United States Patent Application Publication US 2011/0214205 A1 - sequence listing, part 7

SEQ ID NO: 20878 - DNA, 507 bp, Setaria italica
  misc_feature (440)..(440): n is a, c, g, or t
  misc_feature (448)..(448): n is a, c, g, or t
  Peptide Sequence Number=SeqID_86852
catgtaccaggacttcgagaacccggcgttccagcggagcggctcaccgaggtgcctcgacccggcggagggccgccggcagaagcttcgcggccttcgtggcgctgcgcaacctgagctggaacgaggtgctgaggaagggcaccaagtactacagcgaggactttagccggttctgcgaccggaagatgagcggcgtcgtggcgacgatgggctggtcccggccgtggcccgagcagctgctgcagtgcttcttcgtcgctgccaagtgcgtctggctgctccacctgctggccttctccttcggcccgccgctgacgatcatgcgcgtcgaagacggccgcgcgttcgatcagatgtacatggaggacatcctgcaagacaggcaacaggtgcagggtccttgtcaagtgaagatcatggtgatgccagggttttangtccaagntagggttcttaagtgcagggtcctcacaaccagatcagcagcataattgtgtctctaaa

SEQ ID NO: 20879 - DNA, 611 bp, Setaria italica
  Peptide Sequence Number=SeqID_86853
aggctgctcagcacctcctcctgctcgccggagccgccgacggcctccagcttcagcggccggaggcccgccagcagcgcggcgtccttctggtcggtctgctggctggtgttcccggaggtcgtggcgctggcgttgggcgcgaagctgatgaggtgggagccggcgtggagctcgtcggcgatgccggccgagtggagcacgaccggcgcgacggaggcggggtcccggcaggtgtgcacgccgatgtaggtgaccctgaaggcgtccgggtcgtcgtcgcagcgctgcacctgccgctgcgccgcgcactgctggtcgtacttgtgcgtgcaccggaagtaggcctttgggtgcttggagttttgtatctccttctgcccgtacttgcgccaggcgtgcccatcctcaatatccttgatggtcaccgtgacagtggacgagttctgggctcttctccggcaggtgctcctcttgtcccctcctccggcggccttcctcttgccgccgccgccggcgctgccggcgcaggtgacctcgctctgcccctcggagccctcctcggcggcggcggccgccttggccgtctcgatggtgcgggacatggcgtt

SEQ ID NO: 20880 - DNA, 1053 bp, Setaria italica
  Peptide Sequence Number=SeqID_86854
gtaaaaagttttacttattcgtttcaggagttcacatccaaagttctacctcatataaaaaatagctggatataatgctgttcaactaataggcgtggtggagcacaaggattactcctccgttggctataaggtgactaattattttgcagtcagcagcagatttggcaccccagatgactttaagaaactagttgatgaggcacatggccttggattagtggtgcttctggatattgtccactcctatgcctcggcagatgaactggttggcttatcactttttgatggctctaacgactgttactttcacagcggaaaaagagggcatcacaagtattggggaaccaggatgtttaaatatgatgatgtggatgttctgcacttcttattgtccaatttgaattggtgggtcactgaataccggatcgatggattccagtttcattcattgtcttctatgttatatactcataatgggttttctacttttactggcaccatggaagagtattgcaatcagtatgttgacaaggatgcaattatatatctgattctagcaaacgaaatgttacatgatcttcatccagatattataacaattgccgaagatgcaacattttatcctggattgtgcgagccgaccactcaaggtggattgggattcgactactgtgtcaatctttctgttccagaaatgtggttgtggcatcttgaaaacgttcctgagcgagaatggagcatgaataagattatgaaagtattagtaagcagcgaccagaaaatgctctcgtatgttgaaaatcataaccagtcgatatcaggacgcaagtctttagctgaaataattcttaattctggaaagttctccgttggttctgttgacgatgatttgattagggcttcattgctgaaaattatcaaactaattactttcacaacgagtggaggtgcttatctcaacttcatgggcaatgagtttgcacatccaaagagagttgaatttcctatgtcaagcaatgactattccttccagttagctaatcggcaatg

SEQ ID NO: 20881 - DNA, 508 bp, Setaria italica
  Peptide Sequence Number=SeqID_86855
cgacggcccgctggaaggcaccaagggctccggcgaggttaacgacgacgaggccaccagctcagactccgacgatgagaagggcggcggcgggagggaagtcgacgtggatggtctgaaggagatgctgcagaggtcgaggaacgagctggaggtggcccggctcaacagcaccatgttcgaggagaaggcgcagcggatatccgagtcggccattgcgttgaaggaccaggctgacaatgctcagagggatgtgtccgcggctgtcgcactggtgcaggagatcatcagcaaggaggatgatgccaaggaggccgtccagaagtctaccatggcgctgtccatggctgaggcaaggttgcagctggcggcggaggcgctggaggccaagagggggtctgtcgggccaatggaagttagtttcgaaggtgtggaggaggaatcccttgcatctgcgcaggaggaaattaaggattgccgggcggttctgtccaaatgcgaggaggag

SEQ ID NO: 20882 - DNA, 482 bp, Setaria italica
  misc_feature (254)..(254): n is a, c, g, or t
  Peptide Sequence Number=SeqID_86856
tctcgctcatctgtcacgtcctacccagtcatatcgaccagatgtgcttattagtagccaaattagctgcttattagtggctgcattcaatttttatgatgccaataatctaatttagagcatttagtctgttcttaatttcgtctctcagtagacctaatcaacctactgcagccatgactcatctatattgtgtgcttcttgttgatgtccaactgtcattgaccaattgccgatggctgatgtcttgtccnctttagtccttacgctgcatgctggctgcaacagtccgcgttctctgcattcctgttagggctgcgtttgtttaacaacacttgcgtgaccgtcactgattccctgacagtgacgaacccctgtggttttcagaccggttcaacgtgattgtttactcaccggctgagtaaacaaatcgagcaccactcgcatttctttatcactctctgacatgatttttagtgccc

SEQ ID NO: 20883 - DNA, 262 bp, Setaria italica
  Peptide Sequence Number=SeqID_86857
ctccgatcgagcagcggctcgccgggccgtcgcggcgatgaagggcggccggagcagcaatggcgccgccaccgacctgctcgtctgcttcccgtcgcgggcgcacctcgccctcatgccgcccaaggccatctgcagcccgtcacggccgtccgcgtccgagccggtcaagcgccgccacagcaccagccgggcgccgcccagcgggctctacaagtcggccacggccaggaacccgagccgccgcgccgccgcggcggag

SEQ ID NO: 20884 - DNA, 1762 bp, Setaria italica
  Peptide Sequence Number=SeqID_86858
ctactcggtaatctactactagtataacaacattatatatatcaggtccaggttacatgctctacctctgactgtcactctcatctcaaccactcacacctcacctcatccccgttacagttacaggcaaagacggctgccgaaagaacactatcacgtatgctagcacacgagcgaggcccggagcgagtgcgtcgtcgacaggttcgtgcacgacgcccaccgtatcacggactcggccaccgccacgtccaggtgctcccgctcgccggcaccgatcgtgtggttccgcctgctgttgatgccgacgccaccccgcgacgtgctccccctcgccgtccttgtggtcgtggcctccaccgtcctcagggacgagaaaggagcagcagccactgtcgcctcggcgggagcattctggcccgaagaccccgacggctcaggctcgtcgcattcttgcgcgcagaagaacgagaagctcggcatggatgccaccggtggtggcaggaacgccccgccgctgggctcgcaggcctcaccgaacgagaatcctgaggtcgagcaagacggggccatgtcagcgacgaacgccgagaaggacgacctgcaggcgaaggtgggcgagcacgcttcatcctcccccgccatgccctggcaggagacagggccgccggtgttgaagctcacgtccctgctccgcgacgccagcggcgtggagaaggagcacgagccgaggtcctccctccggaggccgatctcgtggcagtggctgcaggaatcttgtgattgctccgcgtgttcttgcatccacgaatgatctagaacctgcttggcggttagtcgttgtctaggatcgcgccgcagcatcccagtcaccagctcctttgctgaatcagaaaccctatcccagggatcagaagggaaccgcagctctgtggaccttatacactcgaagatcttcgactttgttttcccccaaaacggcgggaagccactcaggaggatgtaaagtataaccccggcgctccatacatcggcagcttcattgtatccaccggaaagcacctccggcgcaatgtaaaacgggcttcctaccatgccgctcaagcttcgaccaggctggatgtaggtggcgaggccaaagtccgcgagtttgatcggcgacgacagcgacttgctgaccaggaggatgttctccggcttcaagtcccggtggacgatccccttgctgtggcaatgggccacgacctccatgaggtaccggaagagcacggcggcctcgtgctccgagaagcagccacgctcctcgaggcggtggaagagctctccgccggcgcagagctccatgacgaggtgcacggagtcctcgtcctcgtacacggccttgaggtcaacgacgttggggtggcccgagaggcgcgccatgacctcgatctcgagcttgacgcccctcacgtcgtcgggggacacgaggcggtccttggcgatggacttgcaggcgagcgcctcgccggtgaccaggtcggagcaggaacggatgacgccgaactggccccacccgagctgcggccccagcgcgtagcggtcctcgaggcacgagacgtgcgccgcctccagcaaggccccgcgcaagcccggagccttgtacgagttgtacttggcgtcgccgccgccgacccagccggcggcggccatcgcgctgaggtcccacacgctggaatccggagaacgccttcccgcccccaacctccgccgcccggtgaag

SEQ ID NO: 20885 - DNA, 409 bp, Setaria italica
  Peptide Sequence Number=SeqID_86859
tagattctcttcttgatctcatacaatctcgccatggctagcaacggtgccacctcgacaacggtgccacagccaccgccgtcaaaggggaagctcatcacgattctgagcatcgacggcggcggcatccgtggtctcatcccggcgaccatcatcgcctgcctcgaggccaagctccaggtacatgacacaaacccatgaagagattggcctttgcaacactagtttacacttggggatgcttgcaggagctggacgggccagaggccaggatagcggactacttcgacgtgatcgccgggacgagcaccggcgcgctgatcacggcgatgctggcggcgccggacgagaagaagcggccgctcttcgccgccaaggacatcaccaccttctacctcgagaacgggcc

SEQ ID NO: 20886 - DNA, 711 bp, Setaria italica
  Peptide Sequence Number=SeqID_86860
accaggatatatcgcaccagaattcatagataaacaaaaaataatctttcaagtcagatatattcagttttgggcattatcatgacaaggctgttgatagggagtaacgagagtataattttccagtggcatgaatcattacatgtagagtgccaacaaatgaagatatgcattgaaatagcacaaatttgtgcagaatatgatccatctaagagacctactatcgctgacataattcttaagctgaataagacagaaaccatggttcaaaaggttcctccagatgttaatgagcccagaaatgatccaaggtcttcattataccaggttgtgaaaagattctgggcactgcccacacaaactcttcacgaatattctagcaacggtgccacctcgacaacggtgccacagccaccgccgtcaaaggggaagctcatcacgattctgagcatcgacggcggcggcatccgtggtctcatcccggcgaccatcatcgcctgcctcgaggccaagctccaggagctggacggcccggacgctcggatcgccgactacttcgacgtgatcgccgggacgagcaccggcgccctgctcacgatgatgctggcggcgccggacgagaagaagcggccgctcttcgccgccaaggacatcaccaccttctacctcgagaacgggcccaagatcttcccccagagaaagatcggattc

SEQ ID NO: 20887 - DNA, 412 bp, Setaria italica
  Peptide Sequence Number=SeqID_86861
ttgggtgattggtaacggtgtgcttcctaagaaagcagaggtcattgttttggtctggattgtgaaagtggaatggattgtggcaagtgttacacaggacaggagggcggatggcattgctcaaggatgagcctcacatgctttgaaaatttgatgataattgtttgtacccgtgtggtgtggtcaacgcacacacgcagtcaaagtcctcagtcggccccttccttgttcccttggtcaccaccaccaccacctgctcgaccaaatgccccaaccgactgctcatctacgatgccgttcctcagggacatggaaaggtcaggagtggagtgactccagacgccatggctataccctactattacggttagttcttttcctttaagtttctttaaacttttctttatttttc

SEQ ID NO: 20888 - DNA, 982 bp, Setaria italica
  Peptide Sequence Number=SeqID_86862
gtctctttttccccaagaaccggccccggtcgacgtcgccgacgacgactgctccgcggccgaccagcggattggcttcgagatccaggtatccaagatcgggaagcggaaccggcgcctcgtgcgcgccagggtgcgcgtcgacgcgccactggaggcagtctgggccacgctcacagactacgagggcctcgccgacttcatccccggtctctccgagtgccgactcctcgaccaagcccaaggcttcgcgcgcctctaccaggtcggggagcaggatctggcgctggggttcaagttcaacgccaagggcactatcgactgctacgagggggacttggagtcgctccccgacgcccaggggaacgcgcgcaggagggagatcgccttcaacatgatcgacggcgatttcaaggtcttccaggggaaatgagtgtggagcaagagcaaggtggaggagattcagatgagggtcaggaatcccagacgacgacactgtcctacctggttgagctggagcccaagctgtgggttccggtcaggctactcgaaggaaggatctgcagtgagatcaagaacaaccttatttccataagagaacaagcgcagaggaggatcatcagcacgagtgatcactagagacccttcctgaaggacaagtccttgggtgattggtaacggtgtgcttcctaagaaagcagaggtcattgttttggtctggattgtgaaagtggaatggattgtggcaagtgttacacaggacaggagggcggatggcattgctcaaggatgagcctcacatgctttggtgagtggtcgattgatcatgcctctcttatggcaattggatgcccctcctatgaaaagaaaagggaaggaggcattttgtggttgcaggagctctaacaaaagtagaaatttcagtgcacacaacacaatgtaacagaaagcgttgacagtgcaattcctcatgtaattaatc

SEQ ID NO: 20889 - DNA, 354 bp, Setaria italica
  misc_feature (125)..(125): n is a, c, g, or t
  Peptide Sequence Number=SeqID_86863
aacatgcatgtaggtggcagaaattaaaatggagaaatattttgtatctacttataaattaggttgccaatgtttctatatctgttacttaaggccaattatttcactgtctcagattcttttcncttttttagctactggttaaggcgttgctgggcggcttcaagaagggtgcaaggaactgatatgctgaggcattgatacattgtaagttcaaagagtagcgagtggatccttagttgaaaaatcatagtttttggtccttttgaaatgtcacctccaaaatgtgatggttgtcaaatatgatagtctggtacatttgccgtaattaaaagtatgttaggaagttaaaaa

SEQ ID NO: 20890 - DNA, 279 bp, Setaria italica
  Peptide Sequence Number=SeqID_86864
gttgcaccaaagcatggttgttagtgttcttaacttcttgaagcagctgattgaaaacatgctgctgatattgtgggttcacaccctgcagattattttgcactcccaagccctggagattattttgcattcccagaccctggacattgttatgctggaagcatctagatcgttccgtggacctaaccaagtgcagctcacacagttccaacattctgtgtcatttcaacatccaatgccccagcataacaatgtccagggtctgggaatgcaaataat

SEQ ID NO: 20891 - DNA, 335 bp, Setaria italica
  Peptide Sequence Number=SeqID_86865
attcattgggggagtcaaagtacaggtattcgtcaataacaccgtggtcaaatctaatttggcacagcctaggaagtacttcataggtagcatctatcaaacagatcaaagacaaaaaggacaaaaaattcaacttagtgagctcgatggcagacattgaaataataaaacaggaaaaacacgaaataaatcatgatctataagaatagcatacagattttattacataaactactcaaaacagacatgctgaggtgttcatctatgttatcctcatgcaaagtgcgcagaaggtaacacaaattgatgcccttgtgatgctcactttctcacat

SEQ ID NO: 20892 - DNA, 910 bp, Setaria italica
  Peptide Sequence Number=SeqID_86866
caagatgctgcagatccagcccgacaaggacatcgtcgtcgagttcatcaagaacgaggattacaagtatgttcgcgttctgggggccttctacctgcgcctcaccggcaccgttgctgatgtctaccagtatctggagccactctacaacgactaccgcaagctcaggcataagctcagcgatggacagttcgcacttacccatgttgatgagttcatcgatgagttgctgaccaaggactactcctgtgatacagccctcccccgtattcagaaaagatgggttcttgaagcgtctggaactctagaaccaagaagaagtgcacttgaggatgattttgaggaagaagaggaagacaaggaggaacaacctatggaaattgaccagcctaatggccatgagaaggataatcatcgtggaagaagccctgcaagggaccgggatcgggaccgggaccgggaccggaaacacgaaaggcatcacagggaccgagatcatgatagagatcgggattacgatagggactatgggagaggacgggacagagaccgagatagagatcgtgaaagggacagaaacagggatagggatcgcgaccgtcaccgtctgcgagacgatgactacagccgagacagggaccgagaccgtgagagggatggtagggaaagggaacaccgggacagagaccgtggcaggcacaggagccgctcaaggagcagggatcggcgagacagagaccgtgaagatggagagtaccgcaggaggcgtgatcgtggcagtgtgagtcctcgaggacgtggtgaggatggcgccacaagggaggaaccgaagaggaagaaggaaagaagagaagaaggagaacaaatgctccagatccaaatgatcctgagatcatagaatgaacaagct

SEQ ID NO: 20893 - DNA, 1762 bp, Setaria italica
  misc_feature (237)..(237): n is a, c, g, or t
  Peptide Sequence Number=SeqID_86867
ggctctctgcatatgaacacagaaaatattagaactgcagtacaggtaaatggggggactaggaagtgacggtaagcagttattactagataaaactgaagacactgttaggtaaaatgtgcacgatcatcgtacctttcggaccaagattgttcttgtggctgaactcaatcaagtccttcatgtgattcaccacctccgatatctgaacaatcttgtatttaccgtgccaaaagngcactacagaaatggatgtcaagtactgaagataaatggctatcatcagcttgaatgtcagagtgttcctgaggctgtttactcttatctgaactttcctttgcagcgtcaccagatcctgacccagccgcagccgccgccgccggcgaggggcgaccgcggggcgcggttgccgaagggatggcgaaccgcacggaccccctcgcgaagagcatccacgggacgaacccgcagaacctggtggagaagattgtgcgctccaagatctaccagagcacctactggaaggagcagtgcttcggcctcaccgccgagacgttggtcgacaaggctatggagctcgaccacaccggcgggacctacggcggcaaccgcaagcccaccccgttcctctgcctcgcgctcaagatgctgcagatccagcccgacaaggacatcgtcgtcgagttcatcaagaacgaggattacaagtatgttcgcgttctgggggccttctacctgcgcctcaccggcaccgttgctgatgtctaccagtatctggagccactctacaacgactaccgcaagctcaggcataagctcagcgatggacagtttgcacttacccatgttgatgagttcatcgatgagttgctgaccaaggactactcctgtgatacagccctcccccgtattcagaaaagatgggttcttgaagcgtctggaactctagaaccaagaagaagtgcgcttgaggatgattttgaggaagaagaggaagacaaggaggaacaacctatggaaattgaccagcctaatggccatgagaaggataatcatcgtggaagaagccctgcaagggaccgggaccgggaccgggaccgggaccgggaccgggaccgggaccggaaacacgaaaggcatcacagggaccgagatcatgatagagatcgggattacgatagggactatgggagaggacgggacagagaccgagatagagatcgtgaaagggacagaaacagggatagggatcgcgaccgtcaccgtctgcgagacgatgactacagccgagacagggaccgagaccgtgagagggatggtagggaaagggaacgccgggacagagaccgtggcaggcacaggagccgctcaaggagcagggatcggcgagacagagaccgtgaagatggagagtaccgcaggaggcgtgatcgtggcagtgtgagtcctcgaggacgtggtgaggatggcgccacaagggaggaaccgaagaggaagaaggaaaagaaagagaagaagggagaaccaaatgctccggatccaaatgatcctgagatcatagaaatgaacaagctccgggcctcactagggttgaaaccgctgaagtagatttcttgctgtagtgtattaatacgaagcttgtcagctgtgatagtttgaactggaaatgctgagctgtggatatgcatccaactatttttttctggcttcctcagcttcgtgtagttacctattaattttaatgtaacgatatcatttgatt

SEQ ID NO: 20894 - DNA, 2703 bp, Setaria italica
  Peptide Sequence Number=SeqID_86868
ttttttagcgcgaaaacaatatattccagtaactaccgattactgctttcacatccccacgacagatccaactcacatctgaagttacatcagagtatggtcatcagtaacggcaatacaagaaccccaaaaggacaaggaaacgagagaaaactagaatctagggcaactttccatcaccactcgctagtttccacactagcagccaagtaggctgttgctcaacgcttacagtgaagctcacagagcagtgagacgtctatgtactgctatcacatgttccacgagaagccgttaccgccttggtcccccatgaacagcccgctttccaccagttcattggcaattagattgtcgagatcctccaattcatggaagggctctgccttggaggttgcggcattgcctccagtagcagctgctggattgctgcttactgacttgaaactgttacttctgctggggatgatgctggctgtgctgttgttgatcacattgctcggcccggtgccaactgtagcagcacccttcgcggtgctgttattgatatgctgtgcctgctctccagtagcagcactgttggtgttagcagctccggatacgagaccactgtttacgttagggttatctggaggtggttgttgcaccaaagcatggttgttagtgttcttaacttcttgaagcagctgattgaaaacatgctgctgatattgtgggttcacaccctgcagattattttgcactcccaagccctggagattattttgcattcccagaccctggacattgttatgctggggcattggatgttgaaatgacacagaatgttggaactgtgtgagctgcacttggttaggtccacggaacgatctagatgcttccagctgtatgccattgtgcattgctgcagggcctttgaaaacacttgacgcctcttgctgaagcagactctgatttgcactggagcttctgagtatattctggtaactgtttagtgctgcagaattctgtggagcacaattaccaacagctccaacgccagaagttatgttgtccacatgagcccttatttcttgtttgacacccatggctttggtggtgttctggtcattgggaaggccagcagcagccattatttgttttgcctcatgtgtattctgtcctggaagtttcagtacatttggttttggataattcttcaggccctctataggaccaagattggtcttgttggtgaactcgatcaagtccttcatatgattcaccacctccgatatctgcaggcagcgaacatatcgtttagaaagaccatgttcattcaatgtgtggtgctccagattcttcgctagttgccgcgatgcagtcacaaacatgttgcaaatggtttgtgcatcattgtttgaaaccccagcaggaccactttcactggcagcagcttggtatttctgggcaacttgtagcagattattgacctgtggtgccagaaccctgcgggtgatatactcttcatgtcgtcgtgaacagaactcccaggacatgatctttaattctggtgtgaatatgattctcaaatgcccctcgtgtgtgacatgtagatgctcataaacactcttttgaacaacttttgtatgctccagcagcattaatccattaggcaaccggaattcattgggcatgtcgaggaataggtattcatctataacaccatgatcaaatctaatttgacatagtctaggaagaacttcataggtagcctcatatcctttcccaccatgtgtattgcaaatgtcacaccgccatgaatccagagctgtttgcggggtagaaacggaaccatttgctctcttttcataagaagaaacgcaccacctttctcttgcgcgtggtgcaaaatattcctcaaccagcttcctccagtatgttatgggattattctctggacgatgacgtttgtgatacaaatactgcaatagcctgcgggaacaaagcccactatcaacaggagtcctaacaggtccagctagctgcattccaggctgtgctagtggtggcctaagctgaggctgacgagggatgccgatttgagattgttgtatctgagcaaacggttgcaacaactgcggctgctgccgctgctgcatctgtgccagtttttgctgctggatccaagcatgttgcccctgaagatgaagtgagctctgaccatggagcagctgctgaatcagctgctgctgctgcagtatatcaccttgcctaacatcaattcttgatttcttttgagcatgcaatgcaccaccagcctcaatcataggatgtgatgttacacttgaagacctccgcttttgcacctggtcttggggtggactttgctgcacaattgaaccatcaatgactgaagagccagagatgttatttgatgaaaaagatattggggaggctggaacacgcatgaatgaatcagtattcatgcttgtacttggctgcaacttagcgcctccggagaatgatgagttggcatccgtcatcacctcaaagaatctcaaacaaaagcagggaacataactggaaatcaccaataaagatcttcaaatatttgtagctacgacccctgtcggatgctcgtcgccggcgaagcgcccgtcgcccgacgaagaactggcgggcagcgcaactcgcgctgtcgtcgccgcctgagacacgcaa

SEQ ID NO: 20895 - DNA, 2912 bp, Setaria italica
  Peptide Sequence Number=SeqID_86869
tttttgttcgcaggtaacaggagattgcaattagcattctggcatggacatgatatacatgacagaggtaatgtagtgaacttgtgataatcactgcatgtcattaattaacatgtcgccatagataccctaaaagctattggctgcaccgctcccagattcccaagccaaatccaactctctattctcactcacacatctgaagttacatcagtgtatgatcatatgaaactgtccgaaacggcaatacaaaagctccaaaacgagaaagaagatattaaactagaacctagggcaactttccatcaccacttgccagcaaccaagcaggctattgttgcttagcgctttacatcaaacataccgtgatgtttaccacggtaacgcgttactaccctgccctgcaccgaacagcccgctttccaccagctcgttagcgatcagatggtcaaggtcctccagttcatggaaggagtcgtcaacctttgagtttgcagcattgcctccagtagcaacaacagctggattgctgctcactgacttgaaactgttgtttctgctggggacgatgctggctgtgttattgttgatcacattactaggcccagtaccagctggagcagcactttttaccgcgctgttgttgttactgttattgttactgatgcgctgcgcctgctccccagaagcagcaacattgggggtagcaggtcctgatgcgcgaccactgcttgcattaggtgcatctggaggaggttgctgcgcaatagaacggttgttattcttcttaacttcctgcagcagctgattaagcacgtgctgctggtattgtggactagcaccaaagccctggagattgttttgctgcagcataggctgctgaaatgatgcagggtgttggaattgtgcaagctgcgcttggccaggtccatggaaggatctggctgcttccagctgtatgccattctgcattgctgcagagcctctgaagatgcttgacgcctcctgctgaagcaaaatctgatttgcgctggagcttctgagtatgttctggtaactgtttagagctgtggcattctgtagagtgctaatgccaatggctccaacaccaggagtctgattgttcacagaagcacttgcctcttgctggacccccattactttggtgttgctctggttattggcaaggctagcagcagccatgagctgtcttgaatcatgcatattctgaaacttcgcaatagttttagaataactattcaggctctctttcggaccaagattgttcttgtggctgaactcaatcaagtccttcatgtgattcaccacctccgatatctgcaggcagcgtacatatcttttggaaagcccatgttcattcaaggtgtgatgctctagattttttgctagctgccgtgatgcagtggcaaacatgttacagatggtttgtgcgtcattgtttgatatcccagctggtccactttcattgacagcagtttggtatttctgggcaacttgcagcagattattaacctgtggtgctatagtcttgcgagtggtatactcttcatggcgtcgtgagcagaactcccaggacattatcttcagttctggtgtgaaaatgattctcagatgcccctcatgtataacatgtagatgttcataaacacttttttgaacaacttttgcatgctccagcaccatttgtccattaggtaaccgaaattcattgggggagtcaaagtacaggtattcgtcaataacaccgtggtcaaatctaatttggcacagcctaggaagtacttcataggtagcatcatatcctttacccccatgtgtattgcaaatatcgcatcgccatgtatccagagctctctgtggagcagcagctgaagaactccctctattttcataagacgagacacaccatctttctcttgctcgtggtgcaaaaatactcctcaacaagcttcctccagtatgttatagagttattctctgggcgatgacgcttgtgaaataaatactgcagtatcctgcgagagcaaatcccattctcgataggagtcctaacagggccacctaactgcattccaggctgtgccagtggtggcctaagttgaggctgtcgaggaataccaacttgtggttgttgcatctgagaaaaaggttgcaacagatgttgctgctgccgttgctgaagctgtgccagtttatgctgctggatcaaagcttggagctgcgggttttgttgcccctggaaatggagaggattctgaccatggaccagctgctggatcagctgttgttgcacgatatcaccctgactaacatcagtccttgatttcttctgagcatgcaatgcaccaccagcatcaatcacaggttgtgatgttacacttgaagacctccgtttctgcacctgatcttggggtggactttgctgcatgatggaaccatcaatgactgaagagccagagatgttattggatgaaaatgacattggggaggcgggaacacgcatgaatgaatcaccattcatgctagtacttggttgtaactgggcacctccggaaagcgacgagttggcgtcagtcaccaaagagctaactccaatgcttggcccagaggaattcatagtgctaattggaacactaccattcatctccctggcaacaagtccaaggttagagcatgcacccccagacatggaggtccagggatgggctccgttcatcgccttgtagaatcaggtaaaaactaaaaaggcaaggctcataacttgaaatgctgataaagacctttagatattagccagaacctcgctcgctgctgctgcttccgcttcgcgctcgtgctgcttccgctgcctgctgaattatttctctctccctcctcttcttgcgtttgtg

SEQ ID NO: 20896 - DNA, 978 bp, Setaria italica
  Peptide Sequence Number=SeqID_86870
taccctgaccgtcaacgaattacgaatcaatgtcgctacgtggttcttcagcctgactgccaccagctccaccttcttcgctcgcctgatcttcttgtggtgtgttaccgtcagcaaggccctcctgatggtgtacattcagagattcctctacggcagtttgtgcttccaaatccaggtcagtgctggttgctttgggagctggaaggagtgagactcgacaaagggggcaggtggtgtttttagagagccaatggtcgatgcaattgatatgaaaagtatggccacaaggaggtattcgctgaagccgttcatctggttgatagtctgctaggcagacagagcacctggcaacaatgatcagttgttcagaagcaaaacacaacttaacaaaatagcaatgcaggggcaaatgtcagtagaagaaatgactcatgtcaagggttaaccacaaaaaaggttgggcaaagagctagtcccaacaatcatactctctcaaagataagaaagataagggaccataacatggaaagcttgctgttgtgtttctttcttcgacaatgttgaattgtctacatatgctaagcaatatgcctctcgattagtggacaatttaaatgtactttcaattgattgtaacaaatttgctccctgtcactccaaatataagcctttcacacacgtgtttatatatgtttcccccccttgatatcagaattgggggaacagatgtcaggggaaaaaaaattccttcaatttttttagcaaatattgtcatgaattttactaatataggctctatgtatcaagatgtccaaaacatttattcagaagattgactcacatgctacattcgaacctaaacttgctattacatactgatcgctaaaagctagcactaccccagcttatattgaaaagctagcacaactgtaccggcttgttaagatttagatcttgtgccaatggaaggatctt

SEQ ID NO: 20897 - DNA, 328 bp, Setaria italica
  Peptide Sequence Number=SeqID_86871
ttacttagcggtgagtactactggtatgcaggttactgatcttattatgcagagaggatgggatatacttaaggctcaaaagcactagcaattgaaaatttctctctacttgccagaattaggctgctgccatccctttgagttacttgataggtaaaagaagcagaaactctgcaaggaagctactatatcattatatactggatcaaatagcttagaagtaaatcactgactgtgtctccctgatcaagaaactctctttgaagataaccaccggcaacatttcccgcatctcctccttcaaaccacactccagctacaaatgcag

SEQ ID NO: 20898 - DNA, 1326 bp, Setaria italica
  Peptide Sequence Number=SeqID_86872
ttactatcaagcactgaacttttcctttttcctggaaaatgggtagtacagcataatggtgatctttctgtgtttatccttcctgatcagctaaacatacaatgttacaagaaatatatcaatggtcgtccttatttctttgctttgatgggctggcaggttgtgctcggtgacccttcagcatcagcttgaggctcaacgacaggttgtgctcggtgaaccttcagcatcagcttgaggctcaacgactaccctgaccgtcaacgattcgatcatgtcgctacgtggttcttcagcctgactgccaccagctccaccttcttcgctcgcctgatcttcttgtggtgtgttaccgtcagcaaggccctcctgatggtgtacattcagagattcctctacggcagtttgtgcttccaaatccaggtcagtgctggttgctttgggagctggaaggagtgagactcgacaaagggggcaggtggtgtttttagagagccaatggtcgatgcaattgatatgaaaagtatggccacaaggaggtattcgctgaagccgttcatctggttgatagtctgctaggcagacagagcactgtgtctccctgatcaagaaactctctttgaagataaccaccggcaacatttcccgcatctcctccttcaaaccacactccagtctggggttatctccccgtatcaaattatctgtcctcatcctcaaggactgccaattggccctgcgccgcctcaagtagaagaggtagaagaagagaagcaagacgaatgtaaagaagacaggcaccgagaagatgaaggcctggtacagcttgagctcaggcgattcggctgagcagtagtccggtggatctggagaggtacaagacatcacgaaaccacaatgccctaccgaaaagtatccaacactgtcttccactcttcctttctttagcccaactggtctcaaagttctggcgaaaccttgtttattctagcaaggtaaagagctctacagaaaagtgattggcgaacacttgggacatgggaggtgccaatgaagcaaagggcaacaacacctactacagtactacggatagaacaagggtaagatgtaaagaaaactagtgatctcccaaattacaacaaccacaggcaaatcaatttataccagcaggcgaaaggaaaagggctcaaggtcaactaaacaagataagcagcagtgacgacggtgtcctagccactaaacatcacaggaattgatgccgtcagcccgtcactagcaggggattctctcggccgtctagacttcgtagagccaaataaacaagct

SEQ ID NO: 20899 - DNA, 235 bp, Setaria italica
  Peptide Sequence Number=SeqID_86873
gctggcatcaggaagaatggtgtgctagctgctgatactggagtggagtggactcttgcatcgccagacgctagctggtgattaaatcttgtgtgtgtgatgagtaaattagtggtgatgtcaacggtttatggggcgtccaggtgggctcggcgccacctggcaaggttctgcgaatctatctactctgtgtatggccggtgcctggatctgcgataaaatattttcctggtta

SEQ ID NO: 20900 - DNA, 289 bp, Setaria italica
  Peptide Sequence Number=SeqID_86874
tcggtccgcggcggctacatccggaacgtcaccgtcgacaacgtgcgcatgagccgcgtgcgcagcggcgtccgcatcgccggcgacgccggcgaccaccccgacgggcggttcagccagcgagccgtgccgatggtggacgccgtgcggatcaggaacgtgtggggcgtcggcatccagcagcccgggtcgctggaggggatcaggaactcgcccttcgacccggatctgcctcgacaacgtgaagctcttcgggtggaggaccggcgccgcgtggcggtgcagggga

SEQ ID NO: 20901 - DNA, 390 bp, Setaria italica
  misc_feature (361)..(361): n is a, c, g, or t
  Peptide Sequence Number=SeqID_86875
ttggggatgggggcgggaggaggggaaggggcccgtggaggaggccacggggttcgaggtgggcatcgtggtgcccaagctctcccgcgccgccgccgccgcggggccgccgaggactgcgtggtgcggctggtgcgggagctcgagagcgccgggctgctcgtcgagcgcgtccgcggcgtccccgccgagttcatcaagctggctgcgccaatggggacccttgggagagcggctgctgagatgcagatgaagaagctaacctacatcggaatggagctgcagtttgaatgggaccaggtcgcagcatttgtcaggcagccagatgggtccctgttcagctggagagagcgatatttcngcttccgttacttgatatatggcatagtg

SEQ ID NO: 20902 - DNA, 432 bp, Setaria italica
  Peptide Sequence Number=SeqID_86876
agtacaaggactgctgcaaagttgccgacggctatggcacaatgctggtaacagctgttggaatcaacactgaatggggattactaatggcaagcatatctgaagattcgggtgaagagacacctcttcaggttcgtttgaatggtattgctactttcattggaatggttgggctttctgttgcccttgcagttcttattgtacttttggccaggtacttcactgggcatacttataatcctgatggaactgttcagtatgtgaaagggaagatgggcgtaggccagacaataggtggagtagttataatcttcacagtggcggtcactatagtggtcgtggctgttccagaaggactaccattggctgtcacgttgacgctcgccttctcaatgcgcaagatgatgaaggacaaggctctggtcaggaggc

SEQ ID NO: 20903 - DNA, 3502 bp, Setaria italica
  Peptide Sequence Number=SeqID_86877
cgggcaagcagcccttgtgctgaatgcatcaaggcgctttaggtatacgcttgatttgaaaaaggaggaacaaaaggaggaaatcagaagaaaaattcgtgcacaggctcatgttataagggctgcttttcgtttcaaagaggctggccgagtccatggtcagtctaaagaacctgcagtaccacatcctgatggtgcacttggcttcggaatcaaagaagaccagcttacagcgttgacaagagatcacaactactctgctctgcaacaatatggagggatttctggtgtagctaaaatgctgacaaccgatacggagaaggggattagtggagatgacacggatttaatggccaggagaaatgcatttggctcaaacacatatcctcgtaagaaaggaagaagctttttggctttcgtatgggatgcttgtaaagatttgacactaatcatcctcatggttgctgctgctgtttcactggccttgggcataacaacagagggtataaaagaaggctggtatgatggagcgagcattgcctttgctgttctcctagttgtatttgttacagctatcagcgactacaagcaatcactgcaattccaaaatttgaatgaagaaaaacagaacatacggttggaggttgttagaggtggaaggcgaatcatggtttcaatatatgatttggttgttggagatgttgtccctcttaagattggtgaccaggtccctgcagatgggatccttatcagcggccactccctttccatagatgaatcaagcatgacgggagaaagtaaaattgtacacaaagatcagaagtcaccctttctaatgtcaggctgcaaagttgccgacggctatggcacaatgctggtaacagctgttggaatcaacactgaatggggattactaatggcaagcatatctgaagattcgggtgaagagacacctcttcaggttcgtttgaatggtattgctactttcattggaatggttgggctttctgttgcccttgcagttcttattgtacttttggccaggtacttcactgggcatacttataatcctgatggaactgttcagtatgtgaaagggaagatgggcgtaggccagacaataggtggagtagttagaatcttcacagtggcggtaggtattggtttttctggttatttatgctgctttggtgtttacagtttttatctcatcatgttgaggtgtaactaggtcactatagtggtcgtggctgttccagaaggactaccattggctgtcacgttgacgctcgccttctcaatgcgcaagatgatgaaggacaaggctctggtcaggaggctttcagcatgtgaaacgatgggctctgctacaacgatttgcagtgacaaaactgggaccttgactttaaatcagatgactgttgttgaggcatattttggtggaaagaagatggaatcccctgataatgctcaggtgttatctgctgatgtcacatcactgattgtcgagggaattgcacagaacacttctggaagcatatttgagcctgagcagggtggtcaagaaccagaggtgactggttctcctacagaaaaggctatattgtcttgggggctaaagctgggtatgaaattcaatgaaacaagatcgaagtcctcaattcttcatgtattccctttcaactcagagaaaaagcgaggcggggttgcagtgcacctgggtggctctgaggttcatatacactggaagggagcagctgaaattattttggattcatgcacaagctggctcgacactgatggttcgaagcattcaatgactcctgaaaaagttgctgaattcaagaaattcatagaagatatggctgccgctagcctccgctgtgttgcctttgcctatagaacatatgagattgatgatgttccaaacgaagatctgagggctgagtggaaattgcctgaagataacctgattatgcttggaattgtgggaataaaggatccctgccgtccaggacttcgagattctgttcgtttatgtcaagcagctggcattaaggtccgcatggtcactggtgataatcttcaaactgcgagagccattgccctggagtgcgggatacttgatgatcccaatgtgtcagagcctgtcatcattgaaggaaagacgttccgggcgctgtcagacttagaaagggaggaagctgctgaaaaaatctctgtgatggggaggtcttcaccaaatgacaagcttttacttgttaaggcactgaggaaaagaggtcatgttgttgctgttactggagatggcacaaatgatgccccagcactgcatgaggcagatattggtctatcgatgggcattcagggaactgaagttgccaaggaaagttctgatattattatcttggacgacaattttgcatcggtcgtaagggttgtcagatggggacgatcagtgtatgcgaacatacagaagtttatacaattccaactaacggtcaatgtcgcagctttgataatcaatgtagttgctgccataagttctggaaacgtgccattgaatgctgttcagttgctgtgggtcaacctaatcatggacaccttgggtgcccttgcattggccactgaaccacctaccaaccatcttatggagaaacccccagtagggagaagggagccactggtaacaaatatcatgtggagaaacttgattatcatggctttgtttcaagtttcagttctacttactctcaactttaagggaataagccttttgcagttgaaaaatgatgaccgagcacatgcagataaagtgaaaaataccttcatattcaacacatttgttctctgccaggtgttcaacgaattcaatgcccgtaaaccagatgagctgaatatattcaagggcattttagggaaccacctctttattggcattatagcaataacagtaatactccaggcacttatcgttgagttccttggcaagtttgcctcaacagtcaagctaagctggcagctgtggttggtttcgataggtcttgctttcttcagctggccgttggctttcgtgggaaagcttattcctgttcctaaacgtccacttggagaattctttgcttgctgctgtaaagggagcaaacaagcttctgacgatgcaacctctgacgataataagggaaacaaatctgagcatagagacatcgtatgatctgacttctggcatcgagggccttttgctgtttcttgctagggtttaaagtgttggatttgtaaattaccactgattgcaattgtatatactcacggtagttgtcagcttttggaagcttgcaacagcgtctaaccaagcatgcatcttgatagttgatacctgaaccttagttcttgaaatcagcagcagtgggaggatttgtacggaatatgaaacatgaatggcaggaattgcaactctggcttgaacctgcgtccgtttcttcagtccatggcaactatgcac

SEQ ID NO: 20904 - DNA, 1365 bp, Setaria italica
  Peptide Sequence Number=SeqID_86878
ttctcccccgccagccgccacgcactcaggcgacggcgaggtccttcgcggtgatggtgggcagcatcccgtcgtcgctgtcgagctctcgcggcggtgcggcgtaggcgagcagcggatgagggcgagcaatcgcgcggcagtggcaggcaggcatctccctccacatctgcttgatttcagcagcggtgcagcaccgttccccaatgtcccgacgccacctcgccgccgccttcgccgcagcgctcttcctcctctgcgccgccgaccccgacgacgagcggtgcctgtcccacctccaccagtccctctccgaccccgccggcggcctccgcaactggaccaaggcgtccttctcggcgccgtgcgacggcttcttctcgcacctccagggcgtcacctgcaacaacggccgcgtctacaagctagcgctcccggggctctccctcggcggcaccatcccgccggagctctccaactgcaccaacctccagtcgctggacctctccgccaacgcgctgtccggagccatcccgccggagctctcggcgctgctgaacctcgccgtgctcaacctctccgccaacgcgctctccggcgccatcccgcgggagctcgccagctgcgcctacctcaacatcatagatctccacggcaaccagctgtccgggcccatccccgacgagctcggcctcctcgtccgcctctccaccttggatgtctcctacaaccgcctctcgggccccatccctgcgctcctcgccaaccgcaccggttctgttgggttcaatgccagctccttcgtggggaacaagaacctgtacggctacccgctgccgccgatgcggacgcggggcctctccgtgctcgccatcgtcggcatcggccttggcagcgggctgctcagcctcgtgctcagcttctccgccgtctgcctgtggctccgcgccacggaccgcaccgccaccacccccggagaagagggcaagatctcccagctcatgccggactactgaatccatcaaaggcctcgcaattgaaagatgaattttcattcatcttggcttgcaacaaagattccatcttgtatacatttcagttagattcattcctcaagggccgaagccaaaattggatcctggaactggatcagagcagagcagacatcttcttggtgcagtcagggtgtgtcagtagtggatctagtgtaattggtgaccggaattgctgtaatttttaataactgatgatttttttttcacttggacttggactgtttggcagatggacagtacgtgcgtgtggtaggcaactgattgtgacattggacttatgtttatactgaggaatattttatttttctgc

SEQ ID NO: 20905 - DNA, 286 bp, Setaria italica
  Peptide Sequence Number=SeqID_86879
tccagctcgcgcgaagaagtccgtacaacggctttgcagcaagcacacgccctggcgcttttctccgctgcatctcttgtcttctccttcgtcgaggacaggcagtcctcgcacatctccctgccctcggcgagccggcggtggcggaggcagtacccgagcgcggagatctccgcggcgtggtcgccgcagagggcgtcccgcagccaccgcgcgccgccggcctcgccgccgtccgcctggaagaggcggtcgacgcgggagcagaggaggcacggcggcgcga

SEQ ID NO: 20906 - DNA, 323 bp, Setaria italica
  Peptide Sequence Number=SeqID_86880
ggcatgtttttgattccttttctttctacatgtggttactgcatcgttgggcatacagattcctctgcgagaatagaggcagcccaaaagaaaataaaaaagatgcgggtttcacagactgaaaggtgaaagctatcagacagctgcttgactcggagaatcatgcacggcgaggggcgggaacccggagaaatcacttggcagttggcagagatatcttttccgtcagagccaaccatattttacctcgggactcatgaaacctcgcgaccccgaagcgctcgtccggccggggcccctgctatgccatgaggtctcgtctt

SEQ ID NO: 20907 - DNA, 1636 bp, Setaria italica
  Peptide Sequence Number=SeqID_86881
gttttttttttttagggtaaaccaaaaagctcatcttttttttcttatactactaaaaggataattgggccagacagtataaggtcatctagacctttctcgttcatttttacatattaaaatttttaactattcttcccctttggtaatgtacaacattacccagaaagcagctgaaaaactattgcctaacaaaatttcttcgctttaaagattacaaaaaagaaactttggcgatgtttatattgctgtgtgatcaatattcccttagcatggagaggacgccatgattgttctgtgtgcaagtccaaagtccctcctggctcttgaagtgcattggaattcccagtgcaaaaacgagccgttatcaccaattctgtaactgtgaagccacactcttcacaacagggtgataatctgtgtgcaagtacttcttcgcattctctgaaccaggttgccccagccattcgtcgtataatcttttcgtgatagggttatcgaaaggatcagaaattgatacatcttgtgtgtacacactctccaattgctggataagttccttggcagattggccctgaacaggctttatttggcctcccccattcaggcaacctgaaggacacgccataacttcaataaagtggtattcacattttcccatcttaatcttcctaacaatattctgcaggttcctgaatccataacaaagtgcaaacttcaaaacaggtttgccctccacctccaatgtaatttcgcggaaatctgaatttcgcaaggttctgaaatcaagaggaccctctatttctctcttgtagattgcacgtgcagcatggcgaaagactatttctgcatagcccccagaacctccagaaaccccatagagatggccttcctcatcaacatttgttagcaatctgtccaaggaagattcctctagtgtcttgaaatcgatagatttggactgtatcaggtctaatacttcaccagtagtcagtactgaatccacctctgtgacttctttaccatctactgagaaaacaaaatcatcccggacagcttctagcttcttatcatagcatggcatcacagtaacatgatagacatcatatggcttgagacctagtttttcaaccacatggtgcttaatagctgcaccaatcgcctgttgagggctctttacagatgagatataaggtaggatatatgaaccaagagtcttttcagcatagcatatccaacctgggcatgcagatgaaatcattggaagactggctccagcttcttggccactagatgattggtttttctgataacgtgatacaaattcattgcaagcttcaataagggataggtctctactagagcttgtgtcataaacggcctttacgcccatcgatttgaacaaagcagtaagttttctgagaacctgtgattgagaaagaccgaagaatgcagctagtgatgctcttgactggggagacacagatacaataacagttttgccagagtttatgcgagcaatgaagtcacccaagctttgcttctccagcataaccgtctctgctgatgttatacaaccactgcatgccaaacagtcttttaggaaatcttagactgcttcctctggaggtctttg

SEQ ID NO: 20908 - DNA, 302 bp, Setaria italica
  Peptide Sequence Number=SeqID_86882
acgacgccaagaacggcgtcaagaagaaggccgagcagaagccccgggagccgaagaagaaggtataacactgtagctggcatggcatcgtattgttgccgttacctttgctcttttcgtgatgatcactagctagcttcacgtgaaaccaggtgaagagcagcaagcccgcggcatccaaaaagtgacgatggaagctaagagaaatggagcttgagcgagggtctccgtgctatgttactgttatgaattacgaatccagtctttccattcttctgtctttcatgatgtcttgaacttgt

SEQ ID NO: 20909 - DNA, 480 bp, Setaria italica
  Peptide Sequence Number=SeqID_86883
aaacaaaagaaacaaataaaagaactagctaagcttcttcaagcagtgttacagcagtagcacaagagcgatggcatccatgaaggccgcgaaggtcaccggagctggagcacaggccaaggagccggcacccaagctcagcgagacggcgacgaagccgtcagccgccaagaacggcgtcaagaagaaggccgagcagaagccccgggagccgaagaagaaggtgaagagcagcaagcccgcggcatccaaaaagtgacgatggaagctaagagaaatggagcttgagcgagggtctccgtgctatgttactgttatgaattacgaatccagtctttccattcttctgtctttcatgatgtcttgaacttgtgcccttagtcggacaggtccttgactgtgtatgcacccctcatgtgatgaatactaaaaataagacaggtgtaactatgtcgtcgcaaaaaaaaaaaaaagaaaact

SEQ ID NO: 20910 - DNA, 347 bp, Setaria italica
  Peptide Sequence Number=SeqID_86884
gctggctagggtttcctcgtccttcaagatccggcccttgtagatcagccgctgctgcggcgccgggacgtcgcagctctcggcgacgatcgccttgaacgccccgacggtggcgcccaggtcggcccgcacggcgaacttggagccgttggtgcaccggatgtgcagcgtcgcctgcgcggccgcgggctcagcgccggggtcggcgccggcgtcccctccgcccatgccctagccctaggctcgatccgccccggggcgccgcctcgcgctccgattcggctctcggagtccgcgcgcgcggcgcgacgcgacggtggagaggtgggaggggtggtggactcgcg

SEQ ID NO: 20911 - DNA, 997 bp, Setaria italica
  Peptide Sequence Number=SeqID_86885
tattaactaaatattaattctactacttcactcgttacaacactcggcgaagtttatcagaatgctgtccgtgcagcaaatcagttaaagcaactgtaaaataataccacaggtaccacggctacaaaaattggcaaatgcaatgtaaagaaacagaaagcccctatcatttctctcttcacctgtggcggcgatcacggtcccgctcccgactcctctcgtagtcatggtctcttcccctgtccctccctctttccctgtcatggtctctgctccggcttcggctacggctccggcgccgctcccttccatgatcacccctatccctgttcctgctttccttttcatcataatcgaccctaccacgatccctgctcctctccctgccttccctttcactggaaccacgctgctcaacttcccatccagcacgtcctgacccaggaagagtctgcacactttcagtatgctgagatttagcacggaatttctttttgaggttgccaaactcatcatatatctctccatcatcctcctcgacctctttccgacgctttttaacttcctctagttcttcttcatcaagctctttgtacccaccaccacggccaccccttacaccgccttcattcgtaccaggcttggaagtgttacatatattacattttgtccgcttagcccagtttatgttgccacacattggacatggccaatcatttggaccaaacaatccaggtggaccaccaacagcagcagcagtgccagcacggctgcttcctcttgcatcagcgctaccacggcctctacccctaccgccaccaccaccaccagctcccccaacaccagcagggcgagcggctccacagcgattacaaacaccacggaaggcaaagtttacattgccacaaccatcataacagaccttgtatttggacacatccaatccccatcttgctgccaagcctttcctggaccatcaccacgtcctctgcctctg

SEQ ID NO: 20912 - DNA, 334 bp, Setaria italica
  Peptide Sequence Number=SeqID_86886
ctcgcgaacgccacggtggtgacgaccaccatgaacctgggcgcgccctactcggaggcggcggcggcgcgcggggtggtgccgctgcacgcgccgctgcagcagcggttcccggtgggggacgggaccatggacgtggtgcgcgcggggcacgccgtgaaccggtggatcccggaggccgcgctggagttcctgtggtacgacgccgaccgggcgctgcgccccggcgggctgctctgggtggaccacttctggtgccggaggaacgacctggagggcgtctacgccgccatgctgcggaggctcggctacaagaccatcaagtgggccgtcg

SEQ ID NO: 20913 - DNA, 490 bp, Setaria italica
  Peptide Sequence Number=SeqID_86887
tttactagtttactaatatcagtgcatcaagactgagaatgttcaaagggtttccatcatttttatatatttttctcagtgactaagtaagatgttccttatcagttttaggaccttgtccgcctctggactgagcactgctaatagaacatataatacaatcagatcaaaccggctcttactttgaggtaaaaacatagtatcagggcagtcaagaacttgtgtaaaattcaacattacctgtccaaagtggatcaatggatttgcctttcttttggaatccttcttactgacacaaaacagctgcagcagcttcttgatcttgagagccatccttcccttctttgaatcacctcacacaaaaagcacctttgcgagatccctcgcgctgcggaggaagaagagggggagggttttagtaggagcaggcagagtaggcaagggggggaatgctcttgtgggttgggggtagtctttgtaagtattgtct

SEQ ID NO: 20914 - DNA, 572 bp, Setaria italica
  Peptide Sequence Number=SeqID_86888
gaagtggcatagcatttgccctggggcacacaattttgtacatgcaaattgtttacattttctaatgtgtttcctaatataaaaataatcactttggaacacctgcaatatgctagtgtgacaagattatcatggaaaaaaaattgtgaacaaaatgatgtaagcgatgattatatagaaaccatagttatcctttagttcttggaagctacagattgtggtagttcagcagaaacaagaaacaaaacattgataaaaactaacctgaaaaaagttttttggcacaatcaatgtatgaaatgccaaactgtactcaacactcagtgttgaagtactgatagtttgataagtgtacaaatttatcaaataaacatatgaactgaccaggtagatttttctgtagaagattccattcactctggattgccttcacccaatcttggtggcctttcctggcgatgttttttgcatagtggtgatcagagaaatcttgaacaacatcaaattggttaaataacatgtaaatcatcactcccaattccatgttctgtccttgcatatgatgatatcat

SEQ ID NO: 20915 - DNA, 2190 bp, Setaria italica
  Peptide Sequence Number=SeqID_86889
atataagagaaaaaaatatttaaagattgtatcagtcccccgagtaagttgaatcccacaatctaagagggagtatacttgtgaaacatatgactgaaaatctgccctcttcaagacagagcagagagcaccttactagtttactaatatcagtgcatcaagactgagaatgttcaaagggtttccatcatttttatatatttttttctcagtgactaagtaagatgttccttatcagttttaggaccttgtccgcctctggactgagcactgctaataggacaacgactacaacgactacgtagggtaggacgtagaccctctactggcacggaatgagtatatatatttttttcatagaacgacccatcaccagaaacaggttacctgacaagaacaattcttgtaccagatacaaaagccttttccaaacggtgcaccttctagaacctagcactctagcagtgtatataaaagcgcgtgaattgtgacctattacaccatttcacctttccgttaggacttgtaatgcaatggtcaggtgttcttctgacaaaagaattctagctagcaggcacaatctcatctacaaccgatgactgcctttccagttccagcaagcaacttctgtttgcagcaaactcggtcctcagatgctcagtgtacagagtcagcgacttcttgaaatctgcaaagcacttgtcacaggcatatctggcaccactcccagcagatgatccaacgactgccccagacatgtaagcactgcacgcgtctaggatggcacgctcacgctcgtggaagtggcgtgcaaccagggtctcaaaatgctttggaggcttccggagtgaatacaacattgtcttgcaggatagcacaaaggctgtctgattgtaagccatggaattcttttcaccagctgttgttttagccgaatttttgtttcctggctcattgaagtatggcttatcattgagcacaaggccctgaatggagaccagcacctgcagcatggtggaatttgacttgccccacttctcgcacccgttaccccaccaggtattcagaaggctcaggcaaaccttcccactctcatacaggtttggattcaaccgaagtccacctgaatggtaatgaacttttggtgggcattttgggtattcagcaggaaaacggacatcgaagaagaacaatccatcatgatatggagttccagctggcccaactatagcagccctgagcagatcaatcctgtcctcataaactctaacatatacagattcaggtagatttttctgtagaagattccattcactctggattgccttcacccaatctttggtggcctttcctggcgatgtttttgcatagtggtgatcagagaaatcttgaacaacatcaaattggttaaataacatgtaatcatcactcccaattccatgttctgtccttgcatatgatgatatcatacttgtgcattcaggtttgggtttttgcatgcttagcacagtgccagttccacttgaacagggatccaaatgactcttatttgcagtgacactcaaagaggagtgtggagtggaggctgtccaaagtggatcaatggatttgcctttctttttggaatccttcttactgacacaaaacagctgcagcagcttcttgatcttgagagccatccttcccttctttgaatcacctcacacaaaaagcacctgcaagacatgagacgccattgcttgtaagtgccaacaggaaagatcgtgtttttgtctgcggaaaccacaaaaaaggtcaagatcacaggcgcatgaacaacagatatgcataaacagaagcaccttttttacaaagaagaaatcatttaatttcgtcgctaagaacaagtgaacaaccgaaccaaaaagaaaagaaaaggaaaggagcagtggagaatcgatcatcttggttggagaatcccaacgcggcaagtatctccctttccctttccaagtagcatgctgttttccaagaactggttggtggtgaggcccaggtgtcagcgaccggcactccgaccccaatcagtgcgcgcgtgacgcaagatcggtctctctcggtccaatggaagcgagacaccgcaaacaccagagcaagaacagaacaaaaaaaaaaagaaataaataaatacccggacgtagagtagagacg

SEQ ID NO: 20916 - DNA, 734 bp, Setaria italica
  Peptide Sequence Number=SeqID_86890
gcgctcgcctcgccgcgccggaccacggcgccgcccagggccgccacggcgctcgagctcctccgcgtctgccgcgagctgcagggacggttcgaggaggtggagctgcctctcctcgtcgtgcacggcggcgatgacaccgtctgcgacccggcatgcgtcgaggagctcttcaggcgcgcagggagcaaggacaagacgctccgcgtgtaccctgggatgtggcaccagatcatcggcgagcccgaggagaacgtcgagaaggtgttcgacgaaatcatcgcatggctcaaggcacgctccagcgccagcgttagcgctggctccgccaccgccgacgcgcaagagcagcagtagtttgggcacgcgtcctgcgtgggcgccatggccgcgaactgcgtgcgtggtccgttccatggcggattctagattcctgctaccatcgagtacgggtccagcaataaacttgttgtgatcactgaatttgtttggttcgatgctaggagttctcatctaatggtcccggtctaccatctgcacctgcttgagcagccgtcgctacccatgatgaagaatctggcagctttgtttcttgaatttaatgaatgagcagcattttctgtcaagaacgtcctcccatcttggatcgagtattgactcccaacagttgtacggttggagtggttgttcggttgcgagggtaaagtaaatcaatgcgctttccttttgtttgt

SEQ ID NO: 20917 - DNA, 422 bp, Setaria italica
  Peptide Sequence Number=SeqID_86891
agactagaaatgctagtgtaattgcgggatgaagtcgtaaagtttcttttaccacggcttgcaaatagggaagttggctaatgtcagactccacaacttgccctttagtgccaataaccgtcttgagctcctcccttaccatcttcattgattccgagcattgcaataattctgccattgcccactcaactgtacttgaaactgtctcacttcctcctacgaagagatccgtgatcaagcctttgatggcaccatagttcatctcactgccctcctcttcccattccttctccttgtctatcgccacgtccatcatgtcgtcctttcttggttgaccggcgtcccgaccacgccttctacgcatatattgctcatcaatgatccgatgggcgtacctgaccagtgcacccactcctactccg

SEQ ID NO: 20918 - DNA, 472 bp, Setaria italica
  Peptide Sequence Number=SeqID_86892
gcgcggcacgggcgtcggcggcctcacgggcgcgctcgtgtccatggaggtcgtcgactcctacctcgccatgtggcgctccgacgagccggccatctggagcgccgtctacgtgctggacgtgatctggagcctgctgaccggccgcctcgtgcgcgagaaggtggaccccgccgtgctcagcgccgtcgagagccagatgagtgcagaagaggcaccggtacggacatggtgacggcgccgacatcttcgagacgggtggcagcagcggcatgccgagggccgccatcgacgcgctcccggtggtgaggttcgccgtgagcggcaacgtcgacgccggcggcgagctcaccgtgtgctccgtttgcctccaggagtttgaggccggcgagagcgcgaggagcctgccggtgtgccgccacacgttccacctgccgtgcatcgacggctggctgctccggcacgcctcctg

SEQ ID NO: 20919 - DNA, 657 bp, Setaria italica
  Peptide Sequence Number=SeqID_86893
cgtccgcaggaggtttgagccggggcgccgccaccgctcccgtccgcagaggtctgagccggggcgtcgtcgcaggccggcagctcccgccgccggctcgccgccgcttctgtccgtgggagggaggtgctgactcgggggcgccgccgccacttccgtccgtggatgggaggggccgacccaggctcgccgccgctcccgttcgtgggagggaggggccgactcggctcgccaccgctcccgtccgtggatgggaggtgccggggcgtctggcctgagctgagggctgaggctgttcttttcctaaccctaaaataacacctgctcttgtcatatactctttgtttttgagttttttggtgctgttctctctgtggaggcggaattaggaatagtagttgcaatgtcgagtaatgtctatgtgtgtaacatgtgctggtaacaccaggtcgaccgattataattctgctctaacgatttggtcggaaaatgataaatctttggtctttttatgcaatatgcagtggattccttcagtggatatcgacgcaatggatccgtccctccaggggtacgaacacgtgatgaattggctggcgcagcgggatttggatcgtgccggcccggggcaggacaatctcttccccgacgtccccc

SEQ ID NO: 20920 - DNA, 1132 bp, Setaria italica
  Peptide Sequence Number=SeqID_86894
ttaaacgtaaaccttaagtaactctctgtggaggcggaattaggaatagtagttgcattgtcgagtaatgtctatgtgtgtaacatgtgctggtaacaccaggtcgaccgattataattctgctctaacgatttggtcggaaaatgataaatctttggtctttttatgcaatatgcagtggattccttcagtggatatcgacgcaatggatccgtccctccaggggtacgaacacgtgatgaattggctggcgcagcgggatttggatcgtgccggcccggggcaggacaatctcttccccgacgtccccctcacttctgcgacggaaggttggcgtcgtgtcaactttctgttccctgacaggccgacggtctcgatactcgtcgacgagatcgattcctaccttgtggccatacggaggggggatgggaagtggctcaagttctccgaccactgtattccacttccagcagaccaccctgcagttgagagtatgggcttagtgtcatcttacagtcgcctgacccgtggcttcgacagggagcagttggtgttcggaactccagtgttgactaatctctaccatgtgctttttcatttcaatccaaaacttggattaatgaatccagaaatgacaaggcaaaggaaggcgctggttcagttgatagtcctattctgtgaagctgtccgcttcaggcgtatgcgagcaaggcttctggagatcatggaggatggccagagcgtcactttataaccgaagatgtggtcatggcttcaggaatggtcctcagcgtcagtgtttgccctgagctgcaaggaaagagagggacgtggtaatatgcaggacaaccctcgtctgttgccacgcgttgagggtcttgaaatcaacagcagagaggacgtacctggtttccttggcctcattttgcgcacggccgttgttcctactgctcaagctgtagtacgatagggaggatgtcgcaccaaattagatctacaagcacttgtggcttaagattgatacgtacacttgtaattccgtccaaattctgctgctgttattaatgagactcaaatttgcctgaatgttctctcgtggtcaagttatgcttttgcaggaacaaaaaaaaaa

SEQ ID NO: 20921 - DNA, 1936 bp, Setaria italica
  Peptide Sequence Number=SeqID_86895
tgttccttctttctaaggttaagtcccgtcccgtacccctaaagtcttcccgtcgttttttaatttgtcccgtctaagtctttgtttggttagtcgtaccgtcttcctattgtttcctaaggggtaggtcctaaggtattggtattttttattttctttgtcctatgccatgtggttggttgcatcatttttgctccgcctgtttgttgttgccatttccgttctcggccaggccggcccgaatccgccgcgccttcccgtagatcccccgtcgcgagattcggcggcgacgcgcccgtcttgcaatggagatctcgctcgatctgtcgagcgcgggctcgggcgagtccggtccggattgggctttggctcggacggggctggatgtctagggtttggtcggaatgtggcggaattttgaatttttaagcttgtctctcatggattcttgattttgtgtttgtgtgcctcagcgggtacttggggatttggcgattggagggcaatggtggagattggctaacaggggctgcagaaagattcaattttgtccggccaattttggttcctggaattggattggatcgctggtgccgccgagatggacgacgacggcagcctcggcatccggaattggggcttctacgagacggtgaaaggcaacctcggcctgcagctcatgtcgtccgtgccccctgaccgggacacaaagccgctgcttcccaacggcggcaacttcttgcagcaccatgggcatcacaatgcgccgcaccagcaccagcatcagcaccatacacaacacccacaccatccccgtggtggtggtggtggtagcggtgcccccagcggcatgcccaccgagccgcctgctgttcacatggactttgtgcgcaatgaagcttggctgcacccctcgcagcatcaccaccagcatcatcatcagcaccagcatccccgtcaaccgaaggtcctccatcacctccctgtcgggccagctggacatgctggtcatcctggacatggtggacatgctgtgcatcaccaccctactggctatggtatgatggctgatgcacatggcgtgcacactctgcagatgatgcaaccacaggcgcaacaacagccgcagccgcagccgcagccacaggatcctcctccgcccaaggaggagagcatgccgcagccactgattgaggaccatccggttctaaagaatgagcctcctgtaaagaagaggcagcagggtcggcagcctaagtcaccaaaaccaaagaagccaaagaaggtcgctgctccacaagagaatggggcacccaataagcctgcgccccgaccgagggggccaaggaagaccgtggggatggtgattaacggtattgatttggacctttcaaggataccaacacctgtatgctcttgcaccggaacaccccagcaatgctacaggtggggtgcaggtggctggcaatctgcatgctgtacaacttctatttcaacatatccgctgccaatgagcacgaagcgccgaggtgcacgaattgctggaaggaagatgagccaaggtgcattcaaaaaagtgcttgagaagctagctggtgaaggttacaaccttgctaatccaattgacttgaagaccttctgggccaagcatggcacaaacaagtttgtagtaatcaggtaaagcacatgctatgtttgtcgccttgtaggttccagtgctgcagcttggcctgatttattgcctgtatgtctatgtgccaatctgcagaaacttaggagtagtttgtagccatattcagtttcattgacttaactgccatgcctatcttcaggttcggatatcgactcgatagaagtcggtttgtatcacttcacaagttgtagtatacaataacagtctctaatttagaaggcagacagaaaaaaaaaaaaaaaa

SEQ ID NO: 20922 - DNA, 290 bp, Setaria italica
  misc_feature (268)..(268): n is a, c, g, or t
  Peptide Sequence Number=SeqID_86896
tccagcggccgcccctcccgcctccgggacccgtcgcgctcttccacgcgcttcgcctccgcgccaacgccacccgcccccacgggctcgagctctgcttccaccggaatgccacagtggggccgtgcaagtgcgcggcatctcagtggcagaagatgcccaagagcgggctctgggtgcaagccatctcaccgtacgatcaccggattctggatttccgaatgccagctgacccttcaaggtccgttgttgtgtacactgaggaagngttcttgctccatagggtggtg

SEQ ID NO: 20923 - DNA, 628 bp, Setaria italica
  misc_feature (1)..(65): n is a, c, g, or t
  Peptide Sequence Number=SeqID_86897
nnnnnnnnnnnnnnnnnnnnnnnnnnnnnnnnnnnnnnnnnnnnnnnnnnnnnnnnnnnnnnnnnaaaagttttctaaatactttcttcttcgtgatgaaaagttacacagtagtaatatttttacatgcgtgagcgggaaaaaaagagagcaactgagacgaccttaaacttgagcctctattaagcgtcgatcaaagccagcttcgggtacggttaacccacagggctatatacacatgacgcaacgagaacccacacccatgacccatggcatgctcatcaagcgccgagcttgtagctgccgaggtcctccttgatcagctcaaggtccctggacgccacggccaccgacatcgccctgcggtggcgccccgccggcggcctcgctgcctgctgctcggcaccggcgccgtcggaaccggccttcccgccggcctcggccgccgcgtcgacgtctagggtggcgaggttctccgggagcacgaacacgctctgcgacgcccggcgctggtgccggcccggccgctgcgacgacatcggcctttgctcggggggtcgcgggcagacggggtgggtacggagtgacgagtgagtgagcagagctggtcacttgggcttcggtggtg

SEQ ID NO: 20924 - DNA, 237 bp, Setaria italica
  Peptide Sequence Number=SeqID_86898
atttgtttgggtgtagcagctgtgtaataaacgatatgttccaattttcagatacaattttgtccaccaggtcagccgagatgcttttctggcagcttactctggagagagagtaggagagcagagagcagagcagagtactcagctcggttctcactgcacgtgcacaggtgacgcctcggggagccaatcagatgctacgagctgtttcctttccggaatggggcgtcggtattc

SEQ ID NO: 20925 - DNA, 571 bp, Setaria italica
  Peptide Sequence Number=SeqID_86899
aaggcagcagcaggtgtcacagggtcagaggccacaacagtcattgcagagtcaaaggacgcaacagtccttgcagagtcaaagaccacagcagtcttcacatgttcagaaattgcaatcttcgcaaactcacagaccacagtcgcaaagtaacaggtctcagtctttgcaagggcaaaggcctctttcttcgcagtgtcaatactcggagcaaagaagacttcaggcaagtgatagagtaaaacaagtagaaaggcagattagacctccttcaaaagccatgccatctcggcctatctcttccaatggaattcgtgatgatcatgctaagagaaaacaagtggcgaaaagaagatttgatgaagatgaagatgaggaagacccccttgcaatgatcagaaatatgttcgggtatgatcctagaagatatgcgggcagagatgaggatgatagtgacatggaagcagattttgctactatagagagggaagagaaaagaagcgcgaggattgctaggcaggaggatgaggagcaactccgcctaattgaggaagaagagagacgtagaaca

SEQ ID NO: 20926 - DNA, 2285 bp, Setaria italica
  Peptide Sequence Number=SeqID_86900
cggcgacttctgatccagctgcgtcgcgcgacagccgtcgggcgagtccgatccccgcggccggcgcggaacgagacgtctccgctccccgaggggatttggggattttgaggctgatacgacgggatcctggtgataatgaggggctacgagtatgagaccaatggttaccatcgagcaatggaggatgagtacggagatgagtattatgatcaagatgagtatgaggaggatggttcaggtgctggggatgagtatgttgaggaggaagaacctctagagggacagaaggagatccttgaattgagagaacggctaaaggagcagattaggagaaaggcaaaggctgctgcagccagcgcagccggccgctcgtcttcttcccatgatagaattctaccaaccagggagaacaaatttggctccttcttcggaccatccaagccggtgatttctcgacgagtgattgaagaaagaaaatcattgaaagaactgcatagcacaatctcaagagatccgaggccttctggagtacatagggacatgccatcatcctccaaagtccaaaataaaggaaatggacatcagcataaacccaagatggttaatgaggtaaagaagaaggctgaggcacttaaggataaccgggattattcatttctactctcagatgatgctgacctttcgtcctctccaaaggagaaacctgcaaatagatcttccttgactcaaaaggctgatcgtgtggtgatgcactcagcagcaaagagcaaggcaccaacaagtcaacctgcacgattgtcaaatggatatggatctaagaacacattgtcaacccaaagacatgctgaaggtagggtagattcaatgagaaaggaggttttctcaaatagagaaaggtctgtttcacgtgacaatgagaggatgaatagtattgttagaaatggatccaaccaggcaaatactagcaaaattacaagccaaaagcttccaaccaagggccctactcctaataggcatccttcaagggatttgaatgatccagctctgaggaagggcaatgtagtgtcgaggcacgagattgacagaccaaaatcctcgcaaagtcagaggatgcagtcagctgttcagagaccccagctttcttcccatggtcagaggccacatcaatcgatgcagcagaggccgcagcagtcattgcagaatcgaaggccgcagcaggtgtcacagggtcagaggccacaacagtcattgcagagtcaaaggacgcaacagtccttgcagagtcaaagaccacagcagtcttcacatgttcagaaattgcaatcttcgcaaactcacagaccacagtcgcaaagtaacaggtctcagtctttgcaagggcaaaggcctctttcttcgcagtgtcaatactcggagcaaagaagacttcagccatctcggcctatctcttccaatggaattcgtgatgatcatgctaagagaaaacaagtggcgaaaagagatttgatgaagatgaagatgaggaagacccccttgcaatgatcagaaatatgttcgggtatgatcctagaagatatgcgggcagagatgaggatgatagtgacatggaagcagattttgctactatagagagggaagagaaaagaagcgcgaggattgctaggcaggaggatgaggagcaactccgcctaattgaggaagaagagagacgtgaacaggagaggaagaggcggaagatggcacggggccgatagtaactgaggatagctccaatacacagttatcttggatgttattcagcggccatattgcccgaagataaggcgtggtcgatcagactgccaattggctggcaatactgatgcactggtgcattgcgaacaacctcaagcattgccgtaaggattgacaggagagaaatcaagaaagccggcaggtgagcaatgcagcagggtgtcttggcaaaatgttagtcgtagtggttctcagtccctgaacttgaccgggaccctatctaaactctcgttggggtgcttggatatcaaaaaggttgccaatggtgcagcgcccccatcggattgttggactgtacatgatttcttctcactacactgatttgttctgttagcctcctaaggataccaaatccacattgttgaatttgtttggtgtagcagctgtgtaataaacgatatgttccaattttcagatacaattttgccaccaggtcgtaattagtactaagttactaagtacttagtttactaagtaagtaaccccta

SEQ ID NO: 20927 - DNA, 340 bp, Setaria italica
  Peptide Sequence Number=SeqID_86901
gcggcggcggctgcctctgcggccgcggcctggatgtcggcgggggaggcggacgccgggcgggggagctcgtgcgcgaggtgcgggaagttgaggtgagcggcgcggcccttgatggcgagcgcggccacgtcgtgcgcgcgcgccgccatctcggcggtggggaacgtgccgagccagatgcgcgacttcttgcgcggctcccggatctcggacacccacttgccccagctccgccgccgcacgccgcggtacgacgggtgcttgtacccgctccggctgcttgaccgcgcggcgcctccggccgccgacgccgcctgggccttgctgccgccgctcg

SEQ ID NO: 20928 - DNA, 327 bp, Setaria italica
  Peptide Sequence Number=SeqID_86902
caaaaggttttagactcagcagaactaagactgaatatatgagatgtgactttggcaccactacacatgaggagagagatgtcaatttggaaagctaagcagtgcccaggaaggatacatttcgatatttaggatcaatgctacaatgagagtggggatattgatgaggatgttagtcatagaatcaaagcggggtggatgaagtggcgccaggcatcaggaatttatatgacaagagggtaccattgaagctaaaggcggacgacgattagacctgcaatgttgtatggtgcagaatgttagtctacaaagacgacatgcataaca

SEQ ID NO: 20929 - DNA, 453 bp, Setaria italica
  Peptide Sequence Number=SeqID_86903
atactggaaaacattgtacttgtaaagatacttaattccacgaagggattgcaatgtgtggccaaagatctcttgagcagcagttgcttgtgcatagtaggcaaaagccgtggcaccgaactgaatcacactgatggagcaaagtagtatgagcccaacattaacaggaaggagttcattaaagtgcctccccatttcatcaggtgaattgtgatgaaaacaagtttcaaaccaagcatcatctcccccagcaatcactgcaataaggagatagaagcagaagaacgcgaaagcagcagtcccaaggagaccccaaaggactgtgaatgcccaagtagcctcagccctgttctccttgaggatacatctcttctagagccttcatgtcatcttccagaagtaataactccttttctaaagcctttcacgttcttgcgccatttccggcccttg

SEQ ID NO: 20930 - DNA, 413 bp, Setaria italica
  misc_feature (153)..(153): n is a, c, g, or t
  Peptide Sequence Number=SeqID_86904
cgtcctcgatttatcctctccggctccttcccatcaacctcgacaacctttattggatgccaattttgaatttttaacttcttcttgccactttgacaaagtttgacagcatcaagttgtaaatccccttctgatggcctccgtcgacaagcntttaaaaaaggtttctgatcaagctgcccagctatttttgattcctatatgtgctcggccacttgttgaaaggtcatcaaagcccacttgttcttccagacgcttcagcacattctcctcagctctctcttgttctagcattgccatcttaagatggcttgatttcatagcattatgaaacaagcaacagcaaaaccatgttagagcacatatttcaagaagcacttggccaaaccttcggcactgatcccaaatcaaag

SEQ ID NO: 20931 - DNA, 335 bp, Setaria italica
  Peptide Sequence Number=SeqID_86905
caaaaatgaggatatatgtgataggttaggggtagcaccaattgaagaaaagcttatccaacaccggctgagatggtttggacatgtccaacggaggcctccgaaggcaccggtgcgtagtggaaccctaaggcatgacagtaatgtgaagagaggcagaggaagaccaaaattaacaaagatttagccctagataggagtgcctggaaaacagctattcatgtgcctgaaccctgaattgtggctcttgttcgctttcaactctagcctacccaacttgcttgggactgaaaaacagctattcatgtgcctgaaccctgaattgtggatcttgt

SEQ ID NO: 20932 - DNA, 315 bp, Setaria italica
  Peptide Sequence Number=SeqID_86906
aatcacaccaaacatctctcaagaataacatcaataatacacagacgtaaaagaagagccgatacaagaaatgtgtacactgcaaaatcaactgggttctacttttaacatccatgtccgtggtaaccaacagctccccattcccaccttcagaggtctcatagttcataatctacaccggctgcagttccttggctagggcaaggcaacaaatcgaatttgagagctggaaccttcctgttggtttcctctttcgccatccgaatatcgcatagtagaagagcgtgagtatggcaagagcaacaaagccatact

SEQ ID NO: 20933 - DNA, 218 bp, Setaria italica
  Peptide Sequence Number=SeqID_86907
ggctggcctgcgtgagcccaatgctatggctttaacgactgtcaataaggaggggaaaccttcttcaagaatggttcttttaaagggagttgataagcagggatttgtttggtacacaaattatggtggccggaaggcgcatgacttgtctgaaaatcctaacgcagcactcctattcttctggaaccttctcaactgacccttcaactcttacctga

SEQ ID NO: 20934 - DNA, 261 bp, Setaria italica
  Peptide Sequence Number=SeqID_86908
tgtacaacaatgttgtaattagagtccgaacaagtgatggcgacacaaataacttttcgattagaatatgattgcatcaagggtttgctttaagcccttatctatttgccttggtgatggatgaggtaacaagggacattcaaggggatatcccttggtgtatgctcttcgcggatgatatagtgctagttgatgaaagtcaagcaggagtaaataggaaactggagttgtggcgggagatcctagagtcaaaaggtttta

SEQ ID NO: 20935 - DNA, 164 bp, Setaria italica
  Peptide Sequence Number=SeqID_86909
tgtttgcgttggatttgtggtcatacgagaagggatcgagtccgtaatgagaatacacgtgataggttaggggtagcaccaattgaaaaaaagcttatccaacaccggttgagatggtttggacatatccagcggatgcctccggaggcaccggtgcgtagtgg

SEQ ID NO: 20936 - DNA, 355 bp, Setaria italica
  Peptide Sequence Number=SeqID_86910
gcaaaaatgatgatgtgttcatccccattaacagttatggcacgcgaataacaattaggctcacatgagtgattgatcaaatgagctatacttcctgcccgtgtagcatccacaacatgctcatcatctatcctgaacatatatgtcccagcacccttggtggtaggctgggtagcatgctagatatgcaccaattccactagtgagttgtatattcgccgctctctgatgtctgatattggtggtctaacgatctcccctatgtattcaatcatcatatctcctgccttgtgtgcaaccttggcaaagacaccaaagccatgaattcttgatttttccaaaagttagtctcttc

SEQ ID NO: 20937 - DNA, 266 bp, Setaria italica
  Peptide Sequence Number=SeqID_86911
cattggctgttgttggaaattcagataaagaccagcaatagtttctatcgatgtcccttctggatggcatgttgaagagggagatgtcgatggagggattaaacctgatatgctggttagcatcctatttagaagcttctagattagaatccatctataaacataaggtatacttaccaaaatcgaaagttcatctttaagtaattgcattgtgtctaggtgtcgctgactgcaccgaagctctgtgcgaaaaagttcactggccc

SEQ ID NO: 20938 - DNA, 419 bp, Setaria italica
  Peptide Sequence Number=SeqID_86912
tcaaagcggagtggatgaagtggcaccaagcatcaggaatgttattaggaattttatatgacaagagggtaccattgaagttaaatggcaagtttcataggacggcgattgacctgtaatgctgtatggtgcagaatattggcctacaaaaagacgacatgtccagcagataagtgttgcggaaatgcatatgttgcgttggattgcggtcatacgagaagggattgagtccggaataaggatatacgtgataggttagggtagtaccgattgaggaaaaagcttatccaacaccagctgagatggtttggacatgtccaacgaaggtttccggaggcaccgatgcgtagtggaatcctgatgcatgatagtaatatgaagagagaaagaggaagatcaaaattaatatgagaagaggc

SEQ ID NO: 20939 - DNA, 263 bp, Setaria italica
  Peptide Sequence Number=SeqID_86913
ccaagtgatctccactaatccccacccctctttcgatttggttgatactggatgcaaatctcatcatgagatttgttggtggatattattttcatgtaataatcttgtcccttatgcttttggacatgtcccttaatcttgtcccaattgaagaaaagctcatccaacaccggctaagatggtttggacatgtccaacggagacctccgggaggcaccactacgtagtggaaccctaaggtgggacagtaatgtgaagagagg

SEQ ID NO: 20940 - DNA, 404 bp, Setaria italica
  Peptide Sequence Number=SeqID_86914
tactactactaattcgtatttcaactgccgtttcccaaattggattgcctaacattgctacctatacaattacattggcattccattctaaaagaatgacaagaattatcagaattcctagaatgaactcagcaatttttcagaatttgacagtaggaacaggcaaatatatcatccaagcctgtggcatctcccaaccaatactctcatggaagttaaaaggcaaggttcataggacggcgattagacttgcaatgttgtatggtgcagaatgttgaccaattgaagaaaaacgtatccaacaccagctgagatggtttggacatgtccaacgaaagcctccggaagcaccggtgtgtagtggaactctaaggcgtgacagtaatcttagttatctctttttg

SEQ ID NO: 20941 - DNA, 449 bp, Setaria italica
  misc_feature (416)..(416): n is a, c, g, or t
  Peptide Sequence Number=SeqID_86915
agacaacgagtcgcaaactaggacggtaacattcaaatatggctgcggactgtgaagcggttgtgctgagtttggtaggaaaattcaaatgttaacagttggaatagcataactggaagcagattaaatggttttttacaaatatgttgtaagcctgtcagataaattgaagaaatagtttaatatcattttttttgtaattgttgatataaattggttatctgctgcgagcctttctgtagacataaaaattgatatgctaaaaattatatcagttatacgtgataggttagggtagcaccaattgaagaaaaacttatccaaacacccggctgagatggtttggacatgtccaacgaaggcctccgcaagcaccggtacgtagtggaaccctaaggcatgacagtaatgggaanagaggcagaggaagaccaaattgacatgggaag

SEQ ID NO: 20942 - DNA, 358 bp, Setaria italica
  misc_feature (247)..(247): n is a, c, g, or t
  Peptide Sequence Number=SeqID_86916
ggcgggagaccctgtagtcaaaaggttttagactcagcagaactaaaactaaatatgttagatgtgactttggcactactacaaatgaggagggagatgtcagtttggaaagccaagtagtacccaggaaggatacatttcgatatttgggatcaaagctacaacgagatggggatattgatgaggatgttagtcatagaatcaaagcggggtggatgaagtggcaccaagcatcaggaatttttanatgacaagagagtaccattgaagctaaaaggcaagttttataggacggcgatcagacctacaatgttgtatggtgcagaatgttggcctacaaaaagcatgtccagcaaat

SEQ ID NO: 20943 - DNA, 627 bp, Setaria italica
  Peptide Sequence Number=SeqID_86917
ggatgaagtggtgccaagaatcatgattttatatgacaagaaggtacaattgaagctaaaaggcaagttttataggacaatgattagacctgcaatgtagtatggtgcagaatgttggcatacaaaaagatgacatgtccagcagataagtgttgcggaaatgcgaatgttgcattggatttgtggttatacaaaaagggatcgagtccgtaatgaggatatacgtgataggttagggtagcaccaattgaagaaaagcttatccaataccggctcgagatggtttggacatgtccaacgaaggccctcgtggacggcaccggtgcatagtggaaccctaaggcgtgatagtaatgtgaagagaggcagaggaagactaaaattaacatgggaagaggcaataaaaggagatttgaagggatggaatatatccaaagattttagtcctgaataggagtgctcggaaaacatctattcatgtgctcgaatcctgatttgtggctcttgctgggtttcaactttaacctacccaacttgcttgggactgaaagtctatattgttgttgtataaagtcgaagacatgacgatctgtacatataaacaccacaccgtaacgcatcaaaaaa

SEQ ID NO: 20944 - DNA, 533 bp, Setaria italica
  Peptide Sequence Number=SeqID_86918
aacctgggagtgtggaggcatacacccacaccacccatgtgcaatgccatggtagctaaatgctggttatgtaacaaccacagtgggaaaatacactctcaaaactggttccagggaatgccggaatgaagtgattccgtaatagaaattcaacggttaagcagaccaagaaaaagaagttcaggggatgaaccaaacaattccattgttaaggggaataaggtagacctttacaaaaagacgttaacctttagaatatgcacaatatatactttaaggactttgttgcatacctctacgaagcctgggctcatagtaattgacaaagcaaactgcttagtccgtcctaagcttaaatccacgcagttctccaatgatgaacaaagtaaatccttcggtatcttacccagaaacactgcccttcaagctctgttaaagtgcatcatgaaaataattcattggtaaggatatggttgtttctagtagacaatacctgtcactctgcccagaagaccaatatgaccttatacttg

SEQ ID NO: 20945 - DNA, 355 bp, Setaria italica
  Peptide Sequence Number=SeqID_86919
ccaaacgctactccgatccaggtccaacagctcagcgcttcctcttgcgcgattgccactgctttacgatgaactggacgccttccttcagcagcgctctccggtctgccttgaagttccacaccaccggttttacagtacctgccgctggcattgtactcgtccatctcgagcagcgcctttgtcactgcttcatagacttcttgaccgtactcctgttttagctcccggagcttggcgtcgtcctcgattatcctctccggctccttcccatcaacctcgacaacctttattggatgccaatttgaattttaacttcttcttgccactttgaacaaagtttgacagcatcaag

SEQ ID NO: 20946 - DNA, 459 bp, Setaria italica
  Peptide Sequence Number=SeqID_86920
attaatacagtatttaggtgtcatggtagtggtaacacaaatattgtatcactttcaaacttagaaggctatgagcaacctactattattaaaactgctttaacaagtagcagccatcatactcaagttctgatgttagttagcatgaactgataaaaaaaccattaccataaaataactcaacagtaaaatgtctgtaccttcctagccatgtcctttgttgatcaacaagtatgcagtatgcaccacaataatcctcctgcattgcagctgttgaacattgttgtttactctcttttcaactttccaagggaataatcctcctgcattgcagctgccgaacattgttgtttactctcttttcaacttttccaaggataggagggagaaggatttcttgaattgttcctgcagaactgtgccatgtggatttttgactagatcgcaacatcaccagag

SEQ ID NO: 20947 - DNA, 201 bp, Setaria italica
  Peptide Sequence Number=SeqID_86921
gaaagaaggccagggagttgaagaaagcggctgaagcccttcaccaagaagagagaagcgggaacaagggcaggaaatggcaacaccaccaaatatggtgaaaagcacagatccaacaatagtcgtaagagcaacgacatattcagggaaggtagcacgcattgtccaagttgtcaaagagttagctgatgccgtagaagc

SEQ ID NO: 20948 - DNA, 624 bp, Setaria italica
  Peptide Sequence Number=SeqID_86922
aggacatgcacaacaatgttgtaactagagtccgaacaagtgatggtgacacagatgactttccgattagaataggattgcatcaagggtctgctttgagcccttatctatttgccttggtgatggatgaggtaacaagggacattcaaggggatatcccttggtgtatgctattcgcggataatgtagtgctagttgatgaaagttgagcgggagtaaataggaaactggagttaatggcgggagaccctagagtcaaaaggttttagactcagcagaactaagactgaatatatgagatgtgactttggcaccactacacatgaggagagagatgtcaatttggaaagctaagcagtgcccaggaaggatacatttcgatatttaggatcaatgctacaatgagatggggatattgatgaggatgttagccatagaatcaaagcggggtggatggagtggcgtcaagcatcatgaattttatatgacaagaggtaccattgaagctaaaaggcaagttttataggaagacgattagacgtgcaatgttgtgtggtgcagaatgttggcttacaaaaagatgacatgttcaacagataagtgttgcggaaattcgaatgttgc

SEQ ID NO: 20949 - DNA, 438 bp, Setaria italica
  Peptide Sequence Number=SeqID_86923
aacttacttacttagccaactttgaacaaagtttgacagcatcaagttgtaaatccccttctgatggcctccgtcgacaagcatttaaaaaaggtttctgatcaagctgcccagctattttgattcctatatgtgctcggccacttgttgaaaggtcatcaaagcctttttcaagctcttttcgagctttttccaacatagcattgctttctttgtccttgacaatcaaagcgttggtgtctgactgcaattttcccagtttatcctcctattctttcagaaccttagtcaacttatccattttttctttgattctgaaccttcatcaatgcacttgttcttccagacgcttcagcacattctcctcagctctctcttgttctagcattgccatcttaagatggcttgatttcatagcattatgaaacaagtctaact

SEQ ID NO: 20950 - DNA, 431 bp, Setaria italica
  Peptide Sequence Number=SeqID_86924
tggttttcattgacttggagaaggcgtatgacaaaataccaaagaatgttatgtggtgggctttggacaaacataaagtcccaacgaagtacgttggacttattaaggacatgtacaacaatgttgtaactagagtccgaacaagtgatggcaacacagatgacttttgattagaataggaccgcatcaaggatctgctttgagcccttatctattttccttggtgatggatgaggtaacaagggacattcaaggggatatcccttggtgtatgctcttcgcggatgatgtagtgctagttgatgaaagtcgagcaggagtaaataggaaactggagttgtggcgggagaccctagagtcaaaaggttttagacttagcagaactaaaactgaatatatgagatgtgactttagcactactacacatgagg

SEQ ID NO: 20951 - DNA, 705 bp, Setaria italica
  Peptide Sequence Number=SeqID_86925
ttaagcaagaaactacaaggaaatgacctgaaaatctgaaacgaatgccgttcataacatttaggcctgtttggaggccccatgatttttaggactttgaacacaagtttggactccgcctatgttgtctcaacatagcaggtcccaagccctgaaaggaggagggttgtgataggcttggcgagccaacgttgaacctagtcattctaatggagatgaaacccaccggttgagatggttttggacatgtccaactggagacctccggaggcaccggtgcgtagtggaaccctaaggcgtgacagtaatgtgaagagaggcagaggaagaccaaaattagacatggggaagaggcaataaaaggagatttgaacggatggaatatacccaaagatttagccctggataggagtgcttggaaaacagctattcatgtgcccgaaccctgatttgtggctcttgttgagtttcaactctagcctacaccaacttgcttgggattgaaaggctatgttgttgttgttgttgttgttgtaagagagaaactgtatgcaaggcaatgctcagaaggaaaccaactacatggaaatacaggatacttccctaacacatcatactagctgaatgcccatgtgtcattacgcattacaaaaatcgtattggcacaaccgtcgaaccacaactgcagagtttgattggcctgca

SEQ ID NO: 20952 - DNA, 713 bp, Setaria italica
  Peptide Sequence Number=SeqID_86926
gccttggtgatggatgaggtaataagggacattcaaggggacatcccttggtgtatgctcttcgcggatgatgtagtgctagttgatgaaagtcgggtagaagtaaataggaaactaccttaaagtcttggttttacacttagcagaactaaaactgaatatatgagatatgactttagcattactacacatgaggagggagatgtcagtttgaaaaacccaggaaggatacatttcgaataatttagggaatacaaatagactaacaacgagatggggatattgatgaggatgttagccatagaatcaaagcggggtggatgaagtggcgccaagcatcaggaatttgatatgacaagaaaaaccattgacgctaaaaggcaagtttataggacggcgattaaacctgcaatgttgtatggtgcaaaaacgttggtctaaaaaaacgacatgtccagcagataagtgttgcggaaatgcgtatgctgcgttggatttgtggtcatacgagaagggatcgagtccggaatgaggatatacgtgataggttaggggtagcaccaattgaagaaaagcttatccaacaccagttgagatggtttggacatgtccaacgaaggcctccggaggcaccggtgcgtagtggaaccctaaggcgtgacaataatgtgaagagaggcagaggaagaaccaaaattgacatgggaagaggc

SEQ ID NO: 20953 - DNA, 886 bp, Setaria italica
  misc_feature (448)..(448): n is a, c, g, or t
  Peptide Sequence Number=SeqID_86927
gcccgggtgaactgatatactggagaatgcccttcatgcaaaacagaactaattggtttagcaaacaaagcatataatggaaagatattctgtgcccgcacttcagggtttaaacttccaggcagtgataaggttatctgaatccaattgaagaaaagcttatccaacaccggctgagatagtttggacatgtccaacgaaggcctccggaggcaccggtgcgtagtggaaccccaaagatttcgcagtggataggagtgcttggaaaacagatattcatgtgcccgaaccctgatttgtggctcttgttgggtttcaactctagcctaccccaacttgcttgggactgaaaggctatgttgttgttgttgttgttgttgttgttgttgatgatgatgatgattacagcacttggcacctcagtcaaagctactaaaatttgcaaacnttttaattaccttagcaatggaatcctggaattggctatcttctctgaagcttaaatattaatcctttgttaatcccttggctgtgttatgtaactgcagtagcttgatcccgaagcctgaatactggggtggctacagattgacaccaacactttttgagttctggcaaggccaacagtctcggttgcatgaccggctacaatactcacagcgagaagtagatgggagtacagcgtggcacattgagaggttgtccccttgactattaacgtgcaagcactttggttatagggttcatcttatcaccagcactcaaatcttctccagctgcaagtatgtgcgaattgccccatgatgtcagcatcgcgattaggtcccgtgtttgagtgccagaagctccattgtgtgcgtataccccttctcacgtgtcagcattg

SEQ ID NO: 20954 - DNA, 569 bp, Setaria italica
  Peptide Sequence Number=SeqID_86928
ttgatactactgttctatgcagtacaaacattcagtttttttatgtcactggctaagcataaaccattcacgttttattattgtttggttatcaaaaagaaattttgtctttctctggttttttgaagagctctgttctatggtgcactaacattcagattttgttgccagtcaataaagcataatttgctgcatttctatcttgtacaattgtttgaaagaaaactccgcctatgttgtctcaacatagcaggtcccaagcccctggtaaaggaggagggttgtgataggcttggcgagccaacgttaaacctagccattctaatggggttaatgaaacctaagagaaatccgttggggcataaccttcttagtgacgctccatatcggaacccgggtatggtgttaaatgagcaagggccgggtcgtctccaccgtggtgacgcgccgtgtcgcgatctgggcatggtgtcaagtgagcaaggatcggatcgtcatttccttagtggcgcgctacatcggcgcccgggtgtagtgaaaatgagcaagggtcttcacatctctcttga

SEQ ID NO: 20955 - DNA, 729 bp, Setaria italica
  Peptide Sequence Number=SeqID_86929
tggaatggttcgtactttgttttgtggtttggcctgcattttgaactggacacattatgctgggtttgcattgcaacaggtcatacggagttgggttttgcattctacatactcatctctttgaagacaatgtttaactgttaagaaaagaatatccaattgaagcattgtagatgaattgacgttaacaacataggagaagtatgcttgatgacctctgttctgcattgaggcgttctattgaaattcctgattaaaaagatattggtggagtggaaggattaaaagaaaagcttattcaacaacggttgagatggtttggacatgtccaatgaaggcctccggaggtaccggtgcgtagtggaaccctaaggcgtgacagtaatatgaaaagaggcagaggaagaccaaaattgacatgggaagaggcaataaaaggagatttgaaaggatggaatatacccaaagatttagccctggataggagtgttttgaaaacagctattcatgtgcctgaaccttgatttgtggctcttgttgggtttcaactctagcctaccccaacttgtttgggactgaaaggctatgttgttgttgttggtggtggtggagtggaaggatttgtgtttcgttacagtcccttggcctgcattttgaactggacacatcatgttcgggtttccattgtttaaactgacaatgatttcaacctcatgcatttcttccatt

SEQ ID NO: 20956 - DNA, 1006 bp, Setaria italica
  Peptide Sequence Number=SeqID_86930
ctgccttccattgggacttatattctcatttgttcggcaggcaattccgacaccaccaaatatcgtgaaaagcacagatccaacgattgtagtaagagcaaccacatattcagggaaggtagcacgcattgtccaagttgtttgtgagttagccggtgtagtagaagccgcacactgacgaggcaattgattaaagcaaggctggccacttgagaatccagaaaatgagtttggaaatggctggactgatgaagataggtgcctgacagtgaagttcactttaccaacaagtcctccaaaggcaccggtgcgtagtggaatcctaagccaggatagtaacgtgaagagaggcagaggaagaccgaagttgacttgggtagaggcaacaaaaggagacttgaaaggatggaatatacccaaagacttagccttagataggagtgcttggaaaacagctattcacgtgcctgaaccttgattgcttctgctgggtttcaactctagcctaccccaacttgtttgggacttaaagactttgttgttgttgttgttgtaagctcatgaagcacaggaagaatcatcccctgatgggcagcaacaaggggaactgaattccggatctgagcagttgtggaaatacaatattgataactcaaggggaaaaaaggaggttcagagctcaaagctgtcgcttcaaatcgagctcaaatgcaaggaatcgctggaatccaccacaagattcgggcaaaagatgccacattttttgaactgaactacactaaagtgctagtagtattcagaatctcactccaatcatggagaaatcagaagagcattctgagtgggggatgaggagaggaatggggggagcatggactgatctgcgcgcacagtataagatgccgaggacgaggccgcacaccaccgcggacgcgacgacccacaagagcgcggccctgagcttcttcccgacggacttgtcctggtcgccctcgtagtagaacat

SEQ ID NO: 20957 - DNA, 773 bp, Setaria italica
  Peptide Sequence Number=SeqID_86931
tagtaattgacaaagcaaactgcttagtccgtcctaagcttaaatccacgcagttctccaatgatgaacaaagtaaatccttcggtatcttaccccagaaacactgcccttcaagcttttgaagagaagagttctccaaatcgttattggagaagttattttcatcaggtgtttgtccaatttgtccacagctaacaaggataatgttagctaaagtcctcaggtcttgaatgatgaacgtggcttcagtgtggctgtcgcatccagattcatcgaaacaagtcagcaaacaagcccgggtgaactgatatactggagaatgcccttcatgcaaaacagaactaattggtttagcaaacaaagcatataatggaaagatattctgtgcccgcacttcagggtttaaacttccaggcagtgataaggttatctgaatcctcttcttttgcttggcatgtatcttgtaacgaaggttcctttgaagaaaagagggctttacattggctcgtttctgaataatgtcagagagtataacatgcttgcaatataaggcatgaattttttcagcacaatctggaggcaactcatctcttgactgggaatgatgcatcttgtctgaagacgaactagatccatatatgcaacccgtattcattgcaacaccatctggtaaagcttggcaagacatccagtggatgagcaccttggttcccgtggattcgaggatcccaccaaatccagcacgcacaagagcacaagtgcctgtaagagga

SEQ ID NO: 20958 - DNA, 515 bp, Setaria italica
  Peptide Sequence Number=SeqID_86932
gtggccaaagatctcttgagcagcagttgcttgtgcatagtaggcaaaagccgtggcaccgaactgaatcacactgatggagcaaagtagtatgagcccaacattaaacaggaaggagttcattaaagtgcctccccatctgaaacaaattgattggtttgttataagtaaaactgcagggaaaaaaagtatgccaaggtatgaggcggttacttcatcaggtgaattgtgatgaaaacaagtttcaaaccaagcatcatctcccccagcaatcactgcaataaggagatagaagcagaagaacgcgaaagcagcagtcccaaggagacctggtacataaatcagaagattaattggattgttctcctcagcagcataagttaacaagaatgcaagatcagaagacaccccaaacaccatccaaacttaatgaagacttcattcaggaaagaagatagaggaggatcaatcaacaaggatatgacgatatgttcaacccaagctattgaaacatt

SEQ ID NO: 20959 - DNA, 1169 bp, Setaria italica
  Peptide Sequence Number=SeqID_86933
ctgtctggttacatgctgcacctagattctgatgcacgcgatggatgctaatacttttctttccaatactctggtacctaattattcagtgacctaagttcagttacttgctgactagatccaatgatgccctgttcaatttcggtgtcttatcagtccacttagttgctgacttgagccaaacttactagctcatcttaaatatttcttgtaccttaaatatttattgtgttgcggaaatgcgtatgttgcgttggatttgtggtcatacgagaagggatcgagtccggaatgaggatatacgtgataggttaggggtagcaccaattgtagaaaagtttatccaacaccagttgaaatggtttggacatgtccaatgaaggcctccggaggtaccggtgcgtaatggaaccctaaggcgtgacagtaatgtgaagagaggtagaggaagaccaaaattgacatgagaagaggcaatgaaaggagatttgaagggatggaatatacataaagatttagccctggataggagtgcttggaaaacagctattcatgtgcttgaaccctgatttgtggctcttgttgggtttcaactctagcctaccccaacttgcttgggactgaaaggctatgttgttgttgttgttcttgttgaactggcaagagtgtctcagggacagagtccatgctctggccttgataagcattagttatatatgttttctgaagtatactgtctaaactatggtagttgtacatgtacatcatttggttattttggacaattatattttctaatgaatctagtattttctgtcgcgaagatgagcacatttagttgagcaatctttttcaatcttataaattaattgcgtatattttctgccgttgactgcacatcccattgaattagagcatgttctcttcttacatgttggtttgtccctttcttttgctaacacccatcactcactttgcagtacttttaccactgtttactcaatgaggccattgccaactggtgcagtctttagatgctatcctggaaagtggaaagtattttatgatgatccaagcagaccaaataggtatttgcttgccagagaactcacaagtaaacctgatgccacagatattgagaggatatttggaggtgccgacgagcaatc

SEQ ID NO: 20960 - DNA, 1105 bp, Setaria italica
  Peptide Sequence Number=SeqID_86934
cgaatgtacaacaatgtggtaactagagtccgaacaagtgatagcgacatagatgactttccgattagaataggactgcatcaagggtctgctttgagaccttatctatttgccttggtgatggatgaggtaacaaggacattcaagaggatatcccttggtgtatgctcttcgcagatgatgtaatgctagttgatgaaagtcgagcaggagtaaataggaaactggagttgtggcgggagaccatagagtcaaaagattttagactcaacagaattaaaactgaatatatgagatgtgactttggcactactacacatgaggagggagatgtcagtttggaaagccaagtagtgcccaggaagaatacatttcgatatttggggtcaatgctacaatgtgatggggatattgatgaggatgttagtcatagaatcaaagcggggtggatgaagtgacgccaagtattaggaattttatatgacaagagggtaccattgaagctaaaagaccagttttataggacggcgattagacttgcaatgctgtatggtgcagaatgttggcctacaaaaagacgacatgtccagcagataattgttgcggaaatgcatatgatgcgttggatttgtagtcatacgagaagggatcgagtccggaacgaggatatatgtgatagattaggggtagcaccaattgaagaaaagcttatccaacactggctgagatggtttggacatgtccaacgaaggcctccggaagcaccggtgcatagtggaaccctaaggtgtgaaagtattgtgaagagaggcagaggaagaccaaaattgacatgggaagatgcaataaaaggagatttgaagggatggaatatacccaaagatttagcactggataggagtgcttgggaaacagctattcatatgcctgaaccctgatttgtggctcttgttgggtttcaactctagcctacctcaacttgcttgggactgaaaggctatgttgttgttattgttgttgttgaaaacttgaaacgacactaatcccagacatactaggctactgtagaaggtgtttcaggtttcacctacagtgttatatttct

SEQ ID NO: 20961 - DNA, 1575 bp, Setaria italica
  Peptide Sequence Number=SeqID_86935
aagaatcagagaaatatttccacagtcgccacgaggaagtcagcttggtgccatagtcagtaagcagagtactgtcattgctggaagggaggtccttcaacaggcgtacaaggaattggaacaaaatattctgatggctgccgaacattgttgtttactctcttttcaactttccaaggataggagggagaaggattttcttgaattgttcctgcagaactgtgccatgtggatttttgactagatcgcaacatcaccagagacactattgccacatactagtgctgtaatcggcatatattagcatcagagaaaatcgaatatgctaatagatgccatggaagctattttcttaataagacaagttatggagcggtatagggagaagaagaaggagctacacatggttttcattgacttggagaaggcgtatgacaaaataccaaggaatgctatgttgtgggctttggacaaacataaagtcccaacgaagcacgttggacttattaaggacatgtacaacaatgttgtaactagagtccgaacaagtgatggtgacatagatgactttaagattagaataggactgcatgaagggtttgctttgagcccctatctatttgccttggtgatggatgaggtaacaggggatattcaaggggatatcgcttggtgtatgctcttcgcggatgtagtgctagttgatgaaagtcgagcaggagtaaataggaaactggagttgtggcaggagaccctagagtcaaaaggttttagactcagcagaactaaaactgaaaatatgagatgtgactttggcactactacacatgagaagagagatgtcagtttggaaagccaagtagtgcccaggaaggatacatttcgatatttgggatcaatgctacaacgagatggggatattgatgaggatgttagtcatagaattaaagtggggtggatgaagtggcgccaagcatcaggaattttatatgacaagagggtaccattgaagctagaagtcaaggtttatgggacggcgattagacctgcaatactgtacggtgtagaatgttggcctaaaagggacgacatgtctagcagataagtgttgcggaaatgcgtatgttgcattggatttgtggtcatatgagaagggatcgagttcagaatgaggatatacatgataggtaaggggtagtaccaattgaagaaaagcttatccaacaccggctgagatggtttggacatgtccaacgaaggcctccggaagcaccggtgcgtagtggaaccctaaggcgtgacagtaatgtgaagtaatgtgaagagaggcagaggaagaccaaaattgacattggaagaggcaataaaaggagatttgaagggatggaatatacccaaagatttatccatggataggagtgcttggaaaacagctattcatgtgcctgaaccctgatttgtggctcttgttgggtttcaactctagaccccaacttgcttgggactgaaaggctatgttgtcattgttgtgaataatcttgtcccttatgcttatcttattattgatcaggacaa

SEQ ID NO: 20962 - DNA, 1128 bp, Setaria italica
  Peptide Sequence Number=SeqID_86936
tgacaacagtaaaataagaatccaacaaaaggatcctatcggctgcaattgcagttacatccaacagaacaggctctggacctgattgaaatgaataagatataagtgatggctggatcatcacaactgcattcgctacattctctctgtttaacatcattgtgaaatatgcagtttcatctggactattgttagaaacctgaatgggaaataaaataagttagtgcacggagaagtatgattccacatggtctgttgatgagaacttctcaacaaaccagggaaaatgctttacctgaacgaactgagatcgtctcaaattaaacataaactggggaaaaattgacagacgaggggataaactgaaagatgagggtgtttctttgtgatactctccaaacttcgagcataaactaatcaatgctcgatcaagccatcttatcgggtcaaaatcagcctgaatgaaacatgaagatatattgagtatattaaggttccaaaaacagaaacaatcaataactccagcgagctggcaacattttattactggaaacatattcatacttttgcgttggatttgtggtcatacgagaagggatcgagtccggaatgaggatatacgtgataggttaggggtagcaccaattgaagaaaagcttatccataaggcgtgacagtaatgtgaagagaggcagaggaagactaaaattgacatgggaagaggcaatgaaaggagatttgaagggatggaatatacccaaagatttagctctggataggagtgcttggaaaacagctattcatgtgcccgaaccctgatttgtggctcttgttgggtttcaactctagcctaccccaacttgcttgggactgaaaggctatgttgttgttgttgttgtatatcatttcttacctaataatgctccaggcttgaatattcataatctcataaatacagatgtacccaattacgcatcccaacatattaaactgtaacagaaattaatgtggtagcatatcatataggctagcagtgaaaaaatccttaacatctttcaagttgaccagttcattgccatactgccttactgtttagattttgatagtttacttcttgtttcccttgtt

SEQ ID NO: 20963 - DNA, 1327 bp, Setaria italica
  Peptide Sequence Number=SeqID_86937
tttttttagataaaccgaacatgcattttaatgtcaatagtacattagtactgcaggctagaggctacacaataagcgagcagacctggtttggaagcattgtgttagcaacctaaaggggtatgataccctatttacagaatatattatggttgctcttgaatcagaaatctgtctatgaccaaggcaatgcacaaatgtagagctacgactgcatgtcaaggctaaaatgtggcaaccagcaggagagcatagtagcatacacgataaagaggttgtcctatgctgtacagaatttacaaaatcgctgtgcattgtgaaatcacccataatttactgaaccgccaagcgttggagatgatccatgaagacttggaagctcacgtcatccgtgaaaagaacatcccctcccggcggtggcggattgtcggagttatacgtgacagatggattgagctttgccagtaaaaatcgggcctgagaaccatattgatcgcacacaaccaaacgaggcacaggaaagcgctccttgattactgcatcagcttcctcctttggagcttgcaacaactgggcaaatgcctcgtggccttcttgatcttggtaaccagcctttcgccactgtgcaattgttactccatggaatatgacaacagtaaaataagaatccaacaaaaggatcctatcggctgcaattgcagttacatccaacagaacaggctctggacctgattgaaatgaataagatataagtgatggctggatcatcacaactgcattcgctacattctctctgtttaacatcattgtgaaatatgcagtttcatctggactattgttagaaacctgaacgaactgagatcgtctcaaattaaacataaactggggaaaaattgacagacgaggggataaactgaaagatgagggtgtttctttgtgatactctccaaacttcgagcataaactaatcaatgctcgatcaagccatcttatcgggtcaaaatcagcctcagcttccatcttaaatgagaccaagcgtgccatgactgcagcagctgcttcttgatcaaagccagctattagctcctgcacaccaccagaaccagcaacccattttctcgaaagtgtagtagctcgtaatctcatctgaccctcatgatgctggtaataggttaagaattggaagtagaactgatcatttgctgattgaccaattgaatctgacccatccttctttgcaatatcaaatattaaacatagtgatgttttcctgtctagaccacacatcttccaagcactggtgtttccctgacccacgattgtatct

SEQ ID NO: 20964 - DNA, 2430 bp, Setaria italica
  Peptide Sequence Number=SeqID_86938
ttttcaaaaggtgcaatgcgcagcatcagatacccataatgatttgtaagcatacacacattcagttgaagtggatgatgtttctttcgcaaagttcttagaaacccagccattgtcgctacaatttgttacggtagcatagaagggcattgcccaaattccaatcatgtattttggttatatacctggcatgccatctcagaccatttaatccgaccaccccaattccaaccccaaaggtccaccccaattccaaccccaaaggttaataggtggcataattagtggccgaattacacgtaaacacacaatcgattcaactgccgttcccaaattggattgcctaacattgctacctatacaattacattggcattccattctaaaagaatgacaagaattatcagaattcctagaatgaactcagcaatttttcagaatttgacagtaggaacaggcaaatatatcatccaagcctgtggcatctcccaaccaatactctctacctttagttatctcttttttgaaacaattcacttctcttgacccttattttagctgcctgctcctctgcctcaacatcattaacaactccacggcatttggggaatccacaataacagggaagtcgttgatcacttgaaaaaacctatagtcatatgtcaactcttcccatggatctatgtcccgctttgcaaaaatgatgatgtgttcatccccattaacagttatggcacgcgaataacaattaggctcacatgagtgattgatcaaatgagctatacttcctgcccgtgtagcatccacaacatgctcatcatctatcctgaacatatatgtcccagcacccactagtgagttgtatattcgccgctctctgatgtctgatattggtggtctaacgatctcccctatgtattcaatcatcatatctcctgccttgtgtgcaaccttggcaaagacaccaaagccatgaattcttgattttccaaaagttagtctcttcctaaatgtagccttcatgcttgtatatttttcaaccatagaagacacattgccaaaagcttcatgctgcacagcatccgacaagccaaccggttgaagtgattcactgcaagtatgattgcctactctattttggcagtagccactgacaatatagggtctgttctccacatataaacgtttcagagatgcagtagccatgacttgtggttgcttttggccccttctccggtgaaaattataaggttcagtccttgcacaaccggatgatgaagccatatccgtctgaactaactgagagggctcagcagggtcactttctagatatggacgttcagcagatggttgtctgtgctttttgcagtacgagagtaatcgaatacaaggatcctcatcttcatcaagtaacatgtggtggattttgtcatcatcttcaagctcaacacaaagatcagcagcacgtgcacaaagagggtgatatgcgacacgacaggtaggatgagaacactgtatacaaactccatacgaaactccgcaaatgctgcatacaagtttccaacggtccttgttgattctgctcaatccatcaattggttccattctcttcacatcttttaagcatgtttcaggaatccatatagcacaagcaagatgagcccaacggccatctgttgtaggtttcattgcaccacctgtgactggacatagacagcattttggagacatgcgaggggcaccaggtcgacacaagttgcaaagccaaagtcctccatccaattgttttagttcgccataacatctagcatgaaccatcatacggcacttgtcgcattgcaaaaataagttgtcttcatactcctcatccatatcgcaaacattgcaaaagtccagatctttccaattaacatgaacagctctataaccaaggatagtgtccccactgttgtcaaaatatttcagacatgaccttgcattgggcaattcctgaataagctgccttatctgcggatttgaaaagccaaacatgtaggaaccagatctttggcatacatttctttccaactcagtgacagcactgcactgtttttgctttattctgcagtatatctctttccaacatgcattaggggtagatccatcaatctgcactccatcttctgagatcaccctaaataatgggcgtgcttttgtatctgaattccttagtacttccattttgtaagatgttactgaatttgggtctattattgacatgaactttctgaaagcagtatatccttcaggccatatatgctttttattatggaaatggtctgaatcagatactatcctacctaaattgctcacacgaaggtttcctagttctatttgagtcatttcagcataatcctctccattttgcactgctctatcttctgataaatt

SEQ ID NO: 20965 - DNA, 993 bp, Setaria italica
  Peptide Sequence Number=SeqID_86939
ccttcgtggaattaagtatctttacaagtacaatgttttccagtatggctttgttgcttttgcctactatgcacaagcaactgctgctcaagagatctttggccacacattgcaatcccttcgtggaattaagtatctttacaagtacaatgttttccagtatggctttgttgctcttgccttcctctttctccatccaaatatagcctagtagaagagtgtgaggaaggcaagagcaacaaagccatactggaaaacattgtacttgtaaagatacttaattccacgaagggattgcaatgtgtggccaaagatctcttgagcagcagttgcttgtgcatagtaggcaaaagccgtggcaccgaactgaatcacactgatggagcaaagtagtatgagcccaacattaaacaggaaggagttcattaaagtgcctccccatttcatcaggtgaattgtgatgaaaacaagtttcaaaccaagcatcatctcccccagcaatcactgcaataaggagatagaagcagaagaacgcgaaagcagcagtcccaaggagacctggtacataaatcagaagattaattggattgttctcctcagcagcataagttaacaagaatgcaagatcagaagacaccccaaacaccatccaacttaatgaagacttcattcaggaaagaagatagaggaggatcaatcaacaaggatatgacgatatgttcaacccaagctattgaaacaattaacccaacaacgccaaatataagtttatcaatgtacccaaggactgtgaatgcccaagtagcctcagcctgttctccttgaggatacatctcttctagagccttcatgtcatcttccagaagtaataactccttttctaaagccttcacgttcttgcgccatttccggcccttgttcccacttctttcttcttggtgtagggcttcagccgcttttttcaactcccttgtacctttctttttccctaaa

SEQ ID NO: 20966 - DNA, 2253 bp, Setaria italica
  Peptide Sequence Number=SeqID_86940
agcgctccttgattactgcatcagcttcctcctttggagcttgcaacaactgggcaaatgcctcgtggccttcttgatcttggtaaccagcctttcgccactgtgcaattgttactccatggaatatgacaacagtaaataagaatccaacaaaaggatcctatcggctgcaattgcagttacatccaacagaacaggctctggacctgattgaaatgaataagatataagtgatggctggatcatcacaactgcattcgctacattctctctgtttaacatcattgtgaaatatgcagtttcatctggactattgttagaaacctcagcttccatcttaaatgagaccaagcgtgccatgactgcagcagctgcttcttgatcaaagccagctattagctcctgcacaccaccagaaccagcaacccattttctcgaaagtgtagtagctcgtaatctcatctgaccctcatgatgctggtaataggttaagaattggaagtagaactgatcatttgctgattgaccaattgaatctgacccatccttctttgcaatatcaaatattaaacatagtgatgttttcctgtctagaccacacatcttccaagcactggtgtttccctgacccacgattgtatctgaggatagaggacttttcttctccagggaagtacaaggtccaataattccttggattttgacgtcctttgagcagttaatctcaaatataccgttgaatgataaatcaagatcattgtcacttgactgaaagattcgtcgaagtgagtctttaaaaacagaatgaccaaaactttctgcaagcacaactattccaccagttctctccactgcaaccttcatctcagcaacaccaacctggtcaagcgcacaagcaaataaatcaagtacatgcccttgattcacaagctgcttagagatatcctcgtagaacttaacagctttgttataaagtggagctgaacctttattgaggtctttgtgtgagcgaatcggttctgatagggatttggatacgatagaaccaggtccctctgtagatgggccacctacaaaagccataattctagcacctgatccagggacacaaacccccaagagactagcagcaacacttaatgcaactccggtacatctggatgaacgtttatcagctggaacaggccaagggtccctttgcagttcttctataactgaattcaacacaaactcgcactcagaggcaggcagcaggaacctagcaatgctctctgttgaaaggccatcccttgcacctgcgatcacacctgttgtgggtttagttttcccagcaaagaagctcatttggtccagaatttgctcctttgtaacttcttttgtccctttgaacacatatgactttggcaacaagccaaaacccaattcgtgcacctgcacatatgtcccaaaagtaataaatccaacaagggattgatctggcaatagttcaatagcttgtgctagagcagacttcaaatagccaatctcctcctcaatcatacatgtatcaacaacaaataggaagactggaggcaccacaggacccgtttcagcagtggatgcgtactcaacggtggtaaattgtggaaagagttcggcagggagattgttttctgaaatagtgtagtagtgttgggggaagtgattgcgctgaaagcagaatggacagacccaaatcttagcaacaaagtcaactacggagaaggggttgaggatagagcggcacatgcggcaacggagtggggcataaggaagaacaggaatggtgggatttggctttagaggagtaaaaatggcagaaacagggaccacgcagttaatagcatcttgctttgtgcctggtataacattccatgccattcttatcccatcctgggcctcaaggtcgagaaactcagacattttctgtaatcaagtcgcaatagtgatgaattgttcaaaggaacctctgtttcacaacagtgtcaggcctctgtcagcggcaagctctccatccaacagaagacgaaaccgaccccaagttcggatagatctccgctcctgagggaggagggcgccgacgatgatggctagaaaggtagaattccgctgaagcgccggtgtgcttcacttcagtaggaggaggaggactggagggttcggcgatggtgcgaggcaagggagcagggggaggaaatttggcggaaggtttcggctgttggtggtggaatcgcg

SEQ ID NO: 20967 - DNA, 1315 bp, Setaria italica
  Peptide Sequence Number=SeqID_86941
gtccagcctttcctttcctgagttagcactttagcagaatgtgtgctgtttatgacacatgaacccaatagtgaattgcaattcgaatctccactgcttccaggttaaggaattatctacagagatttttctgggtacacagttacagttacatatacatcggagttgggcagaaatttgatagctgcgctgaaatgccaaaccatactggctatagctccaaacagcagtacccatggtgttgcagactgaaaacagcagggatgcaacaaaactatcgtctggcataataactcaagattcaagaataaaccatcaccgtgattatcagcgacttcaaatgtccattttcacctggagatgaccctcataaaccggctcacggaactaaacacgcccatgacattgttcatcaacgacggtgactcctcagattgctcgtcggcacctccaaatatcctctcaatatctgtggcatcaggtttacttgtgagttctctggcaagcaaatacctatttggtctgcttggatcatcataaaatactttccactttccaggatagcatctaaagactgcaccagttggcaatggcctcattgagtaaacagtggtaaaagtacttaagaaatttctgcgtaaattccgaacattaaagcctactccaacatctccactaacaagtcgtgggttccacatgacaaggggtcttataggatcatccgagagttgagatgcgatgcgctcaacagattccagcatctgatgatcaggaataatcataacagcaacctcatcctcaggaccaactggcttcctgtcacttaagctggcacacttgaattctgcatctttccactgatacttgagaagggcagctgctccagcatcgggaaaaatggcagtaactttctgtcctgtctcttgtacaagtgtgtccaggaaaattttcgataacgcccagagctcagcttgtgctccttcctcgttgaggaattccaactgagggatcagcagctctgcgatagctcgcaggcctcctgaattgacgaaatcggcgctcgccttccccgactgccgaatcgcgccctccaaatccgacggcaagcagctgtcctcctccgccgccggctgcgcctgcgccacctccgcgtccgccacagcttccgccgcctcggcctccgctggggcgtcggaggcgtcgaacttgccgaacttggccccacacgggggcggcgcgcggcggaggcgcagcagcggccgcagcctcgccggcgcgtggagtgtaaaggcgagaggcggggtcgggaggaggc

SEQ ID NO: 20968 - DNA, 2275 bp, Setaria italica
  Peptide Sequence Number=SeqID_86942
tttttttcctattctacaatgcactaatgattatgtaattttattgagaaaattgtataattcaaatcagctgcaatgaattttgtacaagcaaaaaagtttcttcttactgtacagcagaagagatcattggtagtacaaattactctacgcactgttctaagattgatctgctattggactgccagccgctggagatggtccatgaaaacctcaaagctcacatcatctgtaaatatgacgtctccaccaggggagggattatccgaattatatgtcacagatggatttagcttcgccagtaaaaatcgagcctgagatccatattgatcacagactaccaaacggggtacaggaaaccgctcctttattattgaaccagcttcctcgtgtggagcttttaacaactgggcaaatgcctcgtgaccttcttgatcttgataaccagcatttcgccactgtgcaatggttatcccatggaatatgacaacagtaaaataagaatccaacaaaaggatcttgtcagaagcaactgcagttgcatccaagagaactggctctggccctgactgaaataaataggatataagtgaaggctgaatcatcacaagtgcattggctacattctctctgtccatcatcatcctaaaatatgcagtttcatcaggactgttattaaaaacctgaacaaattgagaacgcctcaaattaaaaataaactgaggaaatattgatagacgtggggataaactgaatgatgagggtgtttccttctgatagtctccaaatttagaacatatacgtatcaaagctcgatcaagccatcttactgggtcaaaatcaacctcagtttccatcttaaatgacaccaagcgagccatgactgcagcagcagcttcttgatcaaagccagctactagctcctcgacattatccacgccagagacccatcttctggatattgtggttgaccttaatctcatctgaccctcattgtgctgatagtaggttaagaattgaaagtaaaactgattgcttgttgattgaccaattgaatctgggccatcttttttgcaatatcatatacaaagcaaagtgatgtttttctgtcaagaccgcacatcttccaagcgctagtgtttccttgaccaataacagtgtctgaagacaaaggacttttcttctccagggaagtacaaggtccaatgatgccttgaacctttacatcctttgaacagttaatctccaggataccattgaatgatagaccaaggttgtcgtctgctgattgaaaaatgcggagaagtgagtccttaaaaacagaatgaccaaaactttcagcaagcacaactactcctccagtcttctcaattgcaaccttcatttcagcaactcctacctggtcgactgcacaggcaaacaaatccagaacatgcccttggtgaacaagctgctttgctatttgatcatagaacttaatagctttgtcataaagtggtgccgagtctttatcaaggtccttgtgtgagcgaattggctctgataaggatttggatacaatagaaccaggtccctctgtagatggaccaccaacaaatgccattatcctagcacctgatccagggacacaaaccccaatgagattggctgcaacacttaaggcaactccagtgcaccttgatgcccgctgatcaactggaacaggccaagggtccttttgcatttcttctataactgagttcaacacaaactcgcattcagaagcaggcagcaggaacctagcaatgctctcagatgaaagaccatctctggtaccagcaatcaccccagtggtgggcttttgcttccctgcaaagaagcacatttggtccaatatttgttccttggtgacctcctttgttcccttgaacacatatgattttggcaacaagccaaaacccaactcatgaacctgcacatatgttccaaaagtaatgaatccaacaagggaattatctggcaatagctcaacagcttgtgccagtgcagacttcagataaccaatttcttcttcaatcatgcaagtatctacaacaaaaatgaaaaccggtggcactataggaccagtttccattgatgataagtactcaacagtggtatactgaggaaagagttctgcgggaagattattttctgagatcaaggagtagtgttgagggaattgattgcgttgaaagcagaatggacagacccagatcttagcaacatagtcaacaatggagaaaggatttgtagt

SEQ ID NO: 20969 - DNA, 1896 bp, Setaria italica
  Peptide Sequence Number=SeqID_86943
cccatcctccctgccgcccccttcctccccctcccgccgaggcgaggcatggcgtcgctggcggcctcggcagccgcggccgcatcggcggaggtgacacacctcacgcagcgcgacgcggcggagatcgacgagcagctcatgggcccgctcgggttcagcgtcgaccagctcatggagctcgctgggttgagtgtcgcggaggccgttgcggaggtttacaagttgagtgaacatacaagggtccttattatatgtggtccaggaaataatggcggcgatggtctggtagctgctcgtcatctttatcactttgggtataggccctctgtttgctacccaaagcgtacgcccaaacctctgtattccggtctagttactcagcttgagtcactgtcgatcccattcataactgctgaggacctacctgatgacttatcaagggagtttgatattatcattgacgcaatgtttggtttctcgttccatggaacacccagaccaccctttgatgatcttatccaaaggcttgtttcattggctgttgttggaaattcagataaaagaccagcaatagtttctatcgatgtcccttctggatggcatgttgaagagggagatgtcgatggagggattaaacctgatatgctggtgtcgctgactgcaccgaagctctgtgcgaaaaagttcactggcccacaccagttttcttgggggtaggtttattcccccacctattttgaacaaatatggactccagcttcctccataccctggcacatcgatgtgtgtgagaattggaaaagctccatctgttgacatttcatctctcagggagaactatatttccccggaacttcttgagagtcaagtgatgcctgatccatttgatcagttccggaaatggtttgatgaagcagtcacggctggcctgcgtgagcccaatgctatggctttaacgactgtcaataaggaggggaaaccttcttcaagaatggttcttttaaagggagttgataagcagggatttgtttggtacacaaattatggtggccggaaggcgcatgacttgtctgaaaatcctaacgcagcactcctattctactggaatgagatgaaccgtcaggtaagagttgaagggtcagttgagaaggttccagaagaagaatcagagaaatatttccacagtcgcccacgaggaagtcagcttggtgccatagtcagtaagcagagtactgtcattgctggaagggaggtccttcaacaggcgtacaaggaattggaacaaaaatattctgatggtagcttgatcccgaagcctgaatactggggtggctacagattgacaccaacactttttgagttctggcaaggccaacagtctcggttgcatgaccggctacaatactcacagcgagaagtagatgggagtacagcgtggcacattgagaggttgtccccttgactattaacgtgcaagcactttggttatagggttcatcttatcaccagcactcaaatcttctccagctgcaagatgtgcgaattgccccatgatgtcagcatcgcgattaggtcccgtgtttgagtgccagaagctccattgtgtgcgtataccccttctcacgtgtcagcattgggattaggttccgtgcttatacgtgggtgaactgaatcaatagatgtgctttgcaaagtcatcagatttctttctttctttaaccccttccatttttcttcggtaaatggtactcatccagccagttatgtaaaccggactgaccgctggctcaattgtgtcgtgatacattgatactgccgaaataatgctcgtgaggatggcctgtcaggccttgagctgatgattgatgaataaagctggcgtcatgggcttgt

SEQ ID NO: 20970 - DNA, 1241 bp, Setaria italica
  Peptide Sequence Number=SeqID_86944
gccgccgcatgtttgcttggtagaaagtgacacagacagcaagctgggatcccagacagtgacacagacaagcatagacatcgttaatacaacctagagcctcgtgctgtaatcacagtatgatacatataaagcaatggactgacctaaaataactccagacacagccaagaaaaggaacaacaggaactgcatggtacccaatcacaccaaacatctctcaagaataacatcaataatacacagacgtaaaagaagagccgatacaagaaatgtgtacactgcaaaatcaactgggttctacttttaacatccatgtccgtggtaaccaacagctcccccattcccaccttcagaggtctcatagttcataatctacaccggctgcagttccttggctcttcgagaagatggtttggtttggttgatcatatacaacgctaactgaacaaatatgatgttgagtccgtcaagcttcacttacagggcaaggcaacaaatcaatttgagagctggaaccttcctgttggtttcctctttcgccatccgaatatcgcatagtagaagagcgtgagtatggcaagagcaacaaagccatactggaaaacgttgtacttgtaaaggtacttaattccacgaagagattgcaatgtgtggccgaagatctcctgagctgcagttgcttgtgcatagtaggcaaaagccgtggcacagaactgaatcacactgatggagcaaagtagaatgagtccaacattaaacaggaaagagttcattaaagtgcctccccatttcatcgggtgaatggtgatgaaaactagtttcaagccaagcatcatctccccagcaatcactgcaataaggagatagaagcagaagaatgcaaaggcggcagtcccaagcagacctggtacataaatcagaagaatgaccggactattctcctcaatagcataagtttacaagaatgcaaaagatcagaagataccccaaacaccatccaactttatgaagacttcattcaggaatgaggatagaggaggatcaatcaacaagtatatgatgatatgtgcaacccaggctattgatatgattaacccaacaacaccaaatataagttttccaatgtacccaaggactgtgaatgcccaagtagcctcagcctgttctccttgaggatacatctcttccagagccttcatgtcatcttccagaagtaataactccttctcaacagcctt

SEQ ID NO: 20971 - DNA, 1725 bp, Setaria italica
  Peptide Sequence Number=SeqID_86945
atccgaatatcgcatagtagaagagcgtgagtatggcaagagcaacaaagccatactggaaacgttgtacttgtaaaggtacttaattccacgaagagattgcaatgtgtggccgaagatctcctgagctgcagttgcttgtgcatagtaggcaaaagccgtggcacagaactgaatcacactgatggagcaaagtagaatgagtccaacattaaacaggaaagagttcattaaagtgcctccccatttcatcgggtgaatggtgatgaaaactagtttcaagccaagcatcatctccccagcaatcactgcaataaggagatagaagcagaagaatgcaaaggcggcagtcccaagcagaccccaaacaccatccaactttatgaagacttcattcaggaatgaggatagaggaggatcaatcaacaagtatatgatgatatgtgcaacccaggctattgatatgattaacccaacaacaccaaatataagttttccaatgtacccaaggactgtgaatgcccaagtagcctcagcctgttctccttgaggatacatctcttccagagccttcatgtcatcttccagaagtaataactccttctcaacagccttcacgtttttgcgccatttcctgcccttgttcccgcttctctcttcttggtgaagggcttcagccgctttcttcaactccctggccttctttcccaattcagttgcttcctttatatattgtgagcgtgtgatgacagcttttggacgccggacaaatgagaatataagtcccaatggaaggcaagcaatgccaacaccaccaaatatggtgaaaagcacagatccaacaatagtcgtaagagcaacgacatattcagggaaggtagcacgcattgtccaagttgtcaaagagttagctgatgccgtagaagccgcacactgacgaggcaatgaactgatgcaaggctgaccgcttgagaatccagaaaatgaatttggaaacgtctcaactgatgaagataggtgcctgacagtgaagtccactttacccacaagtccgtataggatgccgaggacgaggccgcaaaccaccgcggaagcgacaacccagatgagcgcggtcttgagcctcttccccacggacttgtcctggtcgccctcgtagtagaacatggcgaagggtatgacgaggaagacgagcacggcgtcgacgatgtagacgacgagccagagcgtccgcatggggagcgtgaggttgcaggcgccgttgtagactgccttccggcaggcctgccggttggcgacgtcggcggggagcatgaggatggagaggacggcaacggtgaggccgaacacgacgacgagcttggggaagtaggcctggttggcgtcgtcggggtgctggtagttgacgagcaggtagacgctgacgagcagcacgagcacgctgaccaccaccgccacgatcaccagggcgaggttgaagtcccccatcgccgcccgccgccgccggatctcggcgcgctcactaacttgtcactccctccctcctagggttcggttcgggttcccccttgctccggcgccagcggcgggggggcccaccaccggcgagcgggatctgggcagcgccggagggtggaggcgagaaggacggagctgaggccgagcggcgggtgggggtgcggtgggttgacgacgacgccgaaggggaaagggactgggggagag

SEQ ID NO: 20972 - DNA, 458 bp, Setaria italica
  Peptide Sequence Number=SeqID_86946
atattgacaacctgaaacagttggagaggatgtcagagacgaatacacagttagagaagtctttgtcatctgcagccaccgagcttgaggggttgagggagaaaaaggtggcattagaagaatcgtgtatgcacctcaaatccaagattgccactcatcagtctgagcgagctgtgcttgttgctcagattgaggtagtttctcagaccatggaggatttactggagaagaatgtcttcttggagaattcattatctgacgctaatgctgaacttgagagtttgaggaggaagttgaaagaactgaaagaatcttcacaggcactccaaaatcagaactctatacttcaatatgagaagaaaacgcttgccaccaggttgacagcatcactgtcactctactgaatttgaaaggcaatacaaagaactagaaaggagacacttcggatctgcagaagg

SEQ ID NO: 20973 - DNA, 260 bp, Setaria italica
  Peptide Sequence Number=SeqID_86947
gacgcacaaaccgtagccctgagcatcctaagagagaaacagagagcttctgagatggcctccaccagctccaagcagcttcaggctcctaccctcctcttggtggcagttctgctcttcctcgtctgcgctacaagggtccaagcagcaaggccggaaccgagagcgaaggaccacatgccacaggccgagctggctgtctccgccgccactgtagttggtgacgagaagagttgctcggggcccggtatggaaatgca

SEQ ID NO: 20974 - DNA, 439 bp, Setaria italica
  Peptide Sequence Number=SeqID_86948
aaaagaccaactagagccactgcccaagacatttaatgagatccaaaatctaatgggttctacaccaatggatgtcggccaatctaatctggcaaagagtggtcagataagtaggaatgctctctgcccatgtggttctaagaaacgatataaaaggtgctgtggagcttcatgaggtgaacaaccatgctacttcgtgggcagaatgtaaaggagtttgttgttctggaaatttcttccttctcaccactgatttggcaccttgattccttttcgttacttagaatctcattcttgccactggaagctctcactaagatactgagatgtatgtcaaaattctacctggtggtgaaaacggaatgaggttacagtactccacggatgaaatacaaaatagacatgtgcacggcgtcctaatttgtgcttagaaaaaaat

SEQ ID NO: 20975 - DNA, 1128 bp, Setaria italica
  Peptide Sequence Number=SeqID_86949
tcttcttccttcctcggcggcgccgcaataaaccccagcaagagacccgaccccgcctcgccaccggcggctcaccggagacggcacccatggcctcccgccgggcgctccacctcctcacggccaaccgcaggatctcctcgaccccgcacctcgcctccctcggctggttcgacaagatcaagtccaccttcaccggcaagaagcccgacgcggcctccgaggcggactccttcaccctcatcaagttcgcggacaccatggagacggcgaggaagatgggggcgttcaagaacttcgtcgccgggcgggccagcgaggccaccgtcgtcaacgccttcgagaagcactccgccgtgctgcgctacctcggtgccatcgaccccactggcgagaaactccaaaacagtgacaagatcaacgcgaccaagcactgccaactgcacgattgctgatgtggagcacatactggccaagtatacatgggctaaagaggctcagaagaagatggcaaagctcaaggaagaaggaaaggaactgaccaacttgtagtatgacatttaatgagatccaaaatctagtgggttctacaccaatggacatcggccaatctaatctggcaaagagtggtcagataagtaggaatgctctctgcccgtgtggttctaagaaacgatataaaaggtgctgtggagcttcatgaggtgaacaaccatgcttttgtttgcttgcaaatgacgaaagccggaggcagcattttgctttgctgtgatcaagaaaagcttttttggcaattctcaatgtgaacatgcagctatttcctggacagcaaaccatgcgaatgtgagcacatgacgttgaaccttgtaaagcacaatatgagccctgtacgtgggaagaaacgtttgctcaaattgcgtgatttcttggttgattcgattcgtccatgttgatgaatcttggtgacatccatttagcttgttcagagttcagatacaagcttgagtatttttagcttcagtgttgctcaacgtttttatgttctaggtggcttaagggctaaggcattatgctggatgaatctagaaaaaaattactttcttttgcttcactatcttatcattagtt

SEQ ID NO: 20976 - DNA, 516 bp, Setaria italica
  Peptide Sequence Number=SeqID_86950
cggcaggtcagtgctagctcttcggccggcggcgacagcagctgactaactgacccgcacatcatgttgacatgttgttgtgttttgactgctgtcgcagcctgccgggcgacaatggtttcgacccgctgggcctggcggaggacccggagaacctgcggtggttcgtgcaggcggagctggtgaacgggcggtgggcgatgctgggggtggccgggatgctgatcccggaggtgctgaccaaggccgggctcatcaacgcgccgcagtggtacgacgccggcaagtcggagtacttcgcgtcgtcgtccacgctgttcgtcatcgagttcatcctcttccactacgtcgagatccggcggtggcaggacatcaagaaccccggcagcgtcaaccaggaccccatcttcaagagctacagcctgccgccccacgagtgcggataccccggcagcgtcttcaacccgctcaacttcgcgcccacgctcgaggccaagggagaaggagcctcggccc

SEQ ID NO: 20977 - DNA, 753 bp, Setaria italica
  Peptide Sequence Number=SeqID_86951
tcttgccagtcaaggtcttcacgaagatctgcatcccacccctcaggcggagcaccaggtggagggtactctccttctggatgttataatcagcaagggtacggccatcctcaagctgcttgccagcaaagataagcctctgctggtctgggggaatgccctccttgtcctggatcttggccttgacattgtcgattgtgtcagaagactccacctcaagggtgatagtcttgccagtcaaggtcttcacgaagatctgcatgcctcccctgagacggagaaccaggtggagggtgctctccttttggatgttataatcagcgagagtgcgcccatcctcaagctgcttgcccgcgaagataagcctctgctggtccggggggatgccctccttgtcctggatcttggccttgacattgtcaatggtgtcagaagactccacctcaagggtgatggtcttgccggtgagggtcttaacgaagatctgcatcttgaagcgggggtgggatcgccgaggctagcgagaaggagagcgatttgatttgggatcgcgtggtgtgctccgaacaacacgagacgagatgtgactaggaaagaaggcgagggtgggcaatttatggcgtcggggacgatagggagagagatcgggtcgtggcctcgtggggaaggaatccccgtgccgtgacggttccgtcttccgtgccgtgcgagacgacagacgagcccgcctcgtctccgccacgcaagttccgg

SEQ ID NO: 20978 - DNA, 807 bp, Setaria italica
  Peptide Sequence Number=SeqID_86952
gaaagacccgacctgactgcattgtaagggtcgattatgctcttcaaatctgagaaccagcttggaacgttagaaggatcaaagctgttgttgctgatgtccacattttccagagagcccatccccgtcaagttaggaattggtccacttagcttgttatttgagagcattagaacgtggagcttagtcaggttgttgaaagcaggaactttacccgtgaaaccgttgttatttagacgaagtacttcaaggtatggaattacaccaatggatgttggaatggggccagtaaatctgtttatatcaaaaagtatatgcttgaggtgcatgctggagttgaagagatttgttgggatagaaccttccagcatgtttccattgaaatggaagtgctctgccttgacaagctggtccaatccagttccattgtccttggaatttgggagtgatcctgtcaacatgttatcggcaaggtccagccagatgacattcgagagcttgcctaatgagggtggaatgctgcccgttaatttgtttgagttcagagcaaagaattttagttgagacaggttgcctagttcgcttggaacaggaccggtgaaaccgcaacctatcaatgccagatattcaagcttaaccaacttgccaataacagctggcaatggcccatcaagactgtttgaggatagatccagaatccttagttcagtcaggcttcctatatcatcactcagagtgccactcatgctcataccaaacagattcagtgatgtgacccttccatttcacagccctgtaatcataaaa

SEQ ID NO: 20979 - DNA, 334 bp, Setaria italica
  Peptide Sequence Number=SeqID_86953
gggatcaggaagctgacgcggatgccgccgtacagtttgttcggaggtcaaggaggccatcaggggaacgtcagaggatgtcgagacctccagaaatttttaaacagcaaacccaaatggattctggtgttgccggcgtcaatcaaatgtgatgtaacgtgtgctgaatcttcttgtttatctctgctgaggctgaagaaatggaactcaaagacagctccatgacttttcccagccggctggtccccaggcagtgagtctggggcagtggtactccatcggatttccaggtcgtccgactagcgttggaccgcaactggttaagctgcatttg

SEQ ID NO: 20980 - DNA, 372 bp, Setaria italica
  misc_feature (359)..(359): n is a, c, g, or t
  Peptide Sequence Number=SeqID_86954
cgttcaatctcgccgcctcgtcggtcctctgcaacggcggctgcggcgacaaggagggtcagggtcacttccgcggctactcgctccaccgctcccggccgttgattagtccccctgcggagcgctcgcctgagcgggagagatccgccgctgggtccgtccgagccgtcaatggaggcggcggcgggcagcaagcgcgcgtacagcatcatcgtgcccacctacaacgagcgcctcaacgtcgccctcatcgtctacctcatcttcaagcacctcccggatgtgaactttgagatcattattgtggatgatggtagtccagatggaactcaagacttgtaaaacaattgcagcaagtntatggtgaagatc

SEQ ID NO: 20981 - DNA, 399 bp, Setaria italica
  Peptide Sequence Number=SeqID_86955
acttaacaatgctttgccaatgtacacttgatgcctgtcttgatagtgcattagagtgtatactttttagtgatccccgagatggtctcatgcgattagctcttggagcctgtgaagatcagcaacagcaatagttagagaattgtattgcctcatatcctggtaacggaaatgacttctttgtggtacctgtatgcacagagtcaagaatggacttatttccttcttcaggttatctctgattgtcccatatatcttctcaacatatgctgttaactgttgcttgaaccgaattgctggatattttgcctctaccattgatgcagtgtcaggccttcctaccattccactgtatccactagttacacctaatcctgacgatgatatccgggcactctg

SEQ ID NO: 20982 - DNA, 1621 bp, Setaria italica
  Peptide Sequence Number=SeqID_86956
gatcaggaatatgtttgcgttgaatgtggttgggtacaaatatatatgtttccatttatacacttcctcaaataattacaatgtctgttccaaacaatcaaaacaatggaaagaactgtatcaggatatcctatatttctctttcttttttcctgaacaaaaatcctatatttctctttcctgtaaacattcccacccaaaaattttaaagggaagaaaaaattgcaactcaatctgtgcactcctataaaagaatcttcagtccttagcaactttacaaatagctgtaccggtatgtctttgtttgtagaaattagtccgtatgctgctgcagaaggaagtgaaactgcgagttctgcctcagtagtggcggtggctccacatctgaagggtcgatgtcaagcatcagtcgtgctatatcatccaaggatataggtatgctcgagtcgtcatctagcaagaaagaactatttggagtagttatcgagtcatctgtcgtcatcgttctcatctttccaataacctcttgggatagaccttgtgcaccatatttgtcatcccagaacattgttgctatgcgatatatttgagttatgctcagaacagggcaaagctcattcatgatttcctccaggtttttgtgtgacttctgatgcagaaccaggaaaccaactgcctgcctaatgtgttgcagttcatcccaagatgcccctgcatactcttcagttgttctagagcaccactgctccagttcctgtaagccagcctttaagaactccccattgctaaaagagcagcattcccgacgaagtagcaaactgttgaagagttgcacattcaaatatgcatatacttgactaaatgttttcttgattatcattggaggtacctacatacaaaattaaaattgaattcagtaattcatttctgtagttccttaactgtaaggtagctgaaaatattaagattggactcacatggttatttttcattatttccagtgtatgatccaggcacttaacaatgctttgccaatgtacacttgatgcctgtcttgatagtgcattagagtgtatactttttagtgatccccgagatggtctcatgcgattagctcttggagcctgttaacggtgacttctttgtggtacctgtatgcacagagtcaagaatggacttatttccttcttcaggttatctctgattgtcccatatatcttctcaacatatgctgttaactgttgcttgaaccgaattgctggatattttgcctctaccattgatgcagtgtcaggccttcctaccattccactgtatccactagttacacctaatcctgacgatgatatccgggcactctgcaccattctactgaacaggctgcctgttgcagtccggctgtgattcgatccttttcttaatgaactgctagctttgagggtattttgtaataagcagaggagagttgatgttgtcgacaaccaataagctagctctccagaactttcagcaccctcaactgatgacctaattgtttggatgattcgatcaaatatattagtcttctctgcttcaaatgaatgccagtgtaggagtgatttgtagacaatgcatgcggcag

SEQ ID NO: 20983 - DNA, 511 bp, Setaria italica
  Peptide Sequence Number=SeqID_86957
tagcacatgtctacagaactcatgttcgagctttggagagcaaattcagaagatgcctaagccatttccaatttttgaaagataaatccttcaaagaaggatatagattctttcgtggcatcagacttcaagctagttggctatgatcctcaccagaagatagagatgaaaatggcaatataatggcggctcagctggagccccagcctatgagctcggcgaaattcgttggactgctactatatatttaagattaaccggacatggcaccaacttgtttttggtgatggtgccgcatgttcgttcaactgggagatcttccccacctcccctatttggggttgcactcaggctgcttatctgaactctacaggacctgctcccctttttatccggagccggtgttgttgcgagtgagctgcttccgggcaacgccctgttccaaagggtcgactggcgtgtgccccgttgacgtattgttacttattccgttgttctactttgttaattt

SEQ ID NO: 20984 - DNA, 667 bp, Setaria italica
  Peptide Sequence Number=SeqID_86958
agccattttcttttgtcattgcaagttttcttgacacaaaacaaagtggtaatgcttctggctgtgtactgcatttagccagtattaaccttatcttccagttacatgctactacgccctcatgctgttgtattgctcgtgctaaccctgacattttagtggtgtgctgtaactacactgttcgtttcatccatgtcactgcacatttccgctcattgatctggaactaaagccattttacgatggaccaaaaaattgttacatctgcattgcttcaccatcattcatgttttatgcaggcggctcagctggagccccagcctatgagctcggcgaaattcgttgactgctactatatatttaagattaaccggacatggcaccaacttgtttttggtgatggtgccgcatgttcgttcaactgggagatcttccccacctcccctatttggggttgcactcaggctgcttatctgaactctacaggacctgctccccttttatccggagccggtgttgttgcgagtgagctgcttccgggcaacgccctgttccaaagggtcgactggcgtgtgccccgtgacgatgtactatccgtgtcactgaattcgttttacttgttaaaactcgttaactgttttgatgccttaaaaaaaaaaaaaaaaaa

SEQ ID NO: 20985 - DNA, 927 bp, Setaria italica
  Peptide Sequence Number=SeqID_86959
tgtcttaattggtattgttgtatttgtactaagtattctaagtaattaattccttgattgaccggcgaatagttttgtcggcatggaatccttcagatctcaagaagatggctcttcctccttgccacatgtttgcacaattttacgttgagaatggggagctatcctgccagatgtatcaacgctctgcagacatgggacttggtgttccattcaacattgcatcgtactctcttctcacgtacatgattgctcaagtttgtgatctttctcctggggattttgtccatgttataggggatgcacatgtctacagaactcatgttcgagctttggaggagcaaattcagaagatgcctaagccattcccaattttgaagataaatccttcaaagaaggatatagattcttttgtggcatcagacttcaagctggttggctatgatcctcaccagaagatagagatgaaaatggcaatataatggtggctcagctggagccccagtctatgagcttggcgaaattattcggactgctactatattaaaattaaccggacatcgcactagcttgtttttggtgatggtgccgaatgttcgcgattgtactctggcttcgtatctgaactctacaaaacctgctccccttttatctggagccggtgttgatggctcgttgcgagtgagagctgctttttgggtaacgccctgtcgcaagggtcgactggcgcgtgccccgcgagacgatgtattacctcgtgagatatacccaagtcactgaattcgtctacttgctaatactcggtactgtttgatatgtacacgtgtgctgtctggttttttccctttgacgtcagatatcgcgcagcttgcagaagcttagtacttttttagggttaaacgtacccttagttacgtactaaaggta

SEQ ID NO: 20986 - DNA, 1596 bp, Setaria italica
  Peptide Sequence Number=SeqID_86960
gcctgcacacggtttcacactgtccatttgtccaacccctccaaaaccccctttccttctggcgcacacgctctcccgtcccctccgtccggccgtccctgcccgcgcccgcatcctctacggctgcgcccccccggatcttcaaccgccggttgcgagattttccagtattggttgttcattcatttcacaagttaagagacatcaaattctggatgtgagcaacaaaataagttctttcctctttagccagccccgaccgatatcaatggctacagctccggccaatggtgattcacagagtggccctcagaggaactatcaggttgttgttgctgctactcgtgacatgggcattgggaaggatggggtcttgccatggaagcttcttggtgaccttaagttcttcaaggaggttacactttcaacatctgaccctgccaagaagaatgcagttataatgggaaggaaaacgtgggagagcattcctgtaaagtcaaggccattgcctggtcgtttgaatgtcatacttactcgatctggtagttttgattttgctacagtagaaaatgttgttatctgtggaagcatgaagtctgccctggaactgctagcatcaactccatattgcttatcaattgagaaagtttttgttatagggggtgggcaggtactgagggagtatcttaatagacctgcttgtgaggccatccatctaactgatattcagtcgagcattgagtgtgacactttcatccctcctattgacttctcagtgttccagccatggtattcatcttttccggtggtagagagcaacattaggcattcatttgtgacctttgttcgtgttagaaaatcactggcagaaactcacgagtcaaatggaaaggaatcaactgaagttgataccaagaatgacaagtttgaaacagagaatttctcttttctccccaagatgatatttgaccggcatgaggagtatcattatcttaatcttgttgaagatattataaggtctggtgctcagaaaaatgacaggacaggaacaggaacgttgtcaaaatttgggtgtcagatgcgattcaacttacggaaaaattttcctctgctgacaacaaagagggtattttggcgtggtgttgtcgaagaactcctgtggttcatcagtggttcaacaaatgcaaaggttctacaagagaaaggtattcatatctgggatggcaatgcttcaagagagtatcttgacagtgttggcttggcacacagggaggaaggtgatctaggtccggtttatggatttcaatggcgacactttggtgctgaatacacagacatgcatgctgactacactggaaaaggttttgatcagctaatggatgtgattgacaagatcaagaataatcctgatgaccggcgaatagttttgtcggcatggaatccttcagatctcaagaagatggctcttcctccttgccacatgtttgcacaattttacgttgagaatggggagctatcctgccagatgtatcaacgctctgcagacatgggacttggtgttccattcaacattgcatcgtgactatggttgtttcc

SEQ ID NO: 20987 - DNA, 514 bp, Setaria italica
  Peptide Sequence Number=SeqID_86961
ctaatactggtgatcaaatgccaccagccaacctgcttgaaaaaaaacccctacctcaggtgctctgatgttgcttttttacaataatatactgtgacacaggactacaggagcaagaagatagttgcactggagatgatcaatgggatgcctagagatatggctcctctgaaacaatggtaaaataagcgctttacaatggaggcggctgaacaagatttgatcgacgagatatacttcacgagcaagaactcctgtgttcgcgagccttccaatccatgggctccgacaagaacgttcaccctttcttggagttgttgaagagcccgccgaggaacccgccattgccgccgctctgctcggccgccgccgccgccttgccggcggctgtcttcgacgccggcgcggcggcgggggccttgccctcgaccttgttgaggatggggtccgtctccagcagctgctcctccttgtacagcacgccgaagatggcgtcgaacaggtcctttctgct

SEQ ID NO: 20988 - DNA, 986 bp, Setaria italica
  Peptide Sequence Number=SeqID_86962
ttaatagaattagaacgaaagtaggaagtatcctggaagtgaggccttcgaaacgttccccatgggttagtggttctgttctgggtcgaaatgtcaacctcaaccttgaaaatagtgagggctcttcacatgtggagaagagttggatcactgatacacaggctcatcacagctcagctgcacatatactgaataaaccagttgaagaatcatctagtatgaaaataacagattttcttggtgtgggaacatctgcttctcagaaccagcattatgtatcacagggagtgaacctgaacctcctaagctcggaaggaaaattaaaagaaaaatgtgttggtaaaatatcttcctctaggttctttggtgcaaatgaggatataaggcatagtaattcattccaacagagaaaggatgactccaatgctaacatgggatggtacaaccaaaatcgtaccggttcctcaatggggcattactcgcctagtgctagaaccttcaatcatctgatctttgcaccacctagcttcaatcacgcactgaatcctccatggcaaatcaacagcacaagctacttgactaagagtcattatggtgctgctgaaacatccactgctaagcatgctctttccagtgggttctcagtggattgtactccaaatgcaccatatcatcattcattgaagattcatgaagaggcacaacatcgaaagctccctccactccatcataacctgaaggatatagatctgaatgatgcgccagtagataccgccgctacttgggaacagggaagtgagaagtcaatggttgatatctcttggaaacaggtaagcctgatgaagtcagaagtcccatcaagttatgcaaattgccattaccagatattgcccagtcccacgtttaattcacaaaataaaactcccacaagagtccccacctttcccaacagtgttggcactgaaaaagattctcggtgctcaccc

SEQ ID NO: 20989 - DNA, 493 bp, Setaria italica
  Peptide Sequence Number=SeqID_86963
catcacttacctttggtgaaacttcaaaccgcatctttgacagtcctaacaacttcctgatggtgtcaatagtgccatagaggtatgatgttattcttctaatcatccacatcctttgtccattccaccatcctctcaatgtatctccatataataatgcctcatatgcgctgtaaatatttttcacaactgagacatatatgtaaggcatgatccatggactcgtaatctcagggaagaggcggatgcctttgagaaggcccagtgaagggatgataacataatatagtgtagggagtgagttcattgcccacaaaccatagactgagtaggccatttgatgttgtaaactgatctttccgtttccaaagatgaaggggcagtacttcgaaagaaaaattgatagattgccctcactccatctcttgtgttgcagcattgtctgtgcatgtgttgttggacctacaccaacaaatgctgctcttgttggatt

SEQ ID NO: 20990 - DNA, 331 bp, Setaria italica
  Peptide Sequence Number=SeqID_86964
ctgctgctggcgcgcttggagccactccacagcgtgccacagctcgtcctccggcacgccggagacgtggcggtccagggccgccgcgacggcgggcagcccggcggcgaggtcggcgcgcgcgcgggtgaagtggacgacgctgccgtagtacccccacggcagcggcgcgtacatccgcttgcggaagtccagcgccagcgtgagctcccgctagccgccggcggcgcctgcgatccggagccagaacagcgcggcgagcgcggcgaacggggttgtcccggactccagggaggcgagcagcgcgcgcaccgcgggagccgggaagtgg

SEQ ID NO: 20991 - DNA, 368 bp, Setaria italica
  Peptide Sequence Number=SeqID_86965
cactgcatttgagtattcagtattcacagtaactatgactttcaaaagatgttgaagatcacagaaccagcatttctaactgctaaacatacagaaaatatttttacagaataatcgcatttttttaattcaacgagcataatttcaatagaaatgaatgagttgtgcaacatccaaaagtgtcttaggaaaacataagaaaggaaagtcatgcttgataaatgttatagttcacaatgctagaaatggtagcctgcctctttgttactagtcatgagctccttgatcatggtctggctagatgaatgtgcaagcgtgacaaggtcctgccatgtcctttaccccgttgctgctattacttcccgtgt

SEQ ID NO: 20992 - DNA, 979 bp, Setaria italica
  Peptide Sequence Number=SeqID_86966
attcagcatttcagggagagacatgacaggaaaagtcttgcagtccataagcattggtcctggctggttgagttccacagatccgtatcctggattctaaggtcttccaaaacatttatccatggcttgccacagaatgtaccatccctcttaatagaaacttttggattatcatgaagaccacagtaaaccaaaactcttcccgcggagtttaccaaaggcacttcccagaggcaatggcgatcaggtaatgtgaaacaagtgctaccattgattatctgaggactgcacccatgaaactcacttatattcaccccaacaacaatggattgcgaaccaatccgtattctaccacaaagtactgaatcataaaccaacgaatcctctcctattgagaccccagaagaaatcttggtagacaaaataatagctgtcgctgcaatatcacaagcagtggtctctggtagtgagcacatatgccttcgacctacaagtcctgaataggaacccgccaagtgatcaagaacctccgcagatgtcccaaaatgtaaaaatgagaagtcatatgaacaaaagctgaaaatcctttgttttcctaaagcatcaatcagttccttgcccaacggacggtttctcaaccattcatgcttggctggtacccatgccgccacaagatcttcatataagctcaactctttgttactagtcatgagctccttgatcatggtctggctagatgaatgtgcaagcgtgacaaggtcctgccatgctttaccccttgctgctattattcccgtgtcaagtaatgctctcccatcatctaggatggcatgaccctctacaagctcgctcactgtcggcttctgcaggagattgatcaagagatattaagaatagctctcttgatcaatcccaccatcctttgacgctacaaccactccatgattagcagcaacatccagagtgggtgggcacagtc

SEQ ID NO: 20993 - DNA, 516 bp, Setaria italica
  Peptide Sequence Number=SeqID_86967
caccttcagattatcaccagccaagacagttgcagggcttgcaacagtttctctttcagttgagccagaaccagaggcaactgccatggaagcttcagcgctgtgaggtgcatcctgctctgcttgtcctggagtagtcacgtttacggattgcggagactgctcaggcctttggctttgctgctgagcagcagcaatccttaaacggcttctctgaatagcctttgcaattgccgtgatgtcacggagcggcgtcctgggataccattcaggaagcgggctcctcctcttcttcggcgtggccctcaaggcccaaaccggcagcaggttctccttgttcctcgagggcgaaatataccgccgcgccagcggcttccggatgcctctcgctgccagggatcccggcgatgccaccctcctgatgaagaacccgccgccgccagccccgccggagaggtcggcgagggccgccctcctgccgtccgtggactcgggcattcttcgggggtcccttgt

SEQ ID NO: 20994 - DNA, 818 bp, Setaria italica
  Peptide Sequence Number=SeqID_86968
aaatttgtgcctacaataaaagactgaagcaacaggtcactagccaaacttggtataaaacatcagcatgccactgacactaagcaagcatacttgcatttgttcaatcatggttcgtaatgatcactagcacaagaaaacattattttacaagttttctcctacccagctagtgttagagcgtggagtaaccaaccatccgcatattggacatctgagaacctatgatactacatgtttccaaaaggattacccatgtgtgcagctcagcagctagcagagtcctgtaaggatggcaaccccttttcaagcggaagttaataagtttgggcatcaacttcacatgcatggcgctgtcaccatttttcttctcatttgcaggatcaaggtggctgaagcccttttgaggccttttgttctgggaccaaatgctgtatttgcactgtagctaaaatagtagctggttctgcaaatctcatgattgtaatattttagattttgcggacactgtatccaacttcttctgttttcaagtcctcattccagttcacaaactctaaccctccaaactgtacttgcttaataccaacatgatctgaacttatggtcgttaaggcattaagtaggatgtccaaaagcaatggctcatgaataccaatgtctacccatacacgtgctagattatcttgaatctcaagattaccaatgttataaaatgatgttggagtgacgttagctccttcaagagcatcataagtcggccttttgcaatctaaaggcaactgcgatagctgcatattcatagaattgcagccacc

SEQ ID NO: 20995 - DNA, 913 bp, Setaria italica
  Peptide Sequence Number=SeqID_86969
agttgattccaaatgtcctgcttgtggactggcaccagaatttccacaccacacagcacaccgagaggagagccacggatcaggtgaggtcacccgatttgtctccagatttttaatcaaatagttggcttgtggattggcaccagcatttccacacccatccaccacacagcacacccgagaggagagccatggaggccaccgcgttgagtgtgggcaagtccgtgctggatggagcgcttggctacgccaaatccgctgtcgcggaggaggtggccttgcagctcggcatccagcgtcatcatgctttcatcagggacgagctcgcgatgatgcaggctttcctcagggccgcgcatggcgagcgagataaccatgaggtgctcatgacctgggtgaagcaagtccgtgatgtggcctatgatgcggaggactgcctccaaaatttttccatccatctccataaccaatcatggtggcatctccctcgcaccctgcgtgaccggcgccgcattgccaagcagatgaaggagctgagggccagagttgaggacgtgagccagaggaacctgcgttaccggcttatcagaagtgccagctccaaggctgtcacttccgctgatgagaagcctaacattacagctgcaggaatatttggtatcaatgatgcatggcgtgctgggaagcaggacaattcaaaagtggatctggtccaactcatcaaccaagagggcgaggatcttagaataatagctgtatggggaacaagtagtgatcttgggcagacatccatcatcaaagctgcctacaataatccagatatcaaagggaaattcgcatatagagcatgggttagggtaatgcatcctttcaatgcaaaagactttgtccagagcttggtgaagcagttccg

SEQ ID NO: 20996 - DNA, 245 bp, Setaria italica
  Peptide Sequence Number=SeqID_86970
gagtgcgtccaccactacgaggaggttggaagctggaggtgtgctttttcttccttgttagtatatcctttctctaagcggtgaatttacaaaagagagagaggtgttgaggtgtggatcaaggctcacacatacatacacattcatggagtctgcggcagtgagcgctttcttgaagaccgtgatgggaaggctcttcttgttgctggagaaggagtacagcaagcacaggggccttgcgcaag

SEQ ID NO: 20997 - DNA, 1351 bp, Setaria italica
  Peptide Sequence Number=SeqID_86971
tttttttttcttcaggtaaagatggaaaatcaggcttcactccagttctctgaataactatacataagtgtatttgtgctgtatatatgcacattatataccgtatacaaaaaccatccaaatgtgacaaacaatggatataaatgtccagtgacgccaaaatcctttggcaaatctgctgtttacctagctagaactcctcttgaccttttattacagttggctatgaaaagtaccacatctacactcacaagaacgcaaggcacgatacatgtgcctcaaaggattccaattcactataccgccttccatcgaatgaatctgaacaataggaaccctattgttgggtacacgcttatagatttgagaaggaactaggcagctttggtgctccctcgaaagcccatgccgatattaggtgatgagcaatggcaaagggtccagggacaaacatcggaacaggttcaccactgtctaccttgaagtcatcggtgatgctctgccctttctcagcacccttgcacatttgattgacctttagagcattggttctctgagctttctcatattctgcaaatgtcagagctttcctgatgtcttcacggctgtgccactgggcatcttcgagctcctgcttatccacacgaatctccaatgatttagcataagcaaagaaacccaccataagttgacatggcatagtatttggcccgacaggccacggttgagagctatgatatatgacttgaccaacttcaataccagtctcttcccatgtttcccttctcactgcctcttctaggctttctcctggctctataaaaccagcaagacaactccacatacgaggcacaaatcttgattggcggcttaagagtgcacggtcattttctttatcgatgaccaacatgatcacaactggatcaactcgagggtatatcctcttcttgcaagactcgttgctgcactgcttacgccttccagcttctttagggaccgcctttgccccacaagctccacaaaatttggccgtattgtgccactccagcagtgctcgagcatgcccggcgatggcgaggtcccccatggcgtccttatcgctccagtccgtggccaccatgagcgtcctcaagtcgacaaacgccgatccatccccgtcccccgagccgccgtcgaccctcgggccctcaccttcgctgacgtcgacggcccagtacgccgcggcctccttgccgtcgccctcggcgtgcgcgccaggaagacgaaggcgtccggggccaccccggggacgcgggagggcgggagccacgcgaggcgccaggctggcgccggcggggggtggcgcgggagg

SEQ ID NO: 20998 - DNA, 315 bp, Setaria italica
  Peptide Sequence Number=SeqID_86972
gccatctcttctttggcaacaaattgatagaatttaatcatcaagtccttgtcattttcgtaaacaacgttgaccttacctaggcaaccaataccaaaacttggatctatgcccatctcgcgaaggatctcctcttgtatctcagtggtcacggccacagcctcctgcttgtccctgacggcgtcggcaatccgctgcttaacctcagggagggaggtgaggaaggagaagcgggagaagaggtggagcagctgctccctcgtcatcatggtctcgccgccggccgccatgtccgtttcttccctgcccgccccc

SEQ ID NO: 20999 - DNA, 354 bp, Setaria italica
  Peptide Sequence Number=SeqID_86973
ccttgtcattttcgtaacaacgttgaccttacctaggcaaccaataccaaaacttggatctgacatccagaaataacatgtcaaaatgcatcatgtcagaacctgatcatttctatgcccatctcgcgaaggatctcctcttgtatctcagtggtcacggccacagcctcctgcttgtccctgacggcgtcggcaatccgctgcttaacctcagggagggaggtgaggaaggagaagcgggagaagaggtggagcagctgctccctcgtcatcatggtctcgccgccggccgccatgtccgtttcttccctgccgcccccttcctgctctgcgactgagaggcttgtggttcac

SEQ ID NO: 21000 - DNA, 549 bp, Setaria italica
  Peptide Sequence Number=SeqID_86974
ctggtactactaatctcatctgttgggaaatggtatcatttctgaatgatctcttgaatttgatctggactcaagatcgatgcattgatgtcaaaatttgcttcctccaattgtttgcgcaaagtcccaagtatgacagattggctctctgggctatatttcctcatttcaactagcatgttcagttgctgttcttgtaatattcgttgagcatgtagtttttcagccatttctctaggtccaagctcagcttcatcaatagccatctcttctctatcaaccaattgatagaatcatcaagtccttgtcatcgaacgttgaccttacctaggcaaccaatacccttggatcccaaaaaaaagagctaaataaaggtcatctaatggattgctcgtttcctattataacgaatcaagaactaatgtatatctcaaatcattaatgtgggtcacattcatatttatatctagtatttagtacaactagaataattaagacgaactaaataactaaacccctaaaactaaaaataaaacaaaaaaataaaaa

SEQ ID NO: 21001 - DNA, 623 bp, Setaria italica
  Peptide Sequence Number=SeqID_86975
gccgtctccgcctccccggacccgcgggtctcctgcaccatcaccgtcttacccgccgtgaccaacgcgtacaacacgctccacggcggcgtggtggcggccgtcgcagaggccgtcgggatggcgtgcgtgtgggccgccgccggggacaaggagatgttcctcggcgagctcagcaccgcgtacctcgccgccgcgcgcctcgatgtgagattctaatgaaattcccagcaccttgatgcattttggtttcccaacaatttcgacctccataccatccagcatccattgattgggatatagtgagttacttcattcagcaattcgaagcttcgtggcaatgtcgggaattggggttggggacacttgttactgatttaatcagttaatccagtgacaaaaaatggttctatgaactgataactgtttgtgattgagagtggttttacatacaacctttcaagaaatggtgttgtttggtctagtgagctctggtagaacctctagccaatatttgaggttaagattctgtccgaaaaattactgaaatatgtcaatctcggtgcgtcaagaaattggatactactccctcccttccaaattactattcgttttggcttttc

SEQ ID NO: 21002 - DNA, 775 bp, Setaria italica
  Peptide Sequence Number=SeqID_86976
cctcgcgattcagacggagtcgccccgaccggagccggcgaccaccgcggcgccgggccccggagcaggaaagcaagcgacgcaggcggagtaggagatggcggagggggagcctaggcagaagctatcgccggcggactcccggatggtggcgctggcattcatccgcgccctgggcgccgacgtgcgcctcccggccgcggccgaccagcccgacgcctactccgcgctcgtccgcgccatcctctcctccatcgccgtctccgcctccccggacccgcgggtctcctgcaccatcaccgtcttacccgccgtgaccaacgcgtacaacacgctccacggcggcgtggtggcggccgtcgcagaggccgtcgggatggcgtgcgtgtgggccgccgccggggacaaggagatgttcctcggtgagctcagcaccgcgtacctggccgccgcgcgcctcgattctgaagtggatgttgaagctaagatactgaggaagggcaggtcggtcgtggttaccactattgacttcacactcaaggataccaagaagctctgttatacatctcgagccaccttttacatattgcccgcagcaagcctatgaacaatcaagttttatacgtgcagtttgttgtatttacaggaccactttgtcttgtttataattaactcggataacatatatatggtgtattaataacgaaaataaaaatcttattgacccatgaaaaaaaaaaaaaacaaaaaaacagagacacgacaacggagggag

SEQ ID NO: 21003 - DNA, 806 bp, Setaria italica
  Peptide Sequence Number=SeqID_86977
ttctctgggagatatcctgagacactctactctccagctccagttccgtttcttccacgcgactgcaaaagccgccaccgggtcaccgggtcaaatggagctgcgcagaccggatcacgcctgaggaaggatggggaaggtggattggacgaacggtacggggcggaggagagccggccggtcacgcgctggcgcgctgctgtgggaaccgcggcgtgggcacgacgaccgggtcgcagccctcctgcatcttgcgcatctgcgccgggatggtgttgtcgaacagctgcgacgtggggttctcggcgtagcacacgtagtagcaccccacgcacgcctgcggcagcgccatgccgatccgggtcatcaggtacccgacgaagaaggccagcagcgacacggtggccgtgtagtgccggtgcgtcgcgaacgcccaggagcccgccagcgccacgcacagcgcgccgctcgtcacgcccgtcaggaagcacaccgagctcgtgatgtccgagtccaccagcgccgccatccccggcagcgcctcgaactggccccacgtgctccgcgacgcctgcacgaacccccgcccgtacgccgcgatatggacgaaggcccagctgttgccgaagctgaagacgccgttcatgacgtggaggcagcagtgcgcgcaggagaacatgaactcgtcctcgccctccaggaggttcagcccgcgtgccaggatgcgcagcgcttcgatggtgggcacgaagagcgagcccaggcaggcgctgccgaggttgtaggacagcgcgcgctggaagctg

SEQ ID NO: 21004 - DNA, 509 bp, Setaria italica
  Peptide Sequence Number=SeqID_86978
ttagttcgttaaattttcctttgttcgggtagtttccgacccgcacgaaaggcgtaacgatctgggcactgtctcggagagaggctcggtgaaatagacatgtctgtgaagatgcggactacctgcacctggacagaaagaccctatgaagctttactgttccctgggattggctttgggcctttcctgcgcagcttaggtggaaggcgaagaaggcccccttccgggggggcccgagccatcagtgagataccactctggaagagctcggattctaaccttgtgtcagacccgcgggccaagggacagtctcaggtagacagtttctatggggcgtaggcctcccaaaaggtaacggaggcgtgcaaaggtttcctcgggccagacggacattggtcctcgagtgcaaaggcagaagggagcttgactgcaagactcacccgtcgagcagagacgaaagtcggccttagtgatccgacggtgccgagtggaagggccgtcgctcaacg

SEQ ID NO: 21005 - DNA, 804 bp, Setaria italica
  Peptide Sequence Number=SeqID_86979
gagttgcatacacttgtgcacagtgtagaatacagattatcaacaaaccaaaaccagcacgagcaagcttaatttctttatacttatacagtaatacagtgatagtgagacgagatatgagttaacattaagccaaaaaacacccaaacccaagtttttttttatcgccatatgcccatataccttgtcgtaagttttggccgagctgggagagcccgtagctaggtagcacacaagccgccatgtgagccgacgcagccggggcccccggccagccggccaggacgccagacgccaccaccctccctacaccaaagcacgcaaaagatgtaccacccacctaccgcgcaagctgtgttccacgcccaccgcgtgcggccggctacggcttgtggagcaccctgccggcgacgacggcggcctcgatgacgagcgtgatcacgtcgatgacctcgtcgatcatgcacttgttcccctcgaacgtggacgtgccctcccgcagcctcgccaggcagtccagcagcgcctcgttgcaccccgtgctcaggtagtccttctttgcctggacgcagttgtcgtggtgcatgcagcaggcgtcgagcgcgtcgcacggcgcctcgccggggcagccgctgtagaggatgccgcagtacttgccgtaccgcaggaacggcgccgtcgtgcagtggtctgactcgcacgtgcggctgcacgcctgctgcttgctcacgccgtcgccggcggactggatgccgatgtcgagcgccgtcggtcgggtccgaggacgacggccgcgcaggcgac

SEQ ID NO: 21006 - DNA, 909 bp, Setaria italica
  Peptide Sequence Number=SeqID_86980
tcaatcttgaattttggatctcggtctttggctccctcgaccagttcctgcaggcgctcaaaattaacggggctctcctcagcaaaagcatcgagaaggtggccaagccaacttggcactccttgaggaatgcggtataagtgtttctgatgtcaccaaccccaacgccttcttgtatcggatgctcaccacgagccccaagcacctgcaggaggccctgacacgcgttcatgagtttggaatccacccgagctcgtcagcattctcccgcgggcttagaacatttgcggtccttagcagtgagaagctcaccaagaatatacagctggtgtagtagcttggatggtcaagggatgctatatcattagcagtgaggagggaaccaactatactgggtttgactgaggaaagggttcggagaagcttggaattcctgataggggatgtcggattggagataccatacatcgcacgaatgccagcactgatgaattatagcattgaccgtcggctattgccacggaactgtctgatgaattttctcaaggcgaaggggttgttcagtgccgaattcagcttcttttctattgctactataagcaatgagaaatttctgcataaatatgtccgtccttacgaggagagtttttccctggccttgctgctgcttttgcttctagctgcgctggaaaacaccaatgggaacaactatatgagacaacatgcaaaaagagaaatagttaacacttgttctggaaagtaccattaggaatctgtttcaaggtttttttgtcctccccattggccattcttgaaatgtaatgttctagcatttagcttatttggtagtacttggtctttaagttacttattctatagtgatttatttgtttcttaggttctatttcg

SEQ ID NO: 21007 - DNA, 327 bp, Setaria italica
  Peptide Sequence Number=SeqID_86981
ccttctccctcctgccgtccatggctcgcctaacccccgccaagtccagatccaccaggaagcccaagccctcgtcgtcctccggcatggacgccgcggcggagccgaacccggagccgcagcggcggccgaagcaggacaggtcggcgggcggcggcggcggcaagaaggccaagtccggcgggagcaagaaggccaagtcgggcggcttcgagtcgatggggctctgcgaggaggtctaccgcggggtgcgccacaaggggtaccgcgtgcccagccggatccagcgcaagaccatgccgctcatcctcgccggcgtcgacgtcg

SEQ ID NO: 21008 - DNA, 374 bp, Setaria italica
  Peptide Sequence Number=SeqID_86982
tcttctgctccggctcctcgctcagatcggagttgcggcgccggcggcggagatggcgacccggttctactggccgatggtcgctgcggccgttgggttccgcctcgtcctggtccttttcggcggagacctccacctcgcctcccgccccgaggtctctaccccgctcacttccctacgccgcctggcggaaggctactggctgaagcaagcgtccatgtcgccctactccggatctatgtatcacggttcccctttgctgctgattgttcttggccttaagcattagattcgatactgtgtttcttgtctatagtgaatgaattagcgcattgtgtatttgataataatgatgaagtagcatagcatctata

SEQ ID NO: 21009 - DNA, 407 bp, Setaria italica
  Peptide Sequence Number=SeqID_86983
gtgctgcaccgagctgatagatcgctgggagaataaactcgctggttctgacgggtcatacgaagtggatatctggccggagtttcagaacctcaccggagacgtgatctcccgcacggcgttcggcagcagcttcatggaagggcggaggatcttccagcttcaggcagagcaagcagagcgaataatcaaggccttccagtatatgtacatcccaggcttcctgttcttgccgacacagaacaaccggaggatgaaggagatcaacggggagatcgaagggattctaagaggcatgatcgagaagagggagcgcgcaatcgagaacggtgaagccagcggcaacgacttgctcggcctgttgctgcagtccaacatggatagcgggaaagcagcctgagatgagc

SEQ ID NO: 21010 - DNA, 1935 bp, Setaria italica
  misc_feature (1885)..(1935): n is a, c, g, or t
  Peptide Sequence Number=SeqID_86984
atcggacttgtggttgccgcagcccgaaggacgcatatccccggaaaggaaaggatggacgacatcgtcgtagcagctgcagcagcttcgccatcgccgtggagccttctccaggggctcctcgccctgctcgtcgtgtggggggcctaccgggccgccgagagatactggctgcggccgcggcggctcgaccgggcgctccgggcgcaggggctcagcggcactgagtaccgcttcccggcgggcgacctccaggagaacgcccggctcaacgatgaggcgcggtccaggcccatgccgcagtgccatgacgttgttccccgcatcatgccgcatctcttcgacactgtcaaggagcacggcaacgtttgcatcacctggtttggcccaatccccagggtgatcatcacggaggcagagttagtccgagacatcctatcaaacaagtttggtcacatcgagaagttcactaacaagcgtctggggaagttgctagcgcttgggcttgcgagtcatgacggcgagaaatgggcaaaacacagaaggatcctgaaccctgcattccatctcgaaaagctcaagcgcatgctgccggctttctcgacgtgctgcaccgagctgatagatcgctgggagaataaactcgctggttctgacgggtcatacgaagtggatatctggccggagtttcagaacctcaccggagacgtgatctcccgcacggcgttcggcagcagcttcatggaagggcggaggatcttccagcttcaggcagagcaagcagagcgaataatcaaggccttccagtatatgtacatcccaggcttcctgtaagcaccttctgatcctttgaagaaacataagctgataagcaccgtaccattgcttagctatatagcctctgctgcaggttcttgccgacacagaacaaccggaggatgaaggagatcaacggggagatcgaagggattctaagaggcatgatcgagaagagggagcgcgcaatcgagaacggtgaagccagcggcaacgacttgctcggcctgttgctgcagtccaacatggatagcgggaaaggcagcctgaggatgagcacggaggacatgattgaggagtgcaagctcttctacttcgcggggatggaaaccacgtcggtgctgctcacgtggactctcgtcatccttggcatgcaccccgagtggcaagacagagcgagggaggaggtcctcagggtgttcggcaaggacgacaagcccaatttggacagcctgagtcgactcaaaacggtgacgatgatactatacgaggtgctcaggttgtacccgccggcagtcacgctaaaccgaagaacgttcaaagacatgcagattggaggcatcacataccctgcaggggtgatcctcgagcttccaataatcgtagttcaccacaaccccgatgtgtgggggacggacgctcatgagttcaagccggagagattcgctgagggaatctcaaaggcgactaaggacgaccagccggcgttcttcccattcgggtgggggccaaggatctgcatcggccagaactttgcgctgcttgaggccaagatggccctgagcatgatccttcagcgctttgagttccaattgtcaccttcttacacgcatgcaccgtacactgtcattacgctgcatccccagcatggtgcgccaattatagtcaagaagatctgatcgtctcgaacttcggtcttcgtcgatgagtatgtcacagtacaaaaacatgtatgagtattaggggagtttttgtatctaaacattgaggtggaaataaatggtaggagatatatgctttgctgttaacctcttggtcgagatatagtccaaaccaagaattaccgacnnnnnnnnnnnnnnnnnnnnnnnnnnnnnnnnnnnnnnnnnnnnnnnnnnn

SEQ ID NO: 21011 - DNA, 1638 bp, Setaria italica
  Peptide Sequence Number=SeqID_86985
aatttctagctttgaagctaaggtggccaacggcaatggtgaacaaacattgagccgtgacatctatcggcttggacgcagatttgacttctacagaatgctatctttctatttcactacagttgggttttatttcagtagcatggttactgtacttactgtctatgtatttttgtatgggaggctatatctagttatgagtggtctggaaaagtctattctgatggacccacgaaatcagcagaacgtgaaggctcttgaaaatgcactggcttcacagtctgttttccagctaggtttgctgcttgtcctccctatgatcatggaagttggcttggagaaagggttccgcacggcgttaggagagtttataatcatgcagcttcagttggcctctatgttcttcacattccagcttggaaccaaaacccactactatgggagaacaatactccatggtggtgcaatatacagacctacaggtcgtggatttgttgtgtaccacgcgaagtttactgaaaattaccgcttgtactcccgtagccactttgttaaaggactggaactgttgatacttctggtcgtatatctagtctatggaagttcctatcgcagctcaaacctatacatatttgtcacctgctcaatatggttcctggttgcttcatggctctttgcgccgtttatattcaatccatcgtgctttgagtggcagaagacagttgacgactggacagaatggaggaagtggatgggtaaccgagggggtatcggcatgtctgtggaaaaaagctgggaagcttggtggataagtgagcaggatcacctcaggaagactagcatccgagcccttctgttggaaatcatcatttcacttcgtttcttgatctaccagtatggcattgtctaccatctgaacatagcagtagcacgtcacaacaaaagcattatggtatatgcactgtcatgggtggttatgctccttgttctagtagtcctgaagatggttttcaatagggcggcagaaatttggaactgatctgcagcttatgttccgcattctcaaaggccttctcttccttggctttgtctccgtgatggcagtcctatttgttgtcttaaaccttactattgctgatgtcttcgctagcatccttgggttcttgcctactggatggtgtatacttctgattggacaagcgtgttcaccattgcttaggaggactgtgctgtgggactccatcatggagctcgggaggtcgtacgaaaacataatgggtctcatccttttcctgccaataggcttcctgtcatggtttccctttgtctctgagttccagacccggctgctgttcaaccaggccttcagcaggggcctccagatatcaagaatccttgcaggtcaggaggtggatatcggcgacgagtccgagtccgaatgaccagttccatccctcttacgaacaagcttggacagcaaagcaaggcaccagttccaagttatcttccatggatgtgcttgtagtgatcgattttgggcatctgtagtgtagtttcgtcaggtttactacattagaagtacatggagctaccgagctactactgatatcagaattatcagtatgtgttttgccctgt

SEQ ID NO: 21012 - DNA, 939 bp, Setaria italica
  Peptide Sequence Number=SeqID_86986
agaagaaagaagtacagtaggatttattcattgaaaaaacgtgcagttgattaaaatctggtgctgagaagaagcaaacgtgatacaaggaaaccttctgaaggtagacacaggcagttgatatgccaacagcagccctccaaccaaagacttcttttactggcagaaaccaaaactgcgggattcatttcaaatctggaatacaaatatttaaaaatacgaaaccatcgaagtcacgtgtaatagaagaaataaaacacagcaggaaacacaggtacctggtctaagttcccaccctctgaaaagatattaaaggattagcagccaatatatgcttcagaccaaaatgatgactgatgcatgaatcctcagtttatattgaacctttggagattacctttaaggctttaacaaaattccttaaaggttgaaaccatcggtaatttcgcacttaagattgtgccagcaagatcatcaccaatccctgacttgttctgctgtgtcccttcgaccctccctagcacatccttcatcaggatttcacgtgctctaggggattgatttagctctattacatctgagcaccctattgagcgaagaaactaggagagctgtatgttgacaacaatctgatacctctttggagcacagaagcaatttagcttttcaccaccagacagatcgtcagaccagagatccgtgtgtgagaaccttttggcttctctggatttggcattacttaactgtgctttcacctttaatagttctggcaaagggaggcagcaagcttgagacaacaactgcacaacttgcaagaaaatcatcggtatggcaagaaaccgattttttttcttgcaaggtatgcagttgctgcctctagcttgccgcctccacttgcagcaactgacacaccggcctggagccgtggagcttgagctc

SEQ ID NO: 21013 - DNA, 1728 bp, Setaria italica
  Peptide Sequence Number=SeqID_86987
aaaagaacacggcacttattctcctttcaagaacaatacaaatgtctggggactacaatttgccctcatctacagactaaactctcacagccgacaaaactcgacagataagactcccattcttacaaatcccgcttcgacatatacttttttcaaggaagaaaagaatttggctacagacatcacctaatccaatagaactcaccggaagcacggcgactagaccaaaaaccctgtcaaccaccgcttttaataacaaagaaaaataaacaaatccatcgtaaggaccgaaggaacaataactgactacaaaaactaaactaaaaatcaagggacctgtactgctacaatgcgtaagccctactatgggccgtggaaacctaactggatagtagctcaagtaccagttcttccaaaagatcatcttttatcaatttttcaatatcccttcctaccctgtcgatgccatctgctaaatctggccacttctgatcaaatcttttcatttcaggcttcgtcttactcggtgcaagttcttctcgtctctgatctaacacctgcaagaccttttccaacaggccctcagatccccatagtggagccaagttcctggcagtattgacccaaggttgcatgttcaagcatggagcaagaatttgtgacaatactgtgttgaccatatcgaataaaaacttcctatctgatcttgaccacgtaacaactttgtacttgttttccaacttctcaaagacatcatagctggcagggcagtcgagcgactgacacactttgtaaagttgatcctctgcagttccatgaatgccagaagcgatcagtatatccagcaagtaagaaaagtccctttcctcttcatcttcaaattcttcaagaatattttcaaccagctgtgtaggttcattgttgttcgactccacttcagaggataaatagtcactagttctgccaacgctacttgcctctgcagcagtctctgctggtgcaaatgtgccaagctcaagtctcagttggagatcatacagatcggcaggctctcgcctgatgttttcagaatcagagctatcctcagatggaggctcaagaacagatatcgggctagcctgacctatctctttgcggtatatgacagacgtagagtctaggcgtgcagcatgagggcagtatacctttttaaaggtcatcttccattgattattagctactgcacctagagatgataagttggagctatcactagtgtcgcttgaagacgatacttgcaagtcatcaatgctgtcaccagaggaaaagcatactatcttctcagattcactgtctgcagggctccataattcttcagttgctttttgattaagtacagttgaacagtacatttgcttttctcgaactaatgcattatttaacaaagcctgtgaatatcctcccaatgagtaatcaagctggtcatggacctcctctgtattaagcaggtcatttactcctctaggattcacaattttatgtcttcgattcaaagtactgatacaattttggtcctgatgattaccgccataccgtggttgacgtagcaatgacattttctcagaaagggaactgtttgcacttgttaagcccatctttgtagaagctgaccttttaacgcttctgactagttgatgactaaaatcactcatatcacttgtctagtcttcttttacttagttttggtta

SEQ ID NO: 21014 - DNA, 497 bp, Setaria italica
  Peptide Sequence Number=SeqID_86988
aacagcatcctggagccgaggccgaccgtcgtctgggtcgccaaccgccagagcccgctcgtcgactccccgggcatcctccgggtctccgccggcggccgcctcgtcgtcctcgacggcaacaacggcaccgtctggtcctcggcggcgcccaccctgaacgtgaccaccggcgccacggcgcggctcctggacgacggcaacctcgtcctgagcgcggacgggagcggttccgagcagagcgtggcgtggcagagcttcgactacccgacggacacgctgctcccggggatgaagctcggggtggacgccaggcacggcatcacccggaacatcacggcgtggcgcagcgagtccgacccgtcgccgggcgacgtcaccttcaagctcgtcctgagcagcgggctcccgcagttcttccttatgcggggcagcaagaggatctacacgagcgggccgtggaacggcgacatcctcaccggcgtgccgtacctacg

SEQ ID NO: 21015 - DNA, 475 bp, Setaria italica
  Peptide Sequence Number=SeqID_86989
catctggatcaacacctgtaccaggcacatgctgcaagtatgagagttcccctgtagatgtcctttccctgagagcttcataatccttcaaggacgcgaggaccttgttgaaatcatcaggccttacatttgcagcaacacttccacatatctcacatacagtggatccatggctgatgaaccacttcaatgcacaggcataatgcgccagggcaagctcgttcttgcaggaacagcctagatccacaagatgatcttgttggtgaaggggcctgattccacgtcagcagtgcatacgaatatctccccctcggggcttatgaactcaacaaacctgggagcattggttccatcctttggcccagtgatggcatccttgctggtggaagtcttggtagcgtcatcgtcggtccttggagcagatggctctctagaaggcggcacgatgcccaagaaacctaaggcagactcgcca

SEQ ID NO: 21016 - DNA, 492 bp, Setaria italica
  Peptide Sequence Number=SeqID_86990
gcacgctcagctccaagacggtcgacgaggtgtggcgcaacctcgtgcgcgacgagccaaccgcagggggtttggtacggcggcgggcagcagcaggcccaccgccagtccacgctcggcgagatgactctggaggagttcttggtcagggccggcgtggtcagggagaaccccgcgcccgccgccgccccagcgccaccgcccatgctgccgccgcggccggtccctgttgcccccaaaagtaccgcctttcttgggaatttcccgggtgccgatgacgcggccgccgcggtagcgctggggttcgcgccgatcggcatgggggatccggccctgggcaatgggctgatgccgcccagggcggctggcatgggaggcagcgccatggccgtgcaaacagcggtgaaccagcttgattctggcgggaaggggtacagcgacctgttgtcgccaacggagcctctgccgtattcctttgaggggatgattcgg

SEQ ID NO: 21017 - DNA, 798 bp, Setaria italica
  Peptide Sequence Number=SeqID_86991
ctcgatagttgctcgacgcacctaccgcggcagagttgcgcagagagagtccacggcacggcttggtttcattccaccaaccaacccgatcctctcccaaccatggccgcggccctccctcgccggtggcccctcctcctccagctgggtttcgctatcgccgtcttgctcgcggcggccccggcggccgaggcgtggacgggggagatccgcggccgcgtcgtctgcgacgtctgcggcgacgccgccatcggccccgaggaccacgccctcgaaggggccgaggttgctgtactctgcatcacaaaatcaggtgaggttatcaactaccaagccttcacaaactccaagggcacgtacaccattgctgagacgatgccagagagcgaccggtgggagtcatgcttggcaaggcccatcagcagcttccaccagcactgcactcggaggggcgacgctcactccggggtgaagttcacttacagcaagccatcagggaactcgcacactgtcaagacattcctttacaagcctgtcaacgcccctctgtattgtagttaaacagttccatcagaccatcacagttggtttgaaggcaaaaataggaacatacaggaaggatatgtattagtaccttggttccatttataagtaaacgtaagtaaacatggtttgagttgtaagttggagtttccagatgtgaatgggaatgtgttgtcttactatctgtacttgcaaggaaacagatgccgcatgcttcatgatcatgaatcagtatatgggccttttgggaaaaaa

SEQ ID NO: 21018 - DNA, 234 bp, Setaria italica
  Peptide Sequence Number=SeqID_86992
ttgctcggcaccatccacacggtgcccggcatttggctctgcgtgtacccggccatctgctgctggtattgctgctgctgttgttgctgctgcatttcttgctcccaccgccgcttccttgacaggtcggagctggcggcggcagacgatgacgacggtgacacgtcgagaccgacgctgccggagtggaagctcagcagcagcggggacacgccgaggaggtggcggatcggg

SEQ ID NO: 21019 - DNA, 925 bp, Setaria italica
  Peptide Sequence Number=SeqID_86993
tttatcacaatattacgtacaaaaccatgacataagtaaacttattagtaactggaagatggcgaaataagacgtaaattacaaagagacacaagcaaacacacttctcaagcgccgaccagattgacaacggccatgagagcaaaagcagcaatcgtcgtccaccccgcactcatccctctacaagccgccgccgctttcgtgctgtcttctgtctccttccccgctgccgacggctccgctgccacgtcgctcttcgggacaccacccttcttccgcgctgccgccttcccagccgccgctccagcagcctgccccgcgggcgccggcgcaaccgccttgcgcgacgcgccgaacagctgctccggcaggagcacggcgtcgatggagtagacggcgagcgggaacctggccacgagcgtgctgctgatgggcacgtcgacgacgcccgtggacatgttcaccaggtggctgctggtggtggtggtcacgttgacggtgtacatgccgccggggcccgacccctcggtgggcagcgggttgctggccgtctggaaggtggtgacgctgtagtaccggggcaggacgtggtaaagcagcagctggatcttctgctggtcggagaggccgttgagcgtgcccgtcttgagcttggtgaaggcgtcatcgttgggcgcgaagaaggtcaggccgtcgtacgagttcttgagctgctcggtgagctgctgggcgatccgggtggtctgcaggaggcggagcagcgtcgagtactgcccgccattttcaaggatgccggtcaggttgagctccccgggtggggatggaccaggggcgacgtcggctgccgcggcgaagaggaaagggaggaggaggagaagggagaggacggtgtgagaggccatttccattggtgggaagtttgcga

SEQ ID NO: 21020 - DNA, 691 bp, Setaria italica
  Peptide Sequence Number=SeqID_86994
ctgggaatttcgccgtcgaagtcgttggaggagacgttgaagtaggtgatgtttaccgtgccgaggagggcaaatggcgcagctccggagaagcggttgctcccgacgtcgaagaggtcaatgctgctgcaggaggcgaccttgccggctaaatcgccgtagagagagttgcttcggacggagatgtagttcatctccggcggcgcgcagactcggtccgggaactcgccggagaggcggttgtaggagaagtcgaacccggcgaggcgcgggcagttggcaatgcccggcgggacggggccggtgaggtcgttgtgcgcgagggagacgtagcggaggcggaggcatgggtcgaagagtgcgggtgggatcccgccggcgaaggcgttgtaggcggagacgaggaggcggagcaagggtaaggtgccgaggaacggcgggatctcgccgcccagcgcgttccggctgaggttgagcttgcggagcgtgggcgcgagcgcgcggaagctgggcgggacgccgccggtgagggcgttgccgagagcgagatggactcgagcgcggggaggcgcgcgagggagggggagagcgcgcccgcgaggcccgcgccgtggatgcgcagccgctgcacggggccggaggccccgccgcaggtgacccccacgaagtcgcaggggttccccgacggccg

SEQ ID NO: 21021 - DNA, 963 bp, Setaria italica
  Peptide Sequence Number=SeqID_86995
gtttcagatgccaaggtttggtttcagatgccatgttctagatatagtataacaaacagaaaaaaaacaagagatcaagtgccaagtgacgatcttcacaatttattactagaccacatcatcacaagttcacaaccatcacagaactgtacacttgaagacccatgttgtttacaggattatggacaatattagataacattatgcagcagcagccataccagcaaagtctcatttatggttcaggacctctaactctgatctccattagtttttcaacaggctgtcggcatatggggcatttatttgactgaaatcgtagagtttttgcacattcactgcacaaacacaaatgtctacagggcataacagcagtgtcccttggctctgtcaagcagataacgcattcctttcccgtgtcatcagcatcagcatcggcaacatccgtttctgtggagttgacaagaccgaaaatttcctgaagctcgtacctcactccatcaatccacaagatttgcttgacaactttgactcgaagatcatcgttatgcttctccaaaacagcaagagtaatctgtgcacgagtggagtttactgacgtgccaccttcctctggagatggatatgcttctgcataaactaccagagggaatacttcccctgatgaatttgaaagctcatcaagagaaaagaatcccaagtcaacaccagatccagagggttgaatgaacctttgggccaaccctttctggaagggtatttttgttggcgtctgtaattctgggtatactgaagagaaactacagtcttttccttccttggcaaagtaatatatagccacactgccgtcggttaccgcgtcgaaggtgaaggcgacgaggcggcggtcggggtctgcggcgtcgggctcgagcctgatggtgtccttgtgcaggttgacgtagttcttcaccttcttgtcgt

SEQ ID NO: 21022 - DNA, 747 bp, Setaria italica
  misc_feature (98)..(98): n is a, c, g, or t
  misc_feature (523)..(523): n is a, c, g, or t
  Peptide Sequence Number=SeqID_86996
ccattgatttgttgtgtgaagggtgccatagaattgtccttgatacaacaggctgtaaagaagtataagctttccaactgatggagtgagggagctanattttttggacatctgctcgagtttgtagttgaggctcgtgaatgcccaatcctactttctccaacttctacagtagcatgatggaatctctgtactgtgtgtcgtctatggatccatgatcatgggcgatatgcctggaataataactgcttactgtcccaggagctaccataatcccatatagctacagcatttgaggttaacacaatttcattggtcttctttctagtgtgggttcctcagcctgtttcgactttgaattttgctgtgcgctagcgggaacagtgtcagcttgtacaacagatccagaccactaactggaaagaaatgaaacaccagcacaacagtgattagacaaaagagtcggggttcgagtccagcttctcacagatgccttcccatggcaggggctagtccctacccncttttctcaaaagagatgcgtgccacaaattcaccaagaaaatctcttcacaagaaagaaagtattgatgtttttggatggaatatactactgttctccactgattgaattttttcaaggtttgaaagaagctgctacatggatctcattctggcctcagccaactcatcaacacaacaccaccactggtgctgagagcatgctgcaaagccacgctgtgcctg

SEQ ID NO: 21023 - DNA, 310 bp, Setaria italica
  Peptide Sequence Number=SeqID_86997
cgaacccgcactcagcaggaggagggcgcgagccgccaccgcgactccgacaggtgcaggagcgacgccacccgccgccgctgactggcgcctcccgcctcggccctctgcccagccagccggacaggtggccaacgccgcgtccgtcatcccttccggtgttgcagaaccccgaccaggcccccggccgccggcggcccgcacggccgaacccccgtcggcgcctcccccgcctcgaatccgccccctcctgccggctgccgcgagtcctcgacttcggccctccacgcccgcggatctaattccaagg

SEQ ID NO: 21024 - DNA, 583 bp, Setaria italica
  Peptide Sequence Number=SeqID_86998
agtttactgttatcttccccaatatttattcataattaaataaaatgtagagtagactatcatcagcttcatctgcaactagacaatgtaaagagatgttccaaaagagaaatattacaactttgcttaatttattgcatcctactgaaactttggtaaccatgtgcttgaggcctcaaacaactatctagcttgaacagcctttgccatcccatatgctgcagctgaagcaagcgctccaataatagcagtctggacagcgctggtgaatgggcggttcccagtaaagcgacccttgatgtagccaaaaaaaagcagcgctaccagtgtgactccgacagatgtgagcatggcattttgagctgtggagatgaacatgtagggcaggagagggaccaatccaccgatcacataagatagtgcgattgtacaggcactttgcagggcccttttggatcgggtttctccaatcccagctcaaacctcatcatgaactctagccaagcttgaggattcctcctgagcccatctatgacagggccatactcgtgtggctcgagcccatacctgcgacatgatctct

SEQ ID NO: 21025 - DNA, 275 bp, Setaria italica
  Peptide Sequence Number=SeqID_86999
ggtacaatcatggacattcctgacaagacaaaggataacgttaaggctagagtggatcaagcgaggttgtgcaatagaccaaagctaaacatggcgcctccaagagctggcaagtcatggagaaagcctaaggccgatttcgttctgacgagggtccaaaggagggaggtactagaatggttccaaacgttaatgtttcctgatgggtatgcaacgaatttgaagaggggagtgaatttagctacttattgcgtaattcaacgggctcaagagtc

SEQ ID NO: 21026 - DNA, 1645 bp, Setaria italica
  Peptide Sequence Number=SeqID_87000
aaaaggaaaaatagttccagcaattttcatcatccaatgcatacatcctttaaggaaaaatgttctagcaattttcatcatgtaatgcctacatcctttcttgcttattacatcatcaaaagcaaaggaaaaacagcagcaaaacatcacacttttgataaacaaatgatgacacagataaatcgaaaatgtaaagcacgtgtgtacacgagactcaaaacactctcaagtctcaacaattcagtaaaccacgaaggcatcatgtgttgaaggaaatgcatagaaattaaatgagcagacggcttgcactatgtgtgattaaaccgtgtcgcttacctcttgcttggaactgtaattactcaatgctctgcaacgtattagtagctcctcgcaagttcccatccaccttgatagtgatatattgatctggaaggaccctctgagcagagttcctcactgcatcaacagtcgccatggcgcccgcatcatgcttctcaaactcgaggaggacatgcttcaggctcgacagatgctctatgccagacacgccactcgattgatcagcaaggcctttctggaacctgagctcaagcacttggatagctggcagtgcattgggctcaaaggtcaccgatggtgagctgcactggatgcacagttttttaacactccggaacccacaagcagggaacttgactcgcttctcatgcgtttcagtagcatcaaaatagagttccagctccctcaatttatcttgtttactgatcccttcgatgaacttcacagagccctttgtggtaccaccgcatgacagtgtctgcagggccttcatctcagcgatgccgccaggcagcttggcactcccagcaagcaaatgcattagcttttccagcctgacaatactgggaggcagctccttcacctttgtgaatctcacatcaagtgtctccagacaccttagatccccaattgctggcgggagctcactggcgtcagtacctttgaggctcaggtacctcagcagcaccagcttgcataggccgtccaagcatactggaccatcacatccttctagatccagcacacgcaccacttttagatcattcaggctaggcgcggcactggcatggccaaagacggtgattgagcgagcatgagataagtccgtagactcatttcgtgctgcaggttgatgtttcttgctactgttcttcaaagagagccggcggacagtggtgccgttgtttgggacatgttgagaatccatcagagtggcaaagttctcttccatggacttgcaaacaatgaaatcatgtatcactgggtgaactctgcaacgccttggggcatcgtcatggttcagatccaatggttgtaccaagtttctgacaatgagctcattgaggtagcccagtgctgtttcctgagcacttatgttgcgtccttcagctatgaatccttcagcaatccatcgcctcacgaggcgctctgtgtcaacctcagagttctcaggaaatatgcttaggtacagcaaacatgtcctgagatgtggctgtagatcgttgaagctaagattgagttatttgcttcagcccatctgatccatctgaatgagaactgtatagaaggttcaaaccaagcttct

SEQ ID NO: 21027 - DNA, 683 bp, Setaria italica
  Peptide Sequence Number=SeqID_87001
gattttgtacttcacctctcccgttcacctggcactgttcttcttcttgcttctttcaccttcttcagttcatcgcattcttgtcaccacttttgagtttacttcggaagaacgacgaagcaaaaacaaaagtagctaaccgatgaatggatgtgatgtggcacactagctatagctataggccctccgcagtactagcagccagcacgctaaaactctgctgcatgccgctaacaatcgatcgggtctgtacatattgcgtcagatggagaagtggccctggccaaccattggcgtcggcgtttctagtagctagctacgccgaccatgtcctgcgcagcagggaccgcgccgagccacggccgccggcgaacatctcgtcgagggcgatgacgagccccatggccagcggcgcgcccaggcgggggtccgccaccagccggaacacgtcgtcgcccaccgactccttccggcgcacctccgccaccgcgtccccgcgcgcgtcgcgcaccgcgcaggcacgccgcccgtacgagccctccaccacgaacgccgcggaggtagcagcagaggccatgggcgtgacgtgcgctagcgtcttgctggaagctttgaggctgacgtggcgccggacggagaggagcggcttggctttgcctgctgctgcgtcggcggcgtcgccg

SEQ ID NO: 21028 - DNA, 606 bp, Setaria italica
  Peptide Sequence Number=SeqID_87002
ttagcttggctgagggatctgccatcttgctcacctttatttgaaaaaaaaaggtttatctaagttctactgtgtccattaaatttagggatgaataagttagatgtcatctagtccttcaccaggttcttggaccatgcaggtaacagatgtgtgcttaaaatggaccatcactgcatttgggtagtgaactgtgttggagcaaggaactacaagtattttctccttttcctggtgtatacatttgctgagacagtgctggataccttggtactacttccaaactttattgagttctttcaagatgaaagtaggcgttccagctctcctggggatattgctattctatttcttgcttttgttctcaatttagcatttgtgctgagcctcctctgtttcattggcatgcacacgtctcttgttacaagtaatacgacttctatagaggtctacgagcgaaagaagtcagtttcatggaaatatgacctaggatggagaagaaacttggagcaggtctttggcaccaaaaagctgttctggttcgttcccttgtactctgcagaggatctgcacaacatccctgcgcttggaggccttgaattcccc

SEQ ID NO: 21029 - DNA, 982 bp, Setaria italica
  Peptide Sequence Number=SeqID_87003
agtaacaattagacacagaggtcgcggagctaccaagggaaatgaagaaccttgagcgtttggagactctggatgtaagtcgcacaaaggtcaccgagctgcctaggtggatcgagaaattgcaatctttgaagactctggatgtaagtagcacaaaggtcacggagctaccactggaaatcaagaaccttgagcgtttggagactctggatataagtgagacactggtgagagagttgcctaaggaaatctggcaactgcagcatctgaggactctggacataagaggtactaatgtccgacagctatcctgcagtaaagacacgaatccgttattaagtgtggttgttaatatggacaagttgatgtcgcctctgggtgttattagctcaagtggtgctgaagaggttattagttcctcttctgaagcaaactgcagggatgacctatccatcctcatcctctttaaccatttcggcttgaggtgtgaggtcctaccagttaggatgcttagagttgccgggagacacatgaaagtcccgcagtgggtcaagcaagacttgtgcaatgtctgctccttagatatcacgatctacaaacttgtgcacgaagacctcgagtttctgaagacgcagatgcccaaccttcaggctctccaactcaggttcgaggtcctcccacgggagccggttgccatcactgatggagggttctcaaagctggagacgttctacgttgattgccgtctgccacgggtcaccttcggggaaggagcgatgccgaagctgaaacatcttgagttcaacttcgtctacaccggcacagtaagtcaagactactacatgggcatcaagcatctcgacagtcttgagaaggtcgtgttccgatgctccgagtacaatagaagtgacagtccgggcatccgcgagactaaatttgtaattgttaacttgtaattaaaattagtaaagtaccgtacgta

SEQ ID NO: 21030 - DNA, 268 bp, Setaria italica
  Peptide Sequence Number=SeqID_87004
ccgctcagcttcgggcccctcctcctccgccgccgccgtggtggcggtggagagcttccgcttgagcgacgagttccagtggttcttcacggcgttgtcggtgcggccggggagcaggcgcgcgatggcggcccaccggttgccgagccgtgcgtgcgccgccaggatcgcggcgtcctcctcgggggtgaagggccgccgctccacctgcggcgacagctggttgcaccaccgcagccggcacgacttgcccgaccggccgggatcc

SEQ ID NO: 21031 - DNA, 400 bp, Setaria italica
  Peptide Sequence Number=SeqID_87005
acgcgaacagcggccaccgcgtcacgggctcgccggcggcgccagcggcgacgagtgcgtccgtggccgtaccattagtgtcctgcagatgcagtcgttgtcggatctacgacagtaaaggatgaaacagtaaaaagtagaaggggaaaaaatacttacaaaggaggaaaaatcttataaggaactgaagttttaatcaccagattcatttactacagtgaaacacagtggatgattcaagagcagttttcaggttacagagacttcaactgggtttgttactgaaacatgatgctaaatatactactacttggtatatctcgtgcaaagccttaaaatgcacacttgatttgctacagtgcaatggatttgtggtccggtgtactcttgtttgcaggtc

SEQ ID NO: 21032 - DNA, 1008 bp, Setaria italica
  Peptide Sequence Number=SeqID_87006
ccgggttgggacaggagtttcattgactcccggagttcaacgctctaataggtccaccgtgagaagcttggcaattgtatagcaacatcgacgtatggccaaaatgctttcccagatgaatctaatcatatcacgagcttttaaaaagtatattgttggtcaaagtttaaaaatgttgagcacatgcaacccaaataacaacaaaatttgtgactagagggagaatagtacatattggttattaattaacaagcaaagaaatgatagaaatttaaccagtacctggatctggatgccatgatgaacgtgagaggaggatgtgttgggtggacagctggtagggatctgctgaccatcttcagacaaaccagcctctgcagccgcagatggtggcagcaggaaacacgctgcgagcgcctcgtgcctcagcgccaccgtcatgttggccatctccaccagatctccccagtacgcagccctgctaccgctactactccagctactgttgttgttgccgtcccttgggatcaccattgccgtgaagattgtcaggcacaagaacagcaggaaccctatcaaatgcgaccaaacgttgagggtctcgttgtggatggagaagatgctgaggatggtctccttcatcggccactcgcaccggtagtagccgtggatgaactcgttgtccttgagccactccggcagcgcctcgtacccgatgagctcacacttcttgctctgcttctccttcttcccgtcatcggcgccgccattccaaggtatgcaggaagaggtagtggtaggagaagaagccatgggtgaagttcctcctccaagctctccggcacctcttggttgcaggcttggctggtgcagtggccgcccttggcctttttttcttgcacataacaccacagcaatgtggttgtgtagctcgtcaagacaaggaaccatgcatcagaagcaagctgctatgctggctggcaatggtggttggctttgttgtctaat

SEQ ID NO: 21033 - DNA, 499 bp, Setaria italica
  Peptide Sequence Number=SeqID_87007
cgtacgccgtgcgctccgagtggcacaggatcaggtggcacgcgctgctcgtcagcaggcacaccatcgcgccggcgaggtacgcgaacagcggccaccgcgtcacgggctcgccggcggcgccagcggcgacgagtgcgtccgtggccgtaccattagtgtcctgcagatgcagtcgttgtcggatctacgacagtaaaggatgaaacagtaaaaagtgaaggggaaaaaatcttacaaaggaggaaaaatcttataaggaactgaagttttaatcaccagattcatttactacagtgaaacacagtggatgattcaagagcagttttcaggttacagagacttcaactgggtttgttactgaaacatgatgctaaatatactactacttggtatatctcgtgcaaagccttaaaatgcacacttgatttgcattattttttagatggtggccaagcatccatatatgcatgccctgtaccttctggatctctgcttt

SEQ ID NO: 21034 - DNA, 435 bp, Setaria italica
  Peptide Sequence Number=SeqID_87008
cgggaggaactcctgaagtgtgtcgcccaggcggtaaagatcggttccgggttcaatgcatgtgacctgttcccgtcgtcgaggctcgtgtgcgccattgatggcacggtgcgcaaggctcgggcgttcacgcggaagacgtttgagctggtggactacgccattgagcaacacagggagcgcaggtcgggggcgagcgccactgacgtcgcggaagacgaggacctgcttggtgtccttttgaggacccaggaggaaggtggcttcggttgcccgctcgacgtgggagatatcaaagccatcctcgctgtaagtactctcttttttagggactctttaatttatatttatattagcgtgtactgtatctatctttctttaattaatcatcgttttcattgaagcaactccatttccatggtacgagcaagaggg

SEQ ID NO: 21035 - DNA, 1619 bp, Setaria italica
  Peptide Sequence Number=SeqID_87009
gagtgtactacgtgacttccttgtccagtcccacagtgcgcacataaaactgaaaactgacgagccacatctagatgctctgaaccagtttccagccgggctagctcagctccgcgagccccatggctccggcgagtcctgtcgtcgtcctcgtcttcttcgccgtaaccgtcccgctctctgctgctgcgggggcgacactggtgttccccaaggaagccctccccaccaagtcggggtacctccccatcccgcccgccaacgcctcgctcttcttcgccttctacgaggccacccaaccgctcaccgcgccggcctccacgccgctcctcctctggctgcagggcgggcccggctgctccagcctcctcggcaacttcttcgagctcggcccctacttcgtgacccccgacgccgagaccctctctcccaaccccttcgcgtggaaccgccgcttcgggctgctcttcatcgacagcccgctcggtaccgggttcagcgccgcgccgtcccccgccgacatccccaccaaccagtccgtcatcgccgcgcacatcctcgccgcgctgcagtcgttcctcgccctcgaccccagctttcacgcgcggccgttcttcctcgccggcgagagctacgccggcaagtacgtcccagcgacgggggcgcacatcctggacgtgaacccgacgctgccggaggcgcggcgcgtcaacctccgcggcgtggcgatcggcaacgggctcacgcaccccgtcgcgcaggtggccacgcacgcggactcggcctacttcacgggcctcatcaacgcgcggcagaagcgggagctcgaggagctgcaggcggaggcggtggcgctgacgcgcgcggagcggtggcgcgaggcgtcggacgcgcgggggcgggtgctgtcgcggctgcagaacatgaccggcctggccacgctgtacgacgcggcgaagcagcggccgtaccagacggagcccgtggccgcgttcctgaacagggcggaggccaaggcggcgctgggcgcgcgcggggacgtggcgtgggaggagtgcagcgacgcggtgggcgccgcgatgcacgcggacgtgatgaggagcgtgaggcccgaggcggagtcgctgctgcggcgcacgcgcgtgctgctgtaccagggcgtccgcgacctcatggacggcgtcgtgtcgacggaggcgtggctcggcggcgtgggatggcacgggctgcacgcgttcctcgatgccgaccgcgccgtgtggcggacgcggggcgacggggagctcgcgggctacgtgcagtgctccggcgcgctctcgcacgcggtggtgtacggggccgggcatctcgtgccggcggacaacggccgcgccgcgcaggagatgatcgaggattgggtgctgcaggcggggccgttcgggcgccgcggtggcgacggcttgaggtgcgccgcctgatgcctgtccgcgcgaacgagcttgttgcagcttacaactgtgcaccaataattcaataatcgattgatgatattgttactgggttttggatagattcaatcgttgtgtttgctgagtgatgctaattggaatagaaaatacacttcctagaaaaaaaaaaaa

SEQ ID NO: 21036 - DNA, 348 bp, Setaria italica
  Peptide Sequence Number=SeqID_87010
ttgccgcagctcgcggagataacttgcccactccgcctcgcacaacaccaccaccacccgacccgatccgtcgccactcgagatggccgccgccgaccccatggcgccgcacgcgctcctcctcccttacccggcgcagggccacgtgatcccgttgatggagctcgcccaccgcctcctcgaccggggcttcgccgtcaccttcgtcaacaccgagttcaaccaccgccgcgtcgtgggcgccgccgccgcgggcgcgtcatcatcagctggaggccggcgcctgcggctcgtgggggtcgcggacgggatggacgacggagaggaccgcgacaacctgctccggct

SEQ ID NO: 21037 - DNA, 657 bp, Setaria italica
  Peptide Sequence Number=SeqID_87011
gccgccaacttccaccacttccgtaacttcatcttcttcagcaccttctttgtttggcgaatagtaaaatggttcactctgaactaacgattcaatattcctcgtaatttggcaatatccttgatggttgaggatataatctgtgcatggaccactcaagcggtgcgtccaatcgcagtgccggcacttccatagacctttggatggatcgaagaagacgctcttgtcctcctcctctgttgtggccgccgccgccgccgccaccgccttgaggaggtcgtccatgaccacctcgcctccgttgtcgccgtcgccagaggcagccatcttcttcttcttcatctcccttgtctggaggcccccggaagcggcggcggagtcctcttcttcgcccatggcctggggcggctgcacgccctcccacggcttctccacctccatcatcttcctcctcctcctctgctgctgcgctccctgggggaagccgtcagcagggaattactgttaataatgagtcggagtcggaggcaggcaggtggattgggatggaccagaccagtcttttatagcgtcgtggcggcgattaggtagaagccgaagccgaagcagaagaagagggtggtgtgatgtgacagggctgcctctgcccgatccctg

SEQ ID NO: 21038 - DNA, 479 bp, Setaria italica
  misc_feature (1)..(33): n is a, c, g, or t
  Peptide Sequence Number=SeqID_87012
nnnnnnnnnnnnnnnnnnnnnnnnnnnnnnnnnagacatatatgcttctttctttacaattggtcaatctgactaaaacatgctattgcacgtgaaatcggacgagaaacatcattcaaaacatctcctggcaggctggcacagatctgaatcataattacacaaaaatactacacaacaaaattgtttttttccaactgaatattttggaaccacattaggcaaaactgtatgaaccgggcaatagatactggtaggctaactgcacatagcattgtgttcccatcttaatggttgaagtgcctaatacgtactagcataaatcctgatctgttaatacttcacatcattttttgtgggcctcattcctactcaccgatgcagagaagctaggcggagggaggttacgcggcatcgatgcactgccagatatgtcacccccacacttccgattggagtgttcgtctgttgtctaagta

SEQ ID NO: 21039 - DNA, 763 bp, Setaria italica
  Peptide Sequence Number=SeqID_87013
caaatacgacaatgaccccactcaatcgaagcatgtaaacatgaatagatttctaacattcgcgccaaggatgggggatagctcacctcaccgatgcagagaagctaggcggagggaggtacgcggcatcgatgcactgccagatatgtcacccccacacttccgattggagtgtcgctgtgcaaaaaaaaaaagctaatcaagagcgtacatcaggatacattgcccactggagtgcgcaggcctcagaacttctcacggtcagaaaccgcagggccacgagtccacgacctgcatcagagctcgctggagacggcctgcaacgccggcacgaacagctgtgggtcagcgcaagtgtagaacgtcctccaggaactcgatttggtgcaggagaactcgatttggaggacctacaccgccggcgtgagcggcgagaggtcggcgcaggcgccgaagaagccctccgagaactcgatctggagcggagaacttgatttggtggaaggcgtggtcgatttggtgtgccgtggagggaatctgcaagggatacgggagaggcgcaggggatccggaggaggctgcgtctggcttcgtgcccgcgccgcgccagtcaaggacgggcaacacgagaaccgcgcgcaagtgctagctcaaccactgctgcgcctcagcggccggccggttggagttaggtagcggatctcggcggcgcgtcgggggcggcgcttgtaaataattagggtttggttggtcgttcgttgta

SEQ ID NO: 21040 - DNA, 787 bp, Setaria italica
  Peptide Sequence Number=SeqID_87014
tagtggatttcatccaaccgagggaattccacatatcttgcttgaggattccacatgcttatcatagcaagcagctgactgtagcagacagggtctctgagctgagtaaaccagtccgacttgttaatcactcctctcatcactcaaaatttgtgatggaacaggatcatcgagcttatgaagatgatgatcacaatactaagaggaaagcggccaatttttgtgcttccaccagtgctagaactgtgaagagaaaactagaagcgagtacgatgccacctagcgatttagttagaagaacaggcaagaaacagaaagtagctgcatatgaagttcggcaggtaaccaagaatgtgttgcctctgaagatgtctgctaggaatgacattggtggcgatcgcttttgtaggcctttaagtggcaaatgcaatgaccttgccaagagcaacaataccaagagaaaaccagattgcaaagttcttccttcctctgaaatacctttgcacataagagaagagaacgagtgctcagtggctagctgcagcgtaaattacatggaatactgtaccaatgatgacgaacagtcagtcagaatctgcggttgcttccctgatgatgccatgtctgcatgtccatctatgtctgcccaggagaataatgatgacaatggatctggtttacatatgaatatacatgagctggagctgcaagcataccaatcaacagtcagagctttccacgccgcgggaccattgacatgggagcaggagtcactactgacaaacct

SEQ ID NO: 21041 - DNA, 669 bp, Setaria italica
  Peptide Sequence Number=SeqID_87015
ttctcaagtttcatctgaaatgttttcacgtcaaaaacatggtgtctgcaatccacagttccagaacagtaagcttcataaaacaggagggaatgtggattctgagccaatgatgcatgctgaagaaatggatgagcatgtagaatgggattgcaggccagatggtgatcaggagggtagctgcacagggacaagaagtgaggtagttgaatcttcaacaataaacctaattcactctcctgcaccttctgtaaacaagtgtacaagtaggatgatgccagatcctccagatccatactttgttgccactcaacacatgagtagagaagatgcatctacaacgctaaatactgcagggtctgacagtcttgtcagatcaggtaaaagaaagcaagatgatggtgccgacaactgccacagcagggactcctgtaacaacaaaaggaagagggtcgaaaagtacaattcactctctgatgctgattccggtgatgataaaatatctagcgtcaatgttgctggtgctgacagtcaatcagctaaaaatcacctcagcaaagtggacagccaaggggatggagatgcaatgcgtaaaggcaatgctaattcaagtgatgacaagatatttgatgataatgttgctggtgctgacagtcaatcagctgaatt

SEQ ID NO: 21042 - DNA, 720 bp, Setaria italica
  Peptide Sequence Number=SeqID_87016
aagctgatcactcgatcgtcaccgacaagctagctagctgcgcccgagtgagtgaacaagtgatggctcggggaagaggcagagcgagcggcggcggcctcgccgcggcgctcctgatcattgccctcctcgtggcgacgtcgagcgccccgatcgccgaggcggcggcgtcgcacatggtcggcgactacggcggctggaagttcaacgtcgaccggtggaccaaggggagaaccttccgcgccggcgaccagctcgtgttcaggtacaaccgggcggtgcacgacgtggcggtggtggacgcggcggcgtaccggagctgcgtggtgcccaggggcgccaaggtgctgcggagcgggcgcgacaaggtaaggctcggcaggggcacgcactacttcgtctgcaccgtgcgggggcactgccaggccggcatgaagatcgccgtcagggcagtgtaggggcagggctgggccgggccgtctggctcccatgcatccggccttaaggttcgtgggagcctgaaaaatctgatgctatctagtggcgtgcgtgctcatcgtgtattcgtgtcgttgtttgtgatgctatccaggctccgtgtttgttgccgttgttgtggtatgtgtgtgcaactagtgtggctctgtgagtcagcttggttgtgacttgtgtacgttgtgagctgcgaaatacagtcaccttgttagttaaattacaaaa

SEQ ID NO: 21043 - DNA, 269 bp, Setaria italica
  Peptide Sequence Number=SeqID_87017
gccgacatctccgccttcctccaccggcaactccaccgcaagcacggacgacctccgcctcgcctcctccgccgacagcggggtggccgacggcgacggcgacggcgacgtcgtcagcgccacccccgcgccggcgccggctccggtcgaggcggcgtcgccgtggggcgacctggaggaagtgctgcggcgtgcggcgaccaaggaccggacggtgatcatgacgcagatcaacgcggcgtggacgcgcccgggctccctgctcgacc

SEQ ID NO: 21044 - DNA, 1543 bp, Setaria italica
  Peptide Sequence Number=SeqID_87018
ttacttacttatttacctttatttaacttatttagttaaatttgttacttcatgttataggtatgtgttcctgaggccattttaatgaaaagatactaaatgacacttgtgctgttatatcatccataaggtcatgataacttattactgtatatgtacaattttgaaacagctctgaaaggtggacaatagatcagttgagactacactcctcagagccatcagagctctcttcatcatcagccgatgacaaacctctatcagcagcacgtagtactagattaagtaatcctgtgctgtccagcctgtcctcaaggtcctctgatgaatcttcttcttcagctgattgttgcctacgctgtgatgccagtaagtgtcggatcaacagctctggtaaatcaaagtgccagagcttggctcttctcttgcgaggtctcaactcctcaacatttaccacaggcgcccgctcgatggcagagggagtccacatttttacatcattatcaattccactacttgcaattgtcatatcatgaggatgaggctcaatgcaattcacaacacactcatcaccttccatggctcgcaaaaacctcccatctctctttctccaaataaatatccgaccacagtctgatccactggcaacatattcatcatttggcccaatgaaagtcacgcgcttcacggtttcacgattgcgatgaccaacatatacctgaggtgcaggttgagcaatatcttgtccagatgcagccattgttgatttgcaaccttcattcactccaatctttatagatgactttggatcagatcccagccctccatttttagggaataggtaaatattctcttcattataagatacaagcagctcactcaggtgagagaatgctaaccctgttatcccaacatgtttatcgtcaacaagatgtgatggacaatagcaatcagatgggtgaccgaaatcagatgacccatcccacttgtgcttgcggatgtcatacacacgagcatatgcattgcttcctccaacagcaaaaagatttgggttcctaggatctatcgcaatggcattaaggtgaacacaagagaatcctgatttacgcacagagcttctgcagagtagtagttttgtggctgtgcttgttctgagatcaaaatgttgaacaaggccatcctcgccacagctgtaaaagatataagggctaccaggctctacagccacattatgagcccttccctcatgttcaccaagcaacgtagtggacacatctccaccatcctgtatcttggcaagtctcacctcgccatcagcgccacaagtgacaatggtccgatcatctgtgccgggcatgaagcgtgcctggaacacattgccgccatggcctgaatggaactccaatttgttggcgccagtggcccagtcccacagcatcaccatctggtcatcggaccctgatatgagggtgtcaccagcatcattgaagcccactgtgttgacacagcccgtgtgcctctcaagcttccggtgaagctggag

SEQ ID NO: 21045 - DNA, 827 bp, Setaria italica
  misc_feature (1)..(87): n is a, c, g, or t
  Peptide Sequence Number=SeqID_87019
nnnnnnnnnnnnnnnnnnnnnnnnnnnnnnnnnnnnnnnnnnnnnnnnnnnnnnnnnnnnnnnnnnnnnnnnnnnnnnnnnnnnnnnctttttatgatgtcttggtcagcctggcacacaacttccacggttcaaaatttttcattaaaatggcctcaggaacacatacctataacatagaaatgacaagatactaaatgacacttgtgctgttatatcatccataaggtcatgataacttattactgtatatgtacaattttgaaacagctctgaaaggtggacaatagatcagttgagactacactcctcagagccatcagagctctcttcatcatcagccgatgacaaacctctatcagcagcacgtagtactagattaagtaatcctgtgctgtccagcctgtcctcaaggtcctctgatgaatcttcttcttcagctgattgttgcctacgctgtgatgccagtaagtgtcggatcaacagctctggtaaatcaaagtgccagagcttggctcttctcttgcgaggtctcaactcctcaacatttaccacagggagcaaccaaacaaggaatgtactcaagtaaatcgtaaatatttaaattttacatatcaaaggaaaatggatgatgctgaactgtaaagagttgaggaagaagtgatatacagatgcctccaatagatcaagaaatatgtattgcatctttacaaacagatagcctgctagatactatatctatatctaaaagtaatgcttaataccatacccacgtggagaatataggttattaggttgactgaaaatagagatgataaggagacatt

SEQ ID NO: 21046 - DNA, 406 bp, Setaria italica
  Peptide Sequence Number=SeqID_87020
accattggagcaccatgtgccacaaggtgatgcgcttgaggctgattggaatgctaagttcgcagagtatgaaaagaagtatccagaggatgcagcaactcttaaaattatcatctcaggggagctgccggctgattgggttgatgttcttcctaaatacactcaggcaagcccagcagatgccaccagaaatctctctcagcagtgcttgaatgcacttgctaaagtgttgcctggtcttcttggaggtagtgctgatcttgcgccctccaacatgacactacttaaaatgtttggcgacttccagagggatacacctgaggagcgcaatgtccgttttggagtcagggagcatggaatgggtgccatttgcaacggcattgctctgcacagtccaggtctcgtt

SEQ ID NO: 21047 - DNA, 266 bp, Setaria italica
  Peptide Sequence Number=SeqID_87021
cgggggagggcgcgccgcgcccaccacctcctcggcgcaggcggcctccttcaccgaactgctcacggggatggccgcggccacggcggccgccggctccgcccccgccgaccacaagcagcagcagtcgcccccctggcagccaatggctgcccccgcgatcgccgactacatcgggttcgcgcagccccggaaggccgccggacacgcgattgcgcactccttcgcctccccggctccccatctcgccaacattgcgccgatcg

SEQ ID NO: 21048 - DNA, 404 bp, Setaria italica
  Peptide Sequence Number=SeqID_87022
ggcgtcggcgtcaacgttaatcctggcagcggcaagcccggtggcaccacggtcggcgttgggaagggcggggttggcgtcaacgtgaagccccgcgggaagcccgtccacgtcaacgtctctcctttccggtacaactacgccgcaacggagacgcagctgcacgacgaccccagcgtcgcgctcttcttccaggagaaggacctccacgccggcaagaaggtgaccgtccagttcaccggcaccgcgggcgccggcacgaagttcctcccacgaagcgaggccgaggccatcccgttctcctccgagaaggtgcccgagatcctgagccgcttctcggtgaacccggacttccgttcgtaggtcggtcggtagtattggtcgtctagtacgttcttgtcgtt

SEQ ID NO: 21049 - DNA, 1420 bp, Setaria italica
  Peptide Sequence Number=SeqID_87023
aacgttcaaccctggctacggcaaacccggcgggaccacggttggcgtcgggaagggtggcgtcggcgttaatgtcaatcccggcaagcccagtggcaccacggtcggcgttggcaagggcggagtaggcgtcaacgtcaatcctggctacggcaagcccggtggcaccaccgtcggcgtcggcaagggcggagtgggcgtcaacgtcagtcctggcaagccgggtggcaccaccgttggtgttggcaaaggcggcgtcggtgtcggcgtgaaccccggctacggcaagccgggcggcaccacggtcggcgtcgggaagggcggggttggcgtcaacgtgaagccccgcgggaagcccgtccacgtcaacgtctctcctttccggtacaactacgccgcaacggagacgcagctgcacgacgaccccagcgtcgcgctcttcttccaggagaaggacctccacgccggcaagaaggtgaccgtccagttcaccggcaccgcgggcgccggcacgaagttcctcccacgaagcgaggccgaggccatcccgttctcctccgagaaggtgcccgagatcctgagccgcttctcggtgaacccggactccgtcgaggcggcggagatggcgcagacgctgcgcgactgcgaggcgcccgcggccaggggcgagaagaaggcctgcgccacgtcgcacgagtccatggtcgacttcgccacgtccagcctcgggaccagccacgtgagggccgtctcgaccgtcgtggcgaagccggggtcgccgaagcaggagtacaccgtggccggcgtgaagcgcgccgccggcaccggcgacgacggccggctcgtcgcctgccacgcggagccctacgcgtacgccgtgttcatgtgccacctgacgcggcagacgcgggcgtactcggtgtcgatggtcggcagggacggcacggccgtggacgccgtcgcggtgtgccacgccgacacctccgggtggaaccccaagcacgtcgcgttccaggtgctcgacgtgaagcccggcaccgttccggtctgtcacttcctgccgcaggaccacgtcgtctggacccgcagcggctgaccgctggatggccgccgtttgctccggccgccaacgttcgtgctgcctgatggtttcatttacgtttagtacctctaggcatactgtcatatggtatcatgagtttgcttatgttttcagtacttgatacttgtatggatggtgttgccagccagtatcgatcacctgctagattctgttgtatagttctaaataaacagacgtctctttagcgttgctgttctcagaaacctaaaaaaaaaaaaaaagccaaggactagaaccgactaggaataggaccgaaccgtttaagaactaaccggaaccgaaccaaacgttaacgta

SEQ ID NO: 21050 - DNA, 1061 bp, Setaria italica
  Peptide Sequence Number=SeqID_87024
tttttttagaatagatcacagatgaaattaactagccaaacaggtcggcgagatcatagatttgcatagcaccgatcaaatctcaagacatcctttttcacatgattatgatagaattatgcattgaacaataatcatgaccgattcatgatattattaggttttgttccaagttccaacttccgaggacaccaccatagtagcttccacctagaagggcttggttgggcaaaacccatttacagtcgtaccgccatccaccgagatcgtctggccggtaatgtaagtggaaccaggcatgcaaagaaaagcaacaagtgctgatatttctccaggttctccaacacgcccaagcggagttcgactcacaacttgctccttgaatgagttactctccaatagcttttcagtaagtgaagtcgtgatgtaccacggggcaacagagttggctctgatgttgtctctcgcccattcgcatgctaaggtcttggttaactggttaatggcacctttagtcatagcatatatagttccgctaaacacacttactactccggcaactgatgatatgaagacaatgctgcctgaaccagacaatttcaaaagaggatgtgcaatttggcacaagtgataggcagattccagattagtggccatcaaaaatgagtattcctctgcagaaaattcagtggttggtttccttatgtttgttcccacattgtttacaaggatgtcgagcttgccgccgaagcggtcggcgacctcacggagcaggcgctcccgctggtcccgcgcggagaggtcgcacacggagccggtgacgcggaaccccctggcctcccactccttgatgcgctcgccgagctcctcctccttccgggagcaagtgtgcacggccgcccccagcgccgccagttcctccacgaccgcacgcccgatgccgcgtgtgccgccggtgacgagggccgtcttgccgtggagcgcccatcttcccgaggaccctatcgccgtgcccgaggtctccgccgccgccatctcgctgctgctcctcccgttggtct

SEQ ID NO: 21051 - DNA, 408 bp, Setaria italica
  Peptide Sequence Number=SeqID_87025
actgaaacaagagcgaggtccaggtatggcatcccaattcactaaggatgaagcatacaagtgctaactaagtaacacaaggaatgaaactttgacaagtcagaaaagtttgggtgcctattcttcttcttaatgaaaaatcgccaagctcttcctaggttgatctaatttttgacaagtcagaaaagcaacaagaacataaaaagcaaatttggtcccactggaatcttttgtctatcctcagctcatcaccaaagattaaaatcctaagtaacatgaaaaatgaaatattgccaggtgagttgcaactatgtgtgatagaagtgctaactaagtaacaacaaaaatgaacagttaatatgtgcctcaaaatgccatcaaccttgagataacaaacactgctgcacc

SEQ ID NO: 21052 - DNA, 507 bp, Setaria italica
  Peptide Sequence Number=SeqID_87026
ccccaccaagaactggaagtcccttgattcgcttgaaaagagtgttcaattcgttctttgtgcagtagcaggtgccggtctcgctgtatggtttccttatgcaatatctgagcctgaattttcccaaggaacaagatggtcgctacgattattcttatcttggcgttttgagaaaactagagctcatttcttgcgtgaactggtgattctctttgggggtgtagagatccacaattttgtgacagagaccctggaacttgcgaaatatctttcgatcacaatccgccattaccctgacagtcttcacatctcataaatgacactcccttatttaatgctagagatgttgccaggttaactcactggaatacgacgtcctggtcatattcctcttatttaatcacacaccagccgctcttacctgctaaaacattatcaagatagaacagctcgtatgcatgaagattcagttatataaatgctacaatccaaaaactaattttgtga

SEQ ID NO: 21053 - DNA, 561 bp, Setaria italica
  Peptide Sequence Number=SeqID_87027
tggtgcacttttctataaactcggtcaaagctagagaagtttgacttaaagagaaaaaaactaaaacgacctgcattttgaaatggagggagtactttataaccaataggcacagctttgctgcaattcacttgatacccatattgcataccaataatttaaatatgatttcaagcacagctaccagcatagaaacagaaaatggctagcaatctggttagaccaatcagtagattctgatgtcagcatgccaactgactacaagatggccagattttgaacatatgaagcaaaatcagtgaaattagtgttagcacgtgatccaaactccaagatatataatacagaatttaatggcatcttggaacccactgcctgaaagggattagtgtagttagcgagttagcagaagggccaagcaatatgaagaatgtaagcatttcagttaagtcaaaaccagttagagaaaacctgatctaagctttcaagatggtaaattaggcatgaagagtaagttatgttaaatggtcagtatccatacttctgattgaaacgctgtat

SEQ ID NO: 21054 - DNA, 619 bp, Setaria italica
  Peptide Sequence Number=SeqID_87028
tgaaaaagtcccacctgaatttcattaaaccacagatgccgggctagccggtgatggttttggtgcaaagcaccttacaagcgttgggccattgaacacccagaagaacatgagcataaggatacaacaccagggtacaacacagagaggagagaaacacaactcactaacaattcaatgacaaagcacgacacagccgaaaaacaaccatcgatcgctggatagcgccaccatcgaacaacatgtttgacagttatgccgtagctgttgcaccttgcaccacccttcgtatttttagcttgctccaagtcatgatccatgaatatgattgtatcatctgcatattgcagaatagataacccatcatccaccaaatgaggaatgacccctctaatttggccatcttcctttgctctcttaatcaaaatagagagcatgtctgccacaatattaaataatattggtgatataggatctccttgtctaagactttttttttagaagtagtgcccaatgtcatcattaactttgatgcccacactccctcctgaaacaaaattttcaatccatctgcaccattttggttaaaccccttaaggcctcgttcggcagcaaagga

SEQ ID NO: 21055 - DNA, 432 bp, Setaria italica
  Peptide Sequence Number=SeqID_87029
ctgcgattacattgcataatggagaaatagattgccctgaatttacctgagttgcattgtccaaggtaacctctcctctggtgcaggtgcggttgctcagatcaggtgtgaatgggttgcagagcagcggcatcaacggccctgactgattgtagtagaaaggcgttgctaccggaggaggagaaggaaagttctgattcgacacgttggtgatcacctggttcaccagattcaccaactggaatgtgacttgcctgcttctatacagggactcatttgctgtggcaggttcaacacaggggataatctcatccagggcagtgtgttctataggatgagcaacccactcctccattgcaacacaagtatctgacgtgacaattattgtgatgtttattagaatacttacttgtgcagaagaaggaagacacc

SEQ ID NO: 21056 - DNA, 1494 bp, Setaria italica
  misc_feature (1488)..(1488): n is a, c, g, or t
  Peptide Sequence Number=SeqID_87030
tttttttttttaggaagcaaactgatgaccatgcaatccttccagatcataactgtatgtacaccaccaatggccaatctcaacacaaatccagctaccgtcagtacgaaaatgcgcataaacctcggctacgaaaatcagcaagcaaccaacagtccaacaatcaagggtaccgcgatctacattacaaaaaccactaccatggaccatggagtatgcacaggcatggatgggaactgtcatcaagcgtgtggggccgttggggccggcttgtcttccaccgggtactgctggtgctgggcgatgaactgcttgttgtacacgcggtggcgccgctccctcgcgtagatcacccagaagatcagggacagcatcactgccgcggagaccatcaccaggccgatgtacacccacttgctgtaccgctgcaggccggggcagtagtcctggttgatggtcgtgaacgtgtcgcggacgaaggtgcagtcctccagctgaatcaggaaagggccgtactggtacaacccctggctcaccgtcacacccgcggccatctgaccatagatcctgggggtgacgcgccccaccgtggtgcagatctcggctcctgagacagtggtggtctggcattcaaagctcttgtaaacctgagttgcattgtccaaggtaacctctcctctggtgcaggtgcggttgctcagatcaggtgtgaatgggttgcagagcagcggcatcaacggccctgactgattgtagtagaaaggcgttgctaccggaggaggagaaggaaagttctgattcgacacgttggtgatcacctggttcaccagattcaccaactggaatgtgacttgcctgcttctatacagggactcatttgctgtggcaggttcaacacaggggataatctcatccagggcagtgtgttctataggatgagcaacccactcctccattgcaacacaagtatctgacgtgacattgtgcagaagaaggaagacaccgcacaggataaacgttccagtaaccagtatccatccaataacaaccaagacggagacgaggaattcaagcccaaagatggataacacgaagccaataaatgccagaagaagcattacagccgcaatgataattaaagcaagccgcacttggtttagcaattttttaatctttgcagcattatctgttgttttaatagcaagatcagtggctgatgagttcaactttgcttgaatttcatcaatctgactttgcatatcggaaggcagtaagaatcgcccaatgtcaaccttctttgcagcagataaactatcagacaggttcctaaggttgtcaacagtataatttgcctggctaacaacaaatttcagagtatgcgttgtgcttttgtggaattttccctggccatcatataacataatacatccagtaattgcagcacaagtgaacaatattagaagtatcaatgacaaagcatatgctgcncgggaa

SEQ ID NO: 21057 - DNA, 879 bp, Setaria italica
  Peptide Sequence Number=SeqID_87031
aaaaggtggcggagcgcgtcggcctcttcgccttcctgctcaccttcctcctctcctccaccacggaggcgctgcccatcttcctgcaggagcgcgaaatcctcgccaaggagacgtcgtcgggggcctaccgcgtgtcctcctacgcgctcgccaacgccgtcgtgttcctgcccttccagctggcgctcgccgtcgtgttcgccgcgccggtgtactggctcgcggggctccggcgcacggcggcggcgttcggctacttcctgctggtggtgtggctcatcctgtacacggccaactcggtggtggtgtgcttcgcagcggcggcgccggacttcgtggtggggaacgcggcgatccagggcgtcatgggctccttcttcctcttctcgggctacttcatcgcgcggtcggcgatgccgggggctgggtgttcatgcactacctgtcgctcttcaagtggccgttcgaggcgcttgcttggtcaacgagttcgccggcggcgggaggtgcgtggtgcgggcgctgggctcctgcgtggccaccggggacgaggtgctgcgccgcgagggcctcggggaggagtgccggtggcgcaacgtcggcgtcatggtggccttcatggcgtcctacaggctgctgggctacgccgtgctcaggatcaggtgcaccctcgcgctcaacagaggggccatggccgacatcagcctcggccgccgcctcaaaagccagctagccatcgtcggcgccgcggcctcgtcctctgctacaacaccgtccgtgtcactcgctgctgccagatgataataagggcttaattgaacttgtataatttcaatttcttaagatctgtcgaattttggatcgttggatactaaa

SEQ ID NO: 21058 - DNA, 512 bp, Setaria italica
  Peptide Sequence Number=SeqID_87032
gttgcggaatcgactccgcccgcgccgcccctcgaactggaatcctctactgttgtgccgccgtcgtgattcgccggaatcgccggaatcgacaagcaggtacatcttctcgacgtttggcgtgcatcttctcttgtcgattccgcttctcctttttcctaatcgcctcgtgttcggatccgtttcgagtccatatccttccatacgcaagacgcgcctcgggatcgaatcgaagtcgccctagaactcggcttccgggtcggagatggagccgccgactcgacgacctatatagctccaccgatcgaggcggttgatcttcttggggatttctcacgccttggtgggagggcgagtccaagaacctgccaagaagcgcgaagagacggtgtgcgcggcggcggcggcggggagcgatgaggatcaggaaagggaaccaggtggaggtgtggacgcaggacgcggcgtcgccggtgggcgcgtggcgcgtcggggaatcacgtggggcaacg

SEQ ID NO: 21059 - DNA, 977 bp, Setaria italica
  Peptide Sequence Number=SeqID_87033
ccgcggtgtagaaagcggggcgcgaggtagtaggatcgatcggtacctcgtcccgttgccccgccgctacgtgtacctcctcggtactcgcctggcttccatggtgtgcctggctaggaaggtggattagccgccaggcggcgtgagtgcgtacggtcgcgggtcctccagccatggacgccggaggtggagtcggcggcggtgcaggcgtgggcgccgccacggccggcggctcgtcgtatgggctcgtccgcaccgtggtggggtactcgacctcgcctctcttcttctggctcctcaccgtcgtgctcgtcgccgcgatccacatcgcctccggctccaagccctccaggagcgatgagaaggagagggatgagaagaagaaggcgcggcgcgatgggttcgccgctgccgaggagagggaggcgtcgggcaggggcgacgaccgggtcctggagatgatgcgcagtttcagcttcgtgcaggcgaccgaggaggatttcatggagggtatggccgcctacgagtacagccgcgtcgacgccggcgcggagcacgagcagtacaaccgcgtcgacgccggcacagcgcacgagcttgtcgagcccgagccgtttgcgccggcgccggcgccaagcctcagcttcaagttccagcaccagatagccgaaattccgcgggaggcggcggccaagcacgagcatgaagacgaagcagaggaaacagagctgctattggaagaacatgtggaagagcagaggagagaggttgtggagcaggccgcgccatcaaaggtcgtctcaaccacgcacaactaccagttcttgacggagcgcgacttccgggggttcatcagggagccagaggccatgacggtgcgcgtccaggaggctttcatgccgccgtcgccgacaccgtcgccgccgctgccacagcagcacgaggaggtctggggggccaacatccgtcccccgcac

SEQ ID NO: 21060 - DNA, 724 bp, Setaria italica
  Peptide Sequence Number=SeqID_87034
gcggtcccacgggtcgccccgcgcgccgccgaagcgtgtgccgggcaggccgggggcgcggagatgtgccgggatggagaaggacgagcccgaggagcggagggagatgttgagagaggtgaagttggccgggatggtgccggtgcccgtggccgcgatcaccgccggctccgcctgctgcagcagccactcgatggtctcgccgtccgtcttgtgccccagctccctagtcagctggaacacccgcgcagcgcaaatcgccggcatccggatgcgccgcccgcgcccatcgaccttcgtgtgccggtccttggtggaggtccgcttcggcggcgccagcttcctcacctgcaactctcccggacccgccgccccattagccccggcgccggcgcccacaccagccgccggggacgtggagcaaggctgctcctccttcttctctagcagctgcaaggggaagttggggcggcgacctccgccggcgtctccgctgacgtccatggccgattagaccatggtatatatacacaagatggtgttcttttgctcagggagctggagcctggtggagtatgggtagtaatggatttggtgacctacgacgaacagttcttgtggggctgatgagctgatttgttgtgatgatggtggggcggtggaggcacggcagcgccgtcggcggcggcgttggagcgagaggcagagagtgggatcaaacagc

SEQ ID NO: 21061 - DNA, 897 bp, Setaria italica
  misc_feature (1)..(78): n is a, c, g, or t
  Peptide Sequence Number=SeqID_87035
nnnnnnnnnnnnnnnnnnnnnnnnnnnnnnnnnnnnnnnnnnnnnnnnnnnnnnnnnnnnnnnnnnnnnnnnnnnnnnaattggcaagaagctgagcacattcagccaagctgaggatcctcaagagaaacaaagcagtgtcatcatacatcaacaagaggttgcatagtgatctactggaccccaacctatgaagcagtagagagatgtgacaagaggttgatggaagcagtggaacaggtcacactaggttactatgaacaaccgcgcagtgcttattgtagaagatatttctagactttaccctcccagaggcactcgacagagggagtgctgtcactgcgattctttgttgatggaatacgcagtaagagatcccggagatgggctggtggctggaggcccatggcagaagcacgctcccagcgctgaagcctagaaacaccaatacatgggccaaacttcgtgtccatgtcaaattgtcgcagctgctcctcttggtcaccaaaatcatctttgagatcccaggaaccatgagaaactagtgctgatgtctgagcagtgtccggggccccgacagaggcccctccagtgtactgctgtgttttcttcttggaagatgatgacgcctttgtcacacctcctttcttttctgccggtaaaaatctttcatgccactagatgccatgtttgacaattctttagtccgagaaaccgggcagatgagtccgcgtccggacggatctgcacaactgtagatcgagggatgagcggagctgtggcggcgcagcggcaggtgactggggagcgcgcggcgggtcgagggtgtggggtggggcggcggcgtcgtgtgctcttggctgcggttggggactcgcgtgcgtgcgtgcgtggacg

SEQ ID NO: 21062 - DNA, 546 bp, Setaria italica
  Peptide Sequence Number=SeqID_87036
cgttcaaagtgtggcttctgaacggcaacatgcaatccaatgggttcttgtactgggtttataagaatcacaagtatatcatcaccctgaacacggcgacaatgaggttctcggtcgaggagctcccccaattcctgaagaatcggtgctgtagcttcgatgttggtgaaacaaacagtggtgagcgttgtattgtctatgctgttgacttcacaattggtgtgatgttgcgaagaacggatagtgatggcgttgagaagtggatgctgtacagggccaccccattagatacacagcttgatggggttctaaggaaactgaagggcaactataatgagctgcttgtcgtggcagtcagggatggctttgcatacttggcaacttcaaagaatgtctatgatccccagaacccaagttggtttttgtccctctgcctggaaacaatgaaactggagaatctgtttcagaggccatataatagtggtggacacccttatgttatggcatggcctccttgtttagttcgtaactatgggaggcttgcac

SEQ ID NO: 21063 - DNA, 1096 bp, Setaria italica
  misc_feature (1)..(14): n is a, c, g, or t
  Peptide Sequence Number=SeqID_87037
nnnnnnnnnnnnnnttttttttttttggttagttacaactcatctcctgttacagcaagttaacaatgcctcagacagcacgcatcttcagcttgccaacaacatctgcatcccgtatgtgcaccaagttacactcaatcgcacgcatcagcaaaaaaaaagccagttcactgaagctaacagtgcaatgcagcaacttttttccttcccattaagattcattcaagagagttgtccacaatgacatcgaagctcagttttcctggcattgcaattcgcttaaacagatgctgccagcaagcgtcctcgttccaaatttttcagctttggatcaacaagagtttacagatgttgatccagatgaacaacacacatgactcataactagtaaaaatcaaaccttactcttatggtcttcgattttccggaacgatgtgaaccaccgcttccaggaagcgtctccctgctgctcaatccatgacaggcaacagctgtcgaagaggcagaacacgttcacatacaggagctggtaccgcacggggatgaagcggaagttcgcgatctgcacggctggccagatggttccacccactaccagagcaggaatgaaatcccttttcacatcttccttcacctgctctacactccttccttggccgagacccacgtatgagaagaacaggagaagatctaatggtccaaagaggaaaccatccgcagcgactttagaggcaacaaatttgaatgtattaggctgaaatctccgccggatgatgcggtccaggtactcataccagtaatgtccgactggtccgacgaaagcaaatccaaaggaacttgtgatgcccaccctcctccaatcaactttgaactctttatctttatccttatcctcgggggggttgttggcgcggcgggcggagtagtggtgggtgacggcctgggcgccgatgtcgccgaggccccagaggatgccggagctgacgacctgcgtgcgcaccgggtgcgaggccaggcactgctggtaccatcgccatagccgccgcatccccaccgcgccgggcaagccaagagagaattccacggggaagaagag

SEQ ID NO: 21064 - DNA, 922 bp, Setaria italica
  misc_feature (1)..(38): n is a, c, g, or t
  Peptide Sequence Number=SeqID_87038
nnnnnnnnnnnnnnnnnnnnnnnnnnnnnnnnnnnnnnccctttttaacgtaataccaacaggcatatacagtgaatcagtgatacatacaatgaaccagaagacaaagcgcgaatggttcctacaggtttcaagggatttctctcaaatgagtagaatatgctggcaacatatatacatcaatatgctgtttccaaatttccattgaagactaatggattgattcctagctcttgttctgatttacttacggggtttcactttccttgatgatcttcttgtaacctgatctgatttattgactgcattactgttggcttggtccaaaccttgctcgccattgctatcagtgacagccgttttcagttccccggcctcaacatgggtacctggtttcttactgccaccaccgcttccccttgcttttctggaactggcacctatggtatctttgttttgctgtcccctggcagctctggaggtggcggctcgcttttttggcttcaaattatcagcatcttctccatcagtatctaaatccttggcatcaccgttctcagccagttgctccaggttagctgctatcattttgctagattgggttccagtcagtttttgcaattgtggcacataggctgttgtcctgccaccagctgttatgaattcaatcttctttccattgactgtaccaggcttcttgccccaacgatgatgaaataaccattcctttggaaagcgctcaaggtcagcatcaacttcaacagcatatttcacaacctcttggatacttcggtgcaatgcttcacaaccatctctagatagatttgaagcaatctgcaatggatggatccttgactgataaagcacctcatctgcaatccaattaccaatgcctgatataaagctctgatcaagttaaaaa

SEQ ID NO: 21065 - DNA, 829 bp, Setaria italica
  Peptide Sequence Number=SeqID_87039
tagctgtcagggttaccgttatatccctagatgctccagggagcactgtgagggctgcaggtgtcacatccagcgcctatttctggcggcattcttgtcatgatggtgtaggtctcggtctcttcagacacgctcgtgacagtccgcttcactgtcaccgtgcctcgaagttgagagatggtgattgaggggatgttgagatcataaggacgctgtcccttggagctggagttgcaggatgcaccagctatgtttgacacttcactatgattgacgtctgggatcgagcacaaaaatgtgatgtagtcttcatgggttgcatctagaacaaggccaggatcaagggcagcttttgggttaaccgcaccactgccacaatcaaatggtgtggcccgtgaaagtgtcatcatttctgatgttgtgtattgctgcgctctaagaggatggctccctttgtccagtgtattagccgtagtcatcaaggcagattttattgctgaggggctccacttcgggttcttctgctttatcagtgccgcaataccagcaatgtgcggtgcagccatgctagttccggaaaccatggcaaatccttcaccagcatagtttgattcatctgttccattaggtgcccatgcagcccatataagattgccaggagcaagtatatctggcttaagaacatcagcatcttgaaagctaaaatcttttacatcgggtcctcgagaagagaacagcgcaacctggggagctgaattgtataatgttggtgaccaaacccatccggacaactacctgctgttgtacttaagactgtacgtcccttacc

SEQ ID NO: 21066 - DNA, 378 bp, Setaria italica
  Peptide Sequence Number=SeqID_87040
ccacaggcgggccgccgcatccgtggaggaggggatcgaggcgctgcagttctactccaaggaggtcagccgccgcctcctcgacttcgtcaagtcccgcgccgcggacgccaaggcagaggcgccgtcggaggaggccgcccccgccgcggctgagggcgaggcggcgtgagcgctgccccgggcagccattgcgttttctatttttcctgcatctggaattggtgtgaaggctgatgtagcctgtggctttggtctgcatctatgcagttcctgtccttcgatcgatgaatagctttctttagtgcgtgctgtgttttacctgcaatttgtgtctctgagcaaggattatgttccgttcgtaactaaaaaaaaaaa

SEQ ID NO: 21067 - DNA, 1131 bp, Setaria italica
  Peptide Sequence Number=SeqID_87041
ttccaaacagcttgaaaaaatccacactgtgcttcagaacccattcttctgcatcatagtcccgaaggacccaaatggacagttcagtgatctggcgagtgttgtctttatgttgactcatgcaatgcacgagtccttgggattcaccaacaaaagcaacatcgaaacgcttccccggcccgctgaggctcctacaatccttcccttccccattaactgcaagtattagatcctggtgtgtatcaaagctggtgacactgagatgcagcatgccattaacaatggcgctccctgcgaagaatgatatgccgcaatctgaagaccaatcgctgtcacaccataccccagtttcagacgagtatgcgcgcacctcttccacgcatacacaatcgtccgaaatgaactcgaccaactgaaagtgcaaggacacagcagggtcaaaaatcaaataggtaaaaagcacatccaatttcattgtcggagtcagagccagggtcctcgccctcatcaaataagggaagtggtttaaagccggagctggggacggccacccattgctcggtggcgggttgcagacgatatagcccagtgaatcgtaggtgtctcctgcccttctgtgcccgaagaggaggagcccgttgcaggaacgcaagaagccgaattcctcaatgcccggctggttccccaggaaggagacggaagcgaggggcacgaatctacccaacgtgttgatgaagcgcccgacgacgcgatccgagccgtcatcgtcgctgtcaccgccgtgtatctcgtcgccgtcgttgacaaagaaccctgcgagggtttgggggaggcttcttgcagcggaggcggtcggcgatgaggtcgcgccaggccctggagacgcacttgaaccggcagagggatttggcggggacgcgggagaggatctccaccagggcgtcgtcgggcagcaggggaaccaccgccgctctcctctgtctcttgccgcggccgccggggacaatggggatcgccgggcgcagctgcaaccgcccgatcctgatccctccgccggagcggcccgacgcagctgccttgttgctgagcatctcgataggctcagctccggcgaggcgtgctcccggtggc

SEQ ID NO: 21068 - DNA, 411 bp, Setaria italica
  Peptide Sequence Number=SeqID_87042
aagacaaggttaatctattgcggcagaatgccagcatttaaagtgtgaagtactatactaggtttaggcaaaatatggtagggatgtccacagtcacattcagtggtaacagtatatcagaaaaactatgtatgcttcatgtatggttacagagtataaattaggagtgctatggctgaagttgcttaaattcgcttcattttggatctgttgattgaatcctgtatgtgcgcaagtcacctataggtaggaacaaaatggaattacgattatcatatgacttgcttttcagtagtattgctttgttttgaatgtgttgattcaatcctgtatatgcaccagtggtagaaataaaattattctgatcatcaactcatttgaagctgtgacctgtaatgacgagataaatag

SEQ ID NO: 21069 - DNA, 332 bp, Setaria italica
  Peptide Sequence Number=SeqID_87043
tcgtcgcttccagctcggagtccggggagacgatgaggatcctccgcacgacgccctgcgagcacggcttgctcagcacgtggttcgggttggcggcgaggatctcgccggcggccaccggccggccgtactcctcgacgcggccgttcaggtggacgatcctgatcaggtccagcgcgccgcaggggaggacgcaggcgaggcagcacctaaggctgttgcccattgctgtgtgtagatgatttgtacctttctctctctagcttgagcttgagctttggtgccacctctctctctctctagagagagagatgaattttctcactctagat

SEQ ID NO: 21070 - DNA, 1342 bp, Setaria italica
  Peptide Sequence Number=SeqID_87044
tgtcaacgaaaaattccccagcatatatactagtaaaaagaagaggaacgaagctctccaaaaatccttgctgcgctgtgcaaaattcagctgccagagtagctgcacaaagatgtcccaggacaggatacgcaattgggtggatttatttgggtttcagctagtatcagctcgtacattccaagctggctacattttgctccagtgcgaggaaatagcaagcactgtgcaagatccaagaagtgggaacccacacaaattctgctccaagagagaaattgtattttatttatatgattcagtatggtgatcccacaactgtatttgccacataagcagccctaaagcctataggcttcataggatttcgttatatcagaacttgctaaagaactcacagatgtgatcagagacctcactaggcttctcctgattgatgaagtggctcactccctccataacaacaacatcctccagttttggtacgcttgccttgaagccacccttgtggatgtaatcctgtacccccggagtgttgtacgtaatatccaggtccccaacaatgaattttgttggaacttttatcggagcaccagtccatggtgcagaaagctcccaattcaggtccatgcatctgtagtagttaaatcctccagtaaagcctgtctttgaaaatttttctgcatagtaggaaatatcttcctctgatagccatggagggcatgttccgtctgaatcaagtgagtcaaagaagctcttgtccttgggtagaataagaggagctggcttgcgcatgccaaatgtcttattaaaaatatacttggcatcatattgagcgaattcagcttcagcaactccaggttcctggaagcggcacatgtagtggtcttccccgcaggcggccttgatggtctggagcgggctcccctccggccgccgcgggtggtacacgacgctgaggttcacgagcgcccgcaccaggtccggccggagcaggcatagctgccacgccacgatggcgccccagtcgtgccccaccacgaacacctggggctggccgaggtcggcgatgagcgcgacgaggtcgccgacgacgtggaacgtggtgtaggcggacgcgtcgggcggggcgtcggagtcgccgtagccgcggaggtcgggcgccacggcgcggtagccccgcgccgccagggcggccatctggtggcgccagccgtaccagaggtccgggaagccgtgcaggagcagcaccgcgggggcggcgccgccctcgggccccgcctccgccacgtgcaagcggaccccgttcgcctccaccgtccggtgccgcaccccatccacc

SEQ ID NO: 21071 - DNA, 301 bp, Setaria italica
  Peptide Sequence Number=SeqID_87045
gccccgtccccgtcccgtcccttctcgtcgcgcggccgcctcaatctcgaagcctccaacgccgccgctcaatctcgaagcctccggagaaaaaaattctagggctttcgcgtcgtccgtcgccatgggctcgaagaagcggtcgccccagcatcccgcctccccagtcgccggcgaggtagccggcgacgtcggcgcccctccaccggcggggaaggccgcgccggagacggcgccggtggggtggtgccgaggcctccggacgtggcgccgttcctgaccaaggtctacgacatggtct

SEQ ID NO: 21072 - DNA, 850 bp, Setaria italica
  Peptide Sequence Number=SeqID_87046
caaccagatcagaatctccgtgaagtgatccaccaggggctcgagcacgcccgacctgatgcggccggcgagctcgccgcccatggccggtcaacagcggcaagaaccggggatgcagggatgcagtgatccaagaaaccatcatggctcgtgctaacgagactacaacgactagcttgacttgtcggccgagccatgtgttggtggtgcttgcaaatggattgcggacgagaaattaacaattagtataaccggtaggctgtcaggatcaaggtgtcttttttatacaggtgtcgttgcgattcgcgaaagcaataggcgctctctgagcaatcacatgatgggtgggacctgatgctaacctaagtttttactactgttttgcggacagagcagcatagtttaataattagatattcctgtagcagtctctgtaaattcataacactacagtgctcgttgaacaagaatttgaccagagtgataaaaaacaacaattgcaatttcttttttaaaaaaaaagcttctgcgtactgcgtactagtaaagagtaaacacccagaggcagaagataagcggcaaacgaaagaaaaaccagcacgctaacaccaaccgatttgcttgcgaggcacaggcactacaagttcaaggcagggaaaccaaggatgaagaagaagggaggctagagccatgagaaatcgggaacgaaccaatcaatcaccagaagcagaggagatggagccctgccaactgccgtgccacaaatgtgtgagcccggtaagaacaggggggccggctgggtttatatcagtctttcagagcagagctcctatgagagaaaaggtgaacg

SEQ ID NO: 21073 - DNA, 469 bp, Setaria italica
  Peptide Sequence Number=SeqID_87047
gcaagcaaacaccaacaagcctaacaagattcttgtgttgaagcttggcgaatcaaaacaagctcatttttcagctcttgtattccttgccctgaactctgtgagaatctcttcacagctatttcttgaccattgggaagtacacccttataaactgctccaaaaccaccttgaccaacccagttgctctcagcaaagttatcagttgcagcacgtattgtcgatagatcgagaagaagtgaaccaatgccttcaatgtcctcaggtttagttgaataagatggttcatgctctcttgctagtcttctcctcctcaaaaagcagagacaaaatattgtgatagcaagcattacagcagcaacaagtattgcaattgctagagcaatcttcatttttttctcatccttcctcctggagtcgccgtcggcatcaagtcatttggcgccggtgctggcgctaatggcgtttg

SEQ ID NO: 21074 - DNA, 314 bp, Setaria italica
  Peptide Sequence Number=SeqID_87048
acgggacactacgaagttacttactaatagaatacaagtacaaccaagaacgaccaatgagaagcctctgcagtgcacttcagctcctcacaacagcattcgggaactatctcagcactttcattttgactatggtcgcctacttcacaacaaggggaggtaaccctggatggattccagataacttgaacaaagggcacctcgattacttcttctgccccctcgctggtcttggggtcttcttcttattcttgtttctgctgcagcagcaagagaggcaccacttgggccagcaattgcaagttcttgatggt

SEQ ID NO: 21075 - DNA, 370 bp, Setaria italica
  Peptide Sequence Number=SeqID_87049
gaaataaacaacaaaacacgtgttcctcgtccagatatacttgaaacggacggcggcgtcacatcctcacaccaaagagctactttgctgccataacaaaaagctcctccgtgtgccttctccggctcatggcatgggtgctggcaacgtcgaagcaacgacgcagcgcaccatggagatcggcaaggtggaccttcgcgggctggagcccggcacgccgggttgggcgcgggccagggcctcggtgaccgcgtccatggcggcgcacggctgcgtcgtggtcgcgcacgacgcgctcggtccggagctccgccacgcgctgttcggccgcgccctgccggagctcttcgggctcccgttcgacgccaag

SEQ ID NO: 21076 - DNA, 426 bp, Setaria italica
  Peptide Sequence Number=SeqID_87050
agttacaatagtgtataggttcatttcaggatcaccatcttccctttttttatgcacatcattatttccctcattggtttgccatgtttccttactgttctttgaagggcaatctgcatctttcattgaaccgaccagatttggcagtgacagacttcagaggagctcaagaattgagggctgatcttcgttcttatcaaggtctagtgcgtgcttatctagcacttgctaaatgcaaagatgcattattcactgcgcgtgaggcaatgaaggttatgcatcagtctgcgaaagctctgaagctagttggtgacgttcatgcaatcagttccagtgggagagagaaggcaagaaagttctatgaatctgccattcgtcttgaacctggatttctcggagctgcattggcctggctgatctgcatgt

SEQ ID NO: 21077 - DNA, 1027 bp, Setaria italica
  Peptide Sequence Number=SeqID_87051
gccaattctagctctatgtagaagaacaaatgtgagcaccgtgaagcactgcaagagatggaaggtattccttctaaagtgagaacgctgaaaatgaatctgatgttagggaagctttatcgaatatcaagaaatagccgttcagctgttgtgtgttataaagagtgcttgaggcaatgcccttatatttttgaagctattacagctttggcggaaatggggctttctgcaaaggagttttctttattattttcacaagcaccaaatagaggaggcaagcttccaagtgactctgtagatgcacaacgatggtggaatcggtatgttgaggcgcagtgttgcattgcttcacatgattataaaggtggccttgacatatatctagaactaatgcaacgattccccaataatgtgcatatcctgctggaaattgcaaaggttgaagcgattataggcaggaatgatcaagcaataatgaactttgagaaggctcggttgattgacccgaacattatgacatatatggatgagtatgcaattcttttaaaaacaaaatccgactacatcaaactgaacaagctggtacatgatatgctgcatattgaccctgcaagaccagaaacatgtgttgctcttgcagcaatgtgggaaagaaaagatgaaagaaaagctttgacatatgcagaaaagggcaatctgcatctttcattgaaccgaccagatttggcagtgactttgacatatgcagaaaagagccttcgagttgatgataggcatataactggttatattatgaagggcaatctgcatctttcattgaaccgaccagatttggcagtgacagacttcagaggagctcaagaattgagggctgatcttcgttcttatcaaggtctagtgcgtgcttatctagcacttgctaaatgcaaagatgcattattcactgcgcgtgaggcaatgaaggttatgcatcagtctgcgaaagctctgaagctagttggtgacgtgtttaggttagtaacgttta

SEQ ID NO: 21078 - DNA, 1015 bp, Setaria italica
  Peptide Sequence Number=SeqID_87052
gttcatgtataggttcatttcaggatcaccatcttccctttttttattgcacatcattatttccctcattggtttgccatgttttccttactgttctttgctaatagactacataaactgacaagctggtcatgatatgctgcatattgatgcaagaccagaaacatgtgttcttgcagcaatgtggggtagtaactaattaattacatatgcagaaaggagccttcgagttgatgataggcatataactggttatattatgaagggcaatctgcatctttcattgaaccgaccagatttggcagtgacagacttcagaggagctcaagaattgagggctgatcttcgttcttatcaaggtctagtgcgtgcttatctagcacttgctaaatgcaaagatgcattattcactgcgcgtgaggcaatgaaggttatgcatcagtctgcgaaagctctgaagctagttggtgacgttcatgcaatcagttccagtgggagagagaaggcaagaaagttctatgaatctgccattcgtcttgaacctggatttctcggagctgcattggccctggctgatctgcatgttgcggaaggacgtaatagggaggctgttatgctacttgaaaaatatctacgacaatgggcagatgattctctacacatcaagctggctcaagtatttgcagcaacaaatatgctttctgatgcactttcccattatcaatccgcattaaggataaacccacaaaatgaagctgcaaagaaaggattggagcgcttggaaaaacagatgaagggagtagacccagatgcacctgaagaggacgaagacaacgaggctgatgatatcgacgccgaccaagatgaagctgagctgctatagagaaacactctgaactcatcatggcaactcttgcctccaaagagcaacgtctggttgcacaatagcctcatcagtcaacaggcacggcaactggacccatgattatgtaacttagaatatgaggtgcaggtg

SEQ ID NO: 21079 - DNA, 579 bp, Setaria italica
  Peptide Sequence Number=SeqID_87053
tttttattttttttgtttttcttttagttttcttttaactttaaatttatttgttctatgctttctgatgcactttcccattatcaatccgcattaaggataaacccacaaaatgaagctgcaaagaaaggattggagcgcttggaaaaacagatgaagggagtagacccagatgcacctgaagaggacgaagacaacgaggctgatgatatcgacgccgaccaagatgaagctgagctgctatagagaaacactctgaactcatcatggcaactcttgcctccaaagagcaacgtctggttgcacaatagcctcatcagtcaacaggcacggcaactggacccatgattatgtaacttagaatatgaggtgcaggtgctccagagccgtctttgctgtgccgtttgtttatagccaattttcgcggtcaaaatgaacgggtatggcacgatgaaggctgtaagctagtagggtagggccatgaaagtacagtacgatcagaacctggattgtctttgaacgcctaagatctgagttcgaacaaagttttgcaggagcatctgacgtgagaatgttagg

SEQ ID NO: 21080 - DNA, 762 bp, Setaria italica
  Peptide Sequence Number=SeqID_87054
gcggcggtggtgtcgtaggcgtagctgtagtaggccgggcacgcgtccttgaacagccgcgagtagacgctgccgcggcacgccgcgggcgtcgcgtacgcgccgcggcagcagaaggcgtccagcccgaacgccaggcacgcgctcttgcacgccaccaccgtcgccgccttcgctccaccgccggtggtagcggtcacctgcagctccggcgggcacaccgcgttcacgtccttggcgcaaccggcgatggcgcacttgttgcccgtggcgggcttggcggacacggccacggggaggttgtacccgtccaccaggctcacgtcgtaggagctccccttgctggggtccgcgtgcaggctcacctccacgagcgtggccggtggggtgccaacggacccgttgcaggccagccggccctcgcagtcgccggtgaggcaggcggcggcgcccgtgccgccgttcgcggtgaagttgcagccggtgcgggcccagaagcggccgttccacgtggccggcgcgacgacgcgcctcgacttgcccggcgggacgaggaagccgccgccggcgagcaccgggtggcccgtgttgggcgccgacgccggccacaccgggaacgggcaccggttcgccacgtggaagacgatggcctcggcgaggacgaccggccctgcagctacgaaactgaggagagcaatgagagcccaggagaggagcgggcgacgagcgccggaggtccaccgcgggcagtgcttccccatc

SEQ ID NO: 21081 - DNA, 218 bp, Setaria italica
  Peptide Sequence Number=SeqID_87055
ttgtcagttcagacagcagcacttgcttcttctgaagcgggtagcagtggacattcacacaccgtccttggcatcccatcactttcagcaccagagtccgcaccagccagtataacctctcgtgtgttgttagggtacaatcctgcacaataatggatgaacacacaagcatcgcatctcatggatgtttaatctagttttttttttgcaaaggctcc

SEQ ID NO: 21082 - DNA, 1252 bp, Setaria italica
  Peptide Sequence Number=SeqID_87056
cttcaatatttccacaccaaggaaagcctatgtacatattgcacgggcaaaacaacaattcagactccatgagccaagatacagttcataattacacatgctgcgagcacaatttatgttactagactacatgtacgcaattcggagattgggtctattgtgtaaaactacaacagaacacacgaggaggacactgccgcgctacctattgagcttctccactaagtatcatgatctatattcctctgggtgcattgtaggaggcacatcccgcatcataccttggtatgtgaaattgaatctaaaacttatgaagtttgctccaacatgaaaccagggccaggttgcaaagataaaaattcacctgctttcgttatgtcactatgcattccctggggtcagagttttccccttggtccctttctgcattgccaaatccaatgtagaaagcctcgtcatcatcactggcgaaatccccagcagcaggttcattctccctatgcagttcagactgtctcctatgcaacctcagcacatgcatgatgacatcagatgaaagtgtcacctcagctcgtgaagcgtcaacctctctcccccgttcattagaggctattatttcctttgcattcttaggtagtgacatcactttctttgctgtgggtgtccaaagcttgacagttttgtcaatcccactagtagccatgaaaggaaaatgcgggtggggttcaatgcagttaactacacttttgtcaccattcatcatcctcatcaattcacctcccttcttcctccatatgaatacattcccgcaatctgatccactcacaacatattcatcgtttggtccgaagaaactgactcccttaacagttcggtaattcctgtgacctgagtatgcttgtggctgatcaagctggtcgaaaaactcaggctgtgctgttacaggatttggaccaagacccatattgttttggaacaaatagacaacctcatcattgtaggatacaagtatctcccttgcatacgaatatgcaataccggtgatgtggaccttcccacctttaataaggtgcttagggcagaaggtatctacaggctggtttatgtttcttgaatcatccaactggaatctcctcatgtcatacaaccgtacatactcatcagaaccaccaattgaaaaatagtaagggttctgcgggtcaatggcaatgctattcagtcttacacgacgtctgtcattcaagaaagaata

SEQ ID NO: 21083 - DNA, 283 bp, Setaria italica
  Peptide Sequence Number=SeqID_87057
cggtacgtccaccaagctttcagtcaccgccacaaatacccatatgggtgtccactggcacgccgagttggacgctatatcaataccaatcgtcgtgccactgtctgtagagagccgcctccggctagatgttgcagctgctttgaacaggccactagcatgtgtaaccagtcgccgccgcgccggtcctcaagctagccattgcccgcctccgcaggttgacaccaatagagcatccgccacctcaccgtccgcccaagcagatcgcctccaccaatcctta

SEQ ID NO: 21084 - DNA, 2575 bp, Setaria italica
  misc_feature (66)..(66): n is a, c, g, or t
  Peptide Sequence Number=SeqID_87058
cttcaaaaacaccagctataaaggcctgtactttcatcatattcctaccaggaaaagatgatgacngaaataacccctgcaactgtgctgaaaacatcaccaatgaccaaacctactccaattacaatcatttcatgctaaaatgtatcattggcgatatcacaagtgaggctagtagtagtactctgcatttttgagatagctactactgtcaagtgaaggcaaatcaagagcaagaacaaaactatggctgtgaccccgttaacccccgtgactaggacaccgagtgccttgtgatccgcgactgcgtggacttcacctcctctgggttcaccgacccagggctctccgacgtgtctgagctgctgttctcaccagcgttcgttttgccagaccagagcttgctcagtatcttcttcggcatcagcatcccctttgccttccctgaggcgctcttgtcatcaccgttcttgttcatgtcgctgctgccactgctcctctcgctgccgccgctgttgttggccagcctcatcgacctcaaagagttgatgtcacttgatgtcgggaccccacactcctcctccgttgtcgttgtggcagctgacctggagctaccaatggagttgccattctctctgggaagaagcgagcgaacaacagatggtagctcaactgaagggtcgctccttgcagaagcaactgatgccctgacttgctcaaagaagagaacttgcacaaccacgcgcagggggaggcgctcattctgcacggcatgcatgcacgcatcctgcgatagctgcttgcagtccatcagtccgcataatttcttcttttcgctcttcgataggcttgggtgctccttcagatacatgtcaatggcacgatagagcccatcatgtgttggtcggggtagagatgacgccatttcagcaagcgccatcaactttggaagaggaaggttgggatctttggcgatctcagcaagatatccatcgatcagctttgcaactgccagtttcgatgcactgggaacagtcgtcacactcacattctcgacctccacgatttcttcatcatcttgaaattttgccttgccattatcactattctgcgacatgaactcctccacaattgccataatcaaatctatgttatatacactgttttcatctgtatttactggtataaggagatccgaaactgatgcaccatccaattgtgtacctattctcttgatcaagtcactgcgatgggactccccagattccaacaagcatgcagctcttaacagcttaagaagaaaaccacatgacactgaaccttcctcagtgggcaagagaaatacaatagcatcaagagctgcacgacgctttgtgcaatcaactccattactcacagcatcttccagggaaccaagaagtcgccgatatgcataggccctcaatgcttctccaattacaacagctggtgttcttccctttgccttgatcgccatgatcacccgcttgtacaaatccacctcgagctcacaaaggtcctcaacccaccagtcgttagggacagtcggttgcttcctgacaccattccaatgagaatcaataccattctcagatgggagtttccttctgttgtaagtgtatgaccactcaacctctgatggatcaattgaagccttcgatgcaatagagtcaatgcagtggttgattaccttcaaattctcacaccaaggtagcagtgactttgtgctctgtaaaactatgattgagtccttccaggtgcgaaacacacttgatgtcaggaaaacatcaattttgtatatgaggtttcctttatcaattgtctcgaacatctcgagatactcagctgcacaacgggcagcgaggacattgtatgcattgagtgttacaatcatgccatagcagaacttagcacaaatttcaaatgctgaatgtccaccagggatgtcagagatatccacttcatcatttttctcctcattgcttgaagccactaatctttgcaatcgcgaactctttgatagaagagggaacttgtgaagataaaacttgacatccccaatggagataacaatgtccgttgccagctctgttgcaacaaacctgatattactgccctctgtctgaaaggcatccggctttgatccaagcttcatgtacttcatcgtgccacgccaagaaatgaccgaagaacaagagagaaaaacttcctacttcctttctgttcccctagctcttcttcttccccacaccaatcaccaccaaatgagacgcaaggaggagcagcacaacaaccccacagacagcgcttaaccaatccgtcaagaaagtaccaaaccggtggccaccggcatgtgaatgcttcccagcccaacggaaaggacaggaccaacaactggtgataaagatccagcaggcctaactgtccccctatcccagtggcaaagcccccaccaaatcgggtcaataacccaacccctcctctagatcagtaaactactctccgcagacgcatcaagatctgggtcgcaacgtctagaaggcaagagctccttcct

SEQ ID NO: 21085 - DNA, 263 bp, Setaria italica
  misc_feature (32)..(32): n is a, c, g, or t
  Peptide Sequence Number=SeqID_87059
gtgaggtccctggccatcggcaagaagtccangccgtgtcttcatcaccggaggcaatgatcgcaaggtcaacttgtgggccattggcaagcaaactccacttctgagcttgtcaggccacacaagtgcagtggagactgtgcagtttgattcagcagaggtgcttgtgcttgctggctcatcaaatggttccatcaagctctgggacttagaggaagctaaagttgtgcggtctcttactgggcatagattgagttgcactg

SEQ ID NO: 21086 - DNA, 274 bp, Setaria italica
  Peptide Sequence Number=SeqID_87060
gacagaattccccgccgccgccacccgccgcccgccgcgccgccagggccagcaagccatgacgacgcgcatcgcgccgggcgtgggcgcgaaccttctcggacagcactcggcagagcgcaaccaggacgccaccacctacgtcggcaacctcgacccgcaggtttctgaggagctactatgggaattgtttgtccaagcaggccctgttgttaatgtgtatgtcccaaaagacagagtcacaaatctacaccagggatatggatttgtagaa

SEQ ID NO: 21087 - DNA, 241 bp, Setaria italica
  Peptide Sequence Number=SeqID_87061
ggggcggcgggaccacggtcgtgtcccccgcgggggacagcgggctgcagacctggtgcgtggagtcgttgcggtcgtcgaaggtggtgacgaggaggcggtcgccgcggctgtcgtagatggacgcggcggagcccttgaaggcgtcgaagaagccgcaggcgcggcgggcggcgccggcgagctccgggaccgggcggatcgggaggaaccgcaggcgcgggttggggccggcggaggt

SEQ ID NO: 21088 - DNA, 1100 bp, Setaria italica
  misc_feature (1)..(25): n is a, c, g, or t
  Peptide Sequence Number=SeqID_87062
nnnnnnnnnnnnnnnnnnnnnnnnnggttttctacagtccaagcatgcattatttatatatatggctgtcaggagaagcatgatccatcgtcaagccaaggttgtttatacatccataggttttcagacgaaacaagattttccagcttttattctccgcgtcaatatatcagcagcagacatgatcgatgtagcgttcaacggtcgtgttgtggaatcgtcgtcatgaagcacgaccctgtccctgaccctgctcagtaggagggagctttctcactaggaagtaggatgacgctggcatcttttggtgcctcggccggcatgggttcgcccagcaggaactgcttgaacaggacgagtgcctgctccggacggtgcaggggaacctcgtgcccggcgccgcggacggtgacgtaggtcaggccgtcatactccatgctccagccaccaacctcagttgggaccatgtaccagggataccagctggtcttaacaggaaggcccagagaagcaagggagcgcctggtcgagctcagcggcactgcagtgtctgtgtcaccactgaagacccagatcttgaggccagcttcaatgagctccttgtagatgggtatcatggaaacattaggcgtgattgtcgtccagttatcataaatgggattgttgcacatcgtccacgggtactttatcatgccgctgacgttggcgtgcatggcgttctgcacctcggggatgttcaggtagttggtcgagtaccaggccgtgcacgggtcgtagggcggcaacatcaatgggcggcggctccgctcgagcatgcgatcgtatgggttccccctctcgcacggcggcgtgtagatgctgtagccgtcgatcttgcccatctccttcgcggcctgcacgtcgcagatcttctggcactccggcgaggggtggatcaaggagctacccaggcagacatcgagcccgctcgccagggtctcgtcggatatgaggccgtggtgccaccagtactcgagcatgccgatcatgtcggtgaggtcgtcgatcaggccgttaccgacatgatcggcatgctcgagtactggtggcaccagggtctc

SEQ ID NO: 21089 - DNA, 1050 bp, Setaria italica
  Peptide Sequence Number=SeqID_87063
gttgattcttagaaataactgcatggtcagttataatccgatcgaccttttacctctacatatttgttcatatgatataccaatcagcttacaccttccaacagtttcagtaaaaatgatggaactgagcgaaacgaatttctgcagatcacatctttcaaattttcaacactcagggtacatggccgcacgcacaataccaaaaactgccccaacacaagacagcaagtgcgcttgcagagggtaagggtaacaagcttaagaggaatcatcagctcctaggtgagccaagccttctttgtacacttcgaagtcatcacaagaccagcggcacacaaggtatagccggaatgttgccatctgtatcccaagcaagcgcagagtctgtgccgcttctggtgaaagaggttttccttcctcacatactacatgatctgcaattaactctacaacacctctgttcaagcgaactggcagtccttgcttgcgcagaaagggttccatttcatgtgtaaactgttccagagggccttccttaagctccaccgtttctgtggcagtacttcccgtccttgcaaaatcatgctcctcaaattctcgaaacagcctctcaacatcctcccttggaagattggtaaagaacaaaccagagtcaccttgaaggaacttggaaagtttgtggaggcctgttttagcttcatcagcaggtgaacgccccaacgctatctgcataaccttctttccagcaagaaatatcctgctagatgctttgtgctgctccctgaggtccttgagcttctgattcctcatgttatcgtaggtgaagacataggcactgccgtatttgtcgacagcctcttttatctcggtaactactttgcccttgcgctctaaacctggcttcttcttggtctttgataaggtcactgggcggttgcgcttagatttcggcatcgcgcgtcggctcctttgctgctgcggcggcggaggttggggttggggggggggggaagggaggacgggaaggcggcggcgggctcctcctctagg

SEQ ID NO: 21090 - DNA, 789 bp, Setaria italica
  Peptide Sequence Number=SeqID_87064
ttttttttttgattctttgaaataactgcatggtcagttataatctgatccacctcttacccctacatattgttcatatgatataccaatcagcttacaccttccaacagttgagtaaaaatgatggaactgagcgaaaagaatttccgcagatgacatctttcaaattttcaacactcaggggtacatggccgcacgcacaataccaaaaactgccccaacacaagacagcaagtgcgcttgcagagggtaagggtaacaagcttaagaggaatcatcagctcctaggtgagccaagccttctttgtacacttcgaagtcatcacaagaccagcggcacacaaggtatagccggaatgttgccatctgtatcccaagcaagcgcagagtctgtgccgcttctggtgaaagattcctaagagaggaagcgaaggggggactcagtgcaagcagatacaccggcataaaaatgggtaaatatcggtccctgagtaaaatgggcacacgcatttcaagtatgagcagtgttagttgagatggtactggactacccaagcaccctaacaaagagcattcagtaagaaccgaggtgccaatgatattttctcgacacccatgagcgaaggtatttaattttgggaaacgtgtgtaacatgtaattctaataaattaaaagatactcttcttagttccatcagcttcatatccgaatcaattatgaaacaaagactgcgtgatatgctgtccttaccagagtctgtcccgcttctggttgaaagaggttttcct

SEQ ID NO: 21091 - DNA, 399 bp, Setaria italica
  Peptide Sequence Number=SeqID_87065
agtaagttgtcgggttaggtggtgtagtcatggtaacgcgacatcagataccctggtttcttttgattgtgatgttaccttgcattatactgatacgtactcaaagggacatgacaaactacagcttgtgatcctgataacagttcaatttggacagacttatttcatggggaccgctcctcacttggccatcatgaccttgacgaactcctcgtagttgatctggccgtcgccatccacgtcagcctcgcggatcatctcatcgacttcctcatcggtcagcttctcaccaaggttggtcatgacgtggcggagctcagcagccgagatgaaaccgttctggtccttgtcgaagacgcggaaggcctccttgagctcctcctcggaatcagtgtcctt

SEQ ID NO: 21092 - DNA, 433 bp, Setaria italica
  Peptide Sequence Number=SeqID_87066
aaatagccagccatccaataatactgagagtcaagcggaagttgatgaaaaaaaataataactacataagggagcaactgcaaccagtacacaccaggcaggataagcattacaggttcacataaaacaagagatctgaaaacacacaaggaagagaaagaaacatagcaggaactgcactgtccttttagcaactacagctaatagaatgtttcacagcaagttgatgaaataagagttgcatcttgactaatatgcaatgcacaatcttctccgccttcagattatggttcgggggctctcaaggccatcgacaagcttcctctccttcctggtatccttgagattgttggaattggctatactgggtggttcacataccgcaacctcatcttccagccagacagggaagctctgatcagacaaaatcaag

SEQ ID NO: 21093 - DNA, 372 bp, Setaria italica
  Peptide Sequence Number=SeqID_87067
tttttgatgaaaaataataactacataagggagcaactgcaaccagtacacaccaggcaggataagcattacaggttcacataaaacaagagatctgaaaacacacaggagagaagaacatagcaggaactgcactgtccttttagcaactacagctaatagaatgtttcacagcaagttgatgaaataagagttgcatcttgactaatatgcaatgcacaatcttctccgccttcagattatggttcggtggctcacttggccatcatgaccttgacaaactcctcatagttgatctgaccatcgccatcgacatcagcctaactgatgaggaggtggacgagatgatccgtgaggctgatgtcgatggcg

SEQ ID NO: 21094 - DNA, 596 bp, Setaria italica
  Peptide Sequence Number=SeqID_87068
gtgaacctgtaatgcttatcctgcctggtgtgtactggttcacataaaacaagagatctgaaaacacacaggagagaagaacatagcaggaactgcactgtccttttagcaactacagctaatagaatgtttcacagcaagttgatgaaataagagttgcatcttgactaatatgcaatgcacaatcttctccgccttcagattatggttcggtggctcacttggccatcatgaccttgacaaactcctcatagttgatctgaccatcgccatcgacatcagcctcacggatcatctcgtccacctcctcatcagttagcttctcaccaagattcgtcatgacatggcggagctcagcagcagagatgaagccatttttggtccttgtcaaacacacggaaggcctccttaagctcttcctccgagtcggtgtccttcatcttgcgagccataagattgagaaattctggaaaatcgatggtgccattgccatcggcatcaacctcattgatcatgtcctggagctcagcctctgtagggttctgccccagtgagcgcattgtactagttaccctagtcttcctttggtttgttgt

SEQ ID NO: 21095 - DNA, 443 bp, Setaria italica
  Peptide Sequence Number=SeqID_87069
aacacgctgtgaaaaacaagaattcaataggatccgcgttagcagaggacaacgagacgctacagccagtgacaaaatggtcaagctaggagataagccttgggtctacatcgccagttctccactaggcacacccgacagcgaccggattgtggccccccgactcgtcagatccgggccggatcggatccgctcatgtataaacagacttacaggcagcaatgccgctacgcaagccgaacgcaggcatcgcgcttgtagaacaactcctacagggatccgatccgaacttgcagagagagagggagggagggagggagtcagagagaagaggaatcttaccatccccgtccttgtcgaagaggctgaaggcctccttgaactcggcgatctggtcgtcggtgagctgatccgccatgagcccggtggtgggtagggatcga

SEQ ID NO: 21096 - DNA, 469 bp, Setaria italica
  Peptide Sequence Number=SeqID_87070
ccaagattcgtcatgacatggcggagctcagcagcagagatgaagccattttggtccttgtcaaacacacggaaggcctccttaagctcttcctccgagtcggtgtccttcatcttgcgagccataagattgagaaattctggaaaatcgatggtgccattgccatcggcattctaaccttctattgatcatgtcctggagctcagcctctgtagggttctgccccagtgagcgcatgacagtacccagctccttggttgtgatgcaacctgcacaagtcaccgacaaacaattctgtaatcagatcctgaacaatgcagtgtgattataattaggtaaatagtggactcaaaatgcatgcaatgattcattacgtgtcatgtttgaggagatccacatgtcaaaaggggctgtagcagccaaaactttgaatgctgtggaaaccagggcagttgctaagtggtttaat

SEQ ID NO: 21097 - DNA, 723 bp, Setaria italica
  Peptide Sequence Number=SeqID_87071
tcctccgccgcgcactgccttcccctcccacacaaagccgccgccgagccaggccacccacctgctgcctcctctcctccgcccaccacgtgatctgaggctctgagcgcgcagctgctcgctcccatggccaccacctgccgcttcgccgcgccgctcggcctcgcaccgctgccccgcggccgcgcccccgccggcgccgtcgtgtccttcccccaatgcggttccaagatctcgagaggtgtcgccgtcagagcgacgtccggcggcgagggcgccacggaggaggtgccggagatcgtcaaggctgcgcaggacgcgtgggacaaagttgaggacaagtacgccgtggccaccatcggcgtcgccgccatcgtcgcgctctggacggcaggcgggggctctcaaggccatcgacaagcttcctctccttcctggtatccttgagattgttggaattggctatactgggtggttcacataccgcaacctcatcttccagccagacagggaagcttgtcgatggccttgagagcccccgctgccgtcagagcgacgtccggcggcgagggcgccacggaggaggtgccggagatcgtcaaggctgcgcaggacgcgtgggacaaagttgaggacaagtacgccgtggccaccatcggcgtcgccgccatcgtcgcgctctggacggcagcgggggctctcaaggccatcgacaagcttcct

SEQ ID NO: 21098 - DNA, 911 bp, Setaria italica
  Peptide Sequence Number=SeqID_87072
tgccttcccctcccacacaaagccgccgccgagccaggccacccacctgctgcctcctctcctccgcccaccacgtgatctgaggctctgagcgcgcagctgctcgctcccatggccaccacctgccgcttcgccgcgccgctcggcctcgcaccgctgccccgcggccgcgcccccgccggcgccgtcgtgtccttcccccaatgcgcaggttccaagatctcgagaggtgtcgccgtcagagcgacgtccggcggcgagggcgccacggaggaggtgccggagatcgtcaaggctgcgcaggacgcggcagtgggacaaagttgaggacaagtacgccgtggccaccatcggcgtcgccgccatcgtcgcgctctggacggcagcgggggcgtctcaaggccatcgacaagcttcctctccttcctggtatccttgagattgttggaattggctatactgggtggttcacataccgcaacctcatcttccagccagacagggaagctctgatcagcaaaatcaagagtacctacaaagaaatcaccgggagtagcaactgattcaagcatcattcacaatatgagtctgtagaattgcatctataagcactgagctgccatgcaagtgaaagtgctaacatctgtgtccggagccccaattgtttttggtcctctgacctaagtcagggacaaacctctgctgatgagctagtcgtttgcttatttcgtgtaatatttatgacacatttccagttcctttccagaccaatgcgtactatggagcacaatatgggattgacatgcgatcggctctttgctctttaaacagtcacggagttatgattcgtttggctgagtgttttatcttctcaataaaaagtattcttttccaggcaagaaaaaaaaaaa

SEQ ID NO: 21099 - DNA, 807 bp, Setaria italica
  Peptide Sequence Number=SeqID_87073
tttggtaagggaaaggcatgatcattgtaccaatataacacaaatgtaatacaatcgcaaacgattccgaaattaccgatgcggtaaaatcccttggaagaaaacaaacaacagatatgttcattgacccacagactggaataagggataaccaaatgcagtcagttttcaacactaaactagttactaccatcaggagagaaactagcttcaaaagggcacatctcacttggccatcatcaccttcacgaactcctcgtagttgatctggccatcgccatccacgtcagcttcgcggatcatctcgtcaacctcctcgtcagtcagcttctcgccgaggttggtcatgacgtggcggagctcagctgcggagatgaagccattctggtccttgtcaaacacacggaaggcctccttgagctcctcctcggagtcagtgtccttcatcttgcgtgccatcaggttgaggaactcagggaagtcgatggttccattgccatcaagcatcgacctcattgatcatgtcctggagctcagcctcggtagggttctgccccaacgagcgcatcacagttccaagttccttggtggtgatgcagccgtcgccgtccttgtcgaagaggctgaaggcctccttgaactcggcgatctggtcgtcggtgagctggtccgccatggcaacacgggcgagggatctgacggagggagggagggagacggggggcagagaggcgaagcgcgaatggaggaagtggagagaggatgccacgcccacgagggagacgagaagacaaaagacccagtcgc

SEQ ID NO: 21100 - DNA, 856 bp, Setaria italica
  Peptide Sequence Number=SeqID_87074
ttttttgaacaaaatagaactacaaattggattcaaccgcaatcagggtccagaataacaagcaacgccgtacagattcacacatgaagcaaggggttcgacgacacaacggagggcaggtagggggtggcagcagagggactcaaatgttcagcagctacagctagtacggtttcttcagggggaagtcgaaggaaacaagagctgcatgcctactaatacggaatgcacggtttcctccttccggcgggggtagtattgtactattgtaccatcggcacggcctcacttggccatcatcaccttgacgaactcctcgtagttgatctggccgtcgccatcgacgtccgcctcgcggatcatctcgtcgacctcctcgtcggtcagcttctcgccgaggttggtcatcacgtggcggagctccgcggcggagatgaagccgttctggtccttgtcgaacaccctgaacgcctccttgagctcctcctcggagtctgtgtccttcatcttgcgggccatgaggttgaggaactcggggaagtcgatggtgccgttgccatcggcgtcgacctcgttgatcatgtcctggagctcagcctcggtcgggttctgaccaagggagcgcatgacagttcccagctccttggttgtgatgcaaccgtcgccgtccttgtcgaagagaggctgaaagcctccttgaactcagcgatctggtcgtcggtgagctggtccgccatggtctccggggcttctctctccgcgcggcgaggcgaggcgaggcgagggagcggtgtcgggctggccggagagattagggagggcgaaccggggggcagggagcgatttgaggcctcgc

SEQ ID NO: 21101 - DNA, 915 bp, Setaria italica
  Peptide Sequence Number=SeqID_87075
ttttttttttttttccttacaatagacatggccatggccacattaaggagacgcgagagtccaaccaacatacagaaatgcagatcgattcaaaatgaacataacacttgcgtaaaaaaacacccaatgccaaagaaaatatgaacttcaacagatcctagagctccaacaggcgcaataatgcaaggtaacatcacaatcaaaagaaaccagggtatctgatgtcgcgttaccatgactacaccacctaacccgacaactactcgacattaccacctgcatgatactgatacgtactcaaagggacatgacaaactacagcttgtgatcctgataacagttcaatttggacagacttatttcatggggaccgctcctcacttggccatcatgaccttgacgaactcctcgtagttgatctggccgtcgccatccacgtcagcctcgcggatcatctcatcgacttcctcatcggtcagcttctcaccaaggttggtcatgacgtggcggagctcagcagccgagatgaaaccgttctggtccttgtcgaagacgcggaaggcctccttgagctcctcctcggaatcagtgtccttcatcttccttgccatcaggtttaggaactccgggaagtcgatggtcccgttgccatcagcatcaacctcgttgatcatgtcctgcagctctgcttcagtagggttctggccaagggagcgcatcacagttcccagctccttggtagtgatgcaaccgtcgccgtccttgtcgaagaggctgaacgcctccttgaactccgcgatctgctcgtcggtgagctggtccgccatgggagagggctgcggcgagggcacgcgacgcggaagggtagagagagagagaggctgctcgcgctcgcgtcactccgttgattgggcc

SEQ ID NO: 21102 - DNA, 1927 bp, Setaria italica
  Peptide Sequence Number=SeqID_87076
cctcggctgcgtcgtcgtcaagcgcaaggtcctgtggtgggccttatggtgcctcgtcggcgccttcgtcctcatcggcctccccatcatcatcgccaaggccatcccccacaagaagccccgcccgccgccagatgaccagtacaccgaggtgctccacaaggcgctccgcttcttcaacgcccagaaatccggccggcttccgaagaacaacggcgtcccgtggcgcggtaactctggcctgtcggacggctccgacgccaaggatgtcaagggcggcctcgtcggcggctactatgacgccggcgacaacatcaagttccacttcccgatggccttttccatgacgctgctgagctggtcggtgatcgagtacagcgccaagtacaaggccgttggggagtatgaccatgtgcgcgagctcatcaagtggggcacagactatctgctactcaccttcaactcctctgcttctaccatcgacaagatctacgctcaggtgggtgttgcaaagatcaacggcagccggccggacgaccactactgctggaaccggccggaggacatggcgtaccctcgccccacccttgccgtgagctcggcccccgacctcggcggcgagatcgccgcggccctggccgccgcctccatcgtgttccgcgacaacgccgcctactccaagaagctcacccagggcgcggccacggtgtacaagttcgcgcggcagatgggccaccgcaccccctactccctccggcagccggacatcgagtactactacaactccaccagctactgggacgagttcatgtggagcgccgcctggatgtactacgccaccggcaacaccagctacatcaccttcgccaccgacccgcggctgcccaagaacgccaaggccttctacaacatcctcgacttctccgtgttcagctgggacaacaagctcccgggcgcccagctgctgctgtcgcggctgcgcatgttcctcaaccccggctacccctacgaggagtcgctcatcggctaccacaacgccaccagcctcaacatgtgcatgtacttcccgaagttcggcgccttcaacttcaccaagggagggatggcgctcttcaaccacggcaagggccagccgctgcagtacgtcgtcgccaactccttcctcgcctcgctctacgccgactacatggaggccgccaacgtccccggctggtactgcggccccaacttcatgtccaccaacgacctccgcgccttcgccaagtcccagctcaactacattcttggggacaacccgaggaagatgagctacgttgtggggttcggcaagaagtacccgcggcacctgcaccaccggggcgcgtcgacgccgaaaaacggcgtcaagtactcgtgcaccggcggctacaagtggcgcgactccaagaaggcggacccgaacctgctgacgggcgccatggtcggcgggcccgacaagaacgacgggttcaaggactcgcgcaacagctacgggcagaacgagccgacgctcgtgggcaacgccggcctcgtggcggcgctggtggccatcaccaacagcggcaggggggtcggcgtcaccgccgtcgacaagaacaccatgttctccgccgtgccgcccatgttccccgccgcgccgccgccgccgtcctcgtggaagccgtgagggagagctatagctgctgctgctggtgcaccggacgtttagttccagccgggttacctgatcggtggttcgtttggtcgtcatacgatttttggtgatcccgtacgcaattcttttgtacaatacaacgttaacttgtgagcaaatactgcggacggtggcatgcatcatgcgtgacctgtagatgtttcatgcataatcgattacggttaatgaatggatacatacatatcttctcaaaaa

SEQ ID NO: 21103 - DNA, 623 bp, Setaria italica
  misc_feature (130)..(130): n is a, c, g, or t
  Peptide Sequence Number=SeqID_87077
cgtcagatcatgctgcatgttatagcaaatctgcagcttcagcagccgctctcttcctctcatcgcctttggtgccttggctgctaggtggtgggggtggggaggtcaggcgtacacgacgccggagganagggccatgagcaggatggccgcgcgctcctcctcgcccgaggcgcctcctccggcgcatccgccgccgctgcttgagcaccacctccttgccgaaccccaccgtgcggagctccacggtgacctcgtccgcctccgctcccttttccctctccctcttggaggcggcggcggcggcggccttcttcttccgctgctgctgctgctgctgctcgccgccggcggccttgttggcgtcgaggcccatcgcctcccttctcttcttccggtaccggatcccgcacgcgttgcacagcgacatgggtccgcagggtcccccgcgccagagcggggtcttggtggtgtggcactcggtgcaggccttgggctcgccggcggccgggcgctcgtccggatccggagacccgctcccctgcttctcgaccgaggagtccatgtcgggcgccaggatcggcggatctaccaccgcggaagtgctccccccttccttccgt

SEQ ID NO: 21104 - DNA, 1214 bp, Setaria italica
  Peptide Sequence Number=SeqID_87078
gtcatcagcagtggccactaggtcactgtagagatcaggcaagaactgaactggagcgcaccgagccggcatttccggccgcggtttccgcaggatcgccgcacagatccgggagctttgctactccctgcaagaacagaggaggagccgggagctttgctactcccttgcattttttctttttgaggatcaataagctctccttacattgcaaggttacaagatactaccacactactaccagtaacattacaactaggcaagaacagcaacggtaacagggagggaacagctactagtctagcacgacacgattattaactcgcttttgttccaactactacttagccgggaaaacttagcatagatccaggggaaaaaaggggtagagagagacgcatctctctaggggctcagatcatgctgcatgttatagcaaatctgcagcttcagcagccgctctcttcctctcatcgcctttggtgccttggctgctaggtgggtgggggtggggaggtcaggcgtacacgacgccggaggagagggccatgagcaggatggccgcgcgctcctcctcgccgaggcgcctcctccggcgcatccgccgccgctgcttgagcaccacctccttgccgaaccccaccgtgcggagctccacggtgacctcgtccgcctccgctccctttttccctctccctcttggaggcggcggcggccttgttggcgtcgaggcccatcgcctcccttctcttcttccggtaccggatcccgcacgcgttgcacagcgacatgggtccgcagggtcccccgcgccagagcggggtcttggtggtgtggcactcggtgcaggccttgggctcgccggcggccgggcgctcgtccggatccggagacccgctcccctgcttctcgaccgaggagtccatgtcgggcgccaggatcggcggatctaccaccgcggaagtgctcccctcctccgtctccagcctctcggggccccggcgctccagcgccgccactcccctgcgcggatcgggagctcgatccgtatgggggacgatccctgccgctcggatctggccgctgggggtgttgcggcggcgggggcgcgagtagcagaaggagggggactaggggttaggagcgggagaagcgtcgagtggagggaaccgaggcgggcggatgggtgggggatgcgatgggcggataggggg

SEQ ID NO: 21105 - DNA, 967 bp, Setaria italica
  Peptide Sequence Number=SeqID_87079
acttggttaacttggttggtctatatattttttaccagattcagataatgtgaatcataatactttgaacgtacaattatatttcagtctacggtcattaccattgttctatgcttattatatgtgttgtcatactatataatgttactcatacagccttttttctttacgtgtagttataacatactaaacaaagtaaggcaaggatgattgtgtagcctttgcgtgtcctgagtttttattgtttactacttttgttttttttgaacagactgaacgatggcacagacggatgacggatgtgcaaggaagtattccctttcttgcttgaagtttttaggtagactattacatattgtttagggtctcccctctgctttgtgtcaaataagaccaaaaaatttgatgtgtcctccagtaatatcgaattacgtaagcaaattgtaaggatccaaatggttgactttgtatagagtaggtggtagatggtatttgttaacatttactattttgttcatgctgtcatgtgatgtttgacaagtggttaccctctgcaaagaatgcagattttgacctggtgaatatttttgacaataagataaaataacatagccacactaatggagggaaatcacaggccaatgcaacacgttttaatatctggaaatcgacaagttaaaaaaggttcttgagttagtcctgacattatggaaagatatctggctgaggaacaaatggaaagatatctgacattatggaaagatacaggagatgggaaaagcatgcgaagatgagttcagactggacctcacaccatttgatgccccataagaggctcactcaaagaattctccccttggtggttattctcttgaggtccacttggccacctacaccatgtcttcatttttgttgaccatgtcctgtagatggtagcaaagaaagttacacaaattgtactgtttag

SEQ ID NO: 21106 - DNA, 273 bp, Setaria italica
  Peptide Sequence Number=SeqID_87080
cggtgccggtgaccttccttccccgggtcctcctactgagccgacgacccccgccgcagccccgccgtcggatgcgacggcgacggagacggcgtcaatggcgtcctcctccgccgccgagcccggcacccgcctttcggatcgagtgaggaggtcgtccctggggctcagattcatggtgctcctgatgcacgtgctcttcgtcggcgccgtcttcttcctcgatccgactctcgactggcgaatccatgaggagccgtggtgtattggggt

SEQ ID NO: 21107 - DNA, 314 bp, Setaria italica
  Peptide Sequence Number=SeqID_87081
ccgccccgcctggctcatcgacctcatcccgctcctcgtcgtcctcctcatcgccgcccacgtcctcgccctcgggtactggatctacaggctcgccacggacgggtccaggcagcccgcgcggagcaagaagcactaaggaggcggcgcccgcggccaggaatgcttgcagccagtgtttgccatttagttcctgcatcctctgcttgttgatctccaaggttttcaatgtcgagcgatggctcgcaaaactcctcctggaaagaaccaaatacagggaaccaatctcctccagtggtttgttcagatgttgg

SEQ ID NO: 21108 - DNA, 616 bp, Setaria italica
  Peptide Sequence Number=SeqID_87082
gggggttaacaaactcccacaaattttctgctgatttttgtttgctccagatctgcgtagtatctgagtaatatgtaacgttagacaacctatgaaacaccaacagtgacctgctaagtactgctgaccttctgcaataagtaggcggcgcccgcggccaggaatgcttgcagccagtgtttgccatttagttcctgcatcctctgcttgttgatctccaaggttttcaatgtcgagcgatggctcgcaaaactcctcctggaaagaaccaaatacagggaaccaatctcctccagtggtttgttcagatgttggtttcaaaggtgacgctagctgatatgtgaaaggaggacctcatgatcataaatagctttcggttgttgaataggcatgtcgcccgtcgacgcctccgtgtaaaggacagtagctagacaggtgtgccgtttcgtctgttgccggctcctgtaatcccaggagcagcgttttatttgcgcaagagtgaaatgcaccacgggccttaaacttgttgtgctgagccaaataggtacagcaactctgaaaatgtatttttggtatttttcaaactttgcttaattcgttgtttaaaaaaaaaaaa

SEQ ID NO: 21109 - DNA, 684 bp, Setaria italica
  Peptide Sequence Number=SeqID_87083
ctagaaattgattagttagaaaattgtactgatatttgtatttgttaagccaagtcaaaagcatcaattgatatagctagtagaaaagcatttcttgcactgtaaatattggagtgcttatataccttgtagcaattcatatatactagcctatgcactctcttagctgctgtgctagttgcgatatgaggtacatgatacatgttcaaaatgtgaagtcatcatgtctagctgcttggcaaataatattttattcaacattaattctttgggtttgatctcggagtggcctaattctgcagttctgctccttgtcgaaagtttccttttagttcttgctgggttacagagctattgatcaggggaggcaattcaatttcgattcttatatgcaggaggaagggagaggcagccaactgcatgtaagttgctgtaacttcctctgcttttctcaccctccaaaagctgcttatcactagttgcttcatgaaatgtatgatatgggactacgttgtgttgctgtgttattccagattaaatgctgttgatttgactcctagcctgttctactcaccaaaggatgtgccaattattattcctcaaaccgacaggattacaactcctttctcagaccttgtgcaatattggactttttgcacaaactgaatctttctacaagtgtaa

SEQ ID NO: 21110 - DNA, 1074 bp, Setaria italica
  Peptide Sequence Number=SeqID_87084
tcggcggacccattctcgggcgcggacccccctccccggtgctcgtttccccgcttgcagccgcttcccctcgcgagcgggcatcgtggttggctgcagccctgaccgggagctgcatccatgggcgacgaccacctgtcgttggggcttgaggcctcgagcaggtagcgctggggctgaagcttcacggtggcacctcgtcccccatctgaccggtgaatgcagcatcctcccccaagcaagcgaggcggcggcacctccaacccctgcagatccagtgagggaagcctctctgcgagggcaacacatcgccgttggagaggacctccaggaggaagggagaggcagccaactgcatgtaagttgctgtaacttcctctgcttttctcaccctccaaaagctgcttatcactagttgcttcatgaaatgtatgatatgggactacgttgtgttgctgtgttattccagattaaatgctgttgatttgactcctagcctgttctactcaccaaaggatgtgccaattattattcctcaaaccgacaggattacaactcctttctcagaccttgtgcaatattggactttttgcacaaactgaatctttctacaagtgtaaaaattcatgcagctaacttcaagacaatgctgtatttattctgttgggccttgaagctgcagcaggtatgctgtatgcaagccctgaactttgcagagggtactgctttcaaaacaaaattggtatggagggtttcccagtgaagtgaaaaggttgaaagcgaaaggtctcttgcttggtgcgattttggacctgttttcagggagttgacatttttgctgggagaagcaaggcatacagtgaacccttgggaaacatgagtatgcgaagagccaaagaccaggtggagctggttcttattaaagctccaaaactgtggttagcaaaagaatggcaattagttatgagatgattgtgatattttgtttggtgatatttggacatgtgaggtcaataatgtacgtgtcaataatgtattaatttttgtcttaaccttagggtaaaaaaaaaaaaa

SEQ ID NO: 21111 - DNA, 256 bp, Setaria italica
  Peptide Sequence Number=SeqID_87085
ccgtgcagctgttccccgagagctctatctggcaccgaaccgcaggccttgaggacgcacgacagcgcggcggctccgacgcgcccaccgcggcggcggtgcacatcgacgaagtggtccagcgcctggtggaccagcccccgccgggcgtagtcgaagagggcaaggtcggagccggccgcagcgtcccggctggaaatttcgtcgaacgccttgcgggcgccgggagcgtcgcggagattgacgccgtcatccg

SEQ ID NO: 21112 - DNA, 362 bp, Setaria italica
  Peptide Sequence Number=SeqID_87086
cgtgacagtgttcgaggcggccgacagggcgggtgggaagatacggaccaattcggaggccgggttcctctgggacgaaggggctaacaccatgacagaaggtgaactggaggtcagcaggctaattgatgatcttggtctacaagacaggcagcagtatcctaactcccagcacaagcgttacattgtcaaagatggagcaccggcactgattcctgcggatcccatttcactaatgaaaagcagtgttctttctacgaaatcaaagcttgcgttgtttctggagccatttctgtacaagaaaagtaacacaagaaactctgggaaagtgtctgatgagcatttaagtgagagtgtcggga

SEQ ID NO: 21113 - DNA, 319 bp, Setaria italica
  Peptide Sequence Number=SeqID_87087
ttttttttagtaaacagtatttccagtcttagtatctgaacattgcaatcttttacacatcaaggtttgtcaaaagaacacttaaaagttccatgtgtaagaaacacaacattaataagaataaaccataaggtaaatggattccacatttttctaattgtagctgcgtgctagcattttcatgttgtcatgcactgcagcaggcatcaaaatagaaattacgaaattctgatacacatataactccatgcatggttcatattctactactagaagtcttcgtgtgcatataacacacgtacattcttgtggttacgat

SEQ ID NO: 21114 - DNA, 691 bp, Setaria italica
  Peptide Sequence Number=SeqID_87088
aagatattaatgcatttaccagtgagctaaagtttctcacccaaccttctgacctacatacaaaattttcacttatgtggcgcaaatctagacaagatggggctagaaaatctatatatgtaactttgctatgtaacctaaggtgtcctagaaattaccagtactttgtgctaaatacacgctaacagtatatggagtattttgtgggtgaagcaaagcttgtatgcacgtgaaacatggaactgctgattttctatgacagaagctcattttcttaaataccttatggtggatcagtctgttttatctgtattattgaatatatggttaataattatgaaaaattgttcacatctaccatgtgttattttccagcaagagtgtgaggaattagccaggaaggtagctgacctaacaactgagaacagtgctctcagagctgaacttgacagcctcaagaaggcctgccaagacatggaagtagagaattcacgtctactggtgagcacatgaaactctgctattctttgtcgttatgacttggtgacactatttgcatcacatcatttgtcggcatgtcaacatatctaaccttaccgtacttgcgaagggtggagtggcgcactcccagggaccaagcgtcacaaccacattgggaatgagcattgagccaccaaaggtgcagcatcat

SEQ ID NO: 21115 - DNA, 444 bp, Setaria italica
  Peptide Sequence Number=SeqID_87089
gggcagcgcttcctaatgccactcccaatctaaacattgggatggacctctggagtgcttctccagccttagccgttccagcagtgcaggtggaagcgaatcctgggttggcgcttgcccgacgggatagcgttactcaactggtatttctgaatcttatggcatcatccggaaagtgattttgttatatatgctacaattggtgtagaaatgtagaatgtcacttgatttgtaggtgttatcttcttatgcaaagtcacagatcataatcaagccacttatttatttgattgagtattcatatttcttcaggatgaacgtgaattgaagagggagaggcgaaaacaatctaacagggaatctgcaaggagatcaagattacgcaagcaggtagtactggaatcatacattctcattttcctgcagaattgttctattgttagt

SEQ ID NO: 21116 - DNA, 1396 bp, Setaria italica
  misc_feature (1354)..(1396): n is a, c, g, or t
  Peptide Sequence Number=SeqID_87090
acgcgcacgcctccatggccgcgggcgttccttacccgactgccgaagctgccgctgcggcggcggcggctgctgctgctgcggccaccgcggcggaagcgaaaggcaaggggaagggagggggcgcgtcgcctgagaagggcagctccggggctccctccggcgaggacgcctccaggagcggtgacagcggcagcgaggagtcgtctgggacgagagacgacgatactgaccacaaggattcctctgcgcccaagaagaggaaatctggtaacacatcggctgaaggtgagccgtcgcaaactgctcttgtgcggtatgctgccgttgagtcgccgtatccagcgaaggggaggtctgcctcaaagcttccggtgtctgcgcctgggcgggcagcgcttcctaatgccactcccaatctaaacattgggatggacctctggagtgcttctccagccttagccgttccagcagtgcaggtggaagcgaatcctgggttggcgcttgcccgacgggatagcgttactcaactggatgaacgtgaattgaagagggagaggcgaaaacaatctaacagggaatctgcaaggagatcaagattacgcaagcagcaagagtgtgaggaattagccaggaaggtagctgacctaacaactgagaacagtgctctcagagctgaacttgacagcctcaagaaggcctgccaagacatggaagtagagaattcacgtctactgggtggagtggcgcactcccagggaccaagcgtcacaaccacattgggaatgagcattgagccaccaaaggtgcagcatcatgatgatgagggccagcttcacaagaacactagtaataacagcaatgggaattacgcgggcggcagccacaaagcggaggctaacactaggtgagagacagaggtgatgaggaagtgacagagatgagatgaggtgtttcttatctaaccacaacacccatcatcagtcggtgtgttttttcttagcgaagctgttgttttagccctcacagcccgccggggccatgtagagtcgccccactgcagccatgtattatttatggctcgtcgcggtgtgcatttgtgttttcgtgtgttgtgtaaacctattgatgtagctattgtaacaaaacctagagagcctagaggtttttatgtttgctaactcctgatgagggatgtaaccggccaatttggtgcctgatcgatggttagatgaaatgcgagcagatatcatttgatagcctgcttcgccttgttatttggatggttgcacttttgtgggagatatttttatacggggttaatgaaaaatctgatagtttaaaaaaaacgttnnnnnnnnnnnnnnnnnnnnnnnnnnnnnnnnnnnnnnnnnnn

SEQ ID NO: 21117 - DNA, 439 bp, Setaria italica
  Peptide Sequence Number=SeqID_87091
acatcttggggtaagagggagaaatcagcttccatttcttcaagggctatcaattctagaaaaacttgctgcacctttggctcctttaattgttggccgctccggtgctcaactctttctcactgatggtgatcctagcaagccaccacttctgctacaaatggcatctgaatgtgaggacaaaaagttcatgtaagtgaataacataattcatttagacactaatttgctcgtattgaaaaatagtgtttcttttttttttcaactgcacaacagattagcattagcagcttttaagaaccgcgttctgtatgctaatgtttcatatgaccgtatccttcctatccaaattatttcttgaacttgaactgtgcaggaaaaaaatcatttcttggacttgatctgcagcatactatccaataatgctcatctcccccct

SEQ ID NO: 21118 - DNA, 638 bp, Setaria italica
  Peptide Sequence Number=SeqID_87092
tggatgtggttaagaagatgttcagcttgagaaagatttcattcctagcacattctttgggtggtttgtttgctagatatgctattgcgatactctattcactggaaacagagaatgcaggacaaagaagtgcccaaattgttcctacagcaagaggatctgcaaaatcacgatgtacttcaggattaggtgcagttgctggactggagccaataaattttattaccttggcaaccccacatcttggggtaagagggagaaatcagggctatcaattctagaaaaacttagctgcacctttggctcctttaattgttggccgctccggtgctcaactctttctcactgatggtgatcctagcaagccaccacttctgctacaaatggcatctgaatgtgaggacaaaaagttcatattagcattagcagcttttaagaaccgcgttctgtatgctaatgtttcatatgaccgtatccttcctatccaaattatttcttgaacttgaactgtgcaggaaaaaaatcatttcttggacttgatctgcagcatactatccaataatgctcatctccccccaaactatttctgcttctattcttgttctttgttttcttgagcttatcccagatatggttgg

SEQ ID NO: 21119 - DNA, 1322 bp, Setaria italica
  Peptide Sequence Number=SeqID_87093
ttgatatagctggaagaaggttagcagatgaagtacgttcttgaaagtttgtcctagaataaaggtttcaagcatttaccttgttgtggactttctatctcctgttcctggatcctaatgaatcgcttagaagctctgataattgtgccctatggaacaggtcttggatgtggttaagaagatgtccagcttgagaaagatttcattcctagcacattctttgggtggtttgtttgctagatatgctattgcgatactctattcactggaaacagagaatgcaggacaaagaagtgcccaaattgttcctacagcaagaggatctgcaaaatcacgatgtacttcaggattaggtgcagttgctggactggagccaataaattttattaccttggcaaccccacatcttggggtaagagggagaaatcagcttccatttcttcaagggctatcaattctagaaaaacttgctgcacctttggctcctttaattgttggccgctccggtgctcaactctttctcactgatggtgatcctagcaagccaccacttctgctacaaatggcatctgaatgtgaggacaaaaagttcatgaaaaaaatcatttcttggacttgatctgcagcatactatccaataatgctcatctccccccaaactatttctgcttctattcttgttctttgttttcttgagcttatcccagatatggttggctggcgaacatcttcattaaggagagaaaaggatcttataaagccctcacatcgttcactggatggctataagcacatcgtgaatgttgaatactgttcgcctgtttcatcggaaggcccccattttccttccaaggctgccagagctaaagaagctgcacaacggacgccaaacacagaaaatactgaggaataccaccaaatgatggaggaggagatgattcatggcttgcagaaggttggttggaagaaggtggacgtcaacttccattcatcgttctggccttaccttgctcacaacaacatacacgtcaagaacgagtggcttcacaacgctggtgccggtgttatctcgcacgtggcggacagcatcaagcagcaggagtcacggccatgtcttcctgcgaatctttagcgttagcatttttagcacccccatttcctggcattttctgtggctagtaaacccacgatcaacttaaagaagtcagcattcactgagcaacgaaattcgctaaattgtaccatggtccatgcctccatgggtagtagattgttcgatgtgaatatgtgatggtgccaaatgtcatgcttctctcaccgat

SEQ ID NO: 21120 - DNA, 1505 bp, Setaria italica
  misc_feature (1503)..(1505): n is a, c, g, or t
  Peptide Sequence Number=SeqID_87094
tttataagttgtgagagtgatggttctaacagttattctgagtggcaaaagaaaacacagatatttgtcaactgtaatgccaatgacaattctatacaatttaagtacggaatgttttctagtgcactgagtaaaggcgctgtctcagcttcatttcttgagaagtacttcttttgtctttggtggggcttgctgcagcttagttcaagcggaaatcctcttcaaacaagtgcatttatcgtagagaacgcatttgcgatagcaattggtgctatcagtctcatactctttgctcagttgattggcaatatgcagacatacctgcagtctatcagtaaaaggcttgaggagtggaggctgaggcaaagggacatggatgagtggatgagacatcatcaactcccagctcatcttcaagaacgtgtccggcggtttgttcaagttaaatggcttgcgacacgaggagtagaagaagagtccatcttgcaagctttgcctgctgacatacgccgggatgtgcagcgacatctttgtttggaccttgttcgacgtgtcccttttttctctgagatggatgaccaacttcttgatgccatctgtgagcggctggtgtctttcctgtgccctgagaatacatacatctctcgcgagggtgatcctgtgaatgagatgctttttattatacgtggcaaactagagagttcaacaaccaatggtggccgcagcaacttcttcaactctatcatcctgcgccctggtgatttcgcaggtgaagaactgctcacatgggccctgcttccgaagaccaacgtccacttcccgctttcaacaaggaccgtgcggagcctcacagaggtggaagcctttgctctgcgagctgaggacctgaagttcgttgcaaaccagttccgaaggctccacagcaagaagctccagcacacattccggttctactcccaccactggaggacatgggctgcctgcttcatccaggcggcgtggcggcagcaccagagaaggaagctggctgaaagcctcagccgattggagtcatactcatggtggtcagaggatcatctggctgctgataaacccagacaagaaggcacctcaagtggtggtaggacgattgctgagggtgccattgcccatatgcataagctcgcatctgcttccagaaggttccgtgccaaggacactgctattcgcaggttgcagaagcctgatgagcctgacttctccgaagaccatttcgattgaacctgatgctttgcagttggaaatacacgttgtacaattacaaccatagtgtaattttatattcttactaaacaagaattctaggtgttgtgaattgtgatagaaaaggtgtatcatgtaatccttagctcgagaatctaccctgttagtgtatagacttcatctttgcagtgcatatggacttgagagttctgaagcctcatatattgagtttcagagatgccaaaaaattaaaaaaaaaannn

SEQ ID NO: 21121 - DNA, 1361 bp, Setaria italica
  Peptide Sequence Number=SeqID_87095
gcaaaaaagaatcgcatgttttctgtctccgtccttctactcgagttcttccgttcttcggagtcgtcaaattgagcgactcgagtttgccatggtggtgatttggaaccggaagtgctgtgctccccctctgactcccctgattggcctcgctccagttcggcgcgggatttggacgggtggagggtgggagagcagaggcggccgccatgtttgggtccagggtccaggatgaggtggagatgcagaggaggcctaacaacaggatctttcctgacgagagacaaaatcaatctaagccattatatcaagctgcacgagccgatagatttggggcaaatagaatagatgtgaagaatcctgagaagcttaagatgttaaatgaaggcagcaaaccatggcaccagcgtattctagaccctggaagtaatattgtactgagctggaacagggtgttccttgtggcatgtttgtttgctctttttatcgatccttttttctattaccttccattggttagagaacacggtaatggatcttcgtgtgttgccaaggaccagggactgagcataagaatcaccgttctacgatcacttgctgacttgttttacatgttgaacatagcaatcaagtttcatactgcatatgtggatccaaaatcccgagtccttggaaagggagagcttgttgtggatattaagaagattcaacaaagatatataagaactgatttctttgtagacatacttgcagctgtgccgcttccacaggttactgtgtggttaattatgcctgcgataaaaaactcagattataacgtccggaacactgcatttgctctcataattgtgattcaatatgtcataagaatgtatctcatcgtccctttaagcaatcaaattatcaaagctgttggagttgttgcaaagtcagcttggggaggagcagcatacaatcttctactctacatgcttgcaagccatattactggtgcaatatattatcttctctccatcgaacggcagattacgtgttgggatcagcagtgccttgctgagtccaacgttacatcttgcaaccttagatttataagttgtgagagtgatggttctaacagttattctgagtggcaaaagaaaacacagatatttgtcaactgtaatgccaatgacaattctatacaatttaagtacggaatgttttctagtgcactgagtaaaggcgctgtctcagcttcatttcttgagaagtacttcttttgtctttggtggggcttgctgcagcttagttcgagcgcaaatcctctattctgtattttttaaagatccatcaagatattctatcaccttgggttattttgt

SEQ ID NO: 21122 - DNA, 415 bp, Setaria italica
  Peptide Sequence Number=SeqID_87096
gtatttacacaagttcaaaggaggacaaaataaaactacttgtagcttaggaaaatctacttgtcagcactttacatcatcaccgagaaggtggccgatttccgatactgctatcaatcatcatcttcctcgtcgtcaaattcctcctcttcctcctcttcatcgctcagctcttccataggctcatcgtcctcgtcattaactacaaaacctcccagagtctcatcttcctcgtcctcttcttcctcaacctcttcatcctcgtcatcattatccccacctttaacctttgagttctcctgacgaggctttttcgggtctttagatcttgtcacatactttgatctcttgacgctaggacctcttgccagggattccttttcatcctcgctctcatcttctattctagttccta

SEQ ID NO: 21123 - DNA, 444 bp, Setaria italica
  Peptide Sequence Number=SeqID_87097
taggaatttgacgacgaggaagatgatgattgatagcagtatcggaaatcggccacctttaacctttgagttctcctgacgaggctttttcgggtctttagatcttgtcacatactttgatctcttgacgctaggacctcttgccagggattccttttcatcctcgctctcatcagtccagtcttcatcatcaccctctccatctttattcttcttgttccgacccaaagcttttgatctacctctcctgttgctaacctcatcatcttcatcatcggagcttctctttgtttcctccaggaaccaattccaatcctttggagcacgaatccttccctttggataactatcaaattcatggcccattgacaagaacccaaattctcgaactggatctatgctcgctaaatcaatgtccaaaccctccacatcagagcccgccgc

SEQ ID NO: 21124 - DNA, 252 bp, Setaria italica
  Peptide Sequence Number=SeqID_87098
cggcatggcgcggctcatcagcgcgctggacacgcacctgagcgtgagcacgctggcggggacgcccgggtacgtgccgccggagtactaccagagcttccggtgcacggccaagggcgacgtctactcgctgggggtggtgttcctggagctcctcacggggaggaggccgacggacaaggaggacttcggggacaccaacctcgtggggtgggtcaagatgaaggttagggagggcgccgggaaggaggt

SEQ ID NO: 21125 - DNA, 762 bp, Setaria italica
  Peptide Sequence Number=SeqID_87099
ttgttattaggtttcaccaagctcagaatgggtagcagtaagcttatagcacttagcctttttgtgctcttaagtattggattagccaatgctgttagagtggctaggtactccagttctcaaggaacgggggaaggagggggcaatggtggtgcggttgtgaatggtgctggctctggatctggaagcggctctggatccggtcagactagcggtggtgcatcacatgcgagtagtggaggcgacggcagtggtggtggctggtcaaaatatggtggttctgcgtttggtggtggatccggcactggatctggctctagtctatctgaacagggatcgtcttatggctatggtggcactacaaatgccgggggcagtggtggtggcggcggcggtgggcaagcttcaggaaatgagggatctagtgggtatggtgcaggtggtggtaatggatctggctctagcgagacaggcagaagctactacaatccatatgtaacatatgccaatgctaatgctgctggtaatggaggtggcacaggtaatactcaaaatggtgggagcggtggtggtaatggcagtggctccgggtacggtgatgcagagccttagaatttcttgtatgatctaaagctagagtcctaaatatgttattaatttcactttagttataagattcttttttacttttatttttttcctttttgatgtactgccagacagggactaataaagggctccattattgaataaaaaaaaaaa

SEQ ID NO: 21126 - DNA, 727 bp, Setaria italica
  Peptide Sequence Number=SeqID_87100
tttttttttttttttaaagttacataaatacatagattttattatatgaattattcaaaccaagtccattcgacaaggccattgctaggtgcaactaatgtcagacctagagatttcttcttgaagacgagtaatcggtaccactaaatccaaatccctttgtgctgtgtccccttctttccatggcaatgccgccgtaccacccaattcatgaagagaagacgcttttcaggactttgtgctgtgctgctaaaacagaacacaagatgtatcctggaatgggattttcctctgccatccactcatccataaccattccttttcaagcacgagcagtacacaaaatcatgtcccaatctgttattctcagatgatatgaccatggtcctctcttcctccttcccttttggacagacatgaagtgttgaccagaacctcccaatgttggtccggaaccagaggagcaaaattaggcagctcacaatagcccacaaacgagcctgctatcgtcatggttcattgcaccatctcgttatcctcactagccttggtgatacattcacacgattccatcctagttcaagtgccactcttcggaatcaggcagtagatctatagctgctaggatggggcgtagagagaaatgtacaacgcgcgcgcatatgtgatagaattttaaaaccgttagcccagcctccatgcctgacccccatgcatgctgaacttt

SEQ ID NO: 21127 - DNA, 1950 bp, Setaria italica
  Peptide Sequence Number=SeqID_87101
cgaggcacgagagaggcgacatgagcagcttctgacaaatgtttttgctgctggtggtcttgctcttctcgttggactgtgcctccctatactggtggtggtcttccaccggcacgggcaaaaatgtggtgtaaggtggtagatacctttacaacactttggatgagtaaaatccccacgaaaatgaggggaaaaaatcgggcagcacctcgctaagcttgcttgctcgccatggagaaggagctcgaagctctcgatctgagtggctcgggctcgaggaggaagaagctgacttttataggcaagtcatttagtcctagttggtaacaccaaccggactaaagaccatccatttagtcccggttgaaattaccaaccgggactaaacctttagtcccggttaccaacagggactaaagaccatccatttagtcccggttggaaattaccaaccgggacaaaggtttagtcccggttaccaacagggactaaagggggggcctttagtcccggttggtgaaaccaagcgggactaaacgcccccaccaaattctctcatcccactagccgttacaaccggaactaaaaggggctttttagtcccggttgatattactaaccgggactaaggctcccgtcgtcggtggctatcggtagtggctgtttaacccgggactaaaggctggatcagcctttaatctcgagtcaaaaaacgaccgggactaaaaatgctggacggaaggtctattctctactaggtagtacttacgtacatcataaccacatagagcacgacgagggcgggcgacacggcggcgaggtcgacggccatctctccggagtgccgcgagttgaccgacatgaacagcgccgcgacgagcttctgggacgcggtgagcccccgcagcccgtcggagccccactccatggcgcagaagagcaccagctgcgccgccacgagtgccgctacggtgaacgccaggtgccacgtgcgcgcagccggcagcaggtggtcgtaccctatggtggaagtggcggcagctggtccaggtcctcctcctcctcctccgctgaccagcagctcgccgaggtctcgcctcctcgtgaccctctcgagcgctccaatggagagcctgaggaagacggggaagagcgtgttcccgaggaggacgtgcggcatggccaggaggagcatgcccgggtaggacttgaaggacaccatcccctcgttcgttggcacgaagccgcagttcgcgaacgtcgagacgacggtgaagatggagaaggtgctcgggttgatcttcttaccaatgagcacctccctcgcgccggtgacggcgctgaggtagattagcatgagcgtgtagccggcgaggtgcaccaccacgaggtaccccaacaccacaaacattagcatcctagtcctagcaatggatgtgaaatcaaggttgttcttgaaccctgtctccatttgttctagtgcggcgacggcagctggggctcctcctcccatggttctgagctctaagctagacgatggcggcggtaatccgttattaccgtcgagatcatggggtatttgtgtttctctcttcttgagcttggtgtaggtgaagtggaggccgagcatgcttgtgaacacctcgccgccgaggagcatcaggagggtcacgaggaggagctgggagttggagaaggattccatctcgacggcgaccatgctggacactgtcgtcgcggacacagacgtgaagatcaggtccaggcccgagggtgttgggaccgcgctggttttcatgggcagggcttttaacatcatgaaaccgaagagggagatggagaggaagtacacgagttggatccagaacgggtgcacatgaaagagcaaaaggtggtaaaacctttgagaacaactactactactggggacgtgccaaagacccatagtct

SEQ ID NO: 21128 - DNA, 781 bp, Setaria italica
  misc_feature (1)..(32): n is a, c, g, or t
  Peptide Sequence Number=SeqID_87102
nnnnnnnnnnnnnnnnnnnnnnnnnnnnnnnngttaagtacaagcttctagccattttttcatgttatattacagacagacttccttggtcatacattcacacgattccatcctagttcaagtgccactcttcggaatcaggcagtagatctatagctgctaggatggggcgtagagagaaatgtacaacgcgcgcgcatatgtgatagaattttaaaaccgttagcccagcctccatgcctgacccccatgcatgctgaacttcttgagcctgccatagaacatgacggccatgagcgtgagcttcccttccctgctccacttcccggagaagccgacccaggcgtccctgcagctgccgtcgggcttcacttgcctaccgcagctgtacccggtgctgaatcccacgttgccatacgcactgatgatctcgacgacgatgttgcggacgctgaagttgattgggtcgtgggcgatctgccgccgctcggtgatgcagatgacgatgatgaagatggcgaggcacgagagaggcgacatgagcagcttctgacaaatgtttttgctgctggtggtcttgctcttctcgttggactgtgcctccctatactggtggtggtcttccaccggcacgggcaaaaatgtggtgtaaggtggtagatacctgcagaccaaagacaacatccgagtaagctttgttatgactccatccattccaaatcacagtttacttattattattctaaatcaaactttaatcaacttagagaaatataataac

SEQ ID NO: 21129 - DNA, 499 bp, Setaria italica
  Peptide Sequence Number=SeqID_87103
cgctggcggagggctgcaggtaggtgccgttggccatgggcacgtcgacccagagcttctggcccttgcggcagtgtcccggggcaccgctggtgtagtaggcgcggccgggcgtggtgaggttgaagacggagttgccgtcggcgagcttgagcacggggttggccaggtcgcaggcggcgaaggcctccggcgtcacctgcagcaccgagtcctggctgggcgggtacaggaaccagatggagtcgccgagcgcgaagtggacggacttggcccagctcttgtagacgtcgggcttggagggcggcggcacgccccaggcgtcgaggtcgcccaccttgtacatggcgccggcgcacccgcccgccaggagcagcagcacggccgccgatgccaatgccgcccgcgcacgcatcctgctgcctgtgctgcttcgctttgctagctctaccggctgctcactgtctctttttggtgcacagcgactgctcgttttctt

SEQ ID NO: 21130 - DNA, 794 bp, Setaria italica
  Peptide Sequence Number=SeqID_87104
ctgctttcactgtccaacttcaagactgaaagtttacagatgatgttctttttgaaaattgttccctggcaatacataatgtacatctgtgcaaccttctatatttgatttgttaaatttattggcttaatgaatactcattactagctgctgctgctcttggccatgcatatgattcatagttgatgcattttcttctttggtcctccagcatctgcaaccaatattgctgctgccccctctggaccatgcgaatcagccgcatgacaatgtagaatggaagcaagataccagcagcacggagcaagtacattgtcaggagactgaacgcgcagtgatctgctgcttcaaccatcaccactgcaaccagatgccacaccaacagcataatggtgaacataattgtcagtgtccggcaccatgtggcaacttgatctgagcacgcgccgtaatctgcatcgtcaatcaagctctccgaagattccacatattgcatgtcctcatgttcactgatggtgactgccgtttcgaccaccggagttttctttggaggcatggtgtagcctggctcgaaattctgaaggcaaatctcacagagggtgctccccttctcatcacaccatctctgcacacatcccctgtgagcatacttgagagaaccagagcacccacatggagactccatggtcgtgcacacctcgtcctcctcctcatggcagatcctgcactgcatcaggtagcccaaggaggaagacgatgaaggcagctcctgttcgtgttccattccgttctcc

SEQ ID NO: 21131 - DNA, 234 bp, Setaria italica
  Peptide Sequence Number=SeqID_87105
tgctaaatgctaatctgaatctctgcccatgctctctgaatgtagtttggattaaattgcaatctctgctcaaaaatgttttgttgtcagttgccagcattggtgtatcactcgtgtgttgtaattgcattttgctttattatccttaagtgacacttctgctgcattctgaatttctgatcggtcttgtaggtgccagagaagctctcagtgtcccatgtgttggcaggcaat

SEQ ID NO: 21132 - DNA, 510 bp, Setaria italica
  Peptide Sequence Number=SeqID_87106
gcggcggatggcagagatgtcgagctcgaggccgacgaggaacaggaagaaaagcaggccgaggttggccagcgtgtccaacactgtcatgctctgggctgggaacacggtgtgcaagaacttttcactccggcccagagccgacgggcccagcagaattcctccgatgatctcggcgatgacgcggggctgccggagcgggcggaggaggtacgcgaggccgcgggtgacgacgacgacgaggcagatctggaggatggcgagcgggagcgcgtactcgagcgggttctccccctggaacgccccctgcgaggtggccttcatcggccccgggcacttcgccgtcgcgttcgccgccatcgccgcagcagcgttctcggatcaccagatcaccacgcgctgcttgctggccttaaacccctcttgcgcgccgccgcgcgcggcttggtggatccggcgtggtcgatgtggacagaggcgaggcgagtcacgcgtgactggaggacggtg

SEQ ID NO: 21133 - DNA, 985 bp, Setaria italica
  Peptide Sequence Number=SeqID_87107
tgggaaacacagtgacaatcatcttgtcttggttctcttctcttgacgccaccttcaagcaggctgccaaatttgctccagatgatatcccaactagcaggccctcttcccttgacagcctccttgcattcgccattgcatcttctgcagttactgtaatgatctcatcaattagtgaggtgtctaagttcttgggtacaaatcctgggccaactccctgaattttatgccgggaaggtttgccacctgaaataactggactctctgcaggctcaacacaaatgaccttcacagctgggttcttcatcttcaagtacttgccaacaccagagacagtacctccagtgcccgaaccagctacaaagatatctactttgccagccgtatccctccaaatctcaggtccagtccatgcaaagtgtgcttcaggatttgctgcatttgcaaactgatcaagaacatgaacattgggtaaatctttcttgagctgctccactttgtcaagttgtccttgaaagccaagcataggatcagttaaaaccacatctgctcccagatacctcagcaagatctgcttgtcaagtgaatactcagcaggcatgactgcaacgaacctgtaacctctgatcaaagcgatgtacgccagacctatccccatattgccgctcgtcggctcgatcagtgttgtggtgccaggtgagatcagccctttcccctctgcatcctcaatcatcctcagagcgctgcggtccttgacggagcagagcggctggtaccactccagcttgccaacgatccgggcgttgacctggtccttctcggcgattctcttcagctctatcagtggcgtccatcctacaagctgggtaatatcagaggcgatgtgttcctgatgcgcagaagcagcttcagtttcaggcgttgacggcgatctcagcagggcagggatccccctcctcccctcctcttcctccatgctttcttg

SEQ ID NO: 21134 - DNA, 459 bp, Setaria italica
  Peptide Sequence Number=SeqID_87108
aatcaagttagaagagcagcatattctgtgctgtcaactaaatttcctctgcagagccttagcatcaagcaaaggactactctccttcacaggggcctctctgataggtctgcttcagtaaacaatgggtgcctgaagatgctgaaggatgagtggcttgttaagtactgtggaggagatgcaattgcccttctcaggtttcttgatgttgagacatacgaatcggtcggggaatctgtgatggcagtgcttctgaaagagggtgctttgcgagtgcaagatgggcagagtattaggcagtacttcactgcaaatggtgagaatgaagaagaacaactttccaatattcaactcatggatgctgaggttgctctttactggaaaataatgtgcaagcatttgcaagctgaagctcaggtcaaaggctcagaggctgcaacaactacaggtgcagaagca

SEQ ID NO: 21135 - DNA, 427 bp, Setaria italica
  Peptide Sequence Number=SeqID_87109
tcagatgctcaccgggaggcgccgaagctgtcagtgagctcacggtctgcgcagctcgatgagacgccgaaggcgaaggctcctgtcaggagaggaggcgatccgatgctccattacagctgccctccgcttagcaaggggaggaatggcgccgtggcggatgattcttcgccgtcgacgtgccccaggaggactacagactttgatcacggcctgagaagccagtctgcgctgtcgttccggggagtgtgttcatccaggatatcacccactgaggacagtctcgcgagggctcttcgatcgtgccactctcaacctttctcattcttggaggaaggggaaactgcaacatcaggagtggtgagtttggctgactacctggggacaaatgtggctgaccacatccctgaaactcccaacaacctat

SEQ ID NO: 21136 - DNA, 421 bp, Setaria italica
  Peptide Sequence Number=SeqID_87110
cctgcaacgtttgtaagatgaaaatcttacttttgctaaatttaggttatttctgctaaatttcaaatcaatcttcgtttgttctggctgtgttcatgagcaggaaggggaaactgcaacatcaggagtggtgagtttggctgactacctggggacaaatgtggctgaccacatccctgaaactcccaacaacctatcggaggagatggtcaggtgcatggcaggggtgttctgcaagctcgccgaccctcctctggttcaccaccggccgtcgtcgtcgccgtcctcgtcgctctcctcggcgagcgtggtctccccgcagtacctcggtgacatgtggagccccaactgcaggagggaagcgacgctcgactcccggctgatcaacccgttccatgtcgagggcctcaaggagttcagt

SEQ ID NO: 21137 - DNA, 268 bp, Setaria italica
  Peptide Sequence Number=SeqID_87111
aggaggggggggggggggggcgcagggcaaagatacagtaaggctgtcaagtatcaggctcagatcatctggagaatactcaaaggaactctcgagttggttgataagggcaattctattctccagcacctcggaggatttaaccgcccctaggagggactccaggtcgccacacctcccctccggcacgccgccgtcgacctccattgcttgctcggttgctccctcgctcggcgcgtggctggttttgccgtttcccgcctcttcc

SEQ ID NO: 21138 - DNA, 294 bp, Setaria italica
  Peptide Sequence Number=SeqID_87112
ccggctgcagcacttctacatggaccaggacatggacacgctcgcgctctgcctcgaccgctccagcggctccgggttcagctccaacggcagctacctctacgcacgctacgacatggacatcaagctcgtcgtcaacgactccgccggcaccgtcgccacattctacctgatgccggacgacgtgccgtgggagtaccacgacgaggtggacatggagttcctcggcaacgccaccggagagccgtacacgctgcacaccaacgtctacgtcaacggcgccggcggccgcga

SEQ ID NO: 21139 - DNA, 975 bp, Setaria italica
  misc_feature (1)..(2): n is a, c, g, or t
  Peptide Sequence Number=SeqID_87113
nntttttttattagtctcaatctcaaccaccagtcactttttttgagatgcatgccaacatacatatttttgtgtttattgtacaatgatggaaccctttattaactcgatacaatctagcacatgcataatgatacaaatataaaagtaagcaaattctaataaaataacagccaaaaacaccataggttgggctccatcttctgataggtagagcttctaagggttcgcattaccatagccagatccaccaccctgaccgccgccactaccaccattctgaccggtgccttttccttcaccattgccattggcattagcatttgcataacccggaccgtaccggtatgtaccagcttggctagagccagaaccggttccgctaccaccaccttggccactggacccatagttaccaccagcttgtcctccaccaccgccacctccattaccaccagcgttagaatacccaccatagccataatatgagccttcaatgtactggctagagcctgaacccgagccagatccaccaccatacccagagccaccatagttgctgctaccaccacctccgcctccacctccggcactcgcgtgcacaccatttgaaccactttcaccagacccagcaccactaccagacccagagccagcaccattcacgtatccaccgccgccgccctctccggtaccagttcctcccgaactggagtacctagctacccttgcagcattggctaagctcataatgctcaagaggacaatgaaacctagggctaccagtttagtgcctgccattgtgtgagcttacaagtgtgagatggtgaatggtgctggctctgggtctggtagtggtgctgggtctggtgaaagtggttcaaatggtgtgcacgcgagtgccggaggtggaggcggaggtggtgctaccaccaccttggccactggacccatagttaccaccagcttgtactc

SEQ ID NO: 21140 - DNA, 1006 bp, Setaria italica
  Peptide Sequence Number=SeqID_87114
tcggctagtaacaatctacaatcacacgaacaaatcattggaacatgcacgccacgaccgatcgatctccaacagatgtttatttacagcagtgctatactaatcgccattgacgcggtgaagcttatgcttagtagccccagagctgctcgtggtcgaaccgttggccggaggaggaggagatctcggggtgaacgtcagaggtgagcccggtgtcctgcgacgcgctcagccgttcccgctcgccgcccttgcacggcggcgccggctgctgctgctgcttgggcatgtccggtaggccgccgccgccggcgtacccgctgctctccaggagctgcaccaggctcaccccgccgtggtgcagcgagccgtactgcgcgaagctggagaggaacggcgaggaggatgcgaggccgagatggtccgtggcggcggcggcggcgacttgcggcgccgccgtctggttgaggaacgactggccctccagcgcgttggagaagcaggtcacgtgtgccgccgcggggttggcggcggcgccggacacgtccatcagcggagggaggtgagagatggctgccatgtcgtccatcttggccgccatctccatggcgccccttctggctgctggcgggacgcctacgcctacgataaggctcttcttgaacaccctgcacagaacccactcgttcttggacgcgggcttgggcatggcgccgtggagcttgccgtggaggcggtactcgtgcatgacccagccggacttctcgcccttgggcgccctcccggtgtagaagacgagcgtcttcttggagccgacgagggccttgcccctgaagatgtccttgtccttgcccgtggccttccagtacccggcctccgtggccctgttcgtcctcagccccgtcgggtacttgcggtccttgaggcagaagaagtaccactccttctcccccatcttcgccagcgagggcaggtcccagggctcgcacttgttgaggtcggcctc

SEQ ID NO: 21141 - DNA, 453 bp, Setaria italica
  Peptide Sequence Number=SeqID_87115
cgtctagagcttctcctgcagagcgggcaggacccgtgcttgatcagccagccgtcgatgcaggcacgtggaacacgtgccagcagtctggcaagctccgcaccttctcccgacctggaaatcctgcacaaatgaatggcaacatccaagacggatggaagaaattttcagcacacttgcatatcaaatccatgcagcattcttttgtctgaatgtgatcgatcttaaggcaatgaggaatgagctagagcagagatgttcagagtttctccggacctggaggcagaccgagcagccggagaggtcgccgacgccgtcgcgcttgtactcctcggtgatccaggactcggggagcttgtcaatggaggcccgcggcatgccgttggtggcctccacctcgaacaggtccggcggctccctgaacggcgacgagtccaccgcgttcatctggca

SEQ ID NO: 21142 - DNA, 1384 bp, Setaria italica
  Peptide Sequence Number=SeqID_87116
agttttttttttttgtaaacgtacgagacgagatttcaagaagacaatagtcacggcaagatgataagcatgtccaagtgccatgatgtgactacaagtcggtaatatattacaccagatcacagtccagagacgatggatcgaagcacaagccgaccggtcgtccaagggttttcagaggcagaagcagcagcagtagtatattacatgatcaggagagaacgaacgagcgaggaagatattatagatcaaaaaagatgcaaaaagaaaagtagaagaagaacacgtacaagcagcagcagcaaaaaagaagaagcaaaaactctataaattaagggttctatagatgtcagtctcttcctcctcctccagctcctctcctcatcctaggaagcagtgtggcacagggcacatcgatcaactcgcagcgagcaagcaagcatgcatccatggcgtcggggggcgtctagagcttcctcctgcagagcgggcaggacccgtgcttgatcagccagccgtcgatgcacggcacgtggaacacgtgccagcagtctggcaagctccgcaccttctccccgacctggaaatcctggaggcagaccgagcagccggagaggtcgccgacgccgtcgcgcttgtactcctcggtgatccaggactcggggagcttgtcaatggaggcccgcggcatgccgttggtggcctccacctcgaacaggtccggcggctccctgaacggcgacgagtccaccgcgttcatctggctccggaccactcgctgcaccgccgggtcgaccttctcgcggacgagcctgccggtcaggaggctgtagatcacgttcagcacatagaggatgctccagatcccggagcggcgggcctgccagaggcggatggaggagtcgacgacctcgatggagacgagggcgccggtgatggcgccgatgccggtgccgcggaacagcccgctctcggtggccagcccgatgaggccgccggtcaccgcgcccaggaacagaccagcgatggcaaagatgaaggtgatgacgccgcggcagaccctgcgcatcatcctcctgcccctggtggcgcccctcccgcgggcggcgctcccgccgccgctgccggtcctggcgagcgacgacagcgacacgttgctggagctccgctgcggctggtgctgcaggaacgcggccgacgaatccatgcctgcttgcgcctggagagagagcacgcagcagctcaaacctccagccggccctgaatccttgcgatcgcgggtgcggcggtgcggttggggaggccggtgacgaggagcgaattaattggcggcgacgcagggggtggtgagaggagaagcggtagcaaagctgcaatgcaaagg

SEQ ID NO: 21143 - DNA, 338 bp, Setaria italica
  Peptide Sequence Number=SeqID_87117
ggggggggggggggtaagtgatgaacttatacttgcaatttcagagctgcctcttatttatttggggaactccattctactatgtacctttgtaccccatcaggcttcacactagaagataacagctaaggcgcatgcaaatggtgtgatatagcataatcgcatatgacatgttgaccaagcttaactgtcaaccattacaaattaaaattttgtcaagggacgtgaatggtcgtgtttgttgaattggtaaacgagcatagatgacacactaactgcataacattcaagccatacaatttaaaattcttacccagaattcttgggctctcccactc

SEQ ID NO: 21144 - DNA, 272 bp, Setaria italica
  Peptide Sequence Number=SeqID_87118
ggggaggcacggtggccaccgccgccgacgcggtggcggggcggtacctgtgcctgacgatctcggccctgacggtggcgagctcggcctccagtgcttgcacctgctgctgcagggtgaggatggcgcccatgcagccgtacacggggtcccggagccgcaggttcgcctcgtacaccaggctgttcgccgcgtcggcgcgttggctctcgtgcacctccaggagcatcttggagacgttgctggcgccgaagaccttgtgcacggcggcg

SEQ ID NO: 21145 - DNA, 263 bp, Setaria italica
  Peptide Sequence Number=SeqID_87119
taatcttcctttgttgtaagctttaggatgttgctaagtccatgacacgttcaccctttttaggcttccgctgtgggggacgcttatcaaaccaaaacccaacatgttcatgcaccttcaagctcgaggatatcatggaattgcagagaagagaaacctgctggaccacaaacgtagattgcttgcagaaaaatatgagctaagaggaaagctttataagtctgtctgtagggaccctgatcttccattggatatgacggggg

SEQ ID NO: 21146 - DNA, 894 bp, Setaria italica
  Peptide Sequence Number=SeqID_87120
tttgttgtttgttagttgttaatttactaattatgttgcttgtttttagtgttgtctcacaacttttattctacattctggactagtattttagcagccagttctgcattgtgtactccaacttattatttgattgtaccaggattcacacattagctgttcatttcatcttattgattagatccacttcaatttagttgatgttcaattagatgtcttagtttagttaataggatgatctgtttgcagctagaataatcggtataaatgatgcttggtatacgatatattgcattctgagattctgtagtcaaactgagactaatcaaaatgagttaatggaagtaatttggtcttaacattaggctccatgataaagtgtctttgaaactgttatcacctttttggttataaattgtgagcaagtgcttaactgttataataaactggatttttcgtaaacaaacatcatcaatcttgctacatctgtatatgttacaagctgccatgtaagtagaaactaaacatttaagttgaagaggttcaagttcaagaaaggttatttcacttatttttgtgttctccagtgcacacttatctgcaatggagcgtttctattgcttgtccctttggtccagtttgaaactttgaaattgtggtgtgttgttataaatgcttgttgccataccatgattgcgccaacgtgcactgtttctccaggtggatacaggacagccgcgaccagttcaccaaggagcgcctggacgccatcaacgacgagttcaagctctaccgctgccacaccatcaagaactgcacccacgcctgccccaagggcctgaacccggcgaagcagatcgacactatcaagaagctccagatcaacagctagaa

SEQ ID NO: 21147 - DNA, 520 bp, Setaria italica
  Peptide Sequence Number=SeqID_87121
cttggaacatgtttctgaatgcagaaatgcttattgggttatcttcatacttggactcatgaatttgctgttcctgttcttttgtctgctcactcttccacgatgctagtgaagaaattactacttctctcccaagcatacctcttgtgctctgaatgattgtgaacattgcatggttgggtacttgatatcttaaacctgagtgaagttgcttgtgttgtgaatttttcaattaatgttgcttgttttagtgttgtctcacaacttttattctacattctggactagtattttagcagccagttctgcattgtgtactccaacttattatttgattgtaccaggattcacacattagctgttcatttcatcttattgattagatccacttcaatttagttgatgttcaattagatgtcttagtttagttaataggatgatctgtttgcagctagaataatcggtataaatgatgcttggtatacgatataattcggttattaaattgtattgtctttgt

SEQ ID NO: 21148 - DNA, 484 bp, Setaria italica
  Peptide Sequence Number=SeqID_87122
cggcctcgcctgcctcaccaagatctcctccgcgtcctcggcatccacggtctcgccgctgccacacatgttcgtcgtcaaggatctcgtcgtcgacatgaccaacttctacagccagtacaagagcgtcgagccctggctcaagcgcaaggacccgccgccgcaggagggcaaggagatcccgcagaccaaggccgaccgcgccaagctcgacggcatgtacgagtgcatcctctgcgcctgctgctccacatcgtgcccgtcctactggtggaaccccgaggagtacctcggcccagccgcgctgctccacgccaacaggcttccgctgtggggacgcttatcaaaccaaaacccaacatgttcatgcaccttcaagctcgaggatatcatggaattgcagagaagagaaacctgctggaccacaaacgtggatacaggacagccgcgaccagttcaccaaggagcgcctggacgccatacc

SEQ ID NO: 21149 - DNA, 541 bp, Setaria italica
  Peptide Sequence Number=SeqID_87123
cctccgcgtcctcggcatccacggtctcgccgctgccacacatgttcgtcgtcaaggatctcgtcgtcgacatgaccaacttctacagccagtacaagagcgtcgagccctggctcaagcgcaaggacccgccgccgcaggagggcaaggagatcccgcagaccaaggccgaccgcgccaagctcgacggcatgtacgagtgcatcctctgcgcctgctgctccacatcgtgcccgtcctactggtggaaccccgaggagtacctcggcccagccgcgctgctccacgccaacaggcttccgctgtgggggacgcttatcaaaccaaaacccaacatgttcatgcaccttcaagctcgaggatatcatggaattgcagagaagagaaacctgctggaccacaaacgtagattgcttgcagaaaaatatgagctaaggggaaagctttataagtctgtctgtagggaccctgatcttccattggatatgcgggaaaagttccgctataagttgtcaaagttgccaagaaatagctccatgac

SEQ ID NO: 21150 - DNA, 1249 bp, Setaria italica
  Peptide Sequence Number=SeqID_87124
caaaaaaagaaggagaaaaggaaacgcccccccaaactcggaatccgcacgcaccccatggccgccgccgccctcctccgccgctcgccggcggcgcgcgcgctcctctcgccgtccctctcgtcccgcctcgtcgcgtccaagccccactcctcgtcccccgcgccgccgccgccgccgtcgtcggcgaaggcggccgcccccaacgtgaagaccttctcgatctaccggtgggacccggactcgccgtcgacgaagccgcacctcaaggactaccagattgacctctccgactgcgggccgatggtgctggacgcgctgctcaagatcaagaacgagcaggacccgtcgctcaccttccgccgcagctgccgcgagggcatctgcgggagctgcgccatgaacatcgacggcgacaacggcctcgcctgcctcaccaagatctcctccgcgtcctcggcatccacggtctcgccgctgccacacatgttcgtcgtcaaggatctcgtcgtcgacatgaccaacttctacagccagtacaagagcgtcgagccctggctcaagcgcaaggacccgccgccgcaggagggcaaggagatcccgcagaccaaggccgaccgcgccaagctcgacggcatgtacgagtgcatcctctgcgcctgctgctccacatcgtgcccgtcctactggtggaaccccgaggagtacctcggcccagccgcgctgctccacgccaacaggtggatacaggacagccgcgaccagttcaccaaggagcgcctggacgccatcaacgacgagttcaagctctaccgctgccacaccatcaagaactgcacccacgcctgccccaagggcctgaacccggcgaagcagatcgacactatcaagaagctccagatcaacagctagaagcgatcatgccatgccgtcccttcaaaacgaatttggaacaaaactgtgaaaatttgcgatgaacatgcctttttgttttgcctcgtggtcgttacctgacaaataattcccgcttggggcctccacaggtggaggtagcgtagggagtgaataattgctaccgtgtttcatttttatgctgtatctaatttggtcgcttgcgttacattgtatgctcttatggatgcaggcgttacattgtatgctcttatggatgcagtcattcatggatgattgtcattgattttaatattggttgcacattatggaattgtgtttgaccttttgagtttag

SEQ ID NO: 21151 - DNA, 742 bp, Setaria italica
  Peptide Sequence Number=SeqID_87125
ttacatacatgcctttccttcttaaatctttgtttgagttgaagactactaccttttttttttattgaatgggagggaaatatatttcttgaccattgattacattatggatcataggtacatgaccacaacactcgaggaaaggaaaattacttgaccacactgacaaattgtaattgaaagggaaaggaaattgtgcagattttatttgcggactttgataggtgaaaaaagaaaatgaaggtagtagtcttcaactcaaacaaagatttaagaaggaaaggcatgtatgtaaccagtgcaataatgggctcagcttcttccttccttcttctgcacctggcctcagttcccctaattgaccttgcattcgccaacgcaatcctggcgcttttggcaggcaagcaggagagtcttattgtcaaggaagccattgcaccttctgacacaaatttccaagcatgtgactctgcatatgttgttgtcgccgcaggggacagtagtgttcggcacctgcagaaggctccgccttgcagccgcggccgctggcgtcgccaccagcagctgcccggcaaacaggacgagcatgaggacagcggcggtcctgagggcggcgctggaagccattggtaactgaagtggcagcggcgctgggactgggaggcggctagtagctagagagaacgagggacgatggattgatcaaccctagctgtagaagctagcgtttgctgctgctggc

SEQ ID NO: 21152 - DNA, 258 bp, Setaria italica
  Peptide Sequence Number=SeqID_87126
cttcgcgccgtccaaggccatgcgcgacatgttcgtgccggcgtacgaacccgccggcgccgggacaccgctgctcctgcttcaggttgctgcgcttctgactttctctccattttaacgcaaaccgatttcaattcgttcttggatggagttcgtgcatgcatacagcgtaccacatagttcgagcgaattaagtatgattaataatccaactaatcacgtcaactgtgtaatgattaaaaaagaaagaaatgtggg

SEQ ID NO: 21153 - DNA, 665 bp, Setaria italica
  Peptide Sequence Number=SeqID_87127
acttcacgcgccacactagaagtcagaagcagagagcgcaaggccgaaaagccagagagcactcgcgcgccacagacaccgatggcagccatcgaggtcgtggagtcagagctggtcccgccgagcgagcccacgccgcggggcgcgctctggctgtccaacctcgacctcgccgccaggaacggctacaccccgacggtctacttcttccgccaccccgacgagcagacgcggtcaggcttcttctcggccgacgtcctccacgcggcgctggccgccgcgctggtcccgttctaccccttcgccggccgcctagccgtcggccgcgacgggcgcgccgagatcgactgcaacgccgagggcgcgctcttcgtcgtcgcgcggtccgcggccgcgctcgaggacttcgagggcttcgcgccgtccaaggccatgcgcgacatgttcgtgccggcgtacgaacccgccggcgccgggacaccgctgctcctgcttcaggtcaccttcttccggtgcggcggcgtggcgctgggcacagcgatgcaccacttcgtcatggacggacgcagcgccttcaatttcatccggacgtgggccggcatagcccgcggggacgccggcgccgccgtggtaccgtccctcgatcgcacgccgctccgggcgcg

SEQ ID NO: 21154 - DNA, 259 bp, Setaria italica
  Peptide Sequence Number=SeqID_87128
aacaattatccaaacaacacttgatagctcatactgataaatcctaacaatacattatcattattttggggatattttgctaaaggcacagacctgacatacatttgaatgggttgataaaaataatccagcatatatctacttgaaagcccctttaagtgtgcaagtattttgagttgatcaacgcactagtcaagtacaaatccttttcagatagggtcagcttcaaacttttggctgaccctccaaatcagtatta

SEQ ID NO: 21155 - DNA, 800 bp, Setaria italica
  Peptide Sequence Number=SeqID_87129
aagaaaaagaagcttgttgaaaattactagtaaacatgacagtatattgttaaaatacatgccttggtccctgttgtggaaagacaacacagtcaaacatgtggtgcaggtacggaacatcgacagcatggagaacccgtatgtcaccggggtggaggcaaggatttttggcaacaactacttttcctgttacaacgaatttgcgatggtcatctgcacagtaagaagcttgaatgaatacctggccatacttcagtgtgcgggtttcatccaagcatcccatcattgcccgtccttgtgggatgaatatccttgactttgttttcaattctagcagcttggatgctctaaaagtttgtagcagcatggaaagatatggttcatgatcaggctggtagccacatgacaacaattctttaactacattagttacttctcccatgggcataagttcaattgcttcactagcagcctgcggttcagttaccattctgtttaactgcctcacagcttcctcctgctttagttcaaagacagtaccactaactccgagtgttgagagaagagtgatcaactgtcgattcaagaagcatggttggtacttgctgtatgcaaggacatccagggtgatattttcggactggaactttgacatactttttctcaaagaaagcttacgatttgatcctggatcaatagcgacaacacctttgtaaccgccataccttatctgaaaaactgaaggagcaaagcgtttcaatttgcacttcatagccacctccaatgcaaagttagctgag

SEQ ID NO: 21156 - DNA, 2555 bp, Setaria italica
  Peptide Sequence Number=SeqID_87130
taaagtaaaataaaaggagaataaggcgaaaaatgaatcaaggttccaatgcaaatcaagctacaagcatgaagtgaaatgacggcacacaaaagttccaagtcgcatatacaccagatatcagctcgtagcggtttgcctgccttgatccatcagaccattcatgcaccacaatcaacatgctgattgcaaatgatgaggatatgtacaagagcaaacctgctggcagtgctcaatggaatctcaagttctgattcatattattaaggagggacgtcaaatcaggctccatctttctgaggaaatttcttctctgcttgatgcataaaagcctgtcatatacacaccatggaaagctgataagatgtggccggtcataaccttcattgtagctgccccagtactgtgggtgataagtaacgtgataccaagctgaggccttggcctctatggcatcttgaccaattccatcctcgcccgtgctcatctcattgaaccatgacctagcttccttcctcaaagatctcacagccattctaattgcatcagcatcactactcttggtgaaattctttgccatcttaagaatacatccgctaattatctcagcttcactttttatgccatagtggtccataagattgcccaacttgaaatcatactcttccttaaactctatagcctcggaaatgtaatcctcgtagccatcaacaatcaaatcagtgtcataagactgccttgctacatcccttgtaaagtgctttatgtgaggagtgtgcttctttatttccctatatagcctcccaatcacaccacttgattcgtaggtgactttgtcgagcttttccataaaatcaggatactccttaacatgtagctcaggtggaatcagagccggcactccagtctttgggaaatcaacagctacagagaagagcttggccagttcaatgcacggtaaactttcagccttaagacgttccttatctgcaaaaaccacatgcgcgttggcaataatccccagactctcattaactatgtagtttgtgaaatactcctgtatttcctcgattgtaacgtcatggtctaatatgtctgctggtgctggagtatagtccataggctccaccatacgacttggaataagagtttgatcccaagaaacaaaatatatgtccccatcaagatcactccctgaacactcattagggtgcggtcttggtccctgttgtggaaagacaacacagtcaaacatgtggtgcaggtacggaacatcgacagcatggagaacccgtatgtcaccggggtggaggcaaggatttttggcaacaactacttttcctgttacaacgaatttgcgatggtcatctgcacagtaagaagcttgaatgaatacctggccatacttcagtgtgcgggtttcatccaagcatcccatcattgcccgtccttgtgggatgaatatccttgactttgttttcaattctagcagcttggatgctctaaaagtttgtagcagcatggaaagatatggttcatgatcaggctggtagccacatgacaacaattctttaactacattagttactttttgcccatgggataagtaactaatgtagttaaaggcttcactagcagcctgcggttcagttaccattctgtttaactgcctcacagcttcctcctgctttagtcaaagacagtaccactaactccgagtgttgagagaagagtgatcaactgtcgattcaagaagcatggttggtacttgctgtatgcaaggacatccagggtgatattttcggactggaactttgacatactttttctcaaagaaagcttacgatttgatcctggatcaatagcgacaacacctttgtaaccgccataccttatctgaaaaactgaaggagcaaagcgtttcaatttgcacttcatagccacctccaatgcaaagttagctgagatctttccaattccatcagagaatatgtatttcgtgccatctgttataacagttatatcaggaatttcttccacctcatacctgtgtacctttaaagtttctgttgaggaactaaaagattgaccaagccttgcagcatacttcgccacatttctgatattgcgaaagtcccccatccacttcctgatgtcacttgcagtcaatcccggccgagaagcaaacatccatgcagagttatctcggagttggcttgaggaaaaggcaagaaactcaaagtgcttgccaccaatactgatgccatttgaaaggactgacagaactctattatacagagcagttctcctggcatcatttccagaagcagaacgaggtgacaaatcaactgaacggagcttctcacagtcctcatcaacaaatgaaatccgaaggaagttatctaaatcagcagagaaatgccgtacaacacgattggagacatttatttcaggtccataaaaatacactttagcaggggtaacttgcaccctgtggacataaaccaatccatcatccagagatataccagatgacctttgcagtgcatagcgcg

SEQ ID NO: 21157 - DNA, 236 bp, Setaria italica
  Peptide Sequence Number=SeqID_87131
ggtcgcggcgtcgcggctggcgtgggcggcttcttggacggggccggtggggtggtggtggcggccggcgcggtggccggggcgggggtggtggacttctgcgccgcggcggagtgcgcggccaggaggcagagcagcgcgaggcagagagcgccggcgcgcgccattgcgggtggcggtgtgtgcggcggtttgctcggcttcctgcgctgcggttgctgctgcctcgggtcgcg

SEQ ID NO: 21158 - DNA, 257 bp, Setaria italica
  misc_feature (231)..(231): n is a, c, g, or t
  Peptide Sequence Number=SeqID_87132
agctggtgggaccagccgccggcgtgggcgctggacgaggcgcagcggctggacaacgcatgggtggggcgcaacgtgctcatctacgactactgcgacgaccgcaagcggttccccacgccgcccgaggagtgcgcgctccggaacgccggcgccgcctcgtgacgggacctcgccgacgaagacgatcagtaggatcatcggctgacgagatgatgattcatttttcgngtgtaactggttatcgatttttgggg

SEQ ID NO: 21159 - DNA, 1424 bp, Setaria italica
  Peptide Sequence Number=SeqID_87133
tccagtacatgcataaactgtctcctcgtggtatctatacaagtggtagaggaagttctgctgttggtcttactgcttatgttgccaaagatcctgagactggtgaaactgttcttgagagtggagcacttgttttaagtgacaaaggtgtttgctgtatagatgagttcgataagatgtctgataatgcccgaagcatgttacatgaggtgatggaacagcagacagtatccattgcaaaggctggaataatcgcatctttaaatgctagaacatctgtgctggcatgtgcgaatcctacagaatcacgttacaatccgagactttccgtaatcgacaacatccaccttgccccaacacttctttcaaggtttgatctgatttatcttatcttggacaaggcagatgagcaaactgataggcgcctggcaaagcatattgtttcattgcatttcgagaacccaaatttagaggagctcgaggtcttggacttgcccacattagttgcctacataagctatgcaaggaagtatattcagccacagttatctgatgaagctgcagaagagttgactcgtggctatgttgagatgaggaaaagagggaatagccctgggagcagaaagaaggtcataactgcaacagctagacaaatcgagagcttgattcgtctcagtgaagcattggcccgaatgcggttctctgaagtggtcgaagtgcgagatgttgtggaggctttcaggcttcttgaagttgccatgcagcagtctgcaacagatcatgcaacagggacgattgacatggatctaatcatgacgggaatatctgcaagcgaaaggcagagacgggagaacctcgttgcagcaacccgtaatcttatcatggagaaaatgcagcttggaggcccctcaatgcgtatgacagagctgctggaagaaatgaggaagcagagctcaatggaaattcagctgcacgatcttcgcggtgctcttggcaccctgatgactgaaggtgctgttgttatccatggagacaatgtgaagagggtttgatgccgatacgcaccatctgccgcattgatgtggactggtctacaattcatccacggattgccaagaattgatgaaatgtagagctgagccatgcagaatgctaactttggtctgaagtctaaactggtcctgattgtgctactcccctagataagatagcgtagttttgtggtagttgtagtttctttttttagttattaatattaaacataatattcttgcgttgcctgagtttactgaatcaatgtaacttgtatcatttacgtaatctggctcagggtcctactgaaccatatgtccgtatgtagtgtgtacgggtcattggtgatgaggttaaagaatagtcaccggtacttctagaaaaaaaaaaaa

SEQ ID NO: 21160 - DNA, 666 bp, Setaria italica
  Peptide Sequence Number=SeqID_87134
ctgggggctcgttaacaaggtctccagatgcagcaataggtattctcatgcgcatcctgaaaaatgcaccaggactcagggaaaggctactgacggcccctgccgccccagttcctcaagaaccttcttctctccagagggtcgtgaccgaggaacattgcagcggcgcatcaagctccgcagggatgcctagcactctgttgaagtcaaggacagcagcggacgcactggaggagctgaacagatacaaggagattagggaatcgatactgaatcgcggcaaagggcatccccgcgacgacgccgagctagaggagaaacccgcagatggagatacttagcatacagtatgacgacgaaagctcactgtatataagtagtagtctagtagaagctacctgactttccttaagtagctggtggctgctgagatgtttttggaaacaaagtagctgctaggacgtgaccaactctctctatatatgctatatatgtataagctacgacatatatccatccatccaggtgccctgagatgatgacccagatgctgggttgtgtaaagctgaaatgtttaactgaagtgcacgcattgaacacgtggaagtgcaatgaatgttttggacgttcagtccatccataagaaaaaaaaaaaaaaaaaaaaac

SEQ ID NO: 21161 - DNA, 381 bp, Setaria italica
  Peptide Sequence Number=SeqID_87135
cccatcttctatcattggcccaaggatggggcagcaaggaggaaggtctaggtttgtattcttgtgttgtggcaaatgaaggaaatcagcaggagggcttatccttattcccagcagatatggagaacaaatatgatggctcacagcaccgtcttggttcaactcttcattttgagtataatttgagtcctacccaagatcctgaccaaactagtgacaagagcaagtcatctaatttgtgtgtgatacatattccagacatgcatcttcagaaagaggatgacttgagcatactgaagcaatgtgtggacaagttcaatgtgcccccagagcacaggtttgcattgcttacaaggataagatatgcccgtgctttcaatt

SEQ ID NO: 21162 - DNA, 490 bp, Setaria italica
  Peptide Sequence Number=SeqID_87136
gtcaatacagaacagaacgttaggagaagttttcagcatgctgtagtttgagatgtcgctccagtgaatgtagtgaatgtagtatttcgtcgacttctctctgcagttgagagtactgaattgttgagaaagcacatggtatcatcaggaggtttcttcagaaactatcatactaacttggatccttcttttgcttttgagcggtactgtttgtaaaggacatgcgcatggtgtaaagaggtgagattttgatttgtgtagtcttactaatagctaacgttttgtagtttctctcaaaagaaatagcaatttgtaccttgctactcaattagttaattctcaattagtaagttagggttttgacaaaaaggacagtaggacaccccaaggtaggatctggcagcttccggcccaagtgtaacttttaaacaatagcccagaatttcttcctgcaaatcagaactttctctgtcctattttcctcatttcc

SEQ ID NO: 21163 - DNA, 1677 bp, Setaria italica
  Peptide Sequence Number=SeqID_87137
taagactacacaaatcaaaatctcacctccctacaccatgctcatttcctttacaaacagtaccgctcaaaagcaaaagaaggatccaagttagtatgatagtttctgaagaaacctcctgatgataccatgtgctttctcaacaattcagtactctcaactgcagagagaagtcgacgaaatactacattcactacattcactggagcgacatctcaaactacagcatgctgaaaacttctcctaacgttctgttctgtattgacacaaaggacagtaggacaccccaaggtaggatctggcagcttccggcccaagtgtaacttttaaacaatagcccagaatttcttcctgcaaatcagaactttctctgtcctattttcctcattttccaacatatgtgtgctaacatcccaaaggaacttcggtgctagatcaatgattcttgaaagagtgttcttctcatctctaataatgatggaaccctggggccgaatgatgcggtccatttctaacatgatatcttccaacaaacaatcttcattgcgaccttcataatgagagaagaggtggaaagcatgcagcaagtcataggacctaggatatgttgagaatggctcacaccagtcatggtaagaaccgagtaacccacggtcgtagataattggcaatgtgttgctcatggtataaggtactatattcataatccagacagggtcattgcttagcgcagcagcaaatccaccataattagcattcatgtccatgacatttcggacactagtcttttcaacatcaagaaatgaccaatacttgtgaacctggttcttccaaaactcgttattcttctcaaattggctgatgtaactcctatcatttccaaactcttgaaataaaatgataagcgatcaggtctggaaggaaatttcttaatctctgatttgtccttgttaagcctcacacagttcattaacgggattttccatgatggtgaaacattgtcgttagattcacaaatattcagtagcttcatatcagcatttttctgtcggcaggattcatctgcaggtttgatccaaatagctgtctgaacatgcttagcaataagcttccaacacattgcagttgtaatattaactagcttctcccagataacaggaaagtctttatcttttctgtaagctggtggagcagagtatacaaaatatccattaggccgcaaaagacgatctacctctttgagcaatattccatcattttcatgccaatcaacacgacatcgggagcagtgaaccatttcaaatgagtttccaggataaggtaactgctttgtggccaacacagagatcattgcaccaatcccacgttctacagcaaactgaatttgattctcatggccatcttttggggcaaatgacatggtctgaatatctaggggtagaagataagcagaaaagctggcaacaccacatccaacatccaaaacttgaactactcctgccgaacggagatcgccagtactgtttgttgtcatatttcctagcctctctatgtagtctgatgcaccatgtttgaagtgagtgcctcctccaggaaaccaccaaagcttgcccttctcgtgcaccaattctgtcctcctttgacctcagcaagatgtgaatggttaacattactacg

SEQ ID NO: 21164 - DNA, 521 bp, Setaria italica
  Peptide Sequence Number=SeqID_87138
tatggtactgctatagatcattactttgttgccctccttgtacaattcgctacaagtttttataccgaccgacacacatataaagttataaaccacaaagaaagaagagggggccggggaaatgagaaatggaatcaaaattacaatgaaaatttactagaatacacaggccacaattgaatcgatcaccagttctattcacccaccacctctagtgtaagtaagtgaaaaaaacacagcgcagtgttaactcactcggcagatctaccactgcagcagcagcaggcccgagaggatcaccgccagcagcgtcgccaccggcgacgaggtggcggtcacggcccaggcgccggagtagtgcggcggcggcgggctgtagtagtagaaggggaagtagggcaggaacgggttgggcgggggcggggtcgggtaggcgccgcctccgcctccgcctccactgccaccgccctgctgggaggcgccgttgttgccgccccgcggtgggcggtgggtagtagaag

SEQ ID NO: 21165 - DNA, 438 bp, Setaria italica
  Peptide Sequence Number=SeqID_87139
tcaacctaatgaaatctcaaatcctctggggaataaacacaccaacaatgccaaagattccttgattatagcatccgctcaagtacaataaacatgcatagcaacaataacgcacaagattattgagatgcatcacaagacgatcattcgacacatcatagaatatgtgattgtaatatcaataacgcacaagattattgagatgcatcacaagacgatcattcgatacatcatagaatatgtgattgtaatatcaaattggcaatgaagagctttatacatgccaccaaagaggaatggttagaccatagagtgaagataggtttgtatataatcacttttgcatgattatttttgcaacaaacctctaaaagtttttatgtgagatataagaatgatgttatatacaatggtagaagcagtcgcatgacaaggatt

SEQ ID NO: 21166 - DNA, 560 bp, Setaria italica
  Peptide Sequence Number=SeqID_87140
aagtgaataattctgcaatctgcataagtgctacaataaatcaataatgcactcatgcctctgagtcttaagagaggtagtctccactactccctctagtcacaaataagtgaaattttagggttgtctgaagtcaaccatgtcaaacttaaagagtacaaattatctcttgtgcattgagattgatatttgaaagaaaagatgagtagatttgtattgaaaagtaggttcacaatagtgtacttttgctatgtgttacaaatttattttaacaaaaactaatggtaaaactgtgttttggagactgatggtctccaaaaacttcactcacttgtgacaagagggagtagttaataaacagttcatggttcctatgcccaagggcactaaacaactgttgtcagcacatacatgcaacccaaatataggattaagaatcccaattaaaaatgctgggtaaatatatcatgatttttttgtatttggtgtttgtttgtactgcaaccttttttttatcttcttagtacaatgagccaatgacacacagttcttctacgtgt

SEQ ID NO: 21167 - DNA, 334 bp, Setaria italica
  Peptide Sequence Number=SeqID_87141
ttgcgtgtctccagacaaatcactcatccagatccagtctacctgccgcggagcgatggagggtgaccggagcagcaggagatggctcttcgtgtcgccgaacccggccgtcgcggcagccggggagcggagcgtacagccgtacctccttgacatccacggctgcctggacgagcgcggcccgcggcccgtgatcccgctcagcatcggggacccctcctcggccccctcttaccgcaccgctcccgaggcggtggaggccgtcgccaccgccctccgctccggtcagttcgacggctacccatcccgcgacacaaattctcagcttgccgag

SEQ ID NO: 21168 - DNA, 220 bp, Setaria italica
  Peptide Sequence Number=SeqID_87142
cagagcaagtgcctcctgtaacaaaggacgctgccacagagtccagcaccgatggtccgcagcagaatgtcagggagcaagtcaagcagcctgatgaacagagtgcctcaaagctcaaggagaagttgaatgagaataagcaggcaccaaaggaagataagccaacagaggtgttccctgatgggagtcaagcagagcttctgaatgagaccaccacgga

SEQ ID NO: 21169 - DNA, 675 bp, Setaria italica
  misc_feature (270)..(270): n is a, c, g, or t
  Peptide Sequence Number=SeqID_87143
cgccgcagaggcagcaggctcgccggggaggagcggggcgattggatgtggttggaggaggtgagggggagggagcgcggggagctgcgcgcacggaggttcgaggccgccgcacgggcgcgccgcgcggcctcactcgcgctctccaaccgcaaggagttcgccaccccgcaccacggcgccgtcaactcgctccaggttgatttgacagaggggaggtacctgctctccggggcatcggatgggtcggccgctgtattcgatgtgttnaacgcgaccgactgcgaagccggcttcatagcgaagcacaagcacatactgcttgtggacaagcagcaccagaatggccacaagttcgccatctctgcggccgtttggtatcctgtggataccgggctgttcgtcacagcatcctttgatcaatacgtcaaagtttgggataccaattcgactacaaagttgtcatggattttaagatgccaggaaaagtctttactgcagccatgtctccaattgcaacaacacaaatgctcatcgctactgggagtgcagatgttcaggtccgtctgtgtgacattgcttctggagcctttacccacacattgtccggtcaccgtggttagtttctttgtgctaatgtggtgataaaatatgcttgttttgcttgtatggtac

SEQ ID NO: 21170 - DNA, 429 bp, Setaria italica
  Peptide Sequence Number=SeqID_87144
cgctcggcggaggctcaaccgccggggattccggcggcggcgtgggcgccgaatgcggcgccggcgccggcgacgcggtcgagaagctccaccactcgatcgcgtgcacctccgtgctcccctgcgtggacgccgagaagccgacgaacgccgcgtcctttacggtctccccaaggtcgagcggcgcggacagcaccggcacccgcggccgattggcggcgtaggacacggacacctccaggatccccctttatcggggcggtaatcgatccaagcgttgacggtcctcccgctggtgagctcgaccccggcctcgccgagatcggcgacggcggcggagaccatggagccgagatccaggcccacgtggttcccgttgacgtccccgaactggacgtccatgagcgtgtcgaactcgatggcggcggc

SEQ ID NO: 21171 - DNA, 1138 bp, Setaria italica
  misc_feature (1137)..(1137): n is a, c, g, or t
  Peptide Sequence Number=SeqID_87145
gtgagggaagggtacgagctcgtgggcaccttcaacctgggagaccactactacacaacgctgtggggcccgctgatggacctcgtggggggtggggcccgcgtgcagggggctggcagctagggttagagggtattttgggaaggtcatcgaggagaggagggtggcaagggactgccacgacagggatgacctgctcagctacatgctttcactgccagaggatgagaggttggaggactctgatgtgattgctgttctttgggaaatggtctttcctggggtggacgtcgtagccatactcctcgagtggaccatggcccgcgttgctctgcatcctgacatccaatccaaggcgcacgaggagattgatgcagtggtgggtgtccatcgtcccatcaccgatgcggacatccccaacctgcacttcctccaatgcattgtcaaggagaccctccgtatgcacccaccagggccactcctatcctgggcacgtctggcagtgcatgacgcccgtgtgggtaagtatgtcgtgcctgcagggaccaccgctatggtgaacatgtgggccatatcccatgatgaggctatttggggagacccatgggtgtttcgaccagagagatttggagtggaggatgtgagtgtgttgggctccgacctgaggctagcacctttcgggtcgggccgaagagtatgccccggccggatgatgggcctctccaccgtgcagctttggctgggtcggctcttgcaagagtatgagtggtcgccggccaagcccgtaaagcttgcagagtgcctccgcctgtctatggagatgaagcaacccttggtctgccgtgcagttcgtcgtggagaagctgcttaattaactaaacttcgatggtgaaatgccagctaagctttgctgtaaattaaaggaggaagatggaccgatgtaaataatccatgctggtttgtgtttgagtaattgtgttagtatttgtaagattgtatctatgtactgtaatgtaccacacctgtactctataggtggctactagacttgatcgagcaatttgtactattgttatatgtatacctgccttattggaccttttttgttttgatcaataaaaaaaaaaactaaaaagng

SEQ ID NO: 21172 - DNA, 1346 bp, Setaria italica
  Peptide Sequence Number=SeqID_87146
ggccgaggaggtgatcgtcgaggaggaggaagaggaggggcacgcaacgagggcgcgcgccgaggagccggcacccgcggctggggccggggagggcggcagggaatcctcgtcgtcgtaccagaggtacgacatacaacaggtggcgaggtgggtggagcagatactgcccttctccctgctgctgctcgtcgtcttcatcagacaacatttgcaaggtttctttgtgacaatttggattgctgcggtgatgttcaagtccaatgacatcttgcgtaagcagactgctctgaagagggagagaaaaattccagtccttgtcgggattacagtattatttgttgttcacgtatctggattttattggtgttacaagaatggggaccttataagacctctcctgatgcttcctcctaaagaaataccaccattttggcatgcgatattcatcatcttggtgaatgatacaatggtgcgccaaactgctatgattgtcaaatgtttgctgctgatgtactacaagaacagcagaggccgaagctatcgtaggcagggtcaaatgttgacaattgtggaatattttctacttttgtaccgtgcattattgcctacacctgtgtggtaccgttttttcttgaacaaggagtatggaagcctattttcgtctctaaccactggcttgtatctcacttttcaagttgacatcagttgtggaaaaggttcaatcgtttttgacagcattgagagcattatctcataaagacttccactatggttcatatgcaacgagtgagcaggtacttgttgctggagatatgtgcgtgatatgccaagagaagatgcatgtccccattcttttgcgctgcaaacacatcttttgtgaagactgtgtatctgaatggtttgagagggagcggacgtgcccgctgtgcagggcactggtgaagccagcagacctccgatcgttcggcgacggttcaacaagcctcttcttccagctattctaaagagcggcaagttggagcgctccactctatgaagatgttagggtgtgtgcgtgtgttgctgctcgcagcgcgctgatgcggtgctcgctgcgagcagagcggccctgatgcggtgctgaaagagtgtacaagtcaaagtcccttccagcagaagctgaaggcgtacatgagtgtgtgtattttgaccgtgcatattgccacccccctgtataggctctcgcgggatgcttgagcacctgatgactacctctacctgaccgtatacgtacaagtttactagtactatataaatagaaatgttgagttgtttgtagttttattaactaaaaaaaaaaaaaa

SEQ ID NO: 21173 - DNA, 877 bp, Setaria italica
  Peptide Sequence Number=SeqID_87147
ctgggagtctgctagatctatggtgggaccaagcataacaagaggggtaaccaaagaactttcgactgtttcatgggatgatataggaggcttgaaagatctaaagaaagagctgcagaaagctgttgagtggcccatcaagcatgctgctggatatgacagacttgggataacaccagtccgggggtgcttttgcatggtccaccagggtgctcgaagactacccttgcaaaggctgcagcacatgcttctcaagcttctttcttttctttgagtggcgcagaattatactcaaagtatgttggagaaggtgaagctctattacgaagaacatttcagaaggcgcgtcttgcttctccaagcattatattttttgacgaggctgatgcaattgcccccaaaagaactggccctggtgggaactctagtggcggtgtcacagttggagaaagacttttgtcaactttgttgactgaaatggatggtttagaattggctacgggaattattgtattggctgctactaatcgcccaaatgcaattgatgctgctcttatgcgtccagggcgttttgacaaggtgttgtatgttccaccaccagatgtggaagggcgatatgaaatactacgtattcatacacggaaaatgaaattgggggaagatgttgatctttggaagattgcagagtgcaccgagctgttcactggtgctgatcttgaaggcctttgcagggaagctggaatggcagcattgagggaagatctttctgcaagttcgatacacaacacccacttccagaccgcacgaagttcattgagaccctctcttacaaaagcaggagttgacaagtactcgaatgctgccatcaatgatctca

SEQ ID NO: 21174 - DNA, 270 bp, Setaria italica
  Peptide Sequence Number=SeqID_87148
aaatccctttatggatcctgaatcaattgacctgaaaacctgtacatgccagttttctgggtcctgttcgtcacaaacatgcgcgttcgcttcacctgtagctggtgaaacaatccatgacatccggtttagttttatcaatgtgtcataatgccaactggcaactttcttaaggttaactttccattttgtagcttttctccatcgctgttcaaagtttgtcagtatgtcataggctgcaggaccctcaactttgcaatgtaaatcatg

SEQ ID NO: 21175 - DNA, 304 bp, Setaria italica
  Peptide Sequence Number=SeqID_87149
ctcgacggggccctgcgcgtgctccgcgtggccctgcgggaagtagtacaccttggagtgcaccgccggcatctggaccatgccgccggcgcaggcgtgccacagctgcgggtccatgcacttgtcgctctcccgctcccgctccatggccgccgagtccacgaaagtaatcatcttcacctcccacggctacccggaggcaagaatctcagcggaattgagcaattcccacccaccgcgacagccttttgtgggtgtaaattcacgccgcctccactagcacgagaagcctttccgctgcaca

SEQ ID NO: 21176 - DNA, 245 bp, Setaria italica
  Peptide Sequence Number=SeqID_87150
tcgatcctgagtctttttatcctgtttaacaagttttatttgatcttatatgcaccgtgacgaaaaatacaagcagcagaaaacagcagatgcataaaggctccatcaaacaagaactgtagcatatcaaatattcataccaacatataatctaccttttgctctgaagaaggaaaggaatttatcttgctgttgattaagctttatctgcattgtcatgctcatctgaaggctcactttgtttc

SEQ ID NO: 21177 - DNA, 449 bp, Setaria italica
  Peptide Sequence Number=SeqID_87151
ttctttttcttttgttatttaagttaatttcttaactactatttgtttattccgtattgtataccgtctcgaatacacatactctgcaactgcaagtttacagggaaaagtagaagctacaaaacgaaagaaagccagtcgacattctgtactggcgtactacatgcaacgagacattctgaatttctgatatagtaagtactacaaagcagaagaattgccagaagcatttccacgtgatgctcgctcagagtcaccctccacgcaccaacttcttttgctctgaagaaggaaaggaatttatcttgctgttgattaagctttatctgcattgtcatgctcatctgaaggctcactttgtttccggtaatgaaaataaaggaactgaagaataataaaagaatccaagcagccccacctcagactactactatgtgtcagactaagaa

SEQ ID NO: 21178 - DNA, 897 bp, Setaria italica
  misc_feature (1)..(1): n is a, c, g, or t
  Peptide Sequence Number=SeqID_87152
ntattgcccaaccatgtaccagcagttggcactggactccttgataaagatctagctgacacatagtagtagtctgaggtggggctgcttggagcatggtattgttcggtaaattccgtattaacaggaataggtgagcttggaataggaattgtagcatctgattggtggttgtttccggatgccccaccatccttggcgcccaaaagcttttcacgtaatgaagtatccccacgctgatgcttctgaggcttgctagttgccctggatttcttggctttaagacggtggtagatgtggctatagtataccgtctgtcctgttaggatcacagtagttattgtatacagcaatgccatgtaaaactgggtcggcagagtagcaggttccaggaagcagccgataaggttaaacatatccccaactatccaggtcattagaaatgcaactgagagcccctcggttgacttttgtctgtaatttgttattatctgcggcacctcagcgacgccccagctgatgacactgatcagcccaagtgcaagggcagcgctgtccttctggctgcacaaacagtactttaggtaggttcgggcccattctgcgcagtgccgggacgaggggcagcttggaggtgttccactaaaaacacccatctctgctccagacctgaaggataaattgcaggaaaaaaatgttggattgtgaacagatgcttcgttgatttggtcaagtacatcctccatcccaaattactattaatttaattttgatttttctagatccacccagatatagatatctggatacgtagtaaaagtaatgtacctgtaaaagtcaaaacgaatagtaatttgggacgaagggagtatatactactaccctttgcagagggaa

SEQ ID NO: 21179 - DNA, 247 bp, Setaria italica
  Peptide Sequence Number=SeqID_87153
tccatccccagcattgcctccctcttcccggagccggccggcctcccatggccatctgctccccggccagattgacgaagcaaaggggctgagccgagaaaccaagagctggaactggaggaagaggaagaagcgtcgagcggggtagtaccacgagtactactccacggagggtttctcaccaaccaggggatgtcaagaggttgctgaggaataaagatgacgacaggcgaaatcctgagggcag

SEQ ID NO: 21180 - DNA, 326 bp, Setaria italica
  Peptide Sequence Number=SeqID_87154
ccggcggcctctgtccccgccgccgaggtggctgcccccgccgtcaaggccaaggaggagttcgacgccgacgccgggtacgccggccacctggagcacgagttctccccggactccggcggcggcgagtcctgcgtcaccacggagtccgacgaggacgcctcttcctccccgtcctacgtcacggactcgtggcgcagcatggcgccggcgcaggaacgcgcggtcctcgaacgggagctctcgctgccgtcccagtccgtggactgcgacggcgacggcgacgacgacatggacgccatgtggaaggccatcatgcagaagac

SEQ ID NO: 21181 - DNA, 308 bp, Setaria italica
  misc_feature (287)..(287): n is a, c, g, or t
  Peptide Sequence Number=SeqID_87155
cgccgcatgcggtcggccggcttctctccggtggcattcagcgaggacgttgccgacgacgtgcggtcactgctccgccggtaccgggagggttggtcgatgcgggatgccggtctagacgactcggcagccggagcaggcgtcttcctcgcgtggaaggagcagcctctcgtgtgggcaagcgcgtggaagccatgatcgagatggatcgaggatcggagctcgtcggcgcaaatgcaagctcggtgagtaggtacgtggaacagcatgagccgggagaagcaagngcgccatacctagccatccac

SEQ ID NO: 21182 - DNA, 329 bp, Setaria italica
  Peptide Sequence Number=SeqID_87156
cagagaagtttatactaatgaaatatttaaactcttccaagatgaggtgattgctgctagggatagctgtgatgtcaaaagtatggcacagcttggtgaaattcggatcacaggcattagtgatgatagtggaaagattaaaacagttcagtacaatacctgtaccaagattgcacaatgttcttgtagattgttcgaatctgttggtattccttgttctcatatcattgttgtcctgaaggggaaaagtgtaatgaaatccctagccattatataatgcagaggtggactaaaatggctacatggataaacatctttggttccaacat

SEQ ID NO: 21183 - DNA, 273 bp, Setaria italica
  Peptide Sequence Number=SeqID_87157
ggggatttgtggagacgacgggggaagggaggaggatgagaagggaggaaatggttgcatttgcatattagtctctaaaaaatattccacttggggattagtccatggaagaattatagatatctagtttaccaaagttgttggagaagtgtataagagttatataaaactcttaaaacaaatttttgatcctcgattctaccaaactgttggagatgctccaaggacttaactggttgacgggaatgcattgtgcgtgtgtggtgagtgctg

SEQ ID NO: 21184 - DNA, 256 bp, Setaria italica
  Peptide Sequence Number=SeqID_87158
taggagaaggaggcaaataaggcgagcagagaggggctgacgaggcagctgccgccattggagccgcgcccagcgttctctctcacacacacagacactctctcctctagctatgcacactattcgtggtcagcgggcgcgggcgcgcagctcagatgtcaagtacgtcaccgccgccgccgccgccgccgacggcgccagcaacggcacggcggcgaagccgttcacggcgcactacttcccgcaggagctggac

SEQ ID NO: 21185 - DNA, 2045 bp, Setaria italica
  misc_feature (1)..(2): n is a, c, g, or t
  Peptide Sequence Number=SeqID_87159
nngtaatgaagtttcagaatagaaactgatcatgaagaaacattcattcatgattcgtgcaagaccatttgagtacaacgtacagtttgtgatgttcagtgacataacttattgacttttcaccttatgttatcttaacttgccctgttaatcatcgtgtgtaagaaggaaattttccttttttattttattgttttccataaatcaaatatattgtcttccttgactgtaactgtaatagaaccttctcagtagtatatttcagccatgtcctgatgatactgatctatccatccctgtatgatctcaacttcttgtctcctttgttctataacccagtcaggatcccccttcgttgccgatctgaagtccaaatgatgagcccctttctctgtgacaagggcaatgatgctggatgagatgttcttgagcaccccgcctcgactccatggatctcgcattccgttggagaagataatgttgctcccaaatctcttgagcaccttatcgattttatatccaccatattcagtggtgatccaatgtggcctcggccgaaccccccagctctgaaaacatccatcagacctgtctttgtaactgaagctggatggtgggaacatgctttcattggagactgtcattggcataatcatctcggtgcaagcctgccattgccagccatcgaggccatgcgggtcatcttcgtcctcaatcgggttgcaagtcaggtctcctgtgtagttgtagtacaagctcgccgctgcgaatgccttttccagaatgtctgtgtttgtggggaacccgtcgatgatcttgcacatctccttgacagggtaggcaggtagattctccaggaaattagccggggtcggatagtccaccatggcagtgtaggtgaatgctgtcgacagccagtttgggatcgaataagcatacttcacagtcttgcaggctctgaacaatttactgagctccaggagccctttgtcgctggcccctctctcatccagcacatcccaggttgccttgatgacgctgaagcagttgaagctctcagacttgaagtcttgcgagacggcatcgtagaagctgctccacggtgttatgtagtcgaactgcaggattggcgcggaggacgccagggctccaatggcgacgtgggggtacttgatcctgaaccatgaagccaacatgccgccgtaggagccgccgaagacgacgacgggggcgccctcggcggagaggttctgcttcaggctcccgatgaggatggcgaagtcggcgagcgcctgcgtcgacgtcaggtagcccagcgtctcggccgacttgtacgagtcgttcccgaacggcttcgactccccgtagaaccggtgctcgatgaagacgaggagggcgccgaacttgggcgcgatgtcgaacatgaacccggtgttggtggcgaaccactcgatgtcgccctcgttgccggtgtacacgaacagcggtccggcggcgccgcctttgcggccgccgctgggcctccgccagtaggtgtcgttgacgaggtacttctggtagaagaccatggacgcgttgggcgtgaaggtgaagtggtccagctcctgcgggaagtagtgcgccgtgaacggcttcgccgccgtgccgttgctggcgccgtcggcggcggcggcggcggcggtgacgtacttgacatctgagctgcgcgcccgcgcccgctgctgccgaagagcttgcaggtgcagaggagcgagtggcgggaacggagccctggggttggaggagcgtgctgctgtggctgtggcaggcgagaaggctgcgaggagtaggagaagaggcaataaggcgagcagaggaggggctgacgaggcagctgccgccattggagccgccgcccagcgttctctctcacacgggcgtgaaggtgaagtggtccagctcctgcgggaagtagtgcgccgtgaacggcttcgccgccgtgccgttgctggcgccgtcggcggcggcggcggcggcggtgacgtacttgacatctgagctgcgcc

SEQ ID NO: 21186 - DNA, 1139 bp, Setaria italica
  Peptide Sequence Number=SeqID_87160
gaagctaataatttgctgtcaggggaaaatggttgtgggtgccttaaaatatcacacagaagttacggatgagacaacaatatatggtgacacaagttgcttgggtatatcctgtgaggcctttggatgaaaaatctccggatcacaagactggatatacccccagcatcatcaaaacaagcaatgctgaatcaatattgccagatggctctcaaaaaagacctctggccatattgggtctacagttaccaaagcctactgccaaaaagactggctacttcggggacaggactgatttcagaaaccttctactgttctgggatatgttgcacattctccctcattgcatcatacctcaatgttcctcttcgatatcctctgcgttttggaggttcacggtcatatattcttgatcattcgcctttagttgagccatcatctatgacctcagttgtgagttctgtctcaccgagcacaagcatgagaacaatggaattccctctgtttttcgatggccaggagactacaagatcagcatatgcaatatttttgttgaacaaggatatcgaacaactcctgaactacattggcgcagaaagccttgggccaagacacgtattagctaacctgaagcagctgacaacgatcatccagtcacaacagtatatctctactgattagtttgacccagatacagttttggagttcttagtgtgttcagtccggacgcagttggtgctactttttaactagcacctttttcttcttgacccccccaccatttgacacacaagagtcagtatgtttctgtgctgatgcgttcactgtaaatgaggaattcattaaagtagttggtgtaaaacgttgtcacttccagttgtacaggaaggatatggatgataaacaagatactgtactacggaggaagaagagaggtgttcatgcccccctggtttccttgtatatgtttgactgacgcaagagcgagcaatctttcttgtacctcgcactgcatttcagcaaaatgatgagctgatttgttcaatcctctcttctttccttaatgtaacttggtttatacagtagtatgtctgtatgagttagtggggatcttatgaaaaatctgctgcagtccctca

SEQ ID NO: 21187 - DNA, 1899 bp, Setaria italica
  misc_feature (1834)..(1899): n is a, c, g, or t
  Peptide Sequence Number=SeqID_87161
acgaagccggcggcgagctgagaggggagaacgcgccggagacgagagagatgggcggcgatccggggaagctcatcaagagcgtcaagggtgcggcgcagaagtacctcggcgttgggttcttgctgggattcttcctcgtgctcctcacctacttcaccgtctccgagcagttcgccatctcggcgcccaacgctatccggaggtcatcgccgggacacgcgcacccctcgccgtcgccgatcaccccggccgaggaaaagaagaggcagcagccccctgtcatagaggagaagccacccaaggcagagtttgcagcggaggagaagcctcccaaggcagagcatcatgcagctgaagagaagcccccagccgttgacgtcgaagagccccacactaaaacagaggaggaccagaagcctgtcgcagatggtggtcggagtagtatcggcggcgacggcgcgacgagggaggagggcgctccggcgaagaagccggcgtgcgacatccagggcccgtgggcgtcggacgtctgcgacgtcaccggcgacgtgcgcatccggggctcggcgggcaccatcctgatcgcgccgtccatcgagagcggcggcaacccgaacccgcaggagtggctgatccgtccctactcccggaagcaccaggccgggatcaaggaggtgacggtgcgggagatggcctccgccgccgacgcgccggcctgcgacgtccggtcgcccgtgccggcgatggtgttcgccatgggcggtctcaccggcaactactggcacgacttcagcgacgtgctgatcccgctctacctccaggcggtgcggttcaagggcgaggtccagctcgtcgtcgagaacttccagccgtggtacgccggcaagtaccggaccatcctgaagcggctgtcgcggtacgacatcgtggacatggacaaggacgacaaggtccggtgcttcccgggcgccgtggtggggatccgcatgcacaaggagttcagcatcgacccggcgcgggagccgctcggccactccatgccggagttcaccaggttcctccgtgagaccttctccctccctcgcgacgcgccggcgaagctcaccggcgccgacggcgaggacaacgagaaggtgaggccgcgcatgatgatcatctcgcggcggcacccgcggaagctgatgaacgtggacgcggtggtggcgctggcagagcgggtggggttcgaggtggtgatcggtgacccgccgttcaacgtggacgtgggagagttcgcgaaggaggtgaacgccgtcgacgcgctggtcggggtgcacggcgccgggctgaccaactcggtgttcctccccacgggcgccgtgttcatccaggtggtgccgtacgggaagatggagcacatcggggaggtggacttcggtgtccccgccgtggacatggggctcaggtacatcgcctactccgccggcgtggaggagagcacgctggtggagacgctggggcgggaccaccccgccgtgagggacccggagtccatccaccgaagcgggtggggaaggtcgccgagtactacctcggcaggcaggacatccggctggacctcgagcgcttcgagcccgtgctccgcaaggccatgcagatgctcagggagcagcagtagcggtggccacgtacagtttattttcacactaccttcatttttagaaattaggttttacttattggatttctcgattcttttccattttttggtgttcttttaaaggggaaaaagttacaaaccaaaggggttcatgtcgctgcatttatgctgaatacgcaggcttaaaacgtnnnnnnnnnnnnnnnnnnnnnnnnnnnnnnnnnnnnnnnnnnnnnnnnnnnnnnnnnnnnnnnnnn

SEQ ID NO: 21188 - DNA, 341 bp, Setaria italica
  Peptide Sequence Number=SeqID_87162
gcgtccgcttcccgcctggccgccggcggcggagccgcgggcgggacgaggccgtcgaggttgatccgcgggaatgcgaagccgaccccgaggtcccggatccggtcggccaggggcatgaagcggtcgggcggcacggcgggccggaacgccggctgctcctgcaggaaccgccggagcccgaacgccgccggcgacgacgacgacgcgaagcgctgcgccacggctctcctcagcacggccgccattgctgcttaatgggtctgggctatctctctcttgcaaactccgattcgatgggaggatgaggatgagcagcgggctctaataatcaatcaatg

SEQ ID NO: 21189 - DNA, 722 bp, Setaria italica
  Peptide Sequence Number=SeqID_87163
ggctctgctgcttgcagcgattagcctgcagcaccaggaggactattccacgcaggcgctagcatgggcaagcaggaagaccaccggagcaaagacggcgaggtcgcggtggagggagggccggtgatggactggcagctcgaaccgggcgtcgccagcaagctatacgacgtcttcaccgtcgccggcctgcgcgtcgacgccatcgagcccggccgcgccctgatctgctctttcacggtgccgactcgcctgacggacgggagcaagcgcatgcatggaggggcgttggcatctctggtcgacctggttgggtcggccgtgttcttcgccggcggctcgccgacgacgggggtgtccctggagatcaccatctcgtacctaaacgctgcccgtgcaaacgaggagatcgagatcgatgcgagggttctgggcatcggcgagacgacggggtgcgtgacggtggaggtcaggaagaagggcaccggcgaggtgatcgcgcacggccggcacaccaagtacctcgccgtctccagcaaactgtgatggatcaacaggattattcaggggcacgcgcagccggcggtcatgatcacgatctcgctagctgtttatttctccagcggtcttctgtctccggcccatcatcgtcgactgtgtgtgttcacttcctctgttttaagagttgctaggatcgtacccgtgcattgctacgggcaacc

SEQ ID NO: 21190 - DNA, 671 bp, Setaria italica
  Peptide Sequence Number=SeqID_87164
ttcttattttttcttagtttggttatttacctttgttaactttgttaagtctatttattgcacccggtgtgccaataattctcgtggggacaaagcttgatcttcgagatgacaagcagttctttgtggaccaccctggtgctgttcctatcactactgctcagggagaggagctaagaaagcaaataggcgcgccatactacatcgaatgcagctcaaagacccaactagtattgttatctgctcaatcatcttctgatcatgcaatatcatgtgagatactaacaggctttctcttttgtttccacctgaattgcagaacgtaaagggtgtcttcgatgcggcgataaaggttgtgctgcagccacccaaggcgaagaagaagaaaaaggcgcagagggggcgtgctccattttgtgatctaatcatcagtagacaaagaaacaagggcgaagttgccatggtttattatcgtcgcgtcttgcttcagcgaaacagcattggtgggtccccctaggtttactggcagctgcagcaagttcttctctttgtcgaggcattgagcgatccgtttgtttcatttcctccttcctgccttgtgattatgtgggtgtgactgacaagtcgtggcaattaggtaacttgcttagaaggtatttcccgtgtttgag

SEQ ID NO: 21191 - DNA, 462 bp, Setaria italica
  Peptide Sequence Number=SeqID_87165
ggaacattgtttcactgatccatgcagggtgaagagctgaggaagctaattggagcggctgcctacatcgaatgcagttcaaaaacccaacaagtagtgcaattgtttttgtttccctgcacaagatgcatcattaattgagctcagttgctgtgcatgatcactgactgctgctgccttgcacctccagaacatcaaagcagtgtttgacgcggccattaaggtggttctccagcctccaaagcaaaagaggaggaggaggaaggcgcagaaaggatgcaccattttgtaactaaacggtagatcgtcttttgcagtctctggctggggtgctgcataggatgagcatcatcacctctatgtgttgtatggacacgaaacaaaagaacacttttatctgtgagtttgcaatatactacgtagcaggttgctgaaactagtcgactctgtgctctgtggtgc

SEQ ID NO: 21192 - DNA, 546 bp, Setaria italica
  Peptide Sequence Number=SeqID_87166
tttggttagttctttgttatttgtttttcctttcttggtcctttcttctacttgatcagtaaggctagttatgagaatgtttcaaagaaggcaagacactgattcttattttctctatttctttttgtttgagctacctgttactttatgccgttttctatggacatcgttgtttttagatcatttatgtgatagtcttcatttagctgatttgtgataacctccattgctctgatttgtccatcacattctgagtgattgtttttttcagtaaagaaattctactatattgtctggaaacacatttccaaaatcaatttctggataggatttaatacagagatggtttccaaacttaaatatcttgacttcttgtctactgactccaaaccctttccatttttcagtggattcctgaattaaggcactatgctcctggcgtgccaataattctcgtcgggaccaagcttggtatgctctcacctcataattgcattaccaagattttcttgaatcacacgtgttaatctcgtgctgcacaaggaa

SEQ ID NO: 21193 - DNA, 721 bp, Setaria italica
  Peptide Sequence Number=SeqID_87167
cctttcttccttccttccttcctcctcgctctggctatctggcctatgtggaaggaaggatggatggatggatggatcggttccccctcctcactcaggttcaggtaggcagggagggggacattgattcctacctaataaataataatcatctggatgatcttttaggaggggaaacgagaaaggaattctaccatacccatagcttagctgattttcctactctattttgagagccacatacacatagccaggataggagacgccatcagagccacccacatacaatagctgaccatcgattttcctggccaatatgtgggtcttggctcactttgagtagccacagcaatgttacgctgttgcttatgcctacatggggcatctcaatgttgcaggattatgttccaactttgttcgacaacttcagtgcgaacgttgtggttgatggtaacactgtcaacctcgggctatgggatactgcaggtcaagaggattacaacagactgagaccactgagctatcgtggagctgatgttttccttctggccttctcactgatcagtaaggctagttatgagaatgtttcaaagaaggcaagacactgattcttattttctctatttctttttgtttgagctacctgttacttatgccgttttctatggacatcgttgttttttagatctatttatgtgatagtcttcatttagctgatttg

SEQ ID NO: 21194 - DNA, 1266 bp, Setaria italica
  misc_feature (1167)..(1266): n is a, c, g, or t
  Peptide Sequence Number=SeqID_87168
ttagttaaggttaagttaagaagaggagaggagcgagagactcggctccgggtgggtcgggagtcagccggtctggagaggagactgtgatcgatcacaggaaaggagaggagagcaagctcttcgccccatccatctctctcaagagtcaggagtcaggaccggccgtccggcctgcctccgtccgcacccagaggatacgtgtggccctgaggcctcctctctctgggacaagaagcaaggaggaggaggagaagagcagatctacatctgctccagcgatgagcgcgtctcggttcatcaagtgcgtcaccgtgggggacggcgccgtcggcaagacctgcatgctcatctcctacacctccaacactttccccaccgattatgttccaactgtgttcgacaacttcagtgccaacgttgtggtcgatgggagcactgtcaacttgggtctgtgggatacggcaggacaggaggactacaacagactgcgcccgttgagctaccgtggtgctgatgtttttctgctcgccttttctcttatcagcaaagcaagctacgagaatgtatcaaagaagtggattcctgaattaaggcactatgctcctggcgtgcccataattcttgtcgggaccaagcttgatctgcgggatgataagcagttttttgctgatcaccctggtgctgttccgatttccacggcccagggtgaagagctgaggaagctaattggagcggctgcctacatcgaatgcagttcaaaaacccaacaaaacatcaaagcagtgtttgacgcggccattaaggtggttctccagcctccaaagcaaaagaggaggaggaggaaggcgcagaaaggatgcaccattttgtaactaaacggtagatcgtcttttgcagtctctggctggggtgctgcataggatgagcatcatcacctctatgtgttgtatggacacgaaacaaaagaacacttttatcggtgagtttgcaatatactacgtagcaggttgctgaaactagtcgactctgtgctctgtggtgcagtagctgtagatggatggtgtgactgaagaatgtagctgtgtgtgctgtcgtgtttgctttgaattggagttgaactcattactcatggaatggaactgtattggcatgacaaaaggaaannnnnnnnnnnnnnnnnnnnnnnnnnnnnnnnnnnnnnnnnnnnnnnnnnnnnnnnnnnnnnnnnnnnnnnnnnnnnnnnnnnnnnnnnnnnnnnnnnnn

SEQ ID NO: 21195 - DNA, 527 bp, Setaria italica
  Peptide Sequence Number=SeqID_87169
aaccaaccatccacacgcattgctctcgcgcgatttccccccaaatttcagcgggaaacactaggatcgggtggggatggcgaccggaggcatcgcccgcagccgcctcgccgaggagcgcaagaaatggcgcaggagccatccccatgggttcgtggcgaagccggagacgctgccggatgggtccgtcaacctcatggtctggaagtgcgtcgtacccgggaaggaaggcactgactgggagggtggatatttcccgctgactttgcaatttcctgaagattacccaagcaatgctcccgtctgcaagtttccagcaggattcttccacgtcaatgtctaccctactggagcagtgtgcttatcaatactcagcaatgcatggaagccttccattacggtgtgtcaaatcctcataggaatccaggacttgcttgaccatcctaatccagcgtctcctgcacaagatgcatgctatcgcctctacaaaaaggatatgcgttcatacaaggatcgtgtccgtcagc

SEQ ID NO: 21196 - DNA, 478 bp, Setaria italica
  misc_feature (15)..(15): n is a, c, g, or t
  Peptide Sequence Number=SeqID_87170
cctgccgctcgactnttacccccccccccccaaaccgaagccgacgacaggcacatcgcgctcgatcgggctcgtcggatggcggcgtccggaggagtcgcccgcggccgcctcgccgaggagcgcaagagccacccccatggattcgtggcgaagccggagacgctgccggatgggaccgtcaacctcatggtctggaagtgcgtcatacccggcaaggaaggcattatgccggagtacaggaaacttgttcgtcagcaggcgaagctatatccttcgctcgtgtagcactgtaccgtctaccacacgcttgcaggcttgcaggctccattttggtggagcggaacttgtcatgattgtgtttatgattacccactggaattttcatcatattcgtactcttattggaaccgctaaaatgcacttcaaatgcatgtaatacttattgctatggcttatcagcatattgtggtgacct

SEQ ID NO: 21197 - DNA, 1203 bp, Setaria italica
  Peptide Sequence Number=SeqID_87171
cactcactcatcttcttcttcctctggtcgctcgattgatcgaggtgaaacacctagctgaagatgggcgcccagatgaagagctttgtcaggctcctgatcctcgtgcaggtggccgccatcctcgccgggcacggcgccgccgagctcagcatggactactacggcatgagctgcccgtacgcggagtacatcgtccgcaacgtcgtcggccaggctctcatgaaggaccccaccctcgccggcagcatcctcaggctccacttccacgactgcttcgtgcagggctgcgacgcgtcggtgctactggactcgacggacgacaacacggcggagaaggacgcgccggcgaacaagagcctgcgcggcttcgaggtgatcgacagcatcaaggaggccctggaggagcagtgccccggcgtcgtctcctgcgccgacgtcctggcgctcgccgcccgcgacgctgtgttcatggcgcgcgggccctactacggcgtgcccctgggccgccgcgacggttcccgctccgtcgcctccgacaccttcctgacgctgccgccgccgatcaagaacgtcacggtgctcatccaaatcttcgacaaggtcggcctcgacgtccacgacatggtggcgctctccggcggccacacgctgggcatcgcgcactgcgccaacttcaagaaccggatcaaggacgagacggagacgctggacgcgacgctggcctcgtcgctgggctccgtctgcaagggcggcgactccggcaaggcgccgttcgaccggaccagcacgcgcttcgacgccgtctactaccgggagctcacctcgaagcgggggctcctgagctccgaccagacgctgttcgagtcgcccgagaccaaggagatggtcagcatgttcgccatgaacccggactacttcttctacgcgttccagcaggggatgctcaagatggggcagatcaacctcaaggaaggcgacgacggcgagatcaggcacacctgcagggtcgtcaactcctaatccgatcatcctaattcccaagtatgatgcagctatatgttgtcgatcgatcctgtgtgagtgtgcttgcccctgtttctcagcaagtgtgtgtgaaatcatgtacgttcttatatatatgtatgtgtggtatatgcatggcttagtaaaagtaaaaacagcatgcatggcactggtgta

SEQ ID NO: 21198 - DNA, 675 bp, Setaria italica
  Peptide Sequence Number=SeqID_87172
tttttttttttttttaatttcggaaagaaagcatgctgctgatttcaccttaaaattggggttttcaccatggactcgtctaacaaagttctaaaccacacacaccatttgcccattaaatgttacccacaacaccgctgaaagaaacatgatggtggtcgccagataaatctacttgcaaggtgatgctacaaaagaactacaataaacgctactgatcagccataaaacttaggcactaatcatcccatcctgacaggccgagtccgcctgcccctacatctggaacagaggatatcatcttaagagctgagggatcggtgatggtgactgcattttttgacttctttctcttctttgtgtgatcaattaccaaatcttcaaactttccgtctggagctacttcctgggttgaactgtcctttagtttgggctctgaactgtactgtttggaaaacactaaatcagcaaatgagatttcggtattatcgattccttcagcatctatgtcttcttcatcaacaaatttcttcctcttggccttcttgtcctttctaccagtatcatcaacatcatccttcctcttcgatttgctgtcattggcatgttcttccacttcaggcttcttctttgcttccttcctgccctttttcctttccttaccatccagcactt

SEQ ID NO: 21199 - DNA, 654 bp, Setaria italica
  Peptide Sequence Number=SeqID_87173
agaagagacaagtggcaccaggtacccatgctctgcctgctgctatctgagcttgatgagtcacccagacctagagccaattcagtcgactttctcttgtagcctctaggagctagcacatcaggttggctagaaccagctgcaggatgactggctgctggaatgacagcagcacactgattcacaaagccatttggatttgggaaacttatggtgaatgctgaatgcccatgtctgggttccattgctcctagagtcgaccaaacttatgaggaagtaccagctgccctcacttccgggttaaataattgtcaaaaaagctacgatgttagaaaatctagggtaattagcaagcttcaacatcttagcatcctccactaacaaaccctgaagtatctctacgatccatttcccagtgttgtatgtgaaatgatgctacttaatcacaaggcgatgacaatttagacccgtgaatatccaacaaacacttttatccgactaagtgaccaaagttcaacaagaatcaaacagcagtaggccagatatagttgtagctgactacccaaatgctcagcaactatgcctaggcggcggcggggttcgcgtcgtcgccgtcgcccgcgcgcctcggggacgcaggagggagggagggcg

SEQ ID NO: 21200 - DNA, 326 bp, Setaria italica
  Peptide Sequence Number=SeqID_87174
cgtaagtcgctcgtttcctcgccctcgatcgaattttcccgcagtggtgtataaatatatatagacacacacaaacagtcccatactcttaacacgttatcacgcaggcatgctcgaacactaatgagttcggccacaagacattcatggcgacgatgcagttcctggcgtcctggtcgctggagaagaacagaagcacaaagtcgatcaatgtcgaatccaagacgaacaagcagagattcgagcgatgatgaacaagcacttcttgctgcagtgcatcaccagtggcgtcttcagcgacgcccttgaacatgtcttggaccccg

SEQ ID NO: 21201 - DNA, 654 bp, Setaria italica
  misc_feature (27)..(27): n is a, c, g, or t
  misc_feature (45)..(45): n is a, c, g, or t
  Peptide Sequence Number=SeqID_87175
tgaagaaaaaataatttcagtatattnttgggggcaaccatatanggttttacagtactgcagatggcagtgcagctgagcacgttgttaattggacacacaccctattcagttgattgagatcagcaattcaaacagtctccggcacctcaattctgatatcaactgattccccgtctgcatcctgacagtctgaatgagcagattcttctacttcttcgatgcaccgtatattagtggatgcatcagagagcttcagttcaggtcctgatagaccatcagcagttgcagtttgcaaatacgcttggtgcaactgcaaagcattctctaggtgccacagtacttcacccattgatggccggctcctcccctcatctgcaaggcatttttctgctatctcactgaattgcttgacagagtccagcgtgtaatttccacctaatcgaggatcgattatggtctcaagcaagttctgtcttttccacttaagagcccactcaggaaggtttatctgatcccttggcaaggtcggttgatgactggccgagcgcataacacttcaagcagcaccacaccaaaagagtacacatctgaactctgagttaactgttgtctcataaagtactctggatcaaggtaaccaaactcccttca

SEQ ID NO: 21202 - DNA, 975 bp, Setaria italica
  misc_feature (946)..(975): n is a, c, g, or t
  Peptide Sequence Number=SeqID_87176
agaacagcaccttcgaccgcttcctgaggtctgcattgatgccaaatacctacctttggtcgctcaacaatgagaagcatgcttattcaaactgttagtgtatcaaactgcactcaaggttcactcagatactggctgtctgttggacctggagacttccagttatcttcatctggctgtgcaaacccagccctctatgctgttgttattgaaagtccatccatacaagtaccatcaggctgcaaagtggtgacatcatctataccaataaagtcgtcacatttcgcagtcatgaaaagcgtgaattacctgccgaatgcactcaccaagtttgaaggcgaagaaaatggtgcatttactggcatttggttggatgatgagggctttgtcgcagagggttccaacatgaacgttggctttgtgacggcgggcaaagagcttctcatgccccgtttcgacaagatactcagtgggtgcacagcaaagcgggttctgaccctggctgagcagctagtagctgatggaaggctcagcaggataatatcaaggaatgtgagtgttcaggaaggtaaggcggctgacgaaatgatgcttattgggagtggcattcttgtcaaacctgttgttcagtgggatgatcagataattggctctggacaagaaggtccaatagctcaagcgctttatgacctcattcttgaggacatgagatctggtccgccatctgttcgtatccccgtcccttactgaaactgtttgtacacgaacgtatggggttattatacggttgtacatgaacagcgatttctaagttatcagagttgtaagcccagtcgtataaaatctatgtacatcggtagcaaataaattgggttgtacaattaatttttcatggatattgtaacaaccagttgttaaaaagtattaatggtgaagtttggatagnnnnnnnnnnnnnnnnnnnnnnnnnnnnnn

SEQ ID NO: 21203 - DNA, 278 bp, Setaria italica
  Peptide Sequence Number=SeqID_87177
gcttgttgcatatgggcaacacctgcatgaaaggtcccagcttctggtgttcggcaagcaactcggctaaatactgactatcaacatctggattgcttctaatctgaggggagaggtttcgcgcaggggagaacccctggctgtagagccccgacatggcggcggctctggagagtgagggttgcaatcgaggaggcggccaggtgattgagagggatacgcagccaagaagtggaggcgaggcgaggcgaggcgaggcgaggagatggtgtttgcgg

SEQ ID NO: 21204 - DNA, 273 bp, Setaria italica
  Peptide Sequence Number=SeqID_87178
ggggggcgaggcggacgcgcgaggcggccagggggtggaaggccatggccatgggtggcgaacggctttgggcggcgatggtattaagtgcgggggggatggggggcgtcgtggagattggggtggcccgagatgttgcgatctccttatcttagaggtgagggaagctttggacgctggccggggccgcgtcagtggaagtggagtggccgcccgggcggtggtggtgcggtggaacggacaccttttttttgagagcaccgtgacacgctg

SEQ ID NO: 21205 - DNA, 995 bp, Setaria italica
  Peptide Sequence Number=SeqID_87179
ttccctctctgtattatgtattcgggattcctaatcccaacagcaagcatcacaaggcagctttgctcgtttaagatgaaattcacatcacttgttcatccatatagtgcacctgacactcttcccctgaagcagcaggtcaaaagcctcgttgatgtcgttgaggccaacttcatgggttatgaacttgtccagctccagctccttgttcaggtacttatcggcgaggatgggaatgtcctgcttaggcttcacccctccaaacatggaaccgatgacagttttcccgtggaggatctgccgagaaggtatggagagaggggctccgtgcatttccactccaagaatgatcgtcttgccccaaccatctcgggtgctcaggaatgcttccttcatcagcaccgccagcccgatgcactcgaagcagtagtccgcaccaccgtcagtcatctcgattatcgcctggttgacaggtttctcaccaagttcttttggattgatgaaatgtgtcacgccgaacttcttcccaagttcctgtttgtcagggtttatatctacgccgattatctttgacgccccacaaatcctcgctccttcggctaccgccaatcctacggcgccgaggccaaagatcgcgaccgaagatccaggctcaactttcgccagcttccatgccgctccaaccccagtggaggcgccgcagctgaggaggcaggcgagtgccggcggcatgtccgggctgaccttgacgacgtggttgacgtccacgacggtgtactcggcgaagctggagacgcccaggaagtggtggagcgggcggccctgggcgtcggcgaaccgggtggcgccgtcgcgcagcatccccgggcgcactgcgaaccggaacctggagcacatgttgctccgcggcgatcggcagtccacgcactcgctgcactgccccaggaacgtcggcaccaccgcgtcgcccgccgcgaacccctccgcgtgctctc

SEQ ID NO: 21206 - DNA, 493 bp, Setaria italica
  Peptide Sequence Number=SeqID_87180
aaaggacagtttattttgcatccgtgccctggaagtcgaagtcgtagaccttcgtcccgtcggggtagaataggccgaagtatcgctcggcgtcatctgacccgtcgcccttctcgttctcgttgaagagggcgaagatgtacacgtccatgtcgatgtaggggtagcgcggggtgcccgtgtcgccggacagcactctgttgatgacgtagttgttgtatgccttggcgttggctaccgtcgccggcgggcattcgcttgtgtcggccttcgaactcgtctcggcatcgcgtggtggtttcttccccggtttgacttgtccacgtgatggccacccagtctccgtccatactgtatcggtctgacctgcattcgagccactggccatcgtctgcatgtgaggttccgtcaagttttcgatggggtctaaagtaacgttggtcgtccctcatcgcgtccagtaagctgtggtagacgtggccgctgttcggtc

SEQ ID NO: 21207 - DNA, 555 bp, Setaria italica
  Peptide Sequence Number=SeqID_87181
agccactggccatcgtctgcctgaaaatcaaattagttaagcagacgagcaggggctgcacggatgaaagaggttagttttgttgtggagagaatcgattcagacatgtgaggttccgtcaagttttcgatggcaaagaacgtggcgtccctcatcgcgtccagtaagctgtggtagacgtggccgctgttcgggtccggcacgccgggctcgtagctccccagcgcgaattcgagggtgatattctgtggctccttggcgagcgcgaggaacgggtaggggttgatggtgaggtaggagccggtctgctgcaggaactggagcatgggcttcatcactgactgcgcgatgtcgtcccggaacctggccccggacggcgggaacgacggctccctgagcgcgtcgaacgcgaccggcgtggtcaccttcacggcgtcgtcgaggcccagcttcgccagcgccgcctgcacgttgatcatggccgggagaagcttcgatgtcaggttcttggcctgctcgaacacctcgtcccacggccaggccattgatttctgt

SEQ ID NO: 21208 - DNA, 144 bp, Setaria italica
  Peptide Sequence Number=SeqID_87182
gggagcgggagagggagatggcgggaagggacgaggaatcgatccaaaactaaaatcctgcggttgtgaacctgcaagacgtgcaaaggatctgtaaatgtatatgtacagaactcacaaatcacaattacaaaagcaattagg

SEQ ID NO: 21209 - DNA, 202 bp, Setaria italica
  Peptide Sequence Number=SeqID_87183
agcttagcaatctacatctcaagatatcccatcaaagcacacttcaaacatgaaaggagaaaaaattccactgaactggccatctcatcccctttataggaccataattttcagactcattttgcagtttcacgtggtctaactagctattgtactatagctgcagctgcaaccttatgacttatgaggcaggaattgatca

SEQ ID NO: 21210 - DNA, 452 bp, Setaria italica
  Peptide Sequence Number=SeqID_87184
ccgccgctgaggatgtccgcggcgtcgcgccccgcgaagacgaggatgtcggcgcaggaggtgttggcgccgaccttctgcttgatggtgtcgatgacctcgaagccggcgaggccgatgttggtgaccgccttcttctcggtgttggtgccgtcggttggcgtcttgtcgaggagcacggatccatcacaaccattgatccagcagtcatggaacaccaagcggacgagggctgcgccgaggccggggttgtacgccatggccttctccacttccttcctcaccttgtcctggactttgtccgagtagtaccggccggcggccgactgcccggcgaggaaggcgagaaccacgcacagagatagcacggcggcgctgagcttcgccatctccgatatatagctgctagctcgagtgttttgaggtggtgagcttgggatggagctagctgc

SEQ ID NO: 21211 - DNA, 370 bp, Setaria italica
  Peptide Sequence Number=SeqID_87185
gtgttcatgctcatctcccttgctgtcccccgtgtgtttcactgccgttagagttcaagttcaacaggtcattaggccaggatcatcatggccaacgcgctgtctctcgtggccgtgctcctatgcgtagcgagctacggggcgctgtcctcggccaggacgttcacggtcggtgatgaccagggatggatgagcggcatcgactacaccgactggaccagcggcaagacgttcgcggtcggagacaaactacttttcagctacaggagccaggagcacacggtgacggaggtgagcaagagcggctactacacctgctccggcagcggcgcgctgagcgacgacaccagcggctggaccgtcgtcacgc

SEQ ID NO: 21212 - DNA, 1495 bp, Setaria italica
  Peptide Sequence Number=SeqID_87186
ccgcgtgcgcggcctcctccggcgagcgtcgctctactacatcatgcggttcgtgttcggcaaggagtacgacgtgtcgcgcgcggcggcgccggcgtccgggaaggaggaggaggtggaggagctgctcgagatggtgcaccaagggtacgagctcctgggcgaggagaactggtgcgactacttcccggggctcgccgcgctggaccctcagggggtgggtgcgcggtgcgccgagctcatgccgcgggtgaaccgcttcgtgcacggcatcatccaggagcgccgccgtgcacgcgccgaggcgatcgacggaggagaggcgcgtgactttgttgacatcttgctttccctgcaggagagcgaggggctcgctgacgcggacatcgccgctgtgctttgggagatgatcttcagaggaactgacgccatggcggtgctcatggagtggaccctagcccgcgtcgtcctccaccgcgacgtccaagccaaagcgcaccgcgagctcgacgagctcgtcggccggaacacaccggtcaccgagtccgcggcgccgtcgctgccttacctgcaggcgctgcttaaggaggctctccggatccacccgccgggtccgctcctctcgtggcgccacagggccatatccgacacgtacgtcgacggccacctcgtgccggcgggcaccaccgccatggtcaaccagtgggcgatcagccgcgacccggaggtctgggacgcgccgctcgagttccagcccgagcggttcctccctggcggcaaggcccaggacgtgtccgtgctcggcgccgacggccggctcgtgccgttcgggtccggtcggaggagctgcccgggcaagtccctggccatgaccaccgtgaccgcctggatggccacgctgctgcacgagtttgagtggctgcccgcgactgacgcggctgccgtcgacatgtcggaggtgctccgcctgtcctgcgagatggcggtgccgctcgaggtccgcgtgcgcccgaggcgcggcgtgtgaatgaagaagttgccgataactttgttgcaccgtgactccattgtgcgtgcagtgtgtagccgtgaccctaagcttttccgtcagtaaactgtgaataagcagctggtaaaggactgtgcaccagctcacctcagtatttggttcagaatctcagcttgcctatgtactacatttgggtgtgacttgtgagtatgaatttcaacaagatgtacaaatcacaaaagttatcaaagtttatgtgaagtgtggcatacatgtagcctctattcctgtcacgcattaaacttgtcacgtgtaaccggtcggtctctggccttgacaagcttagctttcagaaaggctgctatgtggtctctttgaccatgatagctgcacggacatgtacgtttgtttttgtattaccagtgcaaaacaaaacatttgaattgcaaaagggaaataaaagaagaaaatttcaagaaaaaaaaa

SEQ ID NO: 21213 - DNA, 390 bp, Setaria italica
  Peptide Sequence Number=SeqID_87187
gtcgcactagtcgcataagtaaatatccaaattaaactcaatgtctagtgtacataaacaaaaatattcataatccaagttccccaattttgttgttggaacatttgcagagacagaggcaaagtttcttcaatcagcgatgtaaaaaaataaaaggaaaagattcagtacggaacacaatgtgctgtatgatagtttcatattggattgttcgtgaaacagaaaacaatagcagactgctaactaagcaactccacacaggacattgtttgtgtacctttaagaaccatttgagcttcttcgaactcccccttctttaggatccatttgagcttctcaaagttcctaacttcctcctggacttgacttctcgaagggacctggtgccgg

SEQ ID NO: 21214 - DNA, 339 bp, Setaria italica
  Peptide Sequence Number=SeqID_87188
gtaagtatttggactctgctttcgatagtatttcagccttttcgagcaagaaagacaaccaagaggcagtgtttggatcagaagaaaccattcttgatatccgcgaagcaaaactagcatatagagccgaagtttttgagttacagaagcagcttgcacggcagcaagcacagtttgatttgcttgcaggccaagcttctactcttattcaaggtagaagggcacgtgtatctgctatgtctgcagttagtggggaactagtatcgttagatgagatactttcttccagaaacttggagatgaatgcagttcttggaagaattgcggctactacccagg

SEQ ID NO: 21215 - DNA, 1129 bp, Setaria italica
  misc_feature (1101)..(1129): n is a, c, g, or t
  Peptide Sequence Number=SeqID_87189
gcggtgggaggactcgtttgtgaggtttccatatctcttgccatgcctttgtatttcacttttcgctgctgtggttctagtaagctgcatatggttaccggagacacttcataaacacaaaaacataggcagcaacgagatagaaatgtccagtgatccaagaactccacagacaactgatacacatggggacaaaagtttatataagaattggccattgatgtcttctatcattgcatactgtgttttcacacttcacgacacagcatacagtgagatcctttcattgtggaccataagtgacagaaagtacggtggactaagcttttcatctaaagaagttggccaacttcttgcagttgctggtgctggacttatggtgtatcaactattcatctacagaccagtccacaaatttctgggatgcgtcaattcatgccgtgcttcatctgccctatccataccacttcttgctgtgtttcctttcatgacacacctatcagggtatagacttggactagctctttattttgctaccattgtgaaagctgctctcggtataactatcctgacaggcacttcacttctgcagaactatgccgtgccacaaagtcaaagaggcgctgcaaatggcatagctgcaaccgcaatgtccttcttcaaggctattggtcccgctggagcaggcgctttattctcgtggactcaaaagcgccaacatgctgccttctttccaggggatcaaatgttgtttttggttctcaacgttgtccaatgtattgggctcgtgatgacctttaagccattcctagcagtaccacaacactatgatccgaagtaggtgctagaactccgagcaacagaataatgcattttagctcccaaaaacgagcatgagtgccgtacaagataattatgtaacaccaaaagctgtgtgttgtaccaaacaaaaatagccacatcaactcttatgatgtatgtatcttttgttattccagtcctaagttggcggtcatagttgtctgtgctcaagttagaactggaatagcgtttgatcttgaattccacgaaacatgagatgctttgtgcaaaatttcaaannnnnnnnnnnnnnnnnnnnnnnnnnnnn

SEQ ID NO: 21216 - DNA, 202 bp, Setaria italica
  Peptide Sequence Number=SeqID_87190
accctaaagacacagaagcaccacctggtggagtggatgacatgacaaggctatcatacttgcatgagcctggagttttagataacctggctgtcagatatgcaaaaaatatcatttatacctacactggcaatattctgattgcaataaatccattccaaaggctgcctaatctggttgattcccgtactatggaaaaata

SEQ ID NO: 21217 - DNA, 885 bp, Setaria italica
  Peptide Sequence Number=SeqID_87191
gaagggcaccaagaatgtgctcgaggcttgctcggccacgaatgttcagaagctcatcgtggtctcgtccgttgctgcttcctgctttgacccaactggcctgaaggtgagctcaaggatgagagttgctggacagacaaggagttctgcaaggacactcagaattggtattctcttgccaaaacagaagcagaagagatggcgcttgaatacggcaagaaaaatggactgcatgtagttacattttgccctggtctggttgttggcccattgttgcagcatgtggcagtcaataccagcagcaaagttctcctatacatcataaaaggaggccctgacacattaagcaacaaattctggcccttggtagatgttcgtgatctcgctgacgctatgctcctagcatacgagaagtctgaatcctctggtagatacatatgctcattggaccagatggacataaaggatttagtttctttgatgaagagcatgttcccaaactacaattatacagacaaaatggtcgacgtggattacaaggtttataccacatcagataaactgaagaacctggggtggcagccgaggaagctggaggagacgctcgcggatagcgttgagtacttcgaaaaggctgggcttctgcaggatgcagacgggaaaccttgccggcttccctatttttaccgtgtgaacgctgaggaatgaacgggatctgtgctcttatgatcgaaatatattacagaataaaacgtagatatttgcggctatacaaggacgcagctatgcaccttattatttcagctgatctcttggcgccataccgccttgaacagtattgttatgccaactactgtgagatgttaatgttattgtttcaaactc

SEQ ID NO: 21218 - DNA, 221 bp, Setaria italica
  Peptide Sequence Number=SeqID_87192
agttgacgagcacgggcacgagtaataggatcagaaactggtacccgtgtcggcgtggacgtatcgttggtgttgatatcctcatcagtgtttggcagcactccattccagaaaaacagttccactccaccaactccacaaaactccctgccaaacacatccagcttcaccaactccaactccagaaaaaatatggagttcgggggtcagatccacgtttt

SEQ ID NO: 21219 - DNA, 262 bp, Setaria italica
  Peptide Sequence Number=SeqID_87193
gttggtggagtggaactgttttttctggaatggagtgtccacaaaactccctgccaaacacatccagcttcaccaactccaactccagaaaaaatatggagttcgggggtcagatccacgttttttttggagcaccttaaggggtgctccaaaaacactcattttagacctcctcgtggagttgtgggttaatttacccaccattaccactcattacacaacttacctgttcgctaaacaaaagatcgctctcctcctcccg

SEQ ID NO: 21220 - DNA, 513 bp, Setaria italica
  Peptide Sequence Number=SeqID_87194
tcttcgttcggtcgtctagtcttgttcctaccggtctttcttacttcctagtcttccttgccccggcgttgtacagcgccgtcaagtcggtggtgcagtccgccatcgacaaggagaagcgcatgggcgcctccatcgttcgcctcttcttccacgactgcttcgtccaaggttgcgacgggtcgctgctgctggatgacacgcccagcttccagggtgagaagatggcgacgccaaacaacggctccgtgagaggcttcgaggtcatcgatgccatcaagtccgccgtcgagaaggtctgccccggcgtcgtctcctgcgccgacatcctcgccatcgcggcgagggacagcgtcgtcatccttggcgggccgaactggaacgtcaaggttgggaggagggactcgatgacggcgagcttcattggtagtcctaactaactagacaatacccaaccgaccgaacgtacgggacctacgaccaaacctagaacaataccctacttacgaccga

SEQ ID NO: 21221 - DNA, 490 bp, Setaria italica
  Peptide Sequence Number=SeqID_87195
ttagtacgacttacaataaactaagaatcgaatactcttttctctcttatatatttacagaagcaacaaccacaagtttcaaaaaaatgttataaacttgtaatatatgattattatgtatagcgagcaatttattattatgtactagctagattaatatgataacctacttggaataattaatcttgatcggcctcttgcattgctatgatctgaattggcaggtgctcacaccataggcctagcacgctgcaccaacttcagagcccacgtatacaatgaaaccaacatcgatggcgcctttgcaaggactaggcaatcaggctgccctagcacctcaggtacaggtgacaacaacttggcacctctggaccttcaaaccccgaccgtctttgagaacaactactaccggaaccttgttagcaagaagggacttctgcactctgatcaggagctcttcaacggtggagccaccgacgcgcaggtccaa

SEQ ID NO: 21222 - DNA, 671 bp, Setaria italica
  Peptide Sequence Number=SeqID_87196
taaagttccatcatcgtagctagctagttaactgcaaccacacaaattgttcctttttttatgtcgcttcataactagaatcgaatactcttttgtctcttatatatttacagaatcaacaacaaccacctgtctacaaaaaaaaaatgttataaacttgtaatatgattatgtatagcgagcaatttattttgcagaataagtaaaaataggtcaatcattcatttcttccattcttttgatatactagctagattaatatcataacctacttggaatcttgatcggcctcttgatttctggcaggtgctcacaccataggcctagcacgttgcaccaacttcagagcccacgtatacaatgaaaccaacatcgatggcgccttagcaaggactaggcaatcaggctgccctagcacctcaggtacaggtgacaacaacttggcacctctggaccttcaaaccccgaccgtcttcgagaacaactactacaagaaccttgttagcaagaagggacttctgcactccgatcaggagctcttcaacggtggagccaccgacgcgcaggtccaatcgtatgttagtagccaaagcgcatttttcgcagattttgtgacaggcatgatcaaagaatgggtgaacaattaacaaccttttagaacgggctccaaa

SEQ ID NO: 21223 - DNA, 1296 bp, Setaria italica
  misc_feature (1262)..(1296): n is a, c, g, or t
  Peptide Sequence Number=SeqID_87197
ggctatctagctccaggcaggacacaagcacgcactctgctctccctgcatatcttgctagcagctcacacacagtcagacgatcgagcaccatggctgcaagatgcagcggcggcggcatcgctctcgtactgttgctcctggcgctggccggcacctcgtcggcgcagctgtccaccggcttctactccagctcctgccccggcgtgtacagcgccgtcaagtcggtggtgcagtccgccatcgacaaggagaagcgcatgggcgcctccatcgttcgcctcttcttccacgactgcttcgtccaaggttgcgacgggtcgctgctgctggatgacacgcccagcttccagggtgagaagatggcgacgccaaacaacggctccgtgagaggcttcgaggtcatcgatgccatcaagtccgccgtcgagaaggtctgccccggcgtcgtctcctgcgccgacatcctcgccatcgcggcgagggacagcgtcgtcatccttggcgggccgaactggaacgtcaaggttgggaggagggactcgatgacggcgagcttcagtggagccaacaacagcatcccaccgccgacgtcgggcctcgccaacctgacatccctcttcgccgcgcagggactctcccaaaaggacatggtcgcgctctctggtgctcacaccataggcctagcacgttgcaccaacttcagagcccacgtatacaatgaaaccaacatcgatggcgccttagcaaggactaggcaatcaggctgccctagcacctcaggtacaggtgacaacaacttggcacctctggaccttcaaaccccgaccgtcttcgagaacaactactacaagaaccttgttagcaagaagggacttctgcactccgatcaggagctcttcaacggtggagccaccgacgcgcaggtccaatcgtatgttagtagccaaagcgcatttttcgcagattttgtgacaggcatgatcaagatgggtgacattacacctttgacgggctccaacggggagataaggaagaactgcagaaggattaactaatgaagatggaatgtgcatgatctttgaggcttttttcttcagtcacgttcaacaactttgtagcctttgtaaacttttgtttcaacagttgtgaaatcattgtgttgtgccgatgtgttcacatgttggttcatttaaataatgaatgtatcacttgttgtctgcatcatacttttttgtgtctaatatattttgtatgagacnnnnnnnnnnnnnnnnnnnnnnnnnnnnnnnnnnn

SEQ ID NO: 21224 - DNA, 1137 bp, Setaria italica
  Peptide Sequence Number=SeqID_87198
ccgcttctcccacacgagttgctgcttcgtcgctcggtgaacaaaaagtaaacccacaccaagccgccgacctcgcccagccgagggagggaggaagaggaagaggaaggaggagctgccggagctggtctttgctcgggccagccacggcggcggcggcggcatggcggggcggatggtgcggagctgcgtgcagacgacgctcaagacggtgaactccgtcgtggggctcgccggcatggccgtcatcctctacgcgctctggatgctccgcgcgtggtacagggaggtcgcccaactcgaccaacgcctccccgccccctggttcatctacacatttcttggcatggggatctttctttgccttctgacttgctctgggcatattgctgcggaaactgcaaatggtcactgcctctcttgttacatgatcatcgtattcgtgcttattatactggaaggtgcgatcactgtggatgtatgtctgaataacaactgggaagaggatttcccccctgatccatcaggcaagtttgatgaattcaaggtatttgtgagatcaaattttgagatatgtgaatgggtaggcctctcagtggtggctgctcaggtgttatcaatcattcttgggatggtactcaggacccttgggcctgaccgagagactgactatgacagtgatgatgacaccactgtgcctgcaaggctgcctctcctaagaaaccagtcccaacatggtccagcagactatgctgaacccaacacatctcgtaggagtgattcatggaaactacggattttagacaaggtcaacaactaagattttactgatgtcatatggcgaacccttcaggaaagagttttgctccgagggtttcggaaggatgataagagtataccttttttttcttatggagagatgattctcatggtggagtagcagcagcagtggttagaatagttttgaatggctacttttgaatgcctttcaatatgcacagatatttgagtagcgactgacccttataaccccagccatgatggggaagaatgctgtaccgaatgtttcagaaaaagatgaaggcatgactggtgtcttcactgaccaaacaaagaaatatttctattttgtttttc

SEQ ID NO: 21225 - DNA, 267 bp, Setaria italica
  Peptide Sequence Number=SeqID_87199
taggttacccgggtgcccctggcgacgaacgtgccgtccgggagcgtgtcgtcgccggcggcgaacttggagtcaaactgcaccggcgggaacagccgcatgcactcgtacagcgccgcgtgcacgtagtgcatgtccttgagcttctccgaggtggcggcggccgcggggtcgtcgcccctgcctccggcgacgccggagacttcgtcccggatcgcggtggccacgtcggggtggtcggacagcagcaggaagaaggcggtgagg

SEQ ID NO: 21226 - DNA, 124 bp, Setaria italica
  Peptide Sequence Number=SeqID_87200
ttcaaaatatgaatctaattgtatatcttttagacactaagcatgcatataatgtgaccagttgtcggttaaaaattacaaagtttgacttcaaatgtatattgtatttttgaacggaggggta

SEQ ID NO: 21227 - DNA, 312 bp, Setaria italica
  Peptide Sequence Number=SeqID_87201
ccgtggccgccgcctcgaggtccgccagccgcacgtcggcgtcggcctccacgaacatcaccccctcgccggtgcagtcgacgaccagcttccgcgcctccacctcccgcagccgcccggcgagcgggtagtacggcacgagcgcctcgccgagcgcgcggcggatcacgcccgccgggtcgcggtcatgcgcgtgcgccccgccgcggtagaagaagaggaacggcgcttgcccgcgcagcgtctcatggtcgtcgaggtcggacaggcgcttcgtctcgcgcggcgtcggcgcggcagggccgacgagcg

SEQ ID NO: 21228 - DNA, 1071 bp, Setaria italica
  Peptide Sequence Number=SeqID_87202
ttttttttttttttttttgtttagggaggtcgcacatctttgctattgtttctttggcaatttacatgtacccaaaacttgtaaggcggtagaatacagaacgggacatttttaacttcagaggtatttcagacaatggaatttacacatgaggggagaaaaaaaggaatggtgacaatcagttgttagaatggtattgctatacatgtcattcatttcatatagtcaaggtacctatcagaatacaacagacaccaagagtacatgcaccacatctcaggcaaacacatggccgagtgaatcctctgatttgcgtttgatgttcccaaacaaggtgattgtagaatttagtatatctatcctactcagcagcatacagtctttggcgaagctccgcttggctcaaagttgcatcaacacagcatagaacatctccacttcgtgcagtcttctcagagatccactctggaacaagctctttcaacagtgttagctgctcctcgacttcacttctgtccacaatctttggactgcttgcaactatcttatgaatcagctcctgctttgtcatcacagaccgctgtcttgactggtagataagaaatataatatcaaagatacttggcagggaagcaatcaacttgtgccttttaacctgatcagcaaaaccagtttccttctcctccatagccctctgttccttctgctttaccgactggaggagggattgtggaagaaaactgagtaattcatcgtcactatcagcagaagaaatagctgcattttggttctctctgtccatgctacttgcaccctttgtcggagtggtaaataacttagcacgagctgatctctttgccaaattcaaaggtggtgagccataacctgcagcagagattggtctctttggtgtcttaaggtctggtgtggatgccattaacctcactggtgtagatgcatatttagcaggggtgccctctgaaactttagtcgaggatacaacaaccttgccatcctcctctagctgagcttctttagaaccagaaatatagctactggagagggaattcc

SEQ ID NO: 21229 - DNA, 530 bp, Setaria italica
  Peptide Sequence Number=SeqID_87203
ttttttttttttttggtaaaaaagaaacgacgaggcgtccaaatcgtatgcgcatacacctttattttattgtgacagagacaaataaacactgtcgtctgaatgcttatcatcaacactgtcctcttattatcacatcgatttaaaaagcatggtatatgctccacaatgctagaaggtagaaacgatagcttggaactggatgccagtttgatcaaacatctcagaagcagcattgctccagcacgcagcagcagcagagagcggccaaacatcctttgaagaacccggagcagtggcagccacagcagccatcgtcctcctcttcatagggccgatgctgtggcgggtagtgggggctgtcgtcctcatcctcatcaccgtagccctggtaccctggtcgatgccctggtggagggtagtagggatcgtgctggtagctcattgttgccctttgccttccccttgctttgcttgcttgctgtggggagaggagctgtttgctgactttgggaacttgctatgacagc

SEQ ID NO: 21230 - DNA, 601 bp, Setaria italica
  Peptide Sequence Number=SeqID_87204
gctagttcaagatgacagttttttgttaccgtgctatgacaattttattccgcccaatcccgaacgccaaaccaacaaagccaccacagcgtgggtcggtcttatagtttgggctaggacaaaccagagccaaaccggcgcgacgcgctaccgcgatgaattgccagtgagagcccagaccctcgcagcttctcctccacgatgccgtcgagcctctgcgccacctccggcgtcatgtgcgacttccagtccccgacctcccccttacggaagaaggccgagttcttgaacgaccaactggccgtcccgtgcaccccgctccggttggcctcgacgctcctcatcctgtccatgctgcatagcgcaacggcagcttcagggacgcctcgggccacctcctcgccggtgaacgggcagccgaggaacttggccagcctcatcacgctccccacggcgtcctccttgaggtgctcgtaccggaggaatatcacctcccccggccgcgccacgctctccttccagtactcggccatgtggtcccacaccggcccgaacggcgacacgccgtcgcagaacaggtcgaacgcctcggcggacggcg

SEQ ID NO: 21231 - DNA, 425 bp, Setaria italica
  Peptide Sequence Number=SeqID_87205
tgaaaagaagtgcctagacaggccaaaattccccgcattcaaatcaagaaaacaaaataatgaaaatttttaatatttgcttggttttatttcctgcagttactaacatctcactgttttgttattcagatgtgtgttcttctctttgtgggaaccaactactcaacatacttcaacacggcttcacttgttacatacttacatgcatcgagaactttccaaagagcaggggcccaacagtgggcatcctgaaagcattctccagccttagcagcgcaattttgacacaaatatatgcagtaatgcacacaccagaccatgccacgcttattttcatggttgcagttggaccagcattggttgccattggcctgatgtttgttatggcctgttggaggtcaccaccaggcgcgtccatctgtgac

SEQ ID NO: 21232 - DNA, 382 bp, Setaria italica
  Peptide Sequence Number=SeqID_87206
agcagtgtcttgagcagatcggagggcctgaatccacccatccagaggaagcaccgctcggcggggtcgtccacaccccggtgatgaggtggaacacgtcggacttgactgccacagccttgagctggaagagctcgtcatggtgggtcagggtgtcgtcgacgatggctctgaggccaccatccggcaaatgcgcgtgcagggctccgtgcagctctgccatgcgccgggcgtggtcatccagccaccgggcgtactccacgtcgaacatcgcggcgcctgagctggtgtttgcacctggagctccaccaagaaagaggccctgggaacgggctcgctgcatgtcctgttccatctgagcaagcttcagcttgctgctcta

SEQ ID NO: 21233 - DNA, 246 bp, Setaria italica
  Peptide Sequence Number=SeqID_87207
cctatcccctgtgtgccttgcctatctcctgttgcgtgtctcagcgagaagctgatgaaccagatcttcgacctcaagttcacctccaagtcgctgcagcggcaggcgcgcaagtgcgagaaggaggagaaggagcagaagctcaaggtgaagaaggcgatcgagaagggcaacatggacggcgcccgcatctacgccgagaacgccatccctattccgttcttaagtttcgttttcttttaagtt

SEQ ID NO: 21234 - DNA, 1170 bp, Setaria italica
  misc_feature (1150)..(1170): n is a, c, g, or t
  Peptide Sequence Number=SeqID_87208
tcccccaaacggctgcgcgttgccgttgcttagccgtgttgccccaaaccgcgtggtcttcttccccgatcaaaatcgtatccaatcccccaatccgatcgcctcgacaaaatccccattcgttcccctcctcgccgccgcgaaccctcccccgatcccccacctcgatctcccccaaaccctatcctagccccagatccagcccagccctatcgacccccactcgccggcggccatggggaaccccgagaagctgatgaaccagatcttcgacctcaagttcacctccaagtcgctgcagcggcaggcgcgcaagtgcgagaaggaggagaaggagcagaagctcaaggtgaagaaggcgatcgagaagggcaacatggacggcgcccgcatctacgccgagaacgccatccgcaagcgcaccgagcacatgaactacctccgcctcgcctcccgcctcgacgccgtcgtggcccgcctcgacacgcaggccaagatgcaggtcatcggcaagtccatgcagtccatcgtcaagtcgctcgactccgcgctcgccaccgggaacctccagaagatgtccgagaccatggacaatttcgagcgccagttcgtcaacatggaggtccaggccgagttcatggagggcgccatggccggctccacctccctctccacgcccgagactgaggtcaacagcctcatgcagcaggtcgcagacgactatgggctcgaggtctccgtcggcctgcctcaggccgctgcgcacgccatccctgctgccaaggataaggagaaggtcgacgaggacgacctctctcgccgccttgccgagctcaaggcccgcggctgagcgcttttcagcgttttcagatgcgattcatgctatatgctgttgagccgcaatgtcacgcggactgctactcttatttggtagattcgtaaatactgttatgcttaagcgtgagttggcatcaccatgtggggtctgtggacttaatgaaaactttgctgtgtcatattgtactataaaatctataaattgcgggcttgcaaacatctgtgattgtgttgctatctggacactccacatctgtccgaaaaagttaagttgtcgatgcttgtcatcagtttgccctacaaaaaaaaaacnnnnnnnnnnnnnnnnnnnnn

SEQ ID NO: 21235 - DNA, 740 bp, Setaria italica
  Peptide Sequence Number=SeqID_87209
cacccctccctacccttctctctccttttgtttttctctcacttcgtacctttgcttcttctcatactctctcactcactctctctcctattccttttacctacacggctacacaccaaggacacctttgccagaaggaacgtactcccgtgctcgcccgctttgcatctacgcgtacggcctacatgaagtccacctcgaacagattgtgcatgttgccgttgccgttgttggtgttctggtcggagacctcgccgttggccgccgccgacggcagcgcgctggagcacaccgacgagcacgacaggatgttgttgccgccgccattgccgccgttgttgtgaacctgcagcgaggtgatgaagtgctgctcctggtggtggccgcccgcggccgcctgaacctggagcatggtgctgagctggtggtggtggtcctgcttgtccggcgaggcgcccagggtcagcgtcggcctcgccagctgcttgttgccctggtccaggcagctgatcacgctgcccgtgttcgatgacatggtcgacttggtcgtgctcaggtctgctccatcatgggttcaagagccggagatggagccgccgctgggcttcttggcgggcggcgacgcggcgtccttggacgacgccgtggtggccggcttccggcggcggcggttgtgctccgccagccgcttccggcagctcctcttggcctcgtcgaactccgtcagcacgtggaacctg

SEQ ID NO: 21236 - DNA, 1397 bp, Setaria italica
  Peptide Sequence Number=SeqID_87210
atcatttcacattatctcttgtggaattaaaatgatgccattgatagcattgtatgtcacagtaatggtgacgaaagggactgtttgcacattcaagaggcataatacacacacacacacacaaacaaacaagatacaatatgttatagcaaacaagacttgtacaaacactactagcaaccatttaagatccaaacaataaacctagacgccttttattttataggacgccacaccctcaaatgcacaaggtcatgcatatatacttgtatagtgcgtgaataattaaagaccatgtcgatatccaaagcgtgaggataatatagaggttgccgttatactttataccttttatgacaatacgtagattgagcatagcaagttaataggctcgtccagccttcttaacgaaggccagatcaccgtacggcatgaagtggcacaccggcgagccaccgggggcgggtgttcagtatctcgaaagccgggtgcgccgggttccagctggaggtgtcgacgtggcagaacgccagcatggaagccgccggccggccgccgccgcggaggccgctaagcgagaccacgtaggctctgtaccccatcgtccctgcactgtggcactggtagacggcgtacgggaacggcaccttgtggcaggacacgtagcgttcgccgtccagcggggcgacaccctggaccacgtacggctgacgtggcagccccccgcgggggagctccgacgtggccgcccacacgccctgctggccgccgtcgttgacaacggtgccaagcatgtccatggcgctacgcacggtgctctccagggacgtggtgcaggacttgacctcgcccgcgacaggcggctcctggcacctgctcagggtgtccctcacctgggttgcctcggcggagcccgccgggatgttgaaggtggcgaggacgtcgcctaggtttccgaaggggaccttctcggcgacgccgtgggggaggatagctgtctctgcctccgccgggaaggagagcgtcatggcgctgccaggacgcagctgcgcctcgtggaagaagatgccggtctccgcgacggtcagtggattgcaagcggagttgaacattatgcatacactgatactgggcggtgcagagtagtgctccacaagtggcgagtggtcaatgccattcttgacaagatctgcaatggcgtctggcatcgtcgtgcccgggagggccttctgccagaactgtgccgccagagtgttagtggtggcagggtgaccgagcaccacggcggcgccggcggaaaccaccacaatcaggaggagtgttgatggatgcatgcttgaatttggtattggtcgtcttggcttgttctaagctctggttgcgtggttcttggctcc

SEQ ID NO: 21237 - DNA, 388 bp, Setaria italica
  Peptide Sequence Number=SeqID_87211
ttctccggggtcatctactacgacgccgagggccgccgcctcgcgcaaccgccgccgcccaggtcgccccatgcgcagcccgctcccggcctcgcccaggctcgccgccaacgcctgcacctactagctactccgtattaggcttggatcggagggggttgggggctcagcgttctttgctcttgcctgcaacgcgttggccgcaagacggcgagcttgctctgttttagttggggatgaggcagagtgtgtgtctgctgggggattgtagctgtacctgtacatgatcctggtgttcctcttcttcttctctttttctttctgtttttcattggtgttgtaatcatagaatatgcaatagctcgtttgaggaattaaaaaaaaaaaa

SEQ ID NO: 21238 - DNA, 112 bp, Setaria italica
  Peptide Sequence Number=SeqID_87212
acgcgttgaagggctggagacattggactactttgacaacctgaacgagaaagaacgattcacagaacaaggagatgcaattgtgtttgaagcagaggttgacaaaatatat

SEQ ID NO: 21239 - DNA, 416 bp, Setaria italica
  Peptide Sequence Number=SeqID_87213
cccaataggggcctttgcttgtgcttaatgtgcactcactaacaacaacaagaagaatagtaaaacatggagagacatttgcatgggaggcgtacagctacttcacaacaatcttaactaaagttgcaagctgcaactcaatgggaaacatttgtcagttatttggggggtcagatgataacaacctgaaaaatatgaatgaaaagctacagtacagacacagaataggccacttagccaatggtcaacctaagaaaacatttaagatttgtgtaaacacgaattcagattagccacagatggacaaggtgcaaatactttgtagctgtatttgtgaaacatatgttgatagaacacaatgtggatgagaaatactataatcctcacttgtaccataacaaggatcaagcgatcag

SEQ ID NO: 21240 - DNA, 337 bp, Setaria italica
  Peptide Sequence Number=SeqID_87214
acccacacagtaaatcctcgattttattgggtgatcacattgacgatctaccacgactacacgagtagcagtcccctcgccgatcgaggcgcgcagcaacgtgtacagtgtactcactgcgccgccaggccggcagccacggcggcgttgaacggcctctggccgtcgcagtcgaggtcgctcccgtagccgatgcggaaggcgtggcagtagcgcttgtagaatccgatccggtcggcgacgcggaggtccgggccgcgcccgcactcgagcccgccgttgatgatgttggtgatgacgccgtagcccggcgcgccccggccggccgccctgtcgg

SEQ ID NO: 21241 - DNA, 1734 bp, Setaria italica
  misc_feature (1)..(34): n is a, c, g, or t
  Peptide Sequence Number=SeqID_87215
nnnnnnnnnnnnnnnnnnnnnnnnnnnnnnnnnntgcaggcaacatgggaattacagtcttatgaaacaattaggtagatgtacaagaattcttaaatcgaccagaaatggaaactttgacgacagccattgaattcaggcagccatcgttcatgaactacctcttcttacagacaacattgaaacgttttaagaagaaaaaaaggaaggggagtctgataaaaacaacaacatactgtaagcacaagaatccatagctacccagaaatttgacctccacaagctcgctcttttctacccttgaatgacaccacctccagctttaaccaaagaggatcttcaggtgaggcaattatttacatctagcaactggtggtggtagactttgtggtgacaccatgatgggtaaaaaatttccatgtcaatgaagcgaatcggtggctgaaatttaagtctccagctactggtaatcagggttgaatgcaagagcctcttggtagatcagatctttcatttgttcttcggacagtgcatgctgctcgaagtcgaagctgaagggcattgagcagacaggctcatcacttatgtcatgaagtgatgccaaataaggatgcgcaagtgcgccttcaacagttattctctgtctaggatcaaaagtcagcatcttctcaacaagatcaattgctaaaggttgaacatgaggaaatttctcaggaaaggactgcctagcatgacggggcagttggcggatatatcttcttgcattttcatttacgaagtccagatcagcctcatttggtgtcccgatgagctccattagtaaacgtagctgatggacatgatctcttccaggaaacaagggcttccggtccatcagttccataaatatacagcccacagaccacacatcaattgccgcagtatactcagaggaattcaacaaaagctctggtgctctataccatctcgtgacaacatattcagtcataaaatcagtttccgaggtgatgcgagcaagtccaaagtcacaaatcttgaggtcacagtttgcattcaaaaggagattgctaggcttcaagtcacggtgaaggacatttgctgaatgtatatacttcaaaccgcggagaatttgataaagaaaatactggcagtgctcctctgataaagcttgatttgaacgaataatttgatgcagatcagtatccatcaattcatacgcaatatacacatcattgaatgcctccctctgtgaaggaggtatgatatcccttattgcaacaatattctcgtggtccatgtggcggagcagcttgatctcgcggagcgtgcgcttggcgtcgatcttgttgtcgaaggcgttggcgatcttcttgatcgccacctgctcccccgtctcggagttgagcgccgagcagacgatgccgtaggcgcccttgccgatggggaggatggggggcttgtacttggcggtgacctcgaacacgttgccgaagatgttgtactggatgaagcgcccgccgtggctcagcgtcgcctggatgttgtccatcatcccgcctcctccccccgccggctgctgcggcgggtggcctcctccgccgccggcgcccgctccggcgtccgtcatctccgtgtccggcggctgcgccccgccgtccatcgccggatttggatcgcgccgaggaagggggcggaagggaaagtggggtggaggtggggggaatgggaattcgt

SEQ ID NO: 21242 - DNA, 1656 bp, Setaria italica
  Peptide Sequence Number=SeqID_87216
cgatcagaagccatggaagcaatgcagttgcttgccgccgttctcgccgtgctcgctttattcctcgccgcttactggcgaccccgcagcaggtatgtccacactaccagaccaatgcctgtaataattgaagtaggagaccccgacgtcgcccgggccctgatgttcgaccacgccgacttcttctccaaccaccccgacgccgccctcggcatcgactttgacgccggccagccgaagaccgaaagcatcacctttgcaccctacggcacgctctggagcgcactccggcgcaacctcaccgttaacatcctgcacccctcgcgcctcggccaccacgtggagccgatccagcgggacgccgcggaggccctcgtcgccgatctctccacccgggtggtcggcgccggcgaggaggtggccattcgcgagcgcgtgtacgccgcggtgttcgggacgatggcgcgcctgtgcttcggcgacggcgtcggcgagcgcgacgtcgccgtcatgcggcgcacgctgcacgacttcttccactccaacgtggacatcaagctcctagcgaggtccaggctggcgaggctggtgcgctggcggcagtggaggtacatcatcggcatgcgccgccggctggccgaggtcttcggccccgtcgtggaggcacggaggcggcagtctcggcgcagcgacggcggcggtgggagcttctcgtcgtacctcgattctctaatcgaccttcgcgtccccaacgacagcgacgattccgagaccggcggcggcttgggcctcggcgcccggcgcatcctcagggacgacgaggtggtgaggctcgtctgggagttcctggggtccagcacccagtccgtggtgtcgtgcatcgagtggacgctcgcccgcctcgtcaccgagccggaggtccagaagaagctataccacgagctcattgccgccggcgatcaccgtaaaggccaggtctccgacgagcgcctccaggaattgccgtacctgcgcgccgtcattctcgagagcctccggctgcacccgccactgccaaccatcctgcgcgaggtcgggccagagggcgctgcggccgccggagcgccaccgccgccgcctgacggcacgccggtgcggttcctgttcaatgcaggacagatcgggagggaccggaagacgtggacggaggaccctgacgagttcaagccggagcggttcctcgccggcggcgaaggggaggacgtgagccccttgccggggcctaagaagatcaagatgatgccgttcggagccgggcggcggcactgccctggcgcggggctgtccatgattcacgtcgggtgcttcgtcgccgcgctggtgcgcgagttcgagtgggcgccgccggctgatggcggtggcggcgttgatctcactgggaccaatacgttgttcgtgaggatgatggcgccgccgctgagagcgcgaataacaccacgcacgtctcgctgagtcctagacgtgatatgtagtaagaaaaatctgtccctgtgtaaggtggcaggttttttttaagtaactttgagtcgcatcccgccgaattgtcatccatcagcaaccaccgccgaattgtaatcgctttaatttcaataaaagcaggccgatccagggaacaaa

SEQ ID NO: 21243 - DNA, 853 bp, Setaria italica
  Peptide Sequence Number=SeqID_87217
ccggtgtcaaggtccacaagaacacaggcaatgcctcggcaattagctgtgactccatctagaccattggtcgtatactgagcaaaaacaagaccagagcccccggcgtcctggacgttttgtaacgcatttgtgaattccgaggtcggggttagcgctcgttctcggtttgatggaaagcataacacgatccgcctttccaaatccgtaccattcagagcttccgccgtgcagaggcctccaacgccgccaatggcaaggcttcggaaactgctcctggatgagttcttctcttggtagtagagagattgtcctactatttgttgcttgtttcccaacgtgatcacggttggaaacgagcgatcaattgtactcgcggctacggtgatgacccacggggcagtattcccaatggtctgcggtcttggaccgtcgttcccggccgagtatacgatggtgatccccttctgcaccgcgtgcaaggcaccaaacgagcttgtgtcgcggagggcaccgagggacaacgacagcacgtccaccccgtcgtgtatcgcgtcgtcgatggccgcgagcacagtggcgctgctgcccctaccgcgagggccccacaaggacttgtacaccgcgatgcgagctctgtgcgccccgccatgcgcggcacccgcggcgaggccgtgaaagctggccgcttccacgatcgagcccgccgcggtggacgccgcgtgcgtgccgtggccgttgacgccccgtggcgacaggtagtcggacttgaggagattcgcgtcaattccggcgctgtagaaccgtgccccaatgatcttgcggctacagttgctgctgccccaggcctctc

SEQ ID NO: 21244 - DNA, 378 bp, Setaria italica
  Peptide Sequence Number=SeqID_87218
cagcagagaggtagctggaaactaggagagccatcacttcctcgctaaaagcttcatcttcctcgtgtcacatgaattgtgcagctgaaggagcaactactcttcaatcatctctcaaactgaaaggatatgatgcagagacagaggaggaggatgaaaacgcaaggagcagttcctactgaagcatcctctctgttcctcctcttatcggcatcacttgagcatcgagaaaatgaattctctggcagaaaatagtggacaaagtatagaacagataaatgtgtgacaaccacacaatcacaaattaaacaacgcagaaacagaggagccagttgcgaacccaaatagcacttccttccttctaacctattctattct

SEQ ID NO: 21245 - DNA, 291 bp, Setaria italica
  Peptide Sequence Number=SeqID_87219
tttcctatcccctcgttgcgtgtctcagcacgagcagtcgagcacttgccgcttttgagctcaacacacatcctcagccgcggcgtctcttcgctcagcttctcagctgcaattttagcgactaccgctgacatggaggcccaaaacgtggaggttgctgccctggtgcacaagatcgccggcctccacgccgccatcgccaagctgccgtccctgagcccatcaccccaagtcgacgcgctcttcaccgacctcgtcatggcctgcgtcccgccgagccccgtcgacgtg

SEQ ID NO: 21246 - DNA, 248 bp, Setaria italica
  Peptide Sequence Number=SeqID_87220
ccagtacttgcgtatccgatgtgaaaaacacactcccacaacgcatgacgtacgtaggaaataagaagaagaagtacacgcacggacgatagcacgtgagcccgccgtgcaagtgctgcaaggtggaggcgagcgcgctccagaagagggaggagatggcggcgaaggagctgtccatttgatgtggcgcaacgaggagctgtgcgcggtaataacaactcgttagtcgctatttgatcacttttaaa

SEQ ID NO: 21247 - DNA, 835 bp, Setaria italica
  Peptide Sequence Number=SeqID_87221
atcggagcggcgctgccaacgaccgtgcgcggaagctggtccgcgcggacgaggacctgcgcaagcggatggccttccacacggtcgacgtcgccaacctgaccgacgagctcggcaagtacgacgtcgtcttcctggccgcgctcgtcggcatggccgccgaggacaaggccaaggtggtggcgcacctcggcaggcacatggccgatggcgcggccctcgtcgtgcggagcgcgcacggggctcgtgggttcctgtaccccatcgtcgatcccgaggacatccgccgcggcgggttcgacgtgctgaccgtgtaccacccggacgatgaggtgatcaactctgtgatcgtcgcgcgcaagatcgacgccaatgcgaacatggaggttgctgctctcgtccagaagattaccagcctccacgccgccatcaccaagttgccatcgctgagcccgtcccccgacgtcgacaggctgttcaccgagctcgtcatggcctgcgtcccgccgagccccgtcgacgtgaccaagcttgccccggacgcgcagaagatgagagaggagctcatccgcctctgctccgacgccgagggccacctcgaggcgcactactccgacatgctcaacgccttcgacaacccactcgaccacctcagccgcttcccctacttcagcaactacatcaacctgagcaagctggagtacgacctcctggtccgctacatccctggcctcgcgccttcccgcgtcgccttcgtcgggtccggccccttgccgttcagctcgctcgtgctcgcggcgcgccacctgcccaacacggtgttcgacaactatga

SEQ ID NO: 21248 - DNA, 802 bp, Setaria italica
  Peptide Sequence Number=SeqID_87222
gccgcgcgccacctccccggcaccctcttcgacaactacgaccggtgcgccgccgccaacgagcgcgccaagaagcttgtccgcgccgacgccgacctgtcgaagcgcatgtcgttccgcacggccgacgtcgccgacctcacggaggagctcgccgagtacgacgtggtgttcctggcggcgctcgtcggcatggcggccgaggacaaggcgagggtggtggcgcacctcggccggcacatggcccccggcgccgcgctcgtggtgcggagcgcgcacggggcgcgcgggttcctgtaccccgtcgtggaccccgaggacatcggccgcggcgggttcgaggtgcttgcggtgtaccaccccgacgacgaggtgatcaactccgtcatcgtcgccggcaaggcggcggacgggcaggggaagggcagcggcgctgcaccggtggtgagcccgccgtgcaagtgctgcaagatggaggcgggcgccgcaaccaccgccgcgccaccgctgctgaagagggaggacatggcggccagggaggaggtgtccttctgaggtctctcaagggacgatcgagttgccgtaatcgatggtacttttcacgtgttcgtgcatcgtcctgtgtcgtctctgtcgtgagtggcagccgtgacgagcgttttactgtaccgtgtgtgttgaaacgatcggttagtacggtgtgaacaaagattgtacgcgtgtgtgtgaacaaataagagtaattttgtctcagagaaggagaacaaagattggacttggggcaaggattgacccgaaaaaa

SEQ ID NO: 21249 - DNA, 1730 bp, Setaria italica
  misc_feature (1724)..(1730): n is a, c, g, or t
  Peptide Sequence Number=SeqID_87223
gctcagtcgatttcgatcagcctcgcacgatccggccggcgccgatcacctgcaccgcattgcgagcttctagctccccaacccgagctcaacaacaactccgcaagcgaccgaccggacatggaggcccagaaccacgaggtggccgccctggtggagaagatctcgggcctccacgccgccatcgccaagcttccgtcgctgagcccgtccccggccgtcgacgcgctcttcaccgccctcgtcacggcctgcgtcccggcgagccccgtggacgtgtcgaggctcggccccgacgcgcagaagatgcgggaggagctcatccgcctctgctccgacgccgagggccagatggaggcccactacgccgacgcgctcgccgccttcgacaacccgctcgaccacctcgcccgcttcccctactaccgcaactacatcaacctgagcaagctggagtacgacctcctggtccgctacatccctggcctcgcgccttcccgcgtcgccttcgtcgggtccggccccttgccgttcagctcgctcgtgctcgcggcgcgccacctgcccaacacggtgttcgacaactatgatcggagcggcgctgccaacgaccgtgcgcggaagctggtccgcgcggacgaggacctgcgcaagcggatggccttccacacggtcgacgtcgccaacctgaccgacgagctcgccgagtacgacgtggtgttcctggcggcgctcgtcggcatggcggccgaggacaaggcgagggtggtggcgcacctcggccggcacatggccgattcgcgccttcccgcgtcgccttcgtcgggtctggccccttgccgttcagctcgctcgtgctcgcggcacgccacctgcccaacacggtgttcgacaactatgatcggagcggcgctgccaacgaccgtgcgcggaagctggtccgcgcggacgaggacctgcgcaagcggatgaccttccacaccgtcgacgtcgccaacctgaccgacgagctcggcaagtacgacgtcgtcttcctggccgcgctcgtcggcatggccgccgaggacaaggccaaggtggtggcgcacctcggcaggcacatggccgacggcgcggccctcgtcgtgcggagcgcgcacggggcgcgcgggttcctgtaccccgtcgtcgaccccgaggacatctgccgtggcgggttcgacgtgcgggccgtgtaccacccggacgacgaggtgatcaactccgtcatcatcgcgcgcaaggtgggcgcccacgggaacgggctccagaatgggcagcacgcgaacgcgcgcggcgcggtgccgatcgtgagcccgccgtgcaagtgctgcaaggtggaggcgagcgcgctccagaagagggaggagatggcggcgaaggagctgtccatttgatgtggcgcaacgaggagctgtgcgcggtaataacaactcgttagtcgctatttgatcactttaaatttcgtgctatcgtgctatcgtccgtgcgtgtacttcttcttcttatttcctacgtacgtcatgcgttgtgggagtgtgtttttcctatgcgatgtatgccagtacttgcgtatccgatgtgaaaaggcatcgatgaggataatgtggacaccagggaatacgatgtgtttgtaagtgtgccatcgataataaaaggttttcttccctaaacggaaatagtttgttggtaacaaaaaaaaaaannnnnnn

SEQ ID NO: 21250 - DNA, 309 bp, Setaria italica
  Peptide Sequence Number=SeqID_87224
tcgtttatgctcctatttacagaaatctaaaccagctctagatgcaagagaggttagtgatttggtggactgatttatgactgggctggggaaaattaaactctagtataaacagattggactcgattcaattctctctagcactgctgcagctgctaaagtgctaactattcctcacacttccactctccacatgaccttctcgccgcggccgccggcaccggcagcgccggcattggcgctgtgggggtagtgggcgtgagcgcgctccacggcggccacgcgcgacgggtgcacggcgccggccct

SEQ ID NO: 21251 - DNA, 1095 bp, Setaria italica
  Peptide Sequence Number=SeqID_87225
aactttaatcactgacatccacttccataatgtctactgctaccggccttttgttttcacaggtcacatttccttcagcaagctcccctgtcctcaatatgacgttctcggccaacatcggtggcaccgcaactcctgcagccacagggctgacttccatcttaagcttgctggcactaacatcaacctccatgctatctacagataaaggcttcttttcacatgtcatatttcctttagcaacttcctttgatccagggaggatgtgaggttgtcccagttcctcgttctcaaactctattatagtacagtagccatcccgtgatgacactgctaggtatttagcatcaaaagaccatgcaatatccgtaattgcagcatagtgtagaccagcatgtattagaattggaggaacactttcagtgtcatagacatacacagagttcaaagtagcgacagcaaaaacaactctataaggaagcttgaagaaaccatctgagttagaaccacgtggtctgaatagaacagggcagaagcgcactgctactatagctttacttgccccaggtagttgtatcgcaggccttgagaggtcacgccttgacattacataagcagtattaatcacttcagacgagtgtttagaaagacctgctggcagtactagaaaagatccatcaggtgaccatgccaacctccgaaagaaagatggtagtgtctcatcatgaaacagatgagatttaactggcggcttagattcatcatgatttggatattctatcttcaccagcgtatgctgacaaacaaagttcaccttctcggcattctttgatttgccttgaggcttattagcgtatatcttacaggtcctgtcagaactcagtgaagctatatactggcccagaggatcccatgccacaccctgaacataatgtagatgtccctctaacttttgctgcaccgtgcctttaactgcgtcccagattatgcaagtgttgtcaactgaagcagaagcgaggaacgcgctatcacgcgaccactgtaggtcaagaacatccttgtgatggaacagtaaatgtacttagtaggaattta

SEQ ID NO: 21252 - DNA, 209 bp, Setaria italica
  Peptide Sequence Number=SeqID_87226
tctctgccgcctcgtccttcaccggtgagcccagccatactaccgcaacagccaccagcgtcaccgacgaaacgaaatctacaattacagagtagtcagccccttgcagactgaaatttgcagttcttagttacttcagtatcccaataagtagacttcagagtctattcgtttttcttcagtctgtacatacaggtgtaggggggtag

SEQ ID NO: 21253 - DNA, 576 bp, Setaria italica
  Peptide Sequence Number=SeqID_87227
tgacatcctcgtctttcgacagctacgtctggtggatgagcgggagcaggatcaagacggtgtgagtggagccgcgtacagtgggcagcgcactgtcatcttcggaggttagagcgagtcggtgatcgccaccaattcgcactcaccattgcgaactttcaggtggggcgcgtttggagacgacgggtacgaggagctggacgcctgggtggcgttccggctgggcctcaagacatgggccaactgggtcgacgccaacatcgatcccaacgccaccagggtcttcttcatgtccatctccaccacgcacatgaggagcgaggactggggccgtgagggcggcatccgttgctacaacgagacgtggcccatcacgcggaaggctactgggcagcggcgccgaccgccggatgatggaggcggtcggcgccgctgccccagtagcccttccgcgtgatgggccggatgcgggtgcccgtcgcgctgctcaacgtcacgcagctcacggagcaccgcgtcgacgcccacgtctccgtctacaccgagaccggcggcgagctgctcaccgacgcgcag

SEQ ID NO: 21254 - DNA, 1242 bp, Setaria italica
  misc_feature (1228)..(1242): n is a, c, g, or t
  Peptide Sequence Number=SeqID_87228
atgttgacgaggccggtcgagaaggtgacgccgccgccgccggtcgagaaggtgacgccggcggctgcggcggcgaagggggcgttcgacccgagccggtgcagcgtgacggagggatactgggcgtacaacaggtccaagaagctgcattacacggaccagacgtgtccgttcatcgacaggcaggtctcgtgccagaggaacggcaggccggacagtgactacctctactgggattggcatctcgacgactgcaacctaccaaggttcgacccggcggcgttgctggagaagctgcgggggaagcggatgatgttcgtgggcgactcgctgcagatggggcagtggctctccttcgtgtgcctcgtcaactccgccgtgccctacaccgccaggaccatggagcgcagcaccaccctctccgtcttcacagccacggagtacaacgcgacgatcgagttctactggccgccgtacctggtggaggccaactccgaccgcaacatccggctgggcgccgatggccgggtgctgcacgtcgacgccgtcgagctgcacgccaagcactggaagggcgccgacatcctcgtcttcgacagctacgtctggtggatgagcgggagcaggatcaagacggtgtggggcgcgtttggagacgacgggtacgaggagctggacgcctgggtggcgttccggctgggcctcaagacatgggccaactgggtcgacgccaacatcgatcccaacgccaccagggtcttcttcatgtccatctccaccacgcacatgaggagcgaggactggggccgtgagggcggcatccgttgctacaacgagacgtggcccatcacgcggaagggctactggggcagcggcgccgaccgccggatgatggaggtggtgtccgacgtgctgggccggatgcgggtgcccgtcgcgctgctcaacgtcacgcagctcacggagcaccgcgtcgacgcccacgtctccgtctacaccgagaccggcggcgagctgctcaccgacgcgcagagggccgacccgcagacctacaccgattgcatccactggtgcctgcccggcgtgccggacacgtggaaccagatcctctacgcgcacctgtagccggcctttaccctgtagctcactcgtaagtcgatcgtaacaccaagaacgaaattaagtcagtgacagagacattaagtaaaggaaaaaaaacaaaaaaaannnnnnnnnnnnnnn

SEQ ID NO: 21255 - DNA, 318 bp, Setaria italica
  Peptide Sequence Number=SeqID_87229
cgtgtctcagcggaagccatgaggaaggttgggcgttggatggtggtcgacggggatcaaagttggaaggaaccagaagatgataacagaacgagacactgctgctcaagttcaacgtacctggaccacgctcccgcgacaatcgcttaaacggagagggctctccctgtaatctccttttataaatgctaaggcctctatggtaacccagtaatctttattctttaatccacagtggggtttccctcgctgtttctttcaaaaaattctttattctttaatgatcatagaatcatgattcttaacactaggagttgt

SEQ ID NO: 21256 - DNA, 1481 bp, Setaria italica
  misc_feature (1475)..(1475): n is a, c, g, or t
  Peptide Sequence Number=SeqID_87230
tagtagcttgcttgtcttgagaggagctcgaggtagtagccacagctagaagcagcaagtgcgagtgagaggaagaaggcttggagttctgagagagagagagagagagagagacagagcagagagattactgtttgatttgatcgggccggggcagaatgggtgtgggaaaggttctgaacgatgtgaagccgtacctggccatgatcctgctgcaggtagggttcgccgggatgtacgtcgtcgccgtcgcctccctcaagcgcgggatgagccacttcgtcctcgtcgtgtaccggaacgtcgtcgccaccgccgtcatggcgcccttcgcgctctggttcgagaggagcgtgaggccaaagatgacctttaccatcttcctcaagatcatggggctcgccatactcgagcctgtgctcgatcagaacctgtactacatgggggcgaacctgacctccgccggcttcgcgtcggcgctggtgaacgtcctcccggccatcacatttgtcatggccctcttcctgcggatagagaaggtgcggctgcggagcttgcacagcaaggccaagattgccggcacggcgctcaccgtcgtcggcgcggtgctcatgatcctgtaccacggccccgtggtgccgttcccgtggaccaaggggcagcaccacgacggcggcggcgcccaggtcggcggcggcggcttcctccagggcaccctgtgcgtcatcgtcgcctgcgtcgcgtggtcgggcttcttcgtcctccagtccaacacgctgcagagctaccccgcggagctgtcgctgacggcgctcatctgcctcatgggctccctgatgagcggcgccgtcgcgctcgtcgccgagcgccgcaacacccaggcctgggtcatcggcttcgacacccgcctcttcaccgccgtctacgccggcgtagtgtgctccggcgtggcctactacgtgcaaggtgtcgtgtcgaggcaacgaggcccggtgttcgtgacagccttcagccctctgtgcatgatcgtaacctccgtgatgggttccatcatactcaaggaagagatcacacttggaagtgtgatcggcgcggtgatcatcgtgctaggcctgtacgcgctcatctggggcaagagcaaggaccacgagaatcaggtcgccgacgtctccaagggcgccgccgcggccggcggcgagctccccatcaccttggcgcagaccaacggcaacggcaagcacgagctcggcaacacccgcggcctcgtcttcgacgtcgagacgccggcgaccaacggccactactagtccttgtcctcctacctactcttaaagaagcagcatcagcgggctccacatcgttggcagtcagtgttctagctagacacgtgtcatggctgtcgtccagtcggtccatagatcgatcgagttggagcatacaaaactggtgcgtattttttcctcttaatcccgttntgttta

SEQ ID NO: 21257 - DNA, 338 bp, Setaria italica
  Peptide Sequence Number=SeqID_87231
cggcgcgggagcgcgacgaggaagtagagccgccccctgcggagcggcgcgtcgggcgccagcggccgcgcgcgggcgcccaggagcttgacctcctccgactccagcagctggaagcccgggtggtcccgcagcacgtcagccgccgccgcgggggcttcacgcggaaggaggtgccgtccagctgcatcaccttggcgctcttccgcttgcccccgaggctgttccccattgcagcggagcggtgcggtgcggtgcggtggcgccgctgcgacctgcgaaggggtgtggtgtgtgcggggaagtgcggggcgcggcggcgagggtaatttttaaaa

SEQ ID NO: 21258 - DNA, 1330 bp, Setaria italica
  Peptide Sequence Number=SeqID_87232
cccatgaatgcacgacaatcgctagtggatgagttcaacagaagccctagcaacaggttttcctcatatctactcgggcaggtaatttaggtgtaaaccttgtcagtgctaaccgtgtggtgatatttgatccaagttggaaccctgcccaagacttgcaagcacaagacagatcatttcggtatggacagagacgtcatgttacagtatttcgcctacttggtgctggttcgcttgaagagcttgtttattctcgacaaatatataaacagcagctttccaacattgcagtctcaggaaaaatagagaaacgttactttgaaggtgtgcaggatgacaagaaatttcaaggtgagctctttgggatctgcaatctgttccgtgacttgtctgataagctttttactagtgagattatcgaaatgcatggagaacattgcaagagtagtgcaactgaagcaacaggaataagagaaatagttgatactgatttatttggttcacaagagaatagaaagtctgctactgcaacaacagattctgacaatcagaatttggttgattttgggatagtttatgcccaccgtaacgaggacgttgtgaacatgggaacaaatggaagagataaggatggaacagatgagactgttgagagctcctcggaggagctgcaaagtaagcatgaaacaaagcacactgttaaggtgaaatcttcttcactggagcagaaaagaaaagtggtgaaatcctattcactggagcagaaaaggaaagagttcagccagatcgcatctttcatcggcatggatgaccttgaattcagcaagtggttgctagcagcctcacctgtccagcggtccgaagtactgcagaagttcaagaggaaaaggaagatgaagtgcgagcacaatcagaattgatggtgcaggccctcagagctactgcagactatgcatagtgtttagctcgtgtagggagttacggtggttatgacaggtaatggaagtcaaattgaccaatggcactgattaatagctgatttcagcagccgcactgatgtcgacaagttatggcattcttgaggattcaagttgggctcaggaaaaccttggtcgctttgacagggttcaggtgaaatctaaccggtgaggccgttacccgtcatggttcagctgcctgagcccttgtatagtgaattttggttagcttagtctttcatagttttcctaatgatgcttgtaggcgtttacttgtgtacagcaatggacaacaaatttgtttgtaagtagtgtactagaaactggaaagtgtcttcgttttgctttttttt

SEQ ID NO: 21259 - DNA, 372 bp, Setaria italica
  Peptide Sequence Number=SeqID_87233
tggaggatgcaaacacttgacaggacacataactcatgactatttcttctgttgttcatcatgtttgcgccacggattcagggcttctctcatagcttgggcctctggactgctttcccaagctcttttttccgactccaagacagttactttctcatagaagcctgtgtggatcatgaagagctccatggcggcgcctatggaggccccgaccgccgcgatcttcaggtaccatcccgcgaacctcatgatatgatccacccccagtgaatcctcgagggaaggggtggccggagcgagctgaggtgacggcaaggcgaggcggccgcggcggcggcggcggcggcgagcggacaggcgggtcgacgcaag

SEQ ID NO: 21260 - DNA, 414 bp, Setaria italica
  Peptide Sequence Number=SeqID_87234
aacttacctagttccatcaaccatcatcaacgacaaaaaagaaaagtcagctgtcccgaagatgagcggcggaaagaggttcggcggcgggcggccgccgacggggactccttccctcgcgtggtcttccgtggtcatcgtcgcatccctcctcgccggcgcctccatcgtccacaacatctacaagcctgacatgaccattccacctgtggagagcaccagcggaggcagcggcaaggaaagctgagtcgggcaacacgtttttatgagagccatccggaagttacgaagcaagagtttggagaacttgctgttagaacttgtgaatctttgcttcagcacatgttgcattcttttcatcctgtgttttggtgtctgcttttctttttcaaccgaagatgtgagaagttacaa

SEQ ID NO: 21261 - DNA, 420 bp, Setaria italica
  Peptide Sequence Number=SeqID_87235
cgtccttctcgaaccccacctcggagggccccttctcaggtgcaacgccgaggaccatggctgctggggcggtggtggtgctcttctcagccaggtcagggtacatctttctgcatccggcaaaagcagcacgtaaatttcagaaaccagaaagcatcatctttgctcataatatttctccacaataagttacagctccgaaacaatggaagaaaattagtagttcagtaaaacatgttgaaatcactccaaataggtggcacctctgaaccactaatctcagtttagcttcacatattcatgacagtggtatcaaacatacccgcagccgccgccgcagctgcagctcgaaccgcagttgcaacttccaccgcaagacatcttcaggaatctggcctcttgtaacctcaagaactttta

SEQ ID NO: 21262 - DNA, 666 bp, Setaria italica
  misc_feature (1)..(38): n is a, c, g, or t
  Peptide Sequence Number=SeqID_87236
nnnnnnnnnnnnnnnnnnnnnnnnnnnnnnnnnnnnnntttttttttgttttttttttttttttttttttctacaagcaaactggatttatatttacttcactgaaacagtacaacacatgcagatacaaggataatactagtagcttggaaacctcatattttccattcccaatcacaaggccacatgatactgtgattcacaagtcacagtagtgcacagtaacaggagagggagaccatcaagcagccaagccattgcatcagatggcttcttatttacttgtagcagaccatattataggaaggcatgtgtgtgtgcatgccctcatcttcagcagttgcaggggttgcacttgcagctggagccgcagctgcagccatggcctgcctcaccggactcggcgtccttctcgaaccccacctcggagggccccttctcaggtgcaacgccgaggaccatggctgctggggcggtggtggtgctcttctcagccaggtcagggtacatctttccgcagccgccgccgcagctgcagctcgaaccgcagttgcaacttccaccgcaagacatcttcaggaatctggcctcttgtaacctcaagaacttttatgcaaagagcgagaggaagcttgagatgttgaacgcaacagaggataggcaagg

SEQ ID NO: 21263 - DNA, 382 bp, Setaria italica
  Peptide Sequence Number=SeqID_87237
aattgtagtttcgttcgttaaatgctatggttcttccatatgatttctgaagttattcagaagtaattcgtcgagatcgtgcaccttttcttatttatccaaaaaaatactaaaaaatattctaaagtgcagccggatagatccaatctattcttgaaatagacaactcgcacacactcccttccaaaaaaatcaatacaccaaccactacagttagatttattagatttgttgctaaaatatcggtattaagcccgaaactcccagcgaatggcctgtgagctaaaaaacgaaagaataggttacattttcatatgctctcctcttatagataggacgaacaaagaagaaagttttcgatcacttacttcgctcgcccttt

SEQ ID NO: 21264 - DNA, 636 bp, Setaria italica
  Peptide Sequence Number=SeqID_87238
ttccgaatttcgaatagtacttaagatcctctgttttcgattatctaataaatcttttaacactccctttccaaaaaaatacaatacaccaaccactacagttagatttattagatttgttgctaaaatatcggtattaagcccgaaactcccagcgaatggcctgtgagctaaaaaaacgaaagaataggttacatttttcatatgctctcctcttatagataggacgaacaaagaagaaagtttttcgatcacttacttcgctcgcccttttttgatcggttttttttaatgcaatctttttttaaaatgcaaatagatttaatctaataatttctttttagattaagtcttaggtcttgtttgacctgtaaaaaaatctcctttgttgaaatgttcccaaaattcctaaataaagaaaaagagtttccactgtcctaaactaagaatgggaaggaagaggacgagcgtatcctctaaattgatcatgctcaaatcagcccttcctggggttcctggggtattgtctgtcccgataaatacaaaattcccggaataatataataaataggagtaaagtattgatatacttggaattacagaagcaaatcccaatgtacgaaaaaaaagaaaaaa

SEQ ID NO: 21265 - DNA, 169 bp, Setaria italica
  Peptide Sequence Number=SeqID_87239
tttgaaccttgacccgaagcagtgccgccgccggggaagacaagcccaaaggaagcgtcggagaacacgcgagacccgccatcatctccgtctctgcctccggggaagacaagtctgcaagacatcgccaccggcgacatcccgagaaaacccttaagtcttacttctt

SEQ ID NO: 21266 - DNA, 285 bp, Setaria italica
  Peptide Sequence Number=SeqID_87240
gttctcagtggtgagaggtggatccagctcgtcctccctctgtatcctcaagagcacgtccagcaaatcctcctcgtcaacgccggcggctctgttgtcttggtggtcctggatgatggtgtcgatgaaggccatcattttctcgcgttcgcgcatcatcaagcgcggtgtcgggctgatgaacatcgccagacgcgacgaggggaagaggtctggcaaactactcgccggcatgatcttgacccgacgctccagcagccgcaggaacgtgttctctagtctcta

SEQ ID NO: 21267 - DNA, 439 bp, Setaria italica
  Peptide Sequence Number=SeqID_87241
gctctagtgatgcagccaccttttccagagcaagacatcttatgttacccagttcatgcctgcatgttgggcaacgattatgaacccttggcttgcatccagaacacagagtatgtccgttggagcactgatgaattggaggatacatggcactcaaacacacagggcattccagtagctcacgcacattgccataacttgtcacatttggtttcggtgaatgctggatatgttcaccaacaagttcagtgacatccaacatctcctcattctttggaggatcaataacctcagcatggctatcatcaatataagtaactgatgccatggggatgcctattggtacagaatcctcagaggggagccgcgatcggagcaggatgccagggcagaggattcgatctccgggcggcggctgggctctggcgtgacgccaagg

SEQ ID NO: 21268 - DNA, 913 bp, Setaria italica
  Peptide Sequence Number=SeqID_87242
acctaccaaacttacaaaggactagtaagctgtagttcttagcttcagcgtcgtcgcccatgaaccggaggaaggcaatgtagacaggtgccatgcccagctggaatgcctcgaagtgcagacagaagtactggccgaagcagctgaaaaccgtgagcatccaggtggcattctcaacttcatgaggatttgatttaacataacgatgattgaaagtgcttccattgtgcatgtcaaccttgtggtcatctttcaagtgatttactagatatggaatgtcaccagcaactgtgcattcagatccagcatatggacaagtatagggtctgtattggcattgtgattcatgtttcagcttgcaatagtaagggtatatgcccaagcacccaaagttctggtacttgcatggaagctctagtgatgcagccaccttctccagagcaagacatcttatgttacccagttcatgcctgcatgttggacaacgattatgaacccttggcttgcatccagagcacaaagtatgaccattggagcactgatgaattggaggatacatggcactcaagcagactggacattccagaagttcacgcacactgctagacaccaccacattcggttttggtggatgctgaatatggtcgccagcgagttccgtaacgtctagtacctcagtctttgggggatcaataacctcagaacaggaatcatcaatataaccagctgtagccatcatcagggtcttggaattatatatcctcggcggaagaggggacggaaatgcggaatgggtctgctcggccgccctgatctcgcccgcttggcggcggatggctggcgaggtgaggaggcggcggccgagatgagagagaggcgagggatttcgaatgaatgctcccctctctccatg

SEQ ID NO: 21269 - DNA, 238 bp, Setaria italica
  Peptide Sequence Number=SeqID_87243
ctctactgtaaagtctagtatagggcataagccctagcctgtactctgcaaaatctgtcaaacttttgctttcagagccatgtctatagccgtataggccttagaatgccaactctatgagaatactgaaatatttgttatatatgttatcagcagtttgaagttcataaacatgtatgtaaatgtaaaaaaaattgtagaaactggtgcagctcttcagtaactagcaacttaaaat

SEQ ID NO: 21270 - DNA, 783 bp, Setaria italica
  Peptide Sequence Number=SeqID_87244
tctgtaactacaacaaaccaatgtggacaaagaatggacaaaattttatgcacacaagagcaccaccaaaaccactttgaaatcccaaacaagatgataatataattcacatgcgtcaagctgtgtcagatgttgatgcatctggttttgaggcattctgaaagttgcttgatatgggggatgatggctcctctgggccgtccattggagattcaggcctcgagggcacaggggacagttcttcacctcctgaattttcttcaaccataggtaacgcgtactcagtgcaaatgaggttgctgtcctcttctggatcatcgtcttccatgtcgccatcatccaaggagacaacgtcctgcgtggtgctgaactgatggaaatctactatctcacgcaggaagcgattttcacgggcatacgtcgagttttcctgtgccagccttgatttctcggccagtaaggtctccagttgcacacgaatcaagtcatcgtcctcttcagttttgctccctttctgctttgtttctcgcaacagcttgttctcttcttctagctgggcacatctctgctttgcaaaagctagatcagctttaacggatttcagttcacggagtagaagttttgctttagcagccattgcattagcaacgtcgcgggaagctttcaattgagtctcctcagctgcagatttatcttgatccaatgagagattaggagtgctgattgtatgtactgctgaattcgacacataagaactggaactggtaggcttccttctaattt

SEQ ID NO: 21271 - DNA, 241 bp, Setaria italica
  Peptide Sequence Number=SeqID_87245
ctgcgagatgagttgcggccccatcgccgcgcgcggcgctgtggtgcctgggcacgccgcgcccatggtcttctcgcaacgcgcgcgcgtccgcggacattagccgtacctgcggtagcgtcgggatctccagacgttcgtcgccgtcgggctcctagtgattgaatcgacacatccctggctgactcctctgttcgtgcagctcccctaccatgctgtttgcttatagaatgtgaaaaag

SEQ ID NO: 21272 - DNA, 282 bp, Setaria italica
  Peptide Sequence Number=SeqID_87246
gtgaattgcaagtgggattccagctgggtctccggcgaggtcgacgtacgcgttggtcgatctgccggcgaacgccggctgccagcatggccacgtctcatcgataatgaatgagcgagtgggccggcagccgtcgatcggcgagctcgctcactcggcgccgccgcgccccaggcgcggcaggtgcacgccgagcgcggccgacgccaggccccacatgaagaaggagaagaacgccaccggcagcggcgggctcgccgacgtgagcgccgtgatgcaggt

SEQ ID NO: 21273 - DNA, 632 bp, Setaria italica
  Peptide Sequence Number=SeqID_87247
ctacaatcgcgtcaagacccatatgatcttggtggttggagccctgaaccactcgttgaccctgtccgtttctttgtaaggagaaatggcgggtctccgactgcaacgacgactcaacgagccacaagatccttcagcttctggcgcgtggaacatgcattgactaaatgctagaggtttattgattagagaatagagagtgatgtaggcatgtagccaactggatagctcttacagcccggcccggcggcctctgacgacggtgaattgcaagtgggattccagctgggtctccggcgaggtcgacgtacgcgttggtcgatctgccggcgaacgccggctgccagcatggccacgtctcctgcaacacaagcagaacctactagtacaaattttctccgggaaaaaaggagcaagcgaaaaatcgagtaacaattagaccgaggaaatcagcgagccccttaatttggatggccatggcaagttggcaagcccagcggcttcgatatcacgtgcgcccggctgcagcagggatatccggcgaccggcgttgacgacggcctgactcccgtccggcggacagcacagcacaaggagagacaaaaaggaaagaagaaaaaaacgtaggggga

SEQ ID NO: 21274 - DNA, 763 bp, Setaria italica
  Peptide Sequence Number=SeqID_87248
gaggatacagcaacatctcctatcagtagccctaagttgattgagctgagggattcagatgccacccaccaccagaagaaaaataatcccagtgatgagattttgcattctaagaagaatacaactggtgatgtaaatggggcaaacacaacaacagacacgacaatcaaagaagaagacggtgcatatgacaacaatgagctgaggaagaaaggcctttgcttggtcccagtgtctgctttccgtgtatataatagctgatctgatcccagtaaactcattcgttgctagctagctggttgtacatatggtaataagctagcaccgaaccttatcacacattgcttgcatacatgtacacacacttgcacatatgaaaagaaggttgataaccttgtgaaattcttgtaaacgttagtctgttcctgttcatgaaaatggtacaaactttacatgtaaaaaggtacaaactaaaggtttagtgttaggtgacgcatcacactggtgtgttagatacggggtctattccatcttgtgaaggagattagttattctgttcatgtatgagctggttgttgatctatctgtttcttcctccatttgagttcaatcatgaatccatgaccaagatatacaattgaaagtgcacaacatgaaaacgacacggtatcaggatttgtttaaaatggcaacggcttgattgagtgaaaatgaagggtccaaatcgatctaaagaagctgtgcacgcatgggtgcacgcgca

SEQ ID NO: 21275 - DNA, 785 bp, Setaria italica
  Peptide Sequence Number=SeqID_87249
cctcgacctgtgatctatggcattgggcagtaatggtgaatcatcactgctgccgtgcagcgccaatagcgcaaaccatgaactcagtagagcatttgcctacatcacctgaatctagcagtagaactttacatgcgccgctattaatctcctcatcgacaaaaatgtgaagagtcgactagatgagctcactggaataagccaccatcgattcctcgagttacactaagcaaagctgccaccccaacagatgtattgggaacatcaatcaacgatgaaccatcaatgcagccggttccatgggtttcattcttcgtgtttccgctttcgcgccagatcccttttcttctgctcttttctagcttgtactttctcttcatggccctcatcatccatcttcattttcgcaaaacgctttgctttgaatacctttgtaatatttttagtaacttccttgtcactgcactcgtaggcctccaactgcttccccacaatatcttctatctcatgtaaaagacatatatccttctgagtaataaagcttatagcgagccctccccttgaagctcttgcagttcgtccaaccctatggatgtaatcgcgtgcatcgcttggaacgtcatagttaatgacaagatcaactgtttggatatccaatccacggctgcccacatcagtagctagcagtacaggaacctgaccggatttaaaacgattaagtgctgagagcctttgcgcttgagacttgagagagtgcaaagaaacagcaggatggccaagctctt

SEQ ID NO: 21276 - DNA, 203 bp, Setaria italica
  Peptide Sequence Number=SeqID_87250
aggaggaaggaccagacggggatcatgttgccccggcagatcttgcggagctgctccggggccggcggggccgacgggtaccccatctcgtcctgcagccactcgatgatggcgtccggagagacaccgccggggccgctgccaccggagacggaggatgccggcatcgctcgctgccggcgggggcaaaccctaggcaggcg

SEQ ID NO: 21277 - DNA, 1615 bp, Setaria italica
  Peptide Sequence Number=SeqID_87251
ccaaaattttctccattatactcataagtactgtggttttcctgaatgttatctagaattattccaggttgtattgcttgtacattttgcccaacactttgctggattccatcacaatattcatgaggcatctcctgactgcctgatccttcaatatcctgtgaagctgcattatttgaagtggaccacaaccctcctgctgggtcactgtacttgcaacgctttgaggatcgcatcttgacttcaccccacctaattgagttgttactgtggacagcagaaccatcatgcagatcaccatctgtcaataattcagccttgcaagcagaggaatgtccgtgttcaacagttagttcaggctcaaccgattcatgatcagctagagcaagagaattcactgctttatcctgtgtggagcattccgcttttccactttccaaagcaaatggaattttcgctcgtggtattctgaggactagttttctaccagttccagaatttcccttattatccgcaaattgagaaggttgagtaacatcttcttctctgctaaatcttacctgaccactccgttctaactgttcagcttcagtactatccgtattcaattcactgtctgaggaactgccctctgagtaatcctcatcatcttccgttgaagctcctatctttgagaaaaaactgagtgcattgcgagcagcacgtctttgaggtcgcaatcccctggatttaggggatcttttccttttgcttgaacgtccattcctagacttcctacatctatgtggcctcgacactgtagttatgtccggctcatccaaaatctttttcctaactcgccggccagatgaagtaacaagatcagcctcagattttttcttctttcttctggatcggcggagatgagcagcactattaggattatctgcatcaatttctgcacttgaatatgaagtacctgaggagtcgccactcataatctcttgttctccttcacttgaattctcatccatgccattgtactcagaatcagtatcgtcagagataacttcattttctggttcaagctcaatgaagtctgttatctctggaagtggttcccacctatccggatcaataattgggatgttttggtattcaccagtggttgcattgtaagtggggccaacagcaaagtttacagagggaggtcgccattcaataccaagtgtacctaaccgacgtttctggtacatactctgaaagggctctggatatggtatcataccagcatcgcataagaagtcttgcatatttctcctgtgtggtataagctgtgtttcctgatcgataacacttccattggtatctcggataaggggccgatagtctccaaggaagaactgatcatattttgcgtccttctgggactctccttgcccagtaccaataatgaatatttgcccaatttcatctgatagaataagtgatgtgccatccggagagaacttcccatcaactagtttaaaatgccctgtttcgtaaatctgcacaggttttccttcccatatatcccagatgatcgtctttccatcatacccagcactcatagctatacgagggttgaatggatttt

SEQ ID NO: 21278 - DNA, 2314 bp, Setaria italica
  Peptide Sequence Number=SeqID_87252
ttttattaaaaggcgtgcccacaggcacgcagaaagaactgccactaactttcgatatggttacaacgtatcatccaaaatgtatttaacacagacaacaacccacattttcttcctccttttattgctaatgtactggtgtctatacacaatgaatgatatctgttaatgcatttcctttaccagctttacaccttagcaccttctctaacaagccccaataggatgaatcattgtgtcttgacaacaggagatcaagtggtcagaggtgttagttaagatcaatttgtatcagcaagcaaactgtttaaccagttggtctacatcaaaaattccttttcgccctgagaactactttggttaattcctctaacaaaattatgcctcagtagaatcatcttgatggctgaggtgaaaattctgctgacatggaaaatgaaggtgtcaatcaggcatcgaggaacatcccctagaccctataacaatgaaaaggtttgatcgacccactcagagagcctgctgatctttttggtcatttcggcactctttgaaaagtaagactctgcatttgtaagcatcacagtggtgtcatgtttgacagcctccagagttctgtaatagttgttcgctaatcttgtcttgatcacctctatggaaaattggacaggaaacctgttcataaaatctgacttctctgtgaccttgtctaactttaaaacaccataacgatcctgatttttgagcgacatttcctgtaatttttccatttctgataacaatctatctcgaatctcgagattgatatgtggatgtttccatggaacccataaattccctacatcatgaagttcccaggggctatgtgggtgatgagaaccatcattcttatactgtatgacatatttctcccatgggctctcaggaaaatcaggtgatttaggttttagagccataatccggccctcccaccaatttcctccttcctgtccttcttcatccctccaccaaactttgcacttatctctgtgggtccagttccgttccatagaagcttcataccttgttctttccacaagaaaatctggaaagttcactagctcaggcaaggtgatcataaatgttttgccaaacccagtggaagtgcaatcaatgaattcgatggatagtttacagcagctttcaccagatcctttgtaagaggagtaatcaagaccctgtattttgcaaagttctacagctttaaggccttttatccggttccaagggcaaggatcagatgaccgcattccttgaagatattcctcgtggccctgcctcaagtacataacctcatcaccgagttgaggaatataacggtaactatcttcatgctcaagcaacattaaccatgaatactttaagggtgtctggtgctttttacccaatggatgtgtatcaggaaagttgctactctctcttttgttcctagcagaccttaaaccaacagtttttgaggggggtcgccacattacttcacgcgcatctgagacaattcgtcttccactagttgaagcttcataggaactataagaatctttcacttgggaaatatcatcccacggcgtgtcatcatcattgtgcgcatatgacttccttgcacttcttctcaatctaccgcttgcagctgtaacaggactatattctggaggttggtatccaccatcatcgttcgagatagaagtactatcatcgtttgcatattcatctgaatccatttttttcctgttgtttggctttgaccttttgtacactgcagtgcacatctttggaaaatccaagtgcggtttttttgaatcatgtaaaccagtgcttttatctgtgcattcctgagaacttttggacacattaagtaagtccacattcctgggttgattgattgaagaatcctcttcatgctgcactgaacctttatcatgctcggcgttcatggtatttcctactgttgcacttcttgatttgtcggataaagttgctccatctgcaaagccttttgacttgatcttcagtttcaaggaaggctgagaagtattgtgaacttgtacagtattatttgctccatctgcacaggcattattatcgttagttatcttttctttgtccccaaaattttctccattatactcataagtactgtggttttcctgaatgttatctagaattattccaggttgtattgcttgtacattttgcccaacactttgctggattccatcacaatattacaatagaaggacaattacttaccttagtaacttagtaccttagtaattaccta

SEQ ID NO: 21279 - DNA, 505 bp, Setaria italica
  Peptide Sequence Number=SeqID_87253
acatcattgtctttctccaagatggaaacattcttcagaaggccattgattaacattgttatgtgaatcatcgtcctcttcaggcccaatgtagaaagtctccttggagtctcctcgggagtcggggttgtcgtcgaccttctcggagtagggcgcggtgtatccccggtggctgctgttcttccgcagcgccatcttctcctccacggggcgctcgaagaacttgcggctctcggcgagcacccgctccatcagggcgcgctcgatcccgtggttgaccacgtagaagaagccgtactccacgcacgcctggcggatggacgtggcggcggcgcggaggtcgggggacgcgaggtccaccacggggaggtccaggcggcgaccggcgccggccattgatcgatctctcccgctcgctcagcctacttgcagccttggagggaacgtaacgagcagtgcggcgagctcaactttcttgtaatgagcctgctccttgtgctttgta

SEQ ID NO: 21280 - DNA, 281 bp, Setaria italica
  Peptide Sequence Number=SeqID_87254
gagatgcagtgtggatggtgaggacacgaacaagatgcagtcctccccggcctcgagcttattgctaatggcaccgccgcatcactatctcctaccaggaattcactttatcatctgaacaatgctggctgcgtgaacgtctccagccggggctccgtcaggtccaccgcctcctcctcctcctcgtcgcccggcggcggccgccagctgctccgaccgtgggggctcatcagcagcatcccgttcaccagctcgcccgacaccaccgcaccgccactcgc

SEQ ID NO: 21281 - DNA, 313 bp, Setaria italica
  misc_feature (13)..(13): n is a, c, g, or t
  Peptide Sequence Number=SeqID_87255
ccgtgaacagatncggcaagagctgccggctgcggtggaccaactacctgcggccggacatcaagcggggcaagttctcgcaggaggaggagcagaccatcctgcacctccactccgtgctcggcaacaagtggtcggcgatcgcggcgcacctgccgggccggacggacaacgagatcaagaacttctggaacacgcacctcaagaagcggctcatccagatgggcttcgaccccatgacgcaccgtccgcggaccgacttcttcgccgcgctgccgcagctcatcgcgctcgccgcgttccgggaccagct

SEQ ID NO: 21282 - DNA, 532 bp, Setaria italica
  Peptide Sequence Number=SeqID_87256
gccgttcgctcgaaaaaataggaggttgcgacggcgacggaggcgtcggcgccggcggcgagcggcgcggcggcgcggcagaaccacccgttcccgtggctcgactcggccatctcagagccctactacttcctccacctcctcgccttcttctcttacttcgcggcccgcagcgcggcgctctccgccgacgacggaggggagctccacgaccgcctcctccgccgggagatccaggcagtgctcgtgttcctcgtcctcttcgtagtgaagatcgtgaaagaggaaacatgggaaacattccttgctgattcactgctctacgcgaagggcttattgttggcagttactttggttatcaactattggttgacccttggctactttctgggatttgttgttatatatgctgtagctcaacaaccaccttatgatggcctaggccattcaaatcacttgaccccgttgcaacttgaaagtctgctaactgaagagccaacaatacgacgaatttaggactaggttagaaata

SEQ ID NO: 21283 - DNA, 812 bp, Setaria italica
  Peptide Sequence Number=SeqID_87257
tgtagttccttgaattggttacctaatctgccatagtaatgcattgcttacaatggtggtaactggctctttactgaatgaaacactgtcctctgatgatggcctaggccattcaaatcacttgaccccgttgcaacttgaaagtctgctaactgaagagccaacatcgcgattttggctggttgaattccgaacttcgttttcagcaacatgtatacaagcaagcagtgttctgcctgaactctctaatatatactccaacaagaacatctcttttggaataattgacctcggccattttccaaatgctgcagcaaagtttggcatatccatgtgggatcatcttcccacttacatattgtttgacaaggtgactgaagttgctcggtttccggaagtcacaagtgaatcaaaagtatttgtgccaaaagttaccaagaaacttctttgccagcattttgatcttgacagacgattgattgaatacctatctacctgatccatcatctatcccagatgtctcaaaaggatgggggacatttccctttttgtcgttgaaccggacatctgtatggcagcaatcacttcagggtatcttgaggcttgtggcttgcttatgcccttttaatcaaggccttgttttgtggtggaaaacacgaattgcaagttaccatcagtcatctactgaattatggaattttcactgccctgcagagattttctgtaatgatttgccgactatgttttgtcactgcagcagcagtcaattcagacaccgttcatttcccaaaaaaaaaaaaaaaaaactaacg

SEQ ID NO: 21284 - DNA, 405 bp, Setaria italica
  Peptide Sequence Number=SeqID_87258
ttctcatatacatgtctttggtggatctcattgcggcagacttcttgggtgaaaagatgactgccgcaatgagatccaccaaagacatgtatatgagaatgccggccgacaccgagtcaagaatgccctcaaccacaagagccctcgggctatttggattgtaaaacgtggccaagcctgccccggtcagctatcccctgccggtgttgtaatggcaaagaaggatgccattagaaccgctgaaaggttcttgaattgtgcctgtagggagataatttttaggtagtcagtcagccaactaaagaaaatagtaaatgagtaaaataagtgccaatgaaattcagtcagtaaatggacacccaacaagattgtcgtgactccgcaatcctatttattaaaagtaaa

SEQ ID NO: 21285 - DNA, 1274 bp, Setaria italica
  Peptide Sequence Number=SeqID_87259
tttaaaatacaaaaaccaagactagacaagaatagcagcggctgtcacacatgacacataccattacttgctcgtcgtttcaagaaaccacagcagttcgcactcgagtacaataaaaaccgaccatcaacatcccactcccacctatggaaccgcctttattggggcaggtgaaagggccccactttttacatgagcggtgtttctttcatgcccttcaaacagggcatcctatgatgagcacaggcaagctactacagtgagaaaacagaatgccccggaaaccttacaactgtacacatatacaaggaattttctcagggccttaatgcaacttttttttttaagatcttactgcacctcttatgatcctatctgataacaaagggcaggtcttaagcccatattgcaagcgatgacatagagagagcaccaaggaatagcgcgatgtatgccaccaattgctgtcgcagcgaaccagtcatcttttcacccaagaagtctgccgcaatgagatccaccaaagacatgtatatgagaatgccggccgacaccgagtcaagaatgccctcaaccacaagagccctcgggctatttggattgtaaaacgtggccaagcctgccccggcagctatccctgccggtgttgtaatggcaaagaaggatgccattagaaccgctgaaaggttcttgaattgtgcctgagcgatgcacccgcctaatgcaaaaccctcgaagaactggtggaatgaaagtgctgcgacaagtggcctgattgtgcatgggctccgtgacactccgagtgacaacccgatgatcacagagtgagacacaatccccatctccagtatctgcgacacgacgacagagcggacatggtccgacatatccccctcgcggccctctacttgcaccagctcgtgcccatggccgtggttgtgtccgtgcccgtgcgagtgtccgtggcagtgcgtctgcaagagcggggccttgcggtcgtcctcagcgacggtgaccacggtgatgtcctcgtcgctcgcggaggaggccgcggcgagcgtggcggcggcggctgccttgacgcgcgcggcctcgtcgcggtgcttggtctcgtagaacctggtggcgaggaagtcgagcaccagcgtggcgagcgcggcggccatggcgacgaaccccgggaacgggaaccggcgccagggcgcggcggggaggcaggggctggagagcgcgtgctgggcgtcgtgcagcatgtggacgaacccgtggcaagg

SEQ ID NO: 21286 - DNA, 335 bp, Setaria italica
  Peptide Sequence Number=SeqID_87260
gcgccccttggtcccctgcgggtggctcgggtccaccgcctcgagagcccgcgcgagatctgtaaccatgggggacaaaaagaaaacagaaccaatgcttgagctggaacctggaacacggctctgctaatcacaaaaatgatggtgctgtctccatgttttgccataaccacaacgacgaacacgaatgtaacccttctcgctgagattaggaggaggaggatggtctagttatatctgacatttatctcgatggcaccagtgctctgctgtgcaaggtacatgtaacagaaaaggggaggaagcggagagagatcgagttgcatacatggctt

SEQ ID NO: 21287 - DNA, 295 bp, Setaria italica
  Peptide Sequence Number=SeqID_87261
aacgttaatgcattacagaaaacaagcgaaacctttatcgtttcttattcaaatacagcctaatggcaaacttccagttttgtattatcagcccttctgttgagcgggacaatctatccttgggcgaattcaggaggatttcttgttgtcttgcagtcgctcaaataggcttccatcgaaggcgccccggacagtctctcgctgcaacaggccatccttgtcctttgctacgctgtagagtaacagccattcaccggcggcggtggcccagccaaggatggcctgttgcaacagg

SEQ ID NO: 21288 - DNA, 478 bp, Setaria italica
  Peptide Sequence Number=SeqID_87262
tcagtatagagcccacgactgatacagggagtccacaccctattgctcggagaccttgaaacgtctcccaggggtagatgatgccgtcgccattgcggtcgaagaaggccgcgtgctgctgaagcacgctcaggccgcgggagtcgcgccccttggtcccctgcgggtggctcgggtccaccgcctcgagagcccgcgcgagatatggcttggggagctgctgctgcaggtcggggttgagcctccgctcccgggtgacgggcgcgtggggcgcctccgtctcctgggactggtcctccggcggcgacgagaacgacgacgacgacatgctcactcgcgggctcaacttgcaggaccgttacgacgcgcgggtgcgctgcgcagggcaggaatggaggatccggtaccttcggaggtggggaacggcgagacgggagcaccgtgcgggaaggctcgacacgagttgcagagtcatgcg

SEQ ID NO: 21289 - DNA, 1411 bp, Setaria italica
  misc_feature (1)..(27): n is a, c, g, or t
  Peptide Sequence Number=SeqID_87263
nnnnnnnnnnnnnnnnnnnnnnnnnnntactaccgaactacaagtcgcactagagcacgcacgatcaacctgatttccttttccgattacatagtttaaaacacaagttttcataattttatacagttccagcatgaacattgaaaagaatgcactacttttctgagacaagagggagggataactcaagagagtttagaaaacacaaagtccaaatacacaagatagtaatgattttgcacgataaaggtttcgcttgttttctgtaatgcattaacgtttcttattcaaatacagcctaatggcaaacttccagttttgtattatcagcccttctgttgagcgggacaatctatccttgggcgaattcaggaggatttcttgttgtcttgcagtcgctcaaataggcttccatcgaaggcgccccggacagtctctcgctgcaacaggccatccttgtcctttgctacgctgtagagtaacagccattcaccggcggcggtggcccagccaaggaaatcatacatattgcggtttccctcaagcatcgagttcagctcgtcttttgtcaaagcattcggatgagttcgaccatacttgctaaatatagcatcgaactttgatggatcaaacctcccttcagtatcataggcttcagaatcgctcccgtgcttacccttgtggatgttctttatatggatggagaacaaaggtgacggtaaccatcccggctgagtgggataactcaggacgaggttgatcagtatagagcccacgactgatacagggagtccacaccctattgctcggagaccttgaaacgtctcccaggggtagatgatgccgtcgccattgcggtcgaagaaggccgcgtgctgctgaagcacgctcaggccgcgggagtcgcgccccttggtcccctgcgggtggctcgggtccaccgcctcgagagcccgcgcgagatatggcttggggagctgctgctgcaggtcggggttgagcctccgctcccgggtgacgggcgcgtggggcgcctccgtctcctgggactggtcctccggcggcgacgagaacgacgacgacgacatgctcactcgcgggctcaacttgcaggaccttcggaggtggggaacggcgagacgggagcaccgtgcgggaaggctcgacacgagttgcagagtcatgcgtgtaaccgatgatgcctcgacgtgcgctccgcttccttttaaagccctgcgggtgcgggggcggcggcaagggaagggaagggaaggcaaggcaaaaccacgggcgactcacgcggtcaggactcaggaggtgcgccgtccgcgtcgtccgtccggagcacagcgcacagggccaaaccgccaaagcagacgcgggcggcggcggaaagcaccgaaacgctgcc

SEQ ID NO: 21290 - DNA, 734 bp, Setaria italica
  Peptide Sequence Number=SeqID_87264
atcattgcttggcatggtcccttacgctggaattgatcttactgtttatgagacactgaaagaattgtcgaagacatatgtcctcaaagacagtgatcccggccctttagtacagttgggctgtggaacagtctctggagcgctaggagcaacatgtgtttaccctttgcaagttgtcagaacaagaatgcaagctcagtcagccaattcagaggatccatatagaggaatgactgattgttttcggagaacactacgtcgtgagggaatttctggattttacaaagggcttgtaccgaatcttcttaaagtggtgccggctgcaagtattacctatcttgtttatgagacaatgaagaaaagtctctccctagattaaatagttttttaggttttctggttttgcataccagcaactgagtgtagagatagtattgaggcatgccattcctggttgagtaggcgctaacataacggctctgaagtgtgagagtattttgccctcaagatagtaaaggcagggcattctcattcttaatgacagaaataaaaaaggtgatatttgtcagatcatcaagggtccatactggaactggaatacaggtagttgtccttctttgttaacctctgctacaagtaatttccttttatgccttttcttctgcttatgtgatattatggtacttttagtctgcacataaaaaaacttgttgattaaccatatcataaagggg

SEQ ID NO: 21291 - DNA, 194 bp, Setaria italica
  Peptide Sequence Number=SeqID_87265
ttttttgcacaaggaaaccagattatattccactgaacagcacaccattacggcacaaaccacactgattgggtgaacagaagcttggtgtagccacatggttctccaaccacacacagtccacagcatcacaaagctggtgtttcacacaaacatgatatgatacatcacactggtgtgctgttcagtggaat

SEQ ID NO: 21292 - DNA, 360 bp, Setaria italica
  Peptide Sequence Number=SeqID_87266
gtgtggttggagaaccatgtggctacaccacacacagtccacagcatcacaaagctggtgtttcacacaaacatgatatgatacatcacactggtgggtgtctggacagctccttatttactgagtctctatcactcaaacacatacagtgatacagactcacgggcatgcacacggatcatcttctccatcaacagttgcagggttgcacttgcagccggagccgcagctgcagccatggccgccctcgccggactccattgctttctcgaatccctcctcgaggcgccccttctcaggcgcaacgccgaggaccatggccgccggggcggcgctcttctcggccaagtcagggtacta

SEQ ID NO: 21293 - DNA, 508 bp, Setaria italica
  Peptide Sequence Number=SeqID_87267
gaggcgcctgcatgccaaagatggggaggcaaatttcaggcatggaaaccgacatggagcttgagatcatatctgtgctcgattgtgactgaaatcttagataacatggtgagaagagatcaagagaatatgtgcagcataccccttctcaggcgcaacgccgaggaccatggccgccggggcggcgctcttctcggccaagtcagggtacatctttctgcgtccggcaaaacagaacatcacatgaacttcagaaacatttgctcaaagcatccttctagaagaaatcagtaatagagttgggaaaaaagggcacgtctgtatcatgaaaacatgctgaaagtcactcgaatttgggtctattatctgaacagcttatacgtcagttttgattctacacatattcatcatcagtggttgtgcaacgtacccgcatccactgccacagccgcagctcgagccacagttgcagcttccaccgcaagacatcttttgaacttctaggtct

SEQ ID NO: 21294 - DNA, 292 bp, Setaria italica
  Peptide Sequence Number=SeqID_87268
gctcgattgtgactgaaatcttagataacatggtgagaagagatcaagagaatatgtgcggcatgccccttctcaggcgcaacgccgaggaccatggccgccggggcggcgctcttctcggccaagtcagggtacatctttctgcgtccggcaaaacagaacatcacatgaacttcagaaacatttgctcaaagcatccttctagaagaaatcagtaatagagttagggaaaaaagggcacgtctgtatcatgaaaacatgctagaaagtcactcgaatttgggtctattat

SEQ ID NO: 21295 - DNA, 665 bp, Setaria italica
  misc_feature (1)..(45): n is a, c, g, or t
  Peptide Sequence Number=SeqID_87269
nnnnnnnnnnnnnnnnnnnnnnnnnnnnnnnnnnnnnnnnnnnnnaggtctacctcccttgtgtgttttttttttttttttttttttgtcacaaggaaaccagattatattccactgaacagcacaccattacggcacaaaccacactgattgggtgaacagaagcttggtgtagccacatggttctccaaccacacacagtccacagcatcacaaagctggtgtttcacacaaacatgatatgatacatcacactggtgggtgtctggacagctccttatttactgagtctctatcactcaaacacatacagtgatacagactcacgggcatgcacacggatcatcttctccatcaacagttgcaggggttgcacttgcagccggagccgcagctgcagccatggccgccctcgccggactccattgctttctcgaatccctcctcgaggcgccccttctcaggcgcaacgccgaggaccatggccgccggggcggcgctcttctcggccaagtcagggtacatctttccgcatccactgccacagccgcagctcgagccacagttgcagcttccaccgcaagacatcttttgaacttctaggtctcctgaaacctcaagaactcgtagacaaagagcgaggggaaactttgagttgatgagca

SEQ ID NO: 21296 - DNA, 1777 bp, Setaria italica
  Peptide Sequence Number=SeqID_87270
tgctttgatatcttggcaagggcgagaagggaagacgggaaggtccatatgccatctccacagatcaaaccggatgccattgcaggcaccatgaaggccgcttcattcttgttcatcttgttccaaacgaagacgatcaaactcccgacgcacatatcgatcgcaaagcttccaccaacaaggaatggcaccgccatcgccattgggaggggcacaagtctcccatacttgcgtggtaggatatcccttgcaacactaaagatgaatgcgaatgcgaagaaccctgctgagagcgtaaggcaatgcttgggcaacgcggagaagccctccacgccaaggaccgccatgttccgatagatcagcccgtatggggccttccagtaaccggtggggtttccgatgtcgaacgcgttgtagaagagcaagaacgtgagaggcgcaactatgcagcccatggccgtcccaatgaactgtgccacgagcaaggatctgggagatgtcatggtcaggtgacccgtcttgaagtcatgcatcagatcggcggaggccatcaccagctgcttcaccagcgtgccgccggcgaggccagcaatgacaccgttgtccttgccagcccaagctgcgaagatgaacagcgcgatcttgccgtagttgtaggccatgttgatgtcagtgagccctgttccgtaggaattggcgaaaccaaggagaggggcgatgacgtaggccacaatgacgtggtaccacttgatctgccggaacatgattgggatggtgatcactgcaatgacgcttagccctgcatatccggcgtaagctgcccaagcggggaaagaaccgtccttgaagacctcgtcacgttgcagatcgtcgagtgggaccatttcgtccccatttccatttgccactctgttgctagcacgtttccggtttagtcgttcatgcaggctcatagctgtgacaccaaggactttaaagaagtggtaaagaccgtctcccatgatcagagctatgcagaggaaggccttgtaaccgtataggcttttcatgctgctttctggtacatttgcagggtaccactcccccttctgtttgctgatgagtggccacaatatcccccatgacaggatcgcaccaaggagagtggatatgttcacaaggtgcgaacaaatcatccccgcaccaacatatgtcatgctaaaatcaaagaagaacgtctgtttccaagccttcagaccaaatgtagggaactgaacaaatccgcagatatcaccacctgtgtagaaccattggaaaaaactccatatgaagctgagcccgaaatacttcagaaacccacggacttgcatctttgcattcttgtccccttgcttggtgtggaaaccatttatgagaacagcagttgcagtcccactcgggtaagttaaattgtagtcaatgactaaaacctttctgagaggaatcaagctcaggaggcccgagaagctgattgccgccatgaacccggccatccagccgaacccagggtccttgtagctccccggcacgttggccggcgagttcccggacagctcgtacgtcctcttgtccatgcccagcagcgtggagccgaaccctccgccgaaggcgatggtgtagcacgcgacggcgcaggtctcgatgacgcagttctcctggcgcgtgaagggtcggtgcgcgacgccgaggcgctccagcacgcgcgtccacccgcggagcgcgaggaaggcgatgagcgccgcggagacgttcagcgtgg

SEQ ID NO: 21297 - DNA, 810 bp, Setaria italica
  misc_feature (1)..(43): n is a, c, g, or t
  Peptide Sequence Number=SeqID_87271
nnnnnnnnnnnnnnnnnnnnnnnnnnnnnnnnnnnnnnnnnnnacccgttgcaatgcagaggccaaaattctcctacacaaaccaaaccaccagtccaccaccaatgttttcccagcaaacgagctggttttgtttttccccgaacctttttgttttgccccctcctaaacgtcccccgtgatgatcatacagtattcaatggacgcagcggattcccgctccaggctccagagcagcatggccaagcctcgactcgaatgaatgccaacacgccatgcgacgatgctggcagcatggccgccgccgccgcgctccctcgatccatcagctgcaggcagctcgccgctcatggccgcccgccgccgccgactcgctgcccatgctcatcagcgtggtcaggtgcgggatctccttgggcaccgacgccgtcagcacctcgtggccgtcctcggtgacgaggacctcgtcctcgatgcggatcccgatgccgcggaacctccccggcgcgcgctcgttcaggaccggggccggcgggatgtacacgccgggctcgatcgttatgaccacgccgggctccaagggttttgtccttggggagcgtcaccgagtcatgaatgtccatgcctaacgagtgacctatcgcggtcgggttcaggtagttgtattggatggacttccccttctccaggatccccagttcttggaatccctttatcagcatttttaccgaatgattgtgtatctcgttgatgcttgtgcccggtttacagagctttatgcactctttatttgtctccagtattaggctg

SEQ ID NO: 21298 - DNA, 1200 bp, Setaria italica
  Peptide Sequence Number=SeqID_87272
agtccatccaatacaactacctgaacccgaccgcgataggtcactcgttcttggaatccctttatcagcatttttaccgaatgattgtgtatctcgttgatgattaggcccggtttacagagctttatgcactctttatttgtctccagtattaggctgtacagctcttcctgagcaggagaaaatctgccacatggtggccatgttcgagtcagatcactaaggtagccatgatactcacagccaacatccatgagcagaagatcacctgttttgatttttctatcgtttcttgagtagtgtataacactgccatttgctcctccaccaactacaggatggaacgccattctttgggcacctctcattttgcactcatattcaatcttagctgccagctggctttcctccctgtgggtcctcgatagcaacatcgtttgtaaaagagactgagaaacaatagatgccgattccctcatcaacttaatttcagattttgacttgatccaccgtaattcatcagtgtaatatgtaagatcttttactttattgttgagggatgcccggcggaaggcatccaagttcttgtaagaagatgatgatgtctttacattgtgatataccccttttgactgctcaatcatttcaggaaggatcttttgcatctgactaagtgaaaatgctttatccgctttaaagaattccacagctgcctcaattccagcagtttgaccttgccaaactacatcctccttatttgtatcaggcatgaacatgcatagtccggtttcttcactcaaaactgctacgccaccaggttgtgtacaaccagtaatgtacaggtaatcaccattctgtctgaatggatagggcactacatcagtcatcatctgctgatcagcagaggcaataatggccaagctcttttccggcagcacctccaaaagcttttttcttctagagatgtactcctcagttgtgatgcctggtgtgatctctccatcagctaataactcagggtgtgtctggggcgttggttggccaacatcgactattcctccagaagtgtatgcagctcgctgtaccaaaccatgagaagcagataggaatcgagatgctacctcggttgctcgcagcgttcgccgtagcagccgcgccgccatggccatcggcagcagcacagcagcctccctaaaacct

SEQ ID NO: 21299 - DNA, 226 bp, Setaria italica
  misc_feature (221)..(221): n is a, c, g, or t
  Peptide Sequence Number=SeqID_87273
atacatttgtgccactatagatgttggttgttgaatttatgttactactgcttatattttatgaagtccatagattggcttctgtgatgctgcgacatctgtcatgtaaatgatgcagcacaacaacaggagaaattgttttttacatttttcaggaggcttaatgaacagagatacttaccccagtgtgtgcttcatccactaaaaaaaaaaactaaagngacac

SEQ ID NO: 21300 - DNA, 843 bp, Setaria italica
  Peptide Sequence Number=SeqID_87274
tactaaactaaaacaaaacaaacaaatcaaagagcaccatagatacatgttagcaatttgataatgctcactgtcaccacatctggtgaaatgtaagagaagtacagctcttgcagatctttgcataattcgagacacatattagaacaaaatcagatctgcatatccatggatactcacaattaagtactaccataggaacgagaagctctttgctgcggctacggggccagattttctaccgattttcagatcttgacttcaaatgaattcctcgagcacaaaaaccctactggattttacccgtcgtggacgcgtcaaaccccagatccgggcgacgcgaggaaggacagcagcctgctggtggtgttgccattggacgcagcgctgggatcatcaaggaagaggtcctccggcatgcggcaagcgccgtgcgcggcgacgatggcgcccccgacgaggagcccggagatgatgagcgaagccacggaggtgaggaagaaggcgagcacggacgcgacgacgaggccgagcagcgtctcgcggtcggtgaaggtgcggccgaagagcacgacgggctggtcggaggcccggaagacgtagaggaagcaccaggcgccgaggatgctgaggaggacaaggagggagaaggggtgcgccaggagcgaggccgcgagggagaaggcgaccacggcggtcgttagttttcggaagtagccgaggttgcgccgcagccgcgaggtggcctcggagtagggagtccgggcgggagaaggccgaccggtccagcagctccgtccagggacgccggtccgcgagcgagcgccgcgccgttgttcggcc

SEQ ID NO: 21301 - DNA, 299 bp, Setaria italica
  misc_feature (239)..(239): n is a, c, g, or t
  misc_feature (274)..(299): n is a, c, g, or t
  Peptide Sequence Number=SeqID_87275
ctcatttacattgagctcatcacaaagcagcaccacacatgaattcggccagatcggcttcaagggcaggaccgaggactacttcgagaagtgaagcggctgagctccatctgctgaagcggcgtgcgtgccgcatcgaaccttgctttgtatagggctctgatctggcacgcacgccgctgcagcatgcttttggtagaagttcaatgtaaatgagaaatctaccgtcccctgctgcncgcttaaagggtttaaaaaaaaaaaaaaaaaaaannnnnnnnnnnnnnnnnnnnnnnnnn

SEQ ID NO: 21302 - DNA, 249 bp, Setaria italica
  Peptide Sequence Number=SeqID_87276
ggcctgcggctgctgcggcggcggttgtgtatgtgtggtgtgtgatggtctgatgagctcaatgtaaatgagaaaatctaccgtccccctgctgcacgcttgggtttaatttgatgaataatctagctagtgtctcgtgactggagatctttgcaaagtttaatttgcgcaaacaaaaatgagggagaagtgttcaagaattgaattagaaagtgtgcaaacctgataggtggcgaccataatttagag

SEQ ID NO: 21303 - DNA, 548 bp, Setaria italica
  misc_feature (458)..(548): n is a, c, g, or t
  Peptide Sequence Number=SeqID_87277
ccccgggactggctgcggagggacctgagcgtgatcggcttcggcctcatcgggtggatcggcccgtccagcgtccccgtcatcaacggcaacagcctcacgggcctcttcttctccagcatcggcgaggagctcgcccacttcccacgccccgccagtcacctcccagttctgtctgtggatggtgacatggcacctgggcctgttcatcgtgctcaccttcggccagatcggcttcaagggcaggaccgaggactacttcgagaagtgaagcggctgagctccatctgctgaagcggcgtgcgtgccgcatcgaaccttgctttgtatagggctctgatctggctgaattcatgtgtggtgctgcttttgtgatgagctcaatgtaaatgagaaaatctaccgtccccctgctgcacgcttgggtttaatttgatgaattaaaaaaaaaaaaaaannnnnnnnnnnnnnnnnnnnnnnnnnnnnnnnnnnnnnnnnnnnnnnnnnnnnnnnnnnnnnnnnnnnnnnnnnnnnnnnnnnnnnnnnnn

SEQ ID NO: 21304 - DNA, 882 bp, Setaria italica
  misc_feature (856)..(882): n is a, c, g, or t
  Peptide Sequence Number=SeqID_87278
agcagctgcagcggaaccgatcgacagaagatatggccgcctcctcctccgccgtctctggcctcgccggcgccgccctcgccagccggccggctttctccaccagcttcgtgcggggcggccgggtgtcggccaggaacccgctgatgacgaggaacctggagaggtttcccgggtacgtgctcgccaggtttccccgggactggctgcggagggacctgagcgtgatcggcttcggcctcatcgggtggatcggcccgtccagcgtccccgtcatcaacggcaacagcctcacgggcctcttcttctccagcatcggcgaggagctcgcccacttccccacgcccccgccagtcacctcccagttctggtcaggctcaagacctcgcgctcacgctctgcctggccactgtttctgactttctgtacggcagcagcagcatttgatggggcttgtaactgacagactcacacacgaaattgttgcaggctgtggatggtgacatggcacctgggcctgttcatcgtgctcaccttcggccagatcggcttcaagggcaggaccgaggactacttcgagaagtgaagcggctgagctccatctgctgaagcggcgtgcgtgccgcatcgaaccttgctttgtatagggctctgatctggctgaattcatgtgtggtgctgcttttgtgatgagctcaatgtaaatgagaaaatctaccgtccccctgctgcacgcttgggtttaatttgatgaataatctagctagtgtctcgtgactggagatctttgcaaagtttaatttgcgcaacaaaaatgagggagaagtgttcaagaattgaaaagaaaaaaaaaaannnnnnnnnnnnnnnnnnnnnnnnnnn

SEQ ID NO: 21305 - DNA, 813 bp, Setaria italica
  misc_feature (739)..(813): n is a, c, g, or t
  Peptide Sequence Number=SeqID_87279
gaggccagggacaaagcagctgcagcggaaccgatcgacagaagatatggccgcctcctcctccgccgtctctggcctcgccggcgccgccctcgccagccggccggctttctccaccagcttcgtgcggggcggccgggtgtcggccaggaacccgctgatgacgaggaacctggagaggaacggcaggatcacctgcatgacgtttccccgggactggctgcggagggacctgagcgtgatcggcttcggcctcatcgggtggatcggcccgtccagcgtccccgtcatcaacggcaacagcctcacgggcctcttcttctccagcatcggcgaggagctcgcccacttccccacgcccccgccagtcacctcccagttctggctgtggatggtgacatggcacctgggcctgttcatcgtgctcaccttcggccagatcggcttcaagggcaggaccgaggactacttcgagaagtgaagcggctgagctccatctgctgaagcggcgtgcgtgccgcatcgaaccttgctttgtatagggctctgatctggctgaattcatgtgtggtgctgcttttgtgatgagctcaatgtaaatgagaaaatctaccgtccccctgctgcacgcttgggtttaatttgatgaataatctagctagtgtctcgtgactggagatctttgcaaaagaaaaaatgcgcaacacgaaatgagggagaagtgttcaagaattaaagnnnnnnnnnnnnnnnnnnnnnnnnnnnnnnnnnnnnnnnnnnnnnnnnnnnnnnnnnnnnnnnnnnnnnnnnnnn

SEQ ID NO: 21306 - DNA, 864 bp, Setaria italica
  Peptide Sequence Number=SeqID_87280
ggccagggtccatgacagtgttgtgttcatcttctgagcacccacacggcactacatatgttgtacagcattgcatcacttgctgttgctcaaaacatgcgtgagctttatagattggttctagtcgatacacccttggctccttacttctcagagtgcattacatctgaggatctggatgacatgaatatcgagattatgaggaacactctgtacaaagcatatcttgaggatttttacaagttttgccagaaactaggtggtgctacagctgagattatgtgtgatatcctttcatttgaagccgacagaagagctgttaacattacaataaacagtattgggactgagttgacaagagatgaccgcaggaagctgtactccaactttggtctattgtatccatatggtcataagaaggaaactaggactagtctgtgaagatgttgaccaggtgcgtggtgcaatggagaagtatccaccataccagtctattttttcctaggatttcatatggagaaagccagatgttggataaggccttctatgaggaggaagtgcgaaggctatgcttgtcctttgagcagcagttccactacggtgtcttcttcgcttacatcaggctacgcgagcaggagataaggaacctgatgtggatctctgaatgtgtcgctcagaaccagaaggccagggtccatgacagtgttgtgttcatcttctgagcacccacacggcactacatatgttgtacaaaatgcctattttgatgatggcacaatcacttgcactcattataaacctgggacttattattatgcccattccctcttgttcgatggatgcggcaggagctgtagtacttgt

SEQ ID NO: 21307 - DNA, 1577 bp, Setaria italica
  Peptide Sequence Number=SeqID_87281
cgagtcccttctaataaaaagccctcctactcatcagcgccgcgaccgcgaccccacctcccggatctcatctgcgacgacctccccgcctctccctcccgatcccgccaccgcccccgccgcgcgccacccccgaccaagctctcgtctccggggagcgagccggagcaggcggcggcgaagatgtacgggtgggagatgctgtcgttcaacatccacgacgggttcctggaggccatcgtgcgggggaaccgctcgggcctcctcaccgccgccgactacaacaacctctgccagtgcgagaccctcgacgacatcaagatgcacctcaccgccaccgagtacgggccctacctccagaacgagccttctcccctgcacacaacaacaattgtggaaaagtgcactcttaaactggttgatgagtacaagcacatgctgtgccaggcgactgaaccactatctacattcttgcagtatataacgtacgggcatatgattgataatgttgtccttattgtaactgggacattgcatgagagagatgttaatgaactgttggagaaatgccacccattgggcatgtttgacagcattgcatcacttgctgttgctcaaaacatgcgtgagctttatagattggttctagtcgatacacccttggctccttacttctcagagtgcattacatctgaggatctggatgacatgaatatcgagattatgaggaacactctgtacaaagcatatcttgaggatttttacaagttttgccagaaactaggtggtgctacagctgagattatgtgtgatatcctttcatttgaagccgacagaagagctgttaacattacaataaacagtattgggactgagttgacaagagatgaccgcaggaagctgtactccaactttggtctattgtatccatatggtcatgaggaactggctgtctgtgaagatgttgaccaggtgcgtggtgcaatggagaagtatccaccataccagtctattttttccaggatttcatatggagaaagccagatgttggataaggccttctatgaggaggaagtgcgaaggctatgcttgtcctttgagcagcagttccactacggtgtcttcttcgcttacatcaggctacgcgagcaggagataaggaacctgatgtggatctctgaatgtgtcgctcagaaccagaaggccagggtccatgacagtgttgtgttcatcttctgagcacccacacggcactacatatgttgtacaaaatgcctattttgatgatggcacaatcacttgcactcattataaacctgggacttattattatgcccattccctcttgttcgatggatgcggcaggagtccagacctggagtcaatgtattatttgttttgtagtcaaataaaggcgtggttatctggtacaccgaataaaatcctgtctattctttagaataagtgaaatcttgtgtattttgggacagagtttactggcaatgtgcagtttgctttcaatcttttaaaaaaaaaaaaaaaaaaaaaaaacgttgatatgtctggatgctattgaa

SEQ ID NO: 21308 - DNA, 1633 bp, Setaria italica
  Peptide Sequence Number=SeqID_87282
gcaagttgtcaaattgaaagttttaggtaacgacctagaagaagccccgatgatccaatgttattgcgggggaaggttttgtcactcgagctggttaggatggttgttgacaatgcagggccgttctggaagacaaatgaaaagtatcttgaagcagttaagcagtacctttgcttatcattgttgaagaacagtgccttgtctgcaatgagtgtctttcagttattgtgttccattttttatgagtctaatatcaaggtttagatctggtttgaaagaggaaattggaatgtttttcctatgcttatcttaagagttcttgaaaatgtcctccagcctagttttttgcagaagatgacagttctaaactttctggagaagatatgtaaagaacctcaggttattattgatatctttgtgaactttgattgtgatgttgatgcaccaaatatttttgaaaggattgtcaatggactactaaagactgctttaggtgtccccgctggatctacaacaacgttaactgttgcacaagaccaaacatttaggattgagtctgtcaagtgccttgcaactattatgaagtcgatgagcgcatggatggaccaacaactgcgaattggtgaattttctcccagcaattctgaaaatctaagttcagtggacaatcaaaatatccataatggagaagaagggagtggaatggattatgaactgcagtttgacactattaactcggacataactgactcttcctcacttgagcagcgccgtgcttacaagatggaacttcagaaaggaatcaccttgttcaacagaaagccttcaaagggaattgattttcttgttaaaagtaagaagatagggcattcgccagaagatgttgcttctttcttgagaaatactgctggtttaaatgcaacaatgataggcgactatttgggtgaaagggatgactttcccctcaaagttatgcatgcttatgtggatgcattaaactttgaaagcatggactttggtcaggcaattaggttcttcttgcaaggtttcagattaccaggagaagctcaaaaaattgatcggatcatggagaaatttgctcaatgctactgtaaatgcaatccaaatgcttttaccagtgcagatacggcatatgttcttgcttattctgtaatcatgcttaacactgatgctcacaatactatggtcaaggataagatgtctaaggcagacttcattcgcaataaccgaggaatagatgatgggaaggacttgcctgaggcttatctgagtacactatatgatcagattgtcaacaatgagatcaaaatgagtgctgattcatcagttccacaaaacaagcaacctagtagtgtgatgaagcttctaggcttagacaatattatcaatttcgtcaactggagaccggcggaagacaaggcagtaggagctaatgacttgctcattaagcacatccaggaaaattcaaagcaaagcgtggcaaattagagtccacattttatgttattgctgatgcaaccattttaagatccatgatggagtcctgttgggctcctatgatggctgcattcagtgtcctccttgatcagtgtgacgataaggcttccacatc

SEQ ID NO: 21309 - DNA, 1136 bp, Setaria italica
  misc_feature (1)..(77): n is a, c, g, or t
  Peptide Sequence Number=SeqID_87283
nnnnnnnnnnnnnnnnnnnnnnnnnnnnnnnnnnnnnnnnnnnnnnnnnnnnnnnnnnnnnnnnnnnnnnnnnnnnntttttttttttttttaattgcttaatacttccccctttctttgaaaattcaaatcggaatccaaattacaatgccgaatcgccaatgcaaacacgtaagcacaattacaacgcacacagcctcaccataccaccgcgcgatcatcacgtacacgagcaagaaatttaaaaacctctacagcacgcagatgggcaggtcgagcggcggcgccatggtggcctcgagctcggacccgccgttctccaccagcagcgccatggcgagcccccccgtgaggtgcgcgtcgatatggcagtgcaccagccacaccccggggttgtcggccacgaaccgcaccacggcccacccgccgacgggcacgccgatggtgttccggctcggcgggtccaccaggttgaacttggcggcgtcccgccgcgggtcgtagttgccgaaccccgtggccagcacgtagaagtggtacccgtggatgtgcatcgggtgctcctcggcggcgaagatgcccgtgtcctggaacacgatctgcaccaccgcgccgtacctgacgcggtacagcttcgtgcccttcacgggctgccacagcgggcgcgggatgttctggggaacgtgaagtcgaagaacaccggcgggaacgacgggaagtcgtcagtgaacacgccgggtgtgttggagcggtgcgcctggagcagggagacggtgttggggagctggaacgagacgttgttcatgctagcgccgaaccgggtgttgttggggccctggcagaaggggccggggtggcagttgaagaggccgaaccccacggtggtgaagagctcctgggtcaccgggcccggcaccttcaccggatgcgggctccggaggctgttggagaaggcggtcgccgtgttcgtgtcgttgaacgccggcaggaacgggagcatcggctgcggaccggtgcggcctgggtggccggaggacctggatgaccggcctaccgggccgttgaaggtgttgccgcccatgccggcgccggctccggctccggcccctgcactggctgtggtggtggggcagccg

SEQ ID NO: 21310 - DNA, 790 bp, Setaria italica
  Peptide Sequence Number=SeqID_87284
gcggcctcctccgcgccgactcggtcgctcagctctgcaagagcatcgtcatggtgaacacccaagccactgcagatgttgttgactgcagcaatccaaaaaattcaaaatactatgttgttgttgttcagtatatggcgcggcttaacactgaaaacatcaagaacttcctgtacgaactaaatgagaagcaaatacccaaaaagagatttaacatgaggttggcaccagaagaggagtcacacaagcttactgggtttgtgcacaacgctgtcacatgcatcgggatggaaacagacataccggttatcatagatgaagctatcaccaagttggatgaggggttcttctggttgggtggcggagaagttgacctcaagctcgggatgcgaacctcacaattccttagtgcctttagtccattcgttgtgaaatgcagctgatgataatctgcaacggaagagaagcttctgatccatttggttctacagagcgtctggatgcatcacatggaggcacaccacaagtagattttgcttggatctggggttgggatgtctgtctttttgaagcaggctatccccttccaattgctcaccttgcattgtttacagctgactgttggtaagattgatgtggtgggaggggacattcttgggaagattgagatatttgccacaactaggcatataatactctttgtactttgtgcctaaaactcatgttggtttctggtgtgggtacttgagaactaggagttacatgatttagtcagtggtaatttatcagg

SEQ ID NO: 21311 - DNA, 498 bp, Setaria italica
  Peptide Sequence Number=SeqID_87285
ctgcatttcgtttccctctcacaagtcacaactcttcattcctctctgtctctgtgtttacatccttcacaccaacacacgcgttatttccacacgcacccaaccatggcacaacccaactccagacacacaacagatcacaagacacactcaagcatacgtttgaacaaatcgacgtgagcacacccggtcagacagttcaaagaaaaccaccccaaaacgaagaaggaaaaaaaaggactattccctttccttccgttgttcagccaagaatgagacttgcctaccgctgtaggaaatccttcaggtgatcacctcgccgctcctcctgatcgcgccatcgccaccccctccctcctccgcatcaccggcgtcctcctgcagtgccccccagcactgccgctgtcgataccgatcgccaccgcctcgccgcgccattgaccgggatccaagctatggacggatggccacagataagaggatttagagaggtgcgtg

SEQ ID NO: 21312 - DNA, 249 bp, Setaria italica
  Peptide Sequence Number=SeqID_87286
gctgccgctcctgaagcgcgcgaggtccgaggatgatccggcgccggcgccggcgggctgaggcggggatgacgacgccattcactcgcgatgacgccatgcgccggccgccggccaaaccacggcccaacggagagaaggggaaaattaggaaagacgctcacgccaggcggccggcgcggctctcgctttccgctcctcggcttgccgtgctgtgttccgttgcctttgcctcgtgtcacacgcagg

SEQ ID NO: 21313 - DNA, 517 bp, Setaria italica
  misc_feature (513)..(513): n is a, c, g, or t
  Peptide Sequence Number=SeqID_87287
tcgtggggtacggcgcggtgccggtgatcgtgccgcgcgtggccggcgtgcacacgctgctggactcgttcgagcccatccacggcgtgctcctctgcgagggcgaggacatcgacccctccctctacgagtcctccgacgccggcgacggcgacggcagcgcgctctcgccggatcagctcgaggccgtgcggcgcctgcacccgagcgacgccgccatcgaccacgagaaggactcgatcgagctccgcctcgcgcgccgctgcctcgagcgcaacatcccctacctcggcatctgccgcggctcgcaggtgctcaacgtcgcctgcggcggctcgctctaccaggacgtcgagcacgagctgggaggcgaagccgtccagcacataaactacggcgactacgatgggcaccgccacccggtccgcgtcctcccgggcacgccgctgcacgagtggttcgcggacgacctcgccgacggcgaagacggcggcaagcagctgatggtgaacngcta

SEQ ID NO: 21314 - DNA, 291 bp, Setaria italica
  Peptide Sequence Number=SeqID_87288
ctgcctatggcgttggcgtataccgggagtaaactgcagtatcccagtcattctggtctgatgatggccgccacctgctcctcgtaggcggcgccgccgagcatggtggagaactggtccaccaccatcggcgtcggcaccgcgtacggcgagatgcagttgatgcggacgccgacgcgcgacagctcggcggcggcagccttgacgatcccggcgatggcgaacttggacaccgagtacgggtacgtcccgagcccgccgaggatgccgctgatgctcgccatgcacagg

SEQ ID NO: 21315 - DNA, 1341 bp, Setaria italica
  Peptide Sequence Number=SeqID_87289
cctatcccctgtgtgccttgcctatcccatgttgcgtgtctcaacacaaaggtattggagaataaagttaagtgagtaccttttgttcattgttcactgtggtagctgctgttttgagagctctgattgagttgtacagtggggaacaagtaacatctgttcccttaactttattctccaatacctttgtgtatgcctcaagctcgattgcgtaggacatgtaattgaagggtatgatctcatcatcggccagcctcagagccatcattccccatatgctagcagctgcaaacatcttggttaccacatggtggcgcagatagtgcctcaactaatataacggagcaatacaacggagcacaaaagcaggggcaatacaacggagcagacctgcaacatgcctacggaacccaggatctccgaattttgccatccacacgtagtcatcatataaggagtggtaaaccggatatcctggtccttctccgaaaactatattcattgaaggaataccagcatgttggacaaaggctaagtagtctgatcctccatcgcctagtcttagaaccttaatgcaagcgaccagcagtgcgaagagtaagtgatgttaaataacttgccaaaaagccagaaagttataacacttgcagtgcttaaaaaactcaaaggtctattttgtgttcaaggaactagtaaccagacagtaatacttggtgataacacactaaccaggtcctcagaagaatgtatactgtagactattgcataagcaagttattgcaactcacccggggagaaccattcgatttgatccatgaatcatatacagtctgagatgaattgtcaggatcttgaaccttcacaaattgataaaaaaacagtttttaccttttggacattgtaataaggaaaatcctataaacatcagattacctcacaagaaaagactactgttaattaaaaaatggtgatcaaaataaaacaaagttcaatatgactatcatatttttcctttatttctccggggtattttactatctctagttgcctgtatgatgcacacaccactttagttatttcctgaagcaactcgtcaagttggggagttgtagacggcaggaatcctggaccaacgactgaaacgtcgatatttagataagcaacagctcttgaagatagcatctcccggttttcttcaacccattcagtcgaccctgtctcaatcattgctgcagttccgctgttggggtcagatgctccgaacgtccaagcatcacgatggttacccagaatgacatacctatccggctcttcagcgccttcgatgatggcaaagacatt

SEQ ID NO: 21316 - DNA, 457 bp, Setaria italica
  Peptide Sequence Number=SeqID_87290
aacacaaaggtattggagaataaagttaagtgagtaccttttgttcattgttcactgtggtagctgctgttttgagagctctgattgagttgtacagtggggaacaagtaacatctgttcccttaactttattctccaatacctttgtgtatgcctcaagctcgattgcgtaggacatgtaattgaagggtatgatctcatcatcggccagcctcagagccatcattccccatatgctagcagctgcaacatgcctacggaacccaggatctccgaattttgccatccacacgtagtcatcatataaggagtggtaaaccggatatcctggtccttctccgaaaactatattcattgaaggaataccagcatgttggacaaaaggactaaagtaagtactagaatacctaccaatacgacctaagtaacttaaagaaaacccggggaaagaaaacaa

SEQ ID NO: 21317 - DNA, 2203 bp, Setaria italica
  misc_feature (6)..(6): n is a, c, g, or t
  misc_feature (9)..(9): n is a, c, g, or t
  Peptide Sequence Number=SeqID_87291
taaatnttntattgtttgttactagtactttcctaggtacttcttgtaagttgtttgtcttgtcttccgtagtcgtcttgtccttattggtcgtttggtcttattaccgggtattaaacttgtctagttattccctagttctatttcttggttcttgtaaggttcctatacgatcagtagtcgtcggcacgagattatcctgggcctgtatactgtaactgttgaagcaataacttttttaagagatgattaaagttctgtcatgttagacggccgctcagtacagcagatgcctgtgtcacggccctggccaccctgtaaatctcatgttgtacagacttccaggactctgaagtgttgctgctccgagcgctgcctatggcgttggctataccgggataaactgcagtatcccagtcattctggtctgaaggtccatacaccagatgcttacaccattcttgtttgaagatgccctccctgctagtgaatgctcgctcggcctgcatgagccggtcattgagctgtcggattttcagtgcatccttgttcagctgcttgctcaacagttgtttttgaagttccttttgttcattgttcactgtggtagctgctgttttgagagctctgattgagttgtacagtggggaacaagtaacatctgttcccttaactttattctccaatacctttgtgtatgcctcaagctcgattgcgtaggacatgtaattgaagggtatgatctcatcatcggccagcctcagagccatcattccccatatgctagcagctgcaacatgcctacggaacccaggatctccgaattttgccatccacacgtagtcatcatataaggagtggtaaaccggatatcctggtccttctccgaaaactatattcattgaaggaataccagcatgttggacaaaggctaagtagtctgatcctccatcgcctagtcttagaacccggggagaaccattcgatttgatccatgaatcatatacagtctgagatgaattgtcaggatcttgaaccactttagttatttcctgaagcaactcgtcaagttggggagttgtagacggcaggaatcctggaccaacgactgaaacgtcgatatttagataagcaacagctcttgaagatagcatctcccggttttcttcaacccattcagtcgaccctgtcaatccgtactcttctgcatcccaactacagaagataatggttcttcgaggtctccatccttgcttttgcagcatcgagaacctttgagctaactcaatcattgctgcagttccgctgttggggtcagatgctccgaacgtccaagcatcacgatggttacccagaatgacatacctatccggctcttcagcgccttcgatgatggcaaagacattctcgatcgttgccattgtatcattcccaagatacgtcaggttcagaaccgccggcccggggccgaggcggtacacggggccgtcctcccggccctgccaccccgccggcgccacggccccgcccatcccggagtgtatctccatcgcgtcacgcgccgacaccggcagcgccgggatgagcggcatgtcgtcggtgcccatggcctcctccacgctgaggcgctcgcagccgtcggacgacggccacatcggcgtcgtcgggtcgccggcgccgaggaacaggctgcccacctgcacgccgctgggcggcagccaccgggactccgggaacgccgcctccccgggggcgccgccgtagtgcagcgggtccgtgtacaccaccgcggccgcggcgcccgcggcgcgcgcgttgtgcacgacttcctcgcagtggatcctcccgtaccgcgcgagcgccaccttgcccgcgacgtctacgccgcgggaggcgaggtaggcgaagtcctcctcgcggccgtagttggcgtacacggcctccgcggagacggacccggacgccgcgtacgcgtagaacgtcgggatggcctccgccgacgcggccgcgtaggggtcgccacgataggtctcctgcttcagggcgaaggaggtggaggcgccggcgccgcgccccggcgctgagagggagagggagcggtggacggggtaggagaggaggacggagtagggcgcgatgtgggcggggaaggggagcgcgtcgcgcacgtagcgggcggtgcgggagttggccctggtccccg

SEQ ID NO: 21318 - DNA, 335 bp, Setaria italica
  Peptide Sequence Number=SeqID_87292
cgtccgccgaggcgcggcacccgagcacgtgaagcggctcctccgcgacgcgtgcaccagggccggcgcgcggtgcgcgcgggtgctcagggaggcgtcgtgctccgtcgccacgatgacggcgtcctcgcgggcgctggacctcgccgtcgcggacatgaacacggcggtgcacgatctgcagggcgacatgcggtccctcccgtcgatgctggccgtgaagctggccgagacgtcgctggtggacacgatgcccgtcttcaccgtggcgtctctgctggtggagatagcagcgagggtcgagggcgtcgtggacgccgtcctgagacacgcaa

SEQ ID NO: 21319 - DNA, 502 bp, Setaria italica
  Peptide Sequence Number=SeqID_87293
caatatgaaaacctgacaatgcatgcccaattcccaagtttttctgaagtttgaccccttcagtttgtcgctcatggcgcccatcgtctccgcctccaaatgatgtggtttgggcctactaatactagttcacaatggctccgatcaacaccataaggcccagtgacttcaatgtgcaataacaggtgagcactctctgttgacaacagtcttaattagtccactgtaccccattcaagttctgatttgggggctctacagcgcagctctgtcggtcactgtcacaagagtgcggagtgcccaaccgacgaggtgcttgtggatgcaatcgtgctagaattcttggatttgtggctgagtatgggaaacaagcccaaaatgtttcacctggttaacaatggcccattgcatttcaagaggaagctgagcaaagtcatcaaactttgtcccgattaggattggaatagccgtcttattccatttcctcgccctctcgtaccaa

SEQ ID NO: 21320 - DNA, 666 bp, Setaria italica
  Peptide Sequence Number=SeqID_87294
gtatcaaaattgcatgtgcctgtcacctctgacaagaaaaagacagataatctacatagctgtacagtaagaatgagcgactgtggtacactagggacatcatcaagtgataaaagatgtcactgtaataaaacaaaagagtgtattgatcttgagttttttcttcaggattgatacatattccaatccaggtcaggttgtgaaaaaacttcataatccgtgggaccatctacaaagctattaactgtctgcatcccttctaagttctcaaagatggctggaagcgatcacttctagaaggcagcagcttatagaacactaacatcccaagggtacatataccttggagcttcatgaatcaccctgaaccgcaaagaagagcagcactgcagaaaggaagatcacacagaattgcatgatgcacaacactctgtccatcagcttcccatcattccctgctcgaaatcctctaactctgtacacaaacaagaaattgtaattgtccacaagatatcggtagccaaagtatgctttggcatgtggaagcttctgtttaacgggtatagagaaagatcatgcccctcgatactattattcctaaaattctccctcaaggacaaataacaaaagaaaaggtaaaagaaaactaaaaagtaaaaacaaaaa

SEQ ID NO: 21321 - DNA, 544 bp, Setaria italica
  Peptide Sequence Number=SeqID_87295
ttggcagtctcagattcaagcccgtcatctgcaagccgttctgctcctccccgtcatctcccacatacttaacctttcattggcatataatatgtgattgcaatgacaccatgatgcgtgcatgagctggttcatcccattttttcatctccttacttccagaggagcaccggcaacaagcgttggaacgtttgcctttgtgttgtgcacgctgttcgtgacttgcaaggctagctgcgcatagggctgaatgatatgtattccttggagcttcatgaatcaccctgaaccgcaaagaagagcagcactgcagaaaggaagatcacacagaattgcatgatgcacaacactctgtccatcagcttcccatcattccctgctcgaaatcctctaactctgtacacaaacaagaaattgtaattgtccacaagatatcggtagccaaagtatgctttggcatgtggaagcttctgtttaacgggtatagagaaagatcatgcccctcgatactatccaaaagggtcttctctctcaggcatcagag

SEQ ID NO: 21322 - DNA, 797 bp, Setaria italica
  Peptide Sequence Number=SeqID_87296
agacaacgactaagtactgttcatcttgtaagcttctaaaagcatacgagcaaatctcagagttattaaattgttgcagacagtgatctgcagaaatgcaattgtacgagtgggaggcagcccatctgcagttgactgtttgcagcaatttgtagcagttttttgcttatgttcagtcactaggacgtgttcagatataacagcagatgctacagaaaggaaacctgagatgcacaggaagctgtcagcaaagaaaatgcaccaactaacaataaaaccacataggagatgctgaaggccccatacccaagaaacaaagctaccaagaacaacatttcgatcagaacaaaccagtattgtaaaatgcagagctcacctggttaacaatggcccattgcatttcaagaggaagctgagcaaagtcatcaaactttgtcccggttaggattggaatagccgtcttattccatttcctcgccctctcgtaccaatctataatattattaagcgtgcaccggctcgtgagatcgaacatgtaaaggatcgcaacggcatccttgcacgcgattgggatgtgatcgacagactggacgtctcctgcgacgtcccagatgctgtaggcaatcctagctcccggacggccatcgtcttctccatgagattcaggcccgtcatctgcaagccgttctgctcctccccgtcatctcccacatacttaaccatgaagctggtcttgcccgatctggctagttcgtccgtagtctaggtctgaccttgaggctgacaacgttctcgcc

SEQ ID NO: 21323 - DNA, 1676 bp, Setaria italica
  Peptide Sequence Number=SeqID_87297
ctgaggcgttttattccggtgctcggcgacagtacagtacagcctaacaagtgaaccattattattatggtcccatgatgctggatggagcgctgaattataagcgccgatctggacatatctttcttttcttgtcctgtttcagcgaggaagtaaacatgtacagtcttgcaaggaaagctttgtccatcatggaccactagagcagagattaccacaccagtaaatatctctggtctgactaaaaggaatcaatagatggaactaaaaagtagtagaaagattgataggagggtgaatcttaaggaaactgatctgtcaatttgcaataccattgaagcctgcctaatttaacgacaaccattagcattaatctcttttccacctttacaaagtgttaggtgcacactattaacagcatgacctgctgttcctattaagtgatgttaggagttaggaccaattgttgacagggatacttaagcaacagctatgaatgttgctggtcaatgtatttgaaatccgtgtacttttacatgtttgataaacctaatgatataaatgtaaaaacagaattactgccatgcaagcattctgagtaatgctctatatcttcccgaattcccaaggccactgtcttctcgctcaggcatcagagtgctgtcaaattatactttcttcaccattctgcatcattagatagtcctcattttcttcagggaccaactggaccatgtcattctttctaaatttcttcattatatgctttatccaagggattggtgccaacagatcaaaagatattcccagaaaggtacacgtgatcaagaatgccagggatgaaagtgatgatcttgataaaaatgacgggcttaagtagtgttcgatctgcttgcaatctggaccatccaagtagcatcgccccatgctaaggatccaactttcaagtgacgattccaccagggcacgcaacaggatcagattaacaaggaagaagcaaaccatcttgagcaatgcagccctctgctcccctgacaccgtcagatggcactcaaacttggaaaagtatgacaacacagatgggatgatgatatacatgctcacaaagatgagaacattgggaagaaactgaaagattatggtccagaaccagcttgagccttcaagccaggcaagccatgatttggcatgatccatagcctccacattgatgatccgtgccgcgctttgcatcccgctgatgattgccaagggtgaactgaagaacaatagcattaaaagtaggcaggtgttaactgcaatcctcctcaatctcgaagacatcttgctaagacctagatgattccagtaaatatctgaagccggcggtgctctctccaccttccaccgacttctctcgagctggagctccatcacagggaaaaacctgccgatcggggtcttcttcctctcaagcttaaaatcccttacagccttgtttgcggtgtagacatccttaaacaccacaaaagctacgccagcgccaggggcacgcccttccttataatccgatagcttgcttccaagcacaagtttcttagtctgcaatttcctcaacctttcctcatcagtaaaacctagcctctccgatgccatcacccacagctctttgcaccttctcacaaaccgatgctcct

SEQ ID NO: 21324 - DNA, 3313 bp, Setaria italica
  Peptide Sequence Number=SeqID_87298
ttaagtttggttaggtttccgttttctttagttaagtttctttatttgttatttgggttcttcgtccgtattggttgtaggttgcgctccaccgtccacggcaggttgaagagcttcgccgtgatgaacttgaagatcttgttcacgttgatgttgtgcgtcgcgctcgagaagaagagggtcgccttcatcgctcttgcgtatgcccgggcctggttaacaatggcccattgcatttcaagaggaagctgagcaaagtcatcaaactttgtcccgattaggattggaatagccgtcttattccatttcctcgccctctcgtaccaatctataatattattaagcgtgcaccggctcgtgagatcgaacatgtaaaggatcgcaacggcatccttgcacgcgattgggatgtgatcgacagactggacgtctcctgcgacgtcccttatggcaacacaatttgtatcaaaccaaatccaatgtagcaaaaattgaatttttcaaattcgtctctggtagagataatacaatatagccaaacatctaacagatcgtcaatacaatatagccaaatatctatcagatcgacaacctttactgcctatgccacaaacaatatcgtccagcatccattcatgttagcatgaacaacatctaccaaaaacagcatcaattcatgtttgcataacctgaagaggcaatcctagctccccagacggtcatcgtcttgtccatgagattcaagcccgtcatctgcaagccgttctgctcctccccgtcatctcccacatacttaacctttcattggcatataatatgtgattgcaatgacaccatgatgcgtgcatgagctggttcatcccattttttcatctccttacttccagaggagcaccggcaacaagcgttggaacgtttgcctttgtgttgtgcacgctgttcgtgacttgcaaggctagctgcgcatagggctgaatgatatgtattcctgccccaagaagtaaaaaaaagatgtctttacccattgtgaattaccacagcttgttattacgtaccaagaaatacataaaaatactaccgtagtagaactagaaggtagtggactataatttacattaccattctactctcacagagtagaatagaataggacattatggttcaaagtctctgaattataagcgccgacatatctttctcttcttgtcctgtttcagtgaggaagtaagcatgtacaatcttgcaaggaaagctttgtccaccacggaccattagagcaagagatggacatatctttctcttcttgtcctatttcagtgaggaagtaagcatgtacagtcttgcaaggaaagctttgtccaccacggaccattagagcaagagattaccacaccagtacatatctctggtctaaataaaaggaatcaatgtatggaactaaaaagtagtagaatgattggtaggaggggtgaatcttaaggaaactgatctgtcaatttgcaattccattgaagccttcctaatttaacgacaaccattagcattaatctcctttccacctttacaaagtgttaggtgcacactattagcagcatgacctgctgttcctattaagtgatgttaggagttaggaccaattgtagacagggatacttaagcaacagctatgaatgttgctggtctacttttacatgtttgataaacctaatgatatgaagttcttgtccggctagagtagagcatggaaatataattagcaaaaatcagtatgaaacagcttttgcatgacaaacaaaaaatattactacctagagttatacaaaaaatatattaaatatttctattcagttgaacaacatggagacagctcaggtgaacagaccatatgcattatgcctcacctagactagatcaattgtttaaaagatatagtgcaagtcagacagctgtagcagaggcagacaatccttttgttatgtaatttctagcaattacacaatagaagataaggaaatctgaatataaaattacacataagttacatgtggggctgactcctaatatttatttgtataatatttattttcctgtgatgcgactaagatcactgataaaagcatgccattgtaatgaaacaaaagagtgtgttgatcttaagttttttcccttcaggattgatacagactataatccagatcaggttgtgaaaaaacactataatctgtgagatcatctacaaagctattaattgtttgcatcccttctaagttctaacaaagatggctggaagcgatcacttctagaaggcagcagcttatagaacactagcatcccaagagtacatatagcctggagcttcatgaatcaccctgaaccgcaaagaagagcagcattgcagcaaggaagatcacacagaattgcatgatgcacagcactctgtccatcagcttcccatcattccctgctggaaatcctctaactctgtacacaaacaagaaattgtacttgtccacaagatatcggtagccaaagtatgctgcacccacaggaaccacgagcggagcaaacagggagtagatcattgtgagtgcaaatattgtaatgtcaaaagcatagtactgtgcaaagtcaaatttctgctttggcatgtggaagctcctgtttaatgggtatagagaaagatcatgcccctcgatactatccagaaggccactgtcttctcgctcaggcatcagaggtgctgtcaaattattactttcttcaccattctgcatcattagatagtcctcattttcttcagggaccaactggaccatgtcattctttctaaatttcttcattatatgctttatccaagggattggtgccaacagatcaaaagatattcccagaaaggtacacgtgatcaagaatgccagggatgaaagtgatgatcttgataaaaagtatgggcttaagtagtgttcaatctgcttgcaatctggaccatccaagtagcatcgccctatgctaagtatccaactttgaagtgatgattccaccagcacatgcaacaggatcagattaacaaggaagaagcaaactgatgacctcatcattaaactaccatgaggtcaagcgttcagatttctcttgagtaatgtcaatgttagaaggcccatgcatcgcaatgatttcaactcccagcttgtggcagagaattaaaacaaaggaacctaggcggaggagggaaagacggaggggaggatccgggacccgacggaggtaggcgctgagcttcttggaaggctccatcttgcgaggcccaatctcg

SEQ ID NO: 21325 - DNA, 913 bp, Setaria italica
  Peptide Sequence Number=SeqID_87299
aatggaaacatgcatggattcctatacactctggcgaaatgttacaaccggggtcctacacgcgcaggggacaccgtcacctatatgtacaaaggcatctcgccttgcctgcacccggccctcgagaaatcgagaggatgaccgaggacgacggggcgaggtcgtcgctcgctcgctggctcatggcggaggaggtcagcaggagcagagcaagaggaagacacgatccgaccccaagggtcgtgtgcgctgcctaattatctgttaggaggaagaagtggaggccgtcagaagtctatgatgggctcgccgatggtgaggttgcgctccaccgtccacggcaggttgaagagcttcgccgtgatgaacttgaagatcttgttcacgttgatgttgtgcgtcgcgctcgagaagaagagggtcgccttcatcgctcttgcgtatgcccgggcctggttaacaatggcccattgcatttcaagaggaagctgagcaaagtcatcaaactttgtcccgattaggattggaatagccgtcttattccatttcctcgccctctcgtaccaatctataatattattaagcgtgcaccggctcgtgagatcgaacatgtaaaggatcgcaacggcatccttgcacgcgattgggatgtgatcgacagactggacgtctcctgcgacgtcccagatgctgtaggcaatcctagctccccggacggccatcgtcttgtccatgagattcaggcccgtcatctgcaagccgttctgctcctccccgtcatctcccacatacttaaccatgaagctggtcttgccgatctggcagtcgccgagcaggctgactttgaggctgacaacgttctcgccgtccgcggtggcggcgtcgttaaaactaaaacgaaaaccgtaaaacc

SEQ ID NO: 21326 - DNA, 222 bp, Setaria italica
  Peptide Sequence Number=SeqID_87300
ccctccgtttccgtctccgtcgcgggacgacagagctcgtcctcttgcggagtcgtcaccggcgcctgctccgtcatgccgccgctatcgccgagactctgccgcgatgagtagtccacgactccacacgatcacgatcacgttttctgctgcgacgcatgcgcgcgcacgatctgcgcacccattccgttcgtgtaactaccaacacggagatatacgcac

SEQ ID NO: 21327 - DNA, 334 bp, Setaria italica
  Peptide Sequence Number=SeqID_87301
tgcttcgccgccgccacctcccgctccaggcgccgcaccacccgctccattcccgcgtcggcgccgtcgctcacctgccgctccgccagctgttgccccgccgggcgcgccgccttcccctccgtttccgtctccgtcgcgggacgacagagctcgtcctcttgcggagtcgtcaccggcgcctgctccgtcatgccgccgctatcgccgagactctgggactgggaggaggggacgggtggcgagtacgtgggcgtggtggacctgctgcgctcgtgccgaggcttcatctgctgcctgggagacaggagggcggggccgtggcccaggaacc

SEQ ID NO: 21328 - DNA, 484 bp, Setaria italica
  Peptide Sequence Number=SeqID_87302
agaccatcgcgctggtcggcagctccggctccgggaagagcaccgtcgtctcgctcatcgagaggttctacgaccccagcgcagggcagatcctgctcgacgggcatgatctcaagagcctgaagctccggtggctccgccagcagatgggcctggtgagtcaggagccgacgctgttcgcgacgagcatcaaggagaacctgctgctggggcgggagagcgagaccgccacgcaggcagagatggaggaggccgccagggtggccaacgcccactccttcatcatcaagctcccacaaggctacgacacgcaggtcggcgatcgcggtctccagctctccggcggccagaagcagcgcatcgccatcgcccgcgccatgctcaagaacccggcgatccttctgctggacgaggcgacgagcgcgctggactcggagtcgtagaagctggtgcaggaggcactggaccggttcatgatcgggcg

SEQ ID NO: 21329 - DNA, 450 bp, Setaria italica
  Peptide Sequence Number=SeqID_87303
ggacatgtcggcgccggcggcgaacgcggcccccgtggcggagtagagcagcgccggcacggcggcggcgagcagaggcatgagcaccttggccttcttgcccttgcccttcttccacacgcacaggacgatggcgatggcctcgaggaacgcggcgatggcggcggcgccgacgaggtagacgaagggcgggtagtcgctgtatgtcacggtgcgggggcgcgcgccgtaggcggcgtagatggtgcactggctcgccgtggacatgagcaccgccgccgccaccgccaggcccatgcccacgatgcggcaggcgatgctcaccgccatcgcgcacttggattccttcttctcctcgtcatgcatgattgctaccaaccgatggacgagccaagctagaggaagaagatgaggttgcgagaggttgggtgttgacttgcgagcttgaga

SEQ ID NO: 21330 - DNA, 779 bp, Setaria italica
  Peptide Sequence Number=SeqID_87304
cgtgctcgtagcgcagagcctggggctcgccatcggcgccgtgctgatggacgtgaagcagggcaccacgctggcctccgtcatcaccatggtcttcctcatcgccggcgggtactacgtgcagcacatcccgccgttcgtcgcgtggctccggtggctcaactacagcttctactgctaccgcctcctgctcgggatccagttccccaacggcggcgggtactacgactgcggcggcggcgccatgtgccccgtggccgagttcccggcgatcaaggccgtcgggctcaacaaccactgggtcgacgtctgcgtcatggcgctgcttctcgtcggctaccgcgtcgtcgcctacatcgcgctcgaccgcctcaagccgaggtgaacgaaagccatggatgagtagaatctggtgaatcagctcaaggccaagagacagtgattaactggacgagttagttaattagcatcttgtttagctcttgccgtttcttggagggatgcacggtgtcggtgagaagtgattagtggttaattgggcgatcaagagggggacgagaggattagtggcggtgatcatcagttgatcactgattagtttacgtcgatgacctggagtgaaataattattagattgatctgtggcgagaagagaatgaagcacctggtgctctgtattatccctcaagggataatacattacaaacctgcagctgcaacttctcagactctgagactctgcagtctgaacaaaaggttttcagaattcagacgccttc

SEQ ID NO: 21331 - DNA, 1532 bp, Setaria italica
  Peptide Sequence Number=SeqID_87305
tgctctcagctttttagaactgccagcttcatttggcaatctcacaaatgcggtgcacatcaatctatcaggctgcattgggttgaaaaccctgccggccgaatcatttggggttcttaaaaagttggaacatcttgatctatcttcttgctcttgccttgaagggatccctagtgttgtggatggccttaccaatctccagcatctcaacttgtcacacccttgctgttatctttctgaacacaggttccatctcaaagcactaaaagatatctgggtcaagctcatcaacctccggtatttgaacttatccatgtgcctgaatcctatattttgctatctttcagaaaaggagaggattgaatacattgacagtatcagtcacctacatactctggagcatttggacctctctcataacatattttctttttgatatacctgaaagtctaagtcggctcagtcaactacaaacactgaatctgtcgggctgttctagacttaagagaatagagaaatgtatgggagaaaataattgtccaaagaagtctctagttgtgagtaactgcctgggtctggaaagatatcagtttgttgttcacactgatggagcaaatcgaagcaaccttgctcagctcaaggatgtgagttgcaaagaggtggagataagccgtcttgaaaaggtaatatctacaaaggaagcacagaacataggattgatggagaaaaaaaaagctccagaagttggcacttgtttggagtgcaggcggtgacgatgcatcttcgaaggatggagatttgttagcagagctagtgccaccacaaaatttgcagtactttgagctacatggttatagcagcgagtaccttcctgcttggttgacatctagcatattttcgcatctccctaatcttgtggaggttaccatggtggacattccgagttgcagcaatttaccatcagttggtgtactgcccaacctgcaaaggctgattcttagaagggtggctaaggtcacaagaattgacgctggctacttgagtggtggcagcaaagcagcattccgtcgactcatgcatgttaccctggatggtatggtaaacctgaaagagctggatacctacagtagtagtgacaatttcgtgttccccaccttagatgaattggtgataaacaaatgtcccaagttaaggtttggagattccccacctaagacccggatgcttgtgatttcagattgcgaccaattgatgatgtatccagagaagagagggaaacatgatattagttccagttgcaccacatctgctccagtaactgaagtggtgatcaaaaagctgcgaggtgcctctggataaattgaagtggagtttgctcgaaggcttggctcccctgcatagcttacatatcaggaattgcagtgagaagatcatctcaccagagattatgaagggccgcctattgtcgatccagttactgtctttctctcactgtgccagcatgacctatctaccagatcatgtggttcagg

SEQ ID NO: 21332 - DNA, 815 bp, Setaria italica
  Peptide Sequence Number=SeqID_87306
aaaaagaatggttacgtttctgttacatatcaggctagctccggcgctcataatcttattctctgacgaccctcctttcgtcaaaactgaagcggctcagcaaggagcaactgaagccatggtacaactccaggaggtcattggcaggtgcgcctgccttgccaaaaatgaagcgagctcctcggaactgtgcttcagcagggagctctccaactaggtctacaaaaaatctccccattagctggtgcatgatgcctcaacctcaccgttagtcgcttgctcttcgacaaggtcgctcgacatggctgacggtatcctgtgccgcttgaggacccgggatgtggcgagccttgcgttctggtacttcaggatgatgactctttcatcatccaaatcgaatctcaagttttcttcagtgcagctttccacaaggctgcacaagtgcttcaggttttcaacctccacaccattaaccttctttacctgcagttcagcaagcctttcataaccaacgttgatatcatccatgagaacctgagataagacaactagctgttcaccagccttcttgggaagttctcttagtgcccgttcacataatcggcgtggtgaggcattataccagtcttctccaaattcatggagataaggctgggttagcgggataaatacaaaaccagcaaatatatagtagcttggtagtttatcaaattgatggactggaactaaaggctgcaaaggtctaagtatgacactcaattcttgctctttaccatctcttaatgctttgagaacagctgtttctccaggcttct

SEQ ID NO: 21333 - DNA, 584 bp, Setaria italica
  Peptide Sequence Number=SeqID_87307
gtcggctacacggagttcgctatgaatccttggctctgcttggaaggcgtgaactttatgggattcctctaggttaattcacgcgaaattactttatgagacttagaaacgggtgaagatgacaactgaattggccggaacgaacgattctacgcaatcacaaaatttgaagaacatcttcagccgctacacttgaaaactttgggtaataaacccacatgacaccggatcgaaaacatagctcaaagatttcgctgccactgcacctgagagctgagattgtatatataatccatcttatatataatctataagctgaggaaggatagcttattggattgttattgtcatctaagacatatttgtttcagcttacagattattagttggattgtataatctaagttgggaaacaaacatgaccggttgtggtgattcctgaaccaaacgttagctacaaatgagcaagctcccttagcatgagcgatgcaaaggtttggtgtcaacgtaaacagagtccatatgacctatgtcctgtgtgtaacaaactgatggccgtatccgtacatcagctattacctagc

SEQ ID NO: 21334 - DNA, 523 bp, Setaria italica
  Peptide Sequence Number=SeqID_87308
cgtccttggagagaggtagggagatacatgcttatgcactacgaagaggatatctggaagacaattatacatccaatgctctggtggacatgtatgttaagtgtggtgcgttaatggtagctcgacttttgtttgaccggttgactaagaagaacctcatatcatggaccatcatgatagctggatatggcatgcatggtcatgggaaagatgctattgctctctttgaacagatgagaggcagtggtgttgagccagattcagcttctttcagtgccatattgtatgcttgctgccattcaggtcttagaaatgagggatggagattcttcaatgctatgcgaaatgaacacaaaatagagcccaaactgaagcactacgcctgcatcgttgacctgcttagccatactggaaatctgaaagaggcttttgagttcatcgagtcaatgccaattgaacctgactcaagcatctgggtctcattgctgcacggatgtagaattcacagggatgtcaagcttgc

SEQ ID NO: 21335 - DNA, 1377 bp, Setaria italica
  Peptide Sequence Number=SeqID_87309
cgaagcaagttacccagcttgcttgcgagtgtgagcagctagctagctagcagagtgatcgagcgttggtgagctgagctgggaatggcgcggcgtcagtggagcaacggtggcgtcgcggtggcggcagcggtgctcgccgtgctgtccgtgctctgctcggctcacccggtgccgggcggccacggcggcggcgggttcccgctgcagccgcacttctacgaccacagctgcccgcagatgcaggcgatcgtgggcgccatcgtggcgaaggcgcacgcggaggacccgcgcatggcggcgtccctgctgcggatgcacttccacgactgcttcgtgcagggttgcgacgcctccgtgctgctcgacgccgacggcagcggccggttcgtcaccgagaagcggtccaacccgaacaaggactcgctccgcgggtacgaggtcatcgacgagatcaaggccgccgtcgagcacgcgtgcccgcacgtcgtctcctgcgctgacatcgtcgccgtcgccgccagggactccgtcgtcctgacgggcggacccggctgggaggtgccgctggggaggagggactcgctgacggcgagcctgagcggctccaacaacctcatcccggctcccaacgactcgctcccgaccatcatcggcaagttcgccaaccaaggcctcgacgtcgtcgacctcgtcgccctctccggtggccacaccatcggcgactcccggtgcgtgagcttccggcagcggctgtacggacagaacaacaacgggcaggtggaccggacgctgaacccagcgtacgcggcggagctgagggggcggtgcccgcggtcaggcggcgaccagaacctgttcgctctggatcccgcgagccagtttcggttcgacaaccagtactaccacaacatcctcgccatgaacgggctgctcagctccgacgagatcctgctcacgcagggccgcgagaccatggagctcgtccaccgcttcgccgctaaccaggggctcttcttcgagcagttcgccaagtccatggtcaagatgggcaacatctcgccgctcacaggtcacgccggcgagatcagaatgaactgcaggagggtcaaccactaagggtcatccgtggtagctccatctttgcttttctgggtgtctcgtgtttcattctcgttttgccttcggtaaaaagtgtgcagaaacagattgcaattgtgttttattgctgttttcgggtggtatgttttcacatgtgtaatttgccattgttgtaccaagaaatcattcaataaatgccaattgtttgtgtcacttgtttcttgtgatggagtcttatgtatttagatgtgcatatttcagccaagaaaaaaaaaa

SEQ ID NO: 21336 - DNA, 229 bp, Setaria italica
  Peptide Sequence Number=SeqID_87310
taggtgccccagtctatgagatgtagccacaaaaatattgggtgcctccgtgcctgcgcctaacttggtagtgctatatcaagtagcataattgcagcactgatgtgaatgccgagtcgcagcttgtttaacaaatagattgtgaattgtcaaggtcaccatccacaagcattctgcaaatccatccacctgtagcaatattttaccaaaaagtaaacaagaatcccgg

SEQ ID NO: 21337 - DNA, 238 bp, Setaria italica
  Peptide Sequence Number=SeqID_87311
cgtgatggccagaacgaagatgaagatgtgtagctgttctaaggcgtgacgcgagagcaaggggacttttcccttgcttgaacagtggccaaaagctgcccctcctttgagcatcctcctgccgctggcagcgaaagtggaggcggccccgtagtgtgccgccgccgccgaggcatgcttgtcgttgttcccacctcggcacggcagccagtgctccatgaggctctcgtcgatgcag

SEQ ID NO: 21338 - DNA, 347 bp, Setaria italica
  Peptide Sequence Number=SeqID_87312
aaatcctgaagcatttctcttcttatctcaagatcgagagaaaaatttgatggcgactccagtttggtacatttgactggtgattggtctggaagtggatctgtttctggtttggaggtgacaatgtcactctcaaacattgagatggtctcatcattacttgctcctttttatgggataatgagttctggctcaactcagaaggaaataccgtctggtggcatcactcaccaagcacagctagataatatggattatactataccagatggagcaattgttgctataagggatcttaatcaacagatgtatgtatcagtcaaaaacactggaaatacctaccaagt

SEQ ID NO: 21339 - DNA, 963 bp, Setaria italica
  Peptide Sequence Number=SeqID_87313
acaagaaaggagaaagagttcctggccgaactggggattcagggacatgtatgccacccaaacacatcatatcttcttggatgctgcgtcgagaatggattatacctgatatttgaattctgcgcaaacggaactctagcatcggcattgcatgggaagagtgggaaaacccttgaatggcctttgaggtacaagattgcgattggcgttgcaaggggtttgcagtatctgcatatgttctgcaggcacaggatcatccatcgtgacatcaaggcctccaatgtgcttcttggtgatgactttgaacctcagatttcagattttggactagcaaagtggctccccaagcagtggactcatcactctatcatacccatagaaggcacatttgggtacttggcaccagaatatttcatgcatggcatcgttgatgagaagaccgacatattcgcttttggggttctgctgctggagattgtcactggaaggagacctattgactgctccaagcaaagccttctgcagtgggcaaagccactcctggaggctgggcaagcgactgaacttgccgacccgaacctcggcgacgactatgaccaggatcaactgaagaggatgattgccgttgcatcccgctgcattatgcgaccggcaatgtggcggccctcaatggccgaggttctgcatttcctgtctaccgatgattgtctgaaggaaccggagaaatggaacattccagaggacgaggtcgatgacatggatgattgcacattgttttctgaatcttgttctccatagttaatagcctcctgccctttttgtatttgctgctgctgctggcatgccttcttctgatggtgctcgtgcttaccttttatgttttctttttttggttttgaatcttagatgattggtatttatcatgtaatataggaaggagattttgggatagtaaaaaaaaaa

SEQ ID NO: 21340 - DNA, 367 bp, Setaria italica
  Peptide Sequence Number=SeqID_87314
ggcgcgagccaggcacttcctctcttcctcccgcaccacggcgcgcgtgcacacgagccggcgggtggatctatctcaaaaccctagccgtacgtggaacgggagacggcgagctgaggtggatgtagcggcgggaatgctacgggtgggcggcgaccggtccaggcggggcgagcagcaaccgccgcttccttcccccctctgctccctgttgactagctggtctccgctgctgagtacggcggcggcggcaactggagctgacgccgcgaggcgcacgcggaggcgggggcgagccgcttgcctagctcgtcacgcccggatacggaggcgcggcggtcacccacctctcttccgctcccttccc

SEQ ID NO: 21341 - DNA, 485 bp, Setaria italica
  Peptide Sequence Number=SeqID_87315
tgatactcctttttgccttaggactgtctttttattgcccctagcatcagtgtttaagtaaggttaaaacactgtagatacattcttttacattttgtccaccaaaagctgtatgcttcaggccctagctaacgaagaaattgtaagcgagttggaatctactgttgcataattaggcagtcagctcagtatcttggaccacagaatctcctgttagatgggctttggtaacaactaacaagtatacttgctgcttggccttaattctgaacagaagaatattaatccagcattagactttagagtgctttctgttcatcaagtccatgaaagctacatagatgaaattgctggtatcaatactgaattgcttgctcttaagtcttaacttgctcgttaaagaaaaaccataatatgcattacctcgaatttccaaaatttacttaaacttaaaatagtgatggggatatgtggcaggtaatagc

SEQ ID NO: 21342 - DNA, 244 bp, Setaria italica
  Peptide Sequence Number=SeqID_87316
ctggagcttgggcagaagttctatgtcttgggggcctcaatgggaggatactctgtttggggatgcctccagtatataccccacaggctcgcaggtgctgcgctagttgttccagttatcaactactggtggccttctttcccagctgaactatccaggcaagccttcaagaaactggtagtgccagagcagaggaccctgtggattgcacacaacgtaccttccttgctctacctgtggatga

SEQ ID NO: 21343 - DNA, 631 bp, Setaria italica
  Peptide Sequence Number=SeqID_87317
cccaaataaccccaatttgtttgattggatgtctttatccacctttttattcgaggcaaattatcggctcttgcagattgttgggttcataattggaggaacacctttaatcagaaatgctataattggagactctgcacctctgcgtgtcctgcaggaatccgctgaattgataggtggaggagcaattccatcggtgacattgataatgggagcaaaccttctcaacggagttcgaggtggggcaagagttcagccgtccgtgattgccggcgtcatagtggtcagatacatcctgctcccccttctcggcaccgggctggtcaagggagcggtccgcctcggcctcatccagccagaccctctgtaccagtttatcctccacctgcagtacgccgtgccgcccgcaatgaacatcgggactataatgcagctgttcggcgtgggggcgagcgagtgctccgtcatcttcgtgtgggtgtacgcgctcgcgtccgtcgccgtcactgtctggtccgccttcttcatgtggacgctatcgtcgtgatctgggggcatcggaacgcggcgaggccggaacgtcgtgggtgtctctccctgtatcgtcttgctggaaataaagcgcctctgt

SEQ ID NO: 21344 - DNA, 342 bp, Setaria italica
  Peptide Sequence Number=SeqID_87318
aacgccaggaaagatcttgacaaagtgagcaaccgcagttgcagaaagaacatgctcaaactgtttgactaattcttgtggggaaaattggtcaatctcagctccaagtacgcaaattgggcatttgacttctttgatatcatcaacagtaactaacgcggggtgcgacatcacaacagcctggatctcacgagctttagccaactcgacgactacctttgcaccccagcaatatcctgcagccccaatagtaggcatccccttctcctttagagcagcaataactggttttgcctcctcaaatgctttttccggatcgtgtgattgtaaccactgtaaagg

SEQ ID NO: 21345 - DNA, 604 bp, Setaria italica
  Peptide Sequence Number=SeqID_87319
gagataaatcaaacatttatcgactctttggtagacaccttgacgtacttcgtcgctgatgcctcggtgctctccttgcactcgtagtagaacgcggtcatggcgcagacctcaaacacctgcacggcggccatcaggatagtgtagagaaaccccaggagcaaccctgacgccatgttactaagggcgcacgtcttggctagattgtacacgggccagatggcggcagcgagcacgacagtcaccaagatgaaaaccacggcccgtaggagcttccccttcatcagccgccaggcccgcccgactgcgccggcgccgtggcaatcgggctcggcgactgccacgatgatgctcagggagcacacgaagaagaagtatacgaggaatacgaccgcgacgatggctagcagcgcgcctacgaagaccaaggcgaggtattgcttaatcacgaggacgaaggtgaggaggatcccagccatgaccgtgagaaacgcggtgtaggcgatctccagcgcgtagacgaaggcgagcgtcagtagggggcctttcagctgcgcctttgctttgccgaggagcgacgcgaaggtgtgcagctcgccggagt

SEQ ID NO: 21346 - DNA, 591 bp, Setaria italica
  Peptide Sequence Number=SeqID_87320
aagttgtagagccggccggcgtaggacgggcagtgcgccgtgccgagggtgtgcgcaccagagaggacgacgaggtccttaacatcgaggttcttggaaacgaaaatctttgtgagcagagggatgtctccgttggctggaggcagctcgtcggccgcctctgtggcgctggacaccttgccgtctcgcctcccgagcgcaaccggccaggatgggcccttggcaagcacgacggcgtcgcgggccatgagggtgaggacgtcggcgcaggagacggtgttggggcaggcggcctcgagcttggccttcaccctgtccacggaaccaaatccccggaggctcttgttcggcttggcgtccctctctgccaggttgccctcggtggagttgagaaggacagacgcatcacagcccctgacgaagcagtcgtggaaatggagtctgaggaggggaccggcgaggctgggcgcggcggagatgatcttctccatctcgtcgcgcacgatcgcctcggcgttcgggcatgtcttgctgtagtagccgacctccagctgggccgccgccggcgagctgccagccagaagcagcagt

SEQ ID NO: 21347 - DNA, 221 bp, Setaria italica
  Peptide Sequence Number=SeqID_87321
gagcttgatatgagctcagcaagccactgatcgcttgccactcgagagcgagcgaaagagagagagcgtatcacgagctagtagctacgcgacacagctagcagcccgccacagagtagtagcgcgtagcggggagagggacatgccggaggcgccggtcgccatgcgagagacggcggcggcggtgctgcccgaggcgcaccgcgaggcgctcgagtaca

SEQ ID NO: 21348 - DNA, 452 bp, Setaria italica
  Peptide Sequence Number=SeqID_87322
atatagttcggttgacgaatccatcgcattccatgtttatagaggccatgattggttggtttgatgcaggaggacatgaattgcttggtatgcgctttttaatcttctggaattatggtaacatctaatctttggtttttatctagtatttatgataacatctcgtttttgtatttttatcattttatgcaatgacacaatggtgtgcttgtgcccatggtaaggaaaatgaactaattttcctacctgtctgaggggatttgagtctctgtctacccaaacatatcctaagatgactgtttgcttgctattggattatgtggtggtttaatctggacatatcagatccttgataaattcgaaattttcttctccttgcctaatatttgtcatatttatgttatgctgctctctgctagaaagacatacttgattctatgtttggctcgggg

SEQ ID NO: 21349 - DNA, 1449 bp, Setaria italica
  misc_feature (1434)..(1449): n is a, c, g, or t
  Peptide Sequence Number=SeqID_87323
ttaatggcatgcatgcaaaaatcagctaatgtggtgaaacagttgaataatgtgtacagcccaagcacattttttggcaacttgctgcaacatatagttcggttgacgaatccatcgcattccatgtttatagaggccatgattggttggtttgatgcaggaggacatgaattgcttggtatgcgcttttttaatcttctggaattatgtgtgggacaggttgggttagcatgcttggactcattggtacacatactcataaagcatagcatggagaatacagtgaaaggtttgatgctaaacgccagggggatctaaccaagatggatgatcttctgggccctcctatgtctattcccctgatgggttggttatcatataagcaaatggtgaagatgttgcactcatcatgggggtcactagttgagaaattggctacaattggacaactgcagttggttcggactcttatatccttcaaactgagatcagcatgcaagatcaaagcaaacactataacctcggctgttgaggtcttggtgtcttcactttatatgcataaaagagtgtttgagagaggagatgaggatgaaactgtgagattctttctgcaaaatataaaagagaagcagaacttttgtggtttgttttcacctttccaagttatctatatctcagaggaccctccaatgttcttgaccagattgctgtccctcttttcaatatcacagttgtcaagatatgtgcttgatgttcatctaggcaatttgacaagcccattaaagaggtccacggctgatttctctgccgtgatcatagggcttggtacaatcttgcggcagtttgattctttctacatgacccagtatattcagttcatggttcagtacatacggacggcagaagctgcattcaatgccactactgaaacacccaagggagctactcattcttctgaggcgccaaaggcagtgttttggttgatgtccttatgcaagtacatggacgtctcaggggatgtagtcgagtcgtgcttgcccgcttctgctcttgctatcctccagtcatgaatcttctgttgctgtacacttgaacatagttaagcaaagcacagagatcaggatattagctcgcaaagttcaattttcttcgatatatatttttcctccttttcttttcatgtatacgagtcctgtaacattgacggcaaacaatgttctccattatgggaataaagatccataagctggaaaggagagtcgtgcctaatactcgatccaggaagtgttgttttcctagttttttttctcgttgatgcctaagaatctgcatcaaagtgatgtatagaaccggcactgctcctgatgctgcacaacgcatttgctcaatgctcgtgtttttagtttaaagtaaaaaaaaaaaaaaaaaaaaacnnnnnnnnnnnnnnnn

SEQ ID NO: 21350 - DNA, 542 bp, Setaria italica
  Peptide Sequence Number=SeqID_87324
atcgcaggctttctcgaaatctagcttaagaataatccccacttcttgtctcttcttagtttcatgcaagatctcatggagagccatgattccgttcattatattcctgcccttcatgaagggattttaatattagtttttcggctacattatccaacctcaatggcaaggtttttgtgatccacttgtaaatacaattcagcagacatataggcatgtactgttgtattttctcagcaccttgacctttaggtaaaagtgttagttggtatttgtatgatgcttggaatatgtgcattagcccatgcagtggtttctttgtgtgcctattggtaatcatcaatccctcttactattgaacaacatttctgtgttgatgttggcatgcataacgatcttgcatcttttgtaaacacaatacaacactgttcggagagagacatttcaagttatgactaggatctgtatccatggttcatgcatcttcataggctaaactgaatgaataggaatttgttgtctacatttttttttatgtatgg

SEQ ID NO: 21351 - DNA, 260 bp, Setaria italica
  Peptide Sequence Number=SeqID_87325
tccactttctttgtcaaatatgacacagcctcggcaataacaggagctgtttccactatttcatctattaaaaacagtagaggaaacagattaaccaaattgaattatgtgccaaccacaatgtaaacaaaattgaggcaatatgcggttgtgcattgtcctgtgtgcacatatttttaagctgctgcagaaggaaacaccaaattttaaaagcagttgacaaagttattataatccacctctaccaaatggagccgtaa

SEQ ID NO: 21352 - DNA, 1166 bp, Setaria italica
  Peptide Sequence Number=SeqID_87326
tttttttttgttatagatattatttgatattatttaggtaagggattcgattacagtatcaattgattacagaccatcacaaccaaacatatttaatgggattcgttaccttcagtaatcagattatattacatttgagccaaccaaacacttgcttctccttcagtagttccacatgttgtgcttgagaggaaaaatcttcaagcaccaacttcgctgtttaagtagtcgacaaacatcctctttgcgctatcagcatcagtcggcggtggtgggccactcaggctgtactgcccagccagcttgatgaaagttcgtcgcaggcttcggagctcaggcaggccaacagatctttgaagattgatagttggcaagtttggtccaatagaaatcttgttcatggcaagcccaagaccacaggattgtgcttcaacaactgcattcaccacctcctgtgttgctttgtccatctcatacagggaattagcctctgttgttcgcacctgaaatatcaagccattatgaaaacgcaatctgatatccaaagtaactgccaagatccaggaaaatgcaattatgaaaatgtaactgccaagatccaggaacaaaattaacagcatatgtccatttaaaactgccttctgtcacacgcaggaaaggaaatatggaaagcacttgatatcctaagttaattcacacgatggaagagaagctgccagtttcttagattattccattttcatacggccaacttcaataactatgatatatatcttgggctgaactagtcctgatatcgataccactgaacaaactagaaatattcgtccaatcacattatcatactgtgtaatagggaagttagtcaggcatgttcaatccagtagtagacgacaatagaaaatgttgaaaattgtcacttgtacacaatgcacaccattttgtgcagcaggttgctgtcacaccttctctaggcttagggtttatgcttgttacaggaaaccaaagtatacaacatgaccattcacatattctatgattccaacaaccaccgaacaggcaagatataagaagtaactgaatgtgcgctaatgatgttgatgttcaatataaccatattcactttttggggggaacgcgcaggagagttgcgcattctatttact

SEQ ID NO: 21353 - DNA, 749 bp, Setaria italica
  Peptide Sequence Number=SeqID_87327
gtccatctcatacagggaattagcctctgttgttcgcacagtctgagtggctattgtaggttggagaacttttacatctctagtttttgaatccactttctttgtcaaatatgacacagcctcggcaataacaggagctgtttccactatttcatctctagatggaaacaattcaaaaagaggggaatcccaacgattacggctatctggcttctcaaatctgctcacaagatcttcaaatatattactatcatatgctcgttcttctttctcctggcggttgctgttccattccctacaatggtccacttctgtatcacaaaaaagcacacaatatcttactccagatgcacgcgcaagacaccacagctcatatcggtaccccttaatattgttcaaagagtcgacaataattatgctgtcacgtgacacggacctgtcaacttctgatctaagaactcctctcaagtttttctcgacaaccatatctttgtagctatcattgcgtccaagatggagtgatgactcgtcaatgatacggacagtaaggtcagttgaggaggagcgcagcgcagcagcaaggcaagcagcagctgctgatttgccgctgcatggctgcccacacatcacaacgagtgccatggaagatgtagaaacctcgtcgccggccgtctaccactacccaccacagctggacgagcacgaatcggcggaggagagcaagagggagcggctgagctcggacggag

SEQ ID NO: 21354 - DNA, 536 bp, Setaria italica
  Peptide Sequence Number=SeqID_87328
tttacatctctagtttttgaatccactttctttgtcaaatatgacaccgcctcggcaataacaggagctgtttccactatttcatctctagatggaaacaattcaaaaagaggggaatcccaacgattacggctatctggcttctcaaatctcctcacaagatcttcaaatatattactatcatatgctcgttcttctttctcctggcggttgctgttccattcccacacaatatcttactccagatgcacgcgcaagacaccacagctcatatcggtaccccttaatattgttcaaagagtcgacaataattatgctgtcacgtgacacggacctgtcaacttctgatctaagaactcctctcaagtttttctcgacaaccatatctttgtagctatcattgcgtccaagatggagcgatgactcgtcaatgatacggacagtaaggtcggttgaggaggagcgcagcgcagcagcaaggcaagcagcagctgctgatttgccgctgcatggctgcccacacatcacaacgagtg

SEQ ID NO: 21355 - DNA, 970 bp, Setaria italica
  Peptide Sequence Number=SeqID_87329
tagtcggtagtcggtcggtcgcgggcggaccaggaggaggaggaggcggagcggcagcagccgagccaagccaccgccgccaccatgggtatctcgcgtgactcgatgcacaagcgccgggctaccggtgggaaacagaaggcctggaggaagaagcgaaagtatgagcttggccgccagcctgctaacaccaaactgtccagcaacaagacagtgaggagggtacgtgtccgtggaggaaatgtgaagtggagggctctccgacctaggaataactggtaactactcatggggaagtgaggctgttaacccgacaagacccgtatcctggatgttgtctacaatgcgtcaaacaatgagcttgttcgcacccagacccttgtgaagagtgctattgtgcaagttgatgctgccccattcaagcagtggtacctcactcactatggagtggacattggtaggaagaagaaggcccctgctgccaagaaggatgctgctgagggtcaagagggtgaggctgcagctgaggaaacaaagaagagtaaccatgtcacaaggaagcttgagaagcgcaaggtggggcgcaaccttgacccacacattgaggagcaatttggcagtggaaggttgttggcatgcattgcttctcgccctgggcagtgtggccgagctgatgggtacatccttgagggtaaagagctcgagttctacatgaagaaagactaccaagaagaagaagggcaagggtgctgcagcttagatgcatcttcttgctcgaagggcggcttatcttatcctttactctgggttttgttagtccacaagtatgttatgtcgtgttgcagacctgatgaacacctattttctgaaagtgaatcaactctagcttcaaagaactgagaattttcaccctgtcgtggttgtattctcgtggtgtttaggttcactgtttattgaacaaaaaaaaaaa

SEQ ID NO: 21356 - DNA, 787 bp, Setaria italica
  Peptide Sequence Number=SeqID_87330
cttgaatctttaatttgcctgtcttaaggtgcacgatcccatttacaaacaggatggaggccacactgcagaacaatccttgcatcatggtttgattacgtgccgctgcagccatacaccgctgggctcgcggcggtgcccactcatcctatggccgcagaagcatctaatttatgccagcatttctgaatcctataccgaaagtctctttagcggctctaaaagagcatactatgttgttgcttctccaatagtcccccatgttgagttcaccacaaaatgttgccgcatcagagaggaaaaatcttcaagcaccaacttcgcggtttaagtagtcgacaaacatcctctttgcgctatcagcatcagtcggcggtggtggaccactcaggctgtactgccctgccagcttgatgaaagttcgtcgcaggcttcggagctcaggcaggccaacagatctttgaagattgatagttggcaagtttggtccaatagaaatcttgttcatggcaagctcaagaccacaggattgtgcttcaacaactgcattcaccacctcctgtgttgctttgtccatctcatacagggaattaatgttgttcgcacctctagatggaaacaattcaaaaagaggggaatcccaacgattacgcctatctggcttctcaaatctcctcacaagatcttcaaatatattactatcatatgctcgttcttctttctcctggcggttgctgttccattccctacaatggtccacttctgtatcacaaaaaagcacacaata

SEQ ID NO: 21357 - DNA, 1490 bp, Setaria italica
  Peptide Sequence Number=SeqID_87331
tttgaatctggtttctgctcaatgtcttttacaaactgacaaaaacttagcatgcatttcacaaatattcttcctgtagcagtagtactaggggtgtttggataccctgctaaattttagcatctgtcacattggatgtttggatactaattaggagtattaaatatagtctaattacaaaactaattagtatcccaacatccgatgtgatcctgctaaagtttagcacctcgtatccaacaaccccttacgtgaaactaccgaaatatcgacgaccttacatgaaactgccgaaaaccggcatgccatcgacgaagaacacgaagttagcataacaaagacaacaacagcaagatcgaacaggcaggaggtgcctgcagctggtacaggttgcggcagctgagccaagcagcccggcgtctcgagtcacagcacttttattgccccggcagcgccaccgcaaccgcagagagcaggaggcgcgatgctgagctccagattgttgatggcgatgctgagctccaggctgttgaccgaagaggctgtttccaggccggaggccatggacgcgaacgacgtctcggcgtgagccattggtctctcgaaataattagttagttcactaacctgaatgttattgcctaaaatccctccaaagcctctatagcttggtatcgggacatcgccacggtcggtatgaattatctcctgagtgggagcaggcttagtggcactatttggagggcttggcacctgatcgtcactgaagtcggcgatgccgacgtcgaagaggctggcccggcgcttcttcttgccggggttggtctggcggaggaagtacttctgggcgtggctggccacctgcgtcgccgtcctggtggtcacgaagcccttggagatgcccctccagtcccccttgcccagctgcctcaggccgtccaggaatttcctgtgctcctcctcggtccatggaatccctttcttcctctcctgggccttgcggcggcggcgcttctgctgcctggacgccagctccagatcgtcggaggcgtacgccttgccgtcgccggcctccccaggcggcagcaccgggtcgatggagttgacggtgaggttgggcatgctggagatcttcctgagctcgaacccgttgccgaagtcatctagttcctcatcggcgacgcggcggacatccacgccgaacagcctgaagaccaccggcgccaccttcctcccgttctcctcctccggccggtccattccctccctcccgcagctcgcggttgtctgctgccttgtcgctgttgatggtgtcttgttggaagtggattggtcgttggatggggatgctttggaggccactgcagacggcactgcagcagaagaggccaacaggcaagagggagaagaggagattaaatactggtggtagttgctgctgcctctgcctcccctccggggcagggatcatcagccgcgcttatttatac

SEQ ID NO: 21358 - DNA, 820 bp, Setaria italica
  Peptide Sequence Number=SeqID_87332
gcgagacccaaccagcggagcggcggcgcgggcggaccaggaggaggaggaggcggagcggcagcagccgagccaagccaccgccgccaccatgggtatctcgcgtgactcgatgcacaagcgccgggctaccggtgggaaacagaaggcctggaggaagaagcgaaagtatgagcttggccgccagcctgctaacaccaaactgtccagcaacaagacagtgaggagggtacgtgtccgtggaggaaatgtgaagtggagggctctccgcctggatactggtaactactcatggggaagtgaggctgttacccgcaagacccgtatcctggatgttgtctacaatgcgtcaaacaatgagcttgttcgcacccagacccttgtgaagagtgctattgtgcaagttgatgctgccctattcaagcagtggtacctcactcactatggagtggacattggtaggaagaagaaggcccctgctgccaagaaggatgctgctgagggtcaagagggtgaggctgcagctgaggaaacaaagaagagtaaccatgtcacaaggaagcttgagaagcgcaaggtggggccttcttcttcctaccaatgtccactccatagtgagtgaggtaccactgcttgaatggggcagcatcaacttgcacaatagcactcttcacaagggtctgggtgcgaacaagctcaattgtttgacgcattgtagacaacatccaggatacgggtcttgcgggtaacagcctcacttccccatgagtagttaccagtatccaggcggagagccctccacttcacatttcctccacgg

SEQ ID NO: 21359 - DNA, 1027 bp, Setaria italica
  Peptide Sequence Number=SeqID_87333
cgaaccagaagagcggcggcgcgggcggaccaggaggaggcggagaaccagcagcggggaccaagtcaccgccgccaccatgggtatctcgcgtgactcgatgcacaagcgccgggccaccggtgggaagcagaaggcctggaggaagaagcgaaagtatgagctcggccgccagccagctaacaccaagttgtcaagcaacaagacggtgaggagggttcgtgtccgtggaggtaatgtgaagtggagggctctccgcctggatactggtaactactcatggggaagtgaggctgttacccgcaagacccgtatccttgatgtggtctacaatgcttcaaacaatgagctcgtgaggactcagaccctcgtgaagagcgccattgtgcaagttgatgctgccccattcaagctagttggttaccttgacacactatggagtggacatcggtaggaagaagaaggcacctgctgccaagaaggatggtgctgagggacaagagggtgaggctgcagctgaggaaaccaagaaagaagacaaaccaatagtaccaagaaggaagcttgagaagcgtaaggacggacgcgcacttgacccgcacatcgaggagcaatttggcagtggaaggcttttggcttgcattgcttcccgccctgggcagtgtggccgggctggatgggtacatccttgagggtaaggagcttgagttctacatgaagaagctccagaagaagaagggcaagggcgcagcagcttagaggcattctcatgcatgtttggaaggggtgacctatgaaatatttactctgggttttttttgttagttgtctcaagggcagagcatctatgtcgtatttgcagacctgatgagcacagtattttctaaaaatgaatcaactctagcgaagaactgagaattttcacctgccgtggttgtattctcgtaatatttaggttctatgttttgtttgtgctgcagcagtttctgtgtttagcagtttcgttttttataccaaaaaaaaaaaa

SEQ ID NO: 21360 - DNA, 1117 bp, Setaria italica
  misc_feature (1092)..(1092): n is a, c, g, or t
  Peptide Sequence Number=SeqID_87334
gacccaacccagcggagcggcggcgcgggcggaccaggaggaggaggaggcggagcggcagcagccgagccaagccaccgccgccaccatgggtatctcgcgtgactcgatgcacaagcgccgggctaccggtgggaaacagaaggcctggaggaagaagcgaaagtatgagcttggccgccagcctgctaacaccaaactgtccagcaacaagacagtgaggagggtacgtgtccgtggaggaaatgtgaagtggagggctctccgcctggatactggtaactactcatggggaagtgaggctgttacccgcaagacccgtatcctggatgttgtctacaatgcgtcaaacaatgagcttgttcgcacccagacccttgtgaagagtgctattgtgcaagttgatgctgccccattcaagcagtggtacctcactcactatggagtggacattggtaggaagaagaaggcccctgctgccaagaaggatgctgctgagggtcaagagggtgaggctgcagctgaggaaacaaagaagagtaaccatgtcacaaggaagcttgagaagcgcaaggtggggcgcaaccttgacccacacattgaggagcaatttggcagtggaaggttgttggcatgcattgcttctcgccctgggcagtgtggccgagctgatgggtacatccttgagggtaaagagctcgagttctacatgaagaagctccagaagaagaagggcaagggtgctgcagcttagatgcatcttcttgctcgaagggcggcttatcttatcctttactctgggttttgttagtccacaagtatgttatgtcgtgttgcagacctgatgaacacctattttctgaaagtgaatcaactctagcttcaaagaactgagaattttcaccctgtcgtggttgtattctcgtggtgtttaggttcactgtttattgacagtttgtgttcagcagttttggtttatctctcagatggctttctgaatggtgtatctcctgttcggtcttttgtggttgcgaacgtttggacgaaagcgtatccgccagacagtcacaagcttagaaaaaaaaactaagngacgccaaggcacacaggggatagg

SEQ ID NO: 21361 - DNA, 1045 bp, Setaria italica
  misc_feature (1)..(35): n is a, c, g, or t
  Peptide Sequence Number=SeqID_87335
nnnnnnnnnnnnnnnnnnnnnnnnnnnnnnnnnnnagtttgatggcccataatttaataagttatttctgtactagtgtcctctgcatgtttttcaccaacggcttctacaaaacccacttctttatcaatgaaatggacacaaaaacaattgggcctgtttgttcaaaaaaatataaattcaccactgtactttccatcaacatcttgctgaatatcaagctactatatgtccattacttattccacttgtatttattttagctggaactttttttgaacaagccagatggagtaaccctttacatcttgccaaccaacgcatcaaggatagatatccaatacttgtagtccagaggagaaccagaatcgttgattggtatgccattcacaaagaagtagggagtcccagtcacacctcgtgcacaaccgttcttgaaagatatccttgcagcttgatcagattgtgaatcgttgaagcctgctttgtatgcggccaaattggtttcgccaatgatggacacgacaaggtttttagttatttcatcaactactgtagctcttgatttcgtgtaggttggctggttataataaccttcctggtatttgaagaatttctcgagcagaggatacacgaatgatgggtttagcttgttcaccgtatgaattgaccggcaagcaatgaaggcatagctgtggtaaggtagcgggaagaggtgcacaacgacagacacgcgcgagccgtagtgctcgacggccttcttgagcgccggccacgcgtcgcggctgtcggggcagaccgggtcgaagaacgcctcaaccaccaccgtctcgccccacgccggcggcttcccgccgtacacgaacccgtccgtcctcgccgggatcgggatctgcgcgcggcagaccaagcacgcgcagcacccgatgatccccaggagcagaagagagacacgacggctggattccatctcacacagtcaccctccgtagcgtgcgacttggcctctcgcgtgtcaatttgctcaactagcacctctgctctg

SEQ ID NO: 21362 - DNA, 2044 bp, Setaria italica
  Peptide Sequence Number=SeqID_87336
ttccacacttccccctcctctccgaggcgccatgagaccgtcgacggtgaccggggcggtgctcgccaccgccgtgctactcctcgtcgccgtcagggatggccattgcgcgcaattgtgcatggattcttcgttcccaaggacgatcaacgggtccctctccttctgcggctacaacggcacctcctgctgcaacgccacagacgacgccgccgtccagaagcagttcgccgccatgaacatctccggcacgccgtgcggcgacatcgtcaagaacatcctctgcgctagatgcaacccgtacgccggcgagctgttcaccgtcacgacgacgtcgcggacggtgccgctgctgtgcagcaccaccggcgtgtcgagccggttgagcacgaagcccgcagcggcaacgacggactactgctcgcaggtgtgggacacctgcaaggacgtgcgcatcccggggtcgccgttccaggcccccaagggcggggcggcggcgccgaagctcaccgacttgtggcagtcggctggcgaattctgcagcgcgctgggcggcggcggcgccgccaagtcgccgtgcctcgacggcggcggcgcggcgttcaacgccacccgccccgcgctgccgctgaacggcatgtgcctggagcgcatcggcaacggctcgtacctcaacatggcggcgcacccggacgggtccaaccgggtgttcctgagcaaccaggccggcaaggtgttcctcgccaccgtgccggcgcagggctccggcaagacgctggggattgacgtggccagcccgttcctcgacatcaccgacgaggtccacttcgacaacgagttcggcctcatggggctcgccttccacccgggcttcgccaccaacggccgctttttcgtctcctacaactgcgacaagacgcagtcggcgtcgtgcgccgggcggtgcgcctgcaactccgacttcggctgcgacccggccaagctcggcgccgacaacggcgcgcagccgtgccagtaccagagcgtcatcgccgagtacaccgccaacgccacctccggcacgccggcgaaggcgacctcggcgaacccggtggaggtgaggaggatcatgacgctagggctgccgttcacgacgcaccacggcgggcagatcctcttcagccccgccgatggctacatgtacttcgccatgggcgacggcggcagcgtcggcgacccctggaacttcgcgcagaacaagaagacgctgctcggcaagatcctccggatcgacgtcaacactatgccaagtggcaacaccactgccggctggggaagctacagcattcccaaggacaacccctcctccactgactccagcttcgcgccggaggtcttcgccatcggcttcaagaacccatggcgatgcagcttcgactccggcaagccgtcctacatgtactgcgccgacgtcggccaggcggcgtacgaggaggtggacctgatcacgaagggcggcaactacgggtggcgcgtgttcgagggcccgctgccgtacacgcctctctccacccccggcggcaacacctccgccgcctccatcaacgccatcagccccgtcatgggctaccaccacaacgccgtcaacaacaacgtcggctccgcctccatcatcggcggctacgtctaccgctccaccgtcgacccgtgcctcaacggcaggtacctctacgccgacctctacgccaagtcgatgtgggccggcgcggagtcgccggagggcagcggcgtctacaacgtgaccgacctgaagttcagctgctccaagagctcgccgatcccctgcgacgtcgccgccgggagcgcgctgccgtcgctgggatacatcttctccttcggcgaggacaacgccagggacgtgtacctgctcaccagcaagggcgtgtaccgggtggtggaccccgcccagtgcggctacgcgtgccccgtcaagagctcgacgccgggcgcgtcgtcgtcgccgtcgcccggcgcggcgccgagctcggcggtcagggcgcgcgct

SEQ ID NO: 21363 - DNA, 430 bp, Setaria italica
  Peptide Sequence Number=SeqID_87337
tttgtttgttttgttttggttttttttaattggaaatgacatagcccaactgccactttttagattagtgaaaggaaaagtccaaaaaagactgctaattatttagaacaatgttttcaataaaacccagtacggattaacggaacgtaagagtaacgctcagttttcatgagaccctaatatttgcttcttgatggagctaactctggtgataagttcatcacggttctccttaaatatcagatatcttgatgtgaaccaaattgtgaagccaaggccaacaacttccatcacctgaggaaccagagggactgagtcaagtgcagaaaccacaattgatgatatccaaattgcaacaagagcagatgtgccatatacgagggcggaatatgatttgtcagagtccaactgcacaagaatagttcttaga

SEQ ID NO: 21364 - DNA, 342 bp, Setaria italica
  Peptide Sequence Number=SeqID_87338
tggcacatcaaagaaatgcttgaacagcaaggcgcactaagctgcaatgtgactgttgcaagagttgctttccaagaaataactgaggatgcaataaaaaaggctttaatggccccgagatatattgacatggacttggttaatgcttatcttgcacgccgttctcttgattatctgattgggtttggcatatcgccacttctgtggaggaagttgcctggttgccagtcagctggacgggtccaatctgctgctttggcccttgtatgtgatcgggaagctgaaatagaacagtttaagccacaagagtattggacagtacagactagtactttctactaa

SEQ ID NO: 21365 - DNA, 218 bp, Setaria italica
  Peptide Sequence Number=SeqID_87339
aaggatgcaagagcctctcccagtaggacgtgacaaagttcaacgaactgctagaccattgcttcagcctagcagccaactccacaggatacgattcttgaactgacagaaagtctgacacctttgacagggaggtgttcagcatgaccggggaacccgggggcggtggcacacaaacaaacgccgcagccatgaacagaaccagagcaagggggcaa

SEQ ID NO: 21366 - DNA, 459 bp, Setaria italica
  Peptide Sequence Number=SeqID_87340
ggtcaagattgagactgtacagcaggggcagcagctgttagcatctgaggatttttgctgcatagccatccattgaactaggctcaggcctggaaataatgcattttggacatctttcagagcaaagtcatcaccaagccacggcatcgctcttttgaaagcactctcaacctcattctcatcatctggcattccgggctgcttaggaagctttggcctgaaaaatggcggtgggcatatataaaatggtgtagcaactggctcaatctcccatatggaaacacgggtgcgcctctcagatgcagttaattcatcccaaccaacctgaaggtttcgccaatgagaattcttccaccggattggatccaagtcaccaatgcctgtgattgtgcccatatatcttcttacccctgaatcctctgtctacaaagagcattctgaatcgcattccgaagggac

SEQ ID NO: 21367 - DNA, 1168 bp, Setaria italica
  misc_feature (1157)..(1157): n is a, c, g, or t
  Peptide Sequence Number=SeqID_87341
gccgttggagttgttcttgctgctgttgcaagtgaatggcattctgctgcaacagctgggcttgctgttgctgtagaattgcagagttttgctgcagtggttggacctgctgctgttgcaatatagggtgctgctgctgctgttgttgagctaatgaggtaattgcagggtggtccacttttgaaccagcctgtaagttaggtaagccaatattttgggcctgcatactcaatctttttgctggatcttcattgacaccgccaatcccatcctgcatacccagtgcattagaggtcaagtattgagactgtacagcaggggcagcagctgttagcatctgaggattttgctgcatagccatccattgaactaggctcaggcctggaaataatgcattttggacatctttcagagcaaagtcatcaccaagccacggcatcgctcttttgaaagcactctcaacctcattctcatcatctggcattccgggctgcttaggaagctttggcctgaaaaatggcggtgggcatatataaatggtgtagcaactggcttctaattcttccctattattggtaaactacgggttgtcgtccttctcagatgcagttgattcatcccaaccaacctgaaggtttcgccaatgagaattcttccaccggattggatccaagtcaccaatgcctgtgattgtgcccatatatcttcttacccctgaatcctctgtctcaaagagcattctgaatcgcattccaagggacacttgtgtatatagagccttattgtattttgctaaagggatgacaaattctgatgggcttgcccttggattatagaaaatagtaaatgggctactatttgcagcggcatgggctgctgctgccagaattccaatgtgcatgctgtcacttgataaaactgatgatgacagagctggttggggtctgctagcatgccgaatgcctaagagaagctgagatttctcatcccttataaagagaactgaatcaccagctaagagccttttggtactgacgaagacactccaaccagttgtcaaaagatgcctctttggttgacctcgataaatgtgtcgaaaattttccatgaaatgtcatgaagatcctttcgcaatgagttcttgcgctggtggttgnatctaaagtct

SEQ ID NO: 21368 - DNA, 364 bp, Setaria italica
  Peptide Sequence Number=SeqID_87342
catcatgagcaccaccatcttcggcctggggaggggacgccgccgtccggcgggagctgtggacggagttccagcagctgctgaggggcatctgggcggtcccggtcaacctgcccttcaccagctacagccgctgcctcgccgcgagccggcgcgggcggcgcgccgtcgccggggtcatccaggagaggagggccaggctggagcgcggggagagctcgccgtccgacgacgtggtcacgctcatgctcgtggagggcctgcacgacgaggagatcatcgacaacgtcatgttcctcatggtcgccgcgcacgacaccaccgccgccctcctcaccttcctcatccggcagctcgagttcga

SEQ ID NO: 21369 - DNA, 202 bp, Setaria italica
  Peptide Sequence Number=SeqID_87343
acgagacagcaaaccaaacttggcatttcagataactaatagtctaggtccagcatatactgcttcactgctagtgctgaaactacaaggctccaaaggcatgtaacactagcaggaactatggcattatgtctacagaacagggtagaacttcgcacgcaaccaaacctgcatcaagacacaagacagacatcagtatcaa

SEQ ID NO: 21370 - DNA, 2537 bp, Setaria italica
  misc_feature (29)..(29): n is a, c, g, or t
  misc_feature (85)..(85): n is a, c, g, or t
  Peptide Sequence Number=SeqID_87344
accgttagcacacacgagcagagcattancttgcacgtgacggaagaaacagtagctttctgccgaggcagatgccaaggcatcngaaaaacctcaggtgacagtaccatgatgaaaaagcatctgcacaaatagtaactactcatcaaacaccacatgagcagcgtacatttaccgttagacgccaagtaaaatagatttgctgacaataatgctccctttaagtgagcctcacaagtacccaagaaatcatccacaacaccacatgtcactggatgtaattagctagccatgcacaacagaaaactgtcaaacaccagctcacaacagacaacatccgctaataaacttaccatagttaacctggtataattaggctctgagcaactgtttctagttctgacatcatgaactagtccatggcatagaaccattatcacataaaactaacacagaacctaatagcatctgctgataacagcataacacgagacagcaaaccaaacttggcatttcagataactaatagtctaggtccagcatatactgcttcactgctagtgctgaaactacaaggctccaaaggcatgtaacactagcaggaactatggcattatgtctacagaacagggtagaacttcgcacgcaaccaaacctcatcaggggttatatgcgttgcagggctccagagtctgactttctctcaggatcattcaagacttgaagaaaatcagaacccataaagtggtccatgaactgagtgggaatgaatgagaatgcgactgactgaaggatcgatgcgagatgcaatgcaggggcactatgtgaacctaagctgtgtggagatgcagcagatatggtatgctggatatgcaacaaggagaatgcatagtgaagttagtattggaacagaaggaagagataacagggacttcttgcatcttccaaccagcttcttccttaaaaaaactagaagaagccggcaaggagataatggtgttctactgctctttgcagagcaccaggaagccaggataattagtgtgggaaccagttggctagagcatagaaggaaataagtatgcaaggatatgcaagatgcatgaaatgcaggtaccctacaaatatttgacatctgattggggactaggatgcatgctggagatgggactgctgctttggcagagtgccactgtaagttcagaacatgtactatggatgctaatgatgcaatgctaaattctacacctaacaaaccaaggaagcatataggtgaatactatcaactgccatccaccccatccttaacctagaatccaccttcacaacaaccaacatggcagtttcacttttaactaactttctgagatccttcacctaggaactacacaaccatgatcctgaccatatcttacaaccaccaggtatttatgaccattaccctatacactactatgcaggaagaaaagctgtcagttgaagataacctatgtacacaggaaccacccttccatcctcctagtattcaacgatctgctatatccaactggagaatcctcctcagattctccgttgctatagcactagcagtttcattgtcattgaagaattcataccctgctcccccaactggggatgaaggagctgatttagcatgcggcctgacctccacatcatctgagcgctcaactggtggcagctcaagagaaatgctgcgcttctggcggagggagaatttggggatgggcagtgaactggggggtggtgagttggaaaatgctgggcccgcccacagctcagaccgggagggaggagatgtggaggggcttatggaaatgggtcgactgcgcttgccaccatgacgtggctgctgctgtttgggtgtcttgggctctggggatgagtaggtgcgggcaggtgggggtggtggagaagcgagaacacccatgcagccaccaccagagtggaaagaccggcagttcattccatggaagtcacgagagggaggtggtgatgagaagtgtggtcccgatgactttctacgggcaccagggtggcggtgatggtggttgcgctgctccgggaaaaccacaagagcctccatggacagttatgcttgcagtgatgatgtttcggtgggggattggctttccaatacacctgaggcagcttgcagcagcaggtcacccccagtccttccagatctacagccgaggagcagatcggtgccaccgcagaggacgtcgtctcctccacgctaatcccctccgctgcaatgcagatccggccacgagcacactgctcctcgaagcggaacaacggatctgagccggcgaatctcgccacttccggcgcgggaagtcccggtgaaacccaccgtctcggccgggaggaggcggcgcgtcaatccacgggagccaaagccggatccgggggtagccgccggagaggatactcgcggaaaggtgaggccttggggttgggcgaggagtgagagcccggaacgggggcggcgggatgggagcgccggagggggg

SEQ ID NO: 21371 - DNA, 549 bp, Setaria italica
  Peptide Sequence Number=SeqID_87345
cggttgggggcaactaaaaccggggatcgaacgccaacgaacgaggttgggatgaaaatcaccatggcttcgaccgtggaggtgagttcccaagattttggggaggggggggggggggagggggaggagatgtggagaggaggtggggttttgatcatgggggtgaaggccggttctttgacaatcgccgcgccgggattccacagtggagatgggagagcaaaattctttggtggaggggatgaacaagggaagcagaacaagcgtcgcatggatgagagaggtgagagaaatctgggaggagacgatctccatcacagattagctcgggaccaggacagagatccagccaaacaacagaggggtggttttcagcggggtgagagagaaggggtggtgatttgctttcgctgtaaccaagaaggacatcacagatcagaatgctcgaatcccctattatgctacaacagcaaggcatctggtcatatgtcacagagctgccccagagtgaaagtgaacaggggactcaagttgtgtggatttgggtta

SEQ ID NO: 21372 - DNA, 394 bp, Setaria italica
  Peptide Sequence Number=SeqID_87346
catttatgtggaagaatattaaaaaataaatgaattcagtaaactcatttgtgaactactccctccgtcctaaattatgggtcgttttgagttttctaagttcataccttttactgtgcatctagacatgatatatatcaaggtgcatagcaaaacctatatgaatctaaaagacccaaaacgactaataatttggacagtatatgttagtttagttgctggatacttgaagatgacggtaatacaacaatatatctcacagtagtataccttgtactcataggtttgcttcacagaatcaagaaatactgaatcatactcagaatctgcagttccactctctcttggacgaaagctgatcatcaggctacagtccttgcagtagcagaaacaa

SEQ ID NO: 21373 - DNA, 1788 bp, Setaria italica
  Peptide Sequence Number=SeqID_87347
ttttacgcagtataaatttggattaaaagaaacacatacagcgtaatcaagcaatgctagaaacacttcacgccttttcataagctcatctgggctctggcacagcagaatcacgcggcaagaacaacggctagacgacgacaggagcttgtggcctgttgccatcaacgaaaacagacagtatcgcaggtccgacaggcaggatttcctccaatgaagccaatagccagatacagatttccagccatcagcccatcaccaccgattctaagatatgtttgctttgtccaagaccagagcgtgagaagatgaaagtatcaccaaacatttcagcagtagaaaattaggacacatgacactagggtttatggtaacctgcgagggaaacttcagccctcatttcaactgggatgttacagtgagtggttgccacggtaagcagttcagtcatctcaggttctcaactaacattgagcatctctgcagatttgcggtgacaatccacggtgtatgcactagtagagttacagcagcaatgacgaacaacacctccttagtactcatgaagtcacaacagcagcgtcaacaaatagcaatcgccactctgtaatgggcgggcccttcccccttctccagacgtatataggaagaggctcctcattgttggagctgaatctgcgaagcgtctttagtgttactgccctttagagatggcacgagctcctcatttcttgagtagaaattgactatcttctggtccagtttaaaataatgttccatcttatccagaggtttcacatccagatcaatgaaatttgccttgtactcataggtttgcttcacagaatcaagaaatactgaatcatactcagaatctgcagttccactctctcttggacgaaagctgatcatcaggctacagtcctttgcagtagcagaaacaaggaagtccctgacaatcttcaagctcttgtccaacggaagagaatgcaaaagagtgtacttccgcaatagctctgcatcagttacatttttgcagaccaaacaaggctgcgaaattatgctgtagtacaaatgaatcgccccttcaatgtcatgatcgtccagcttttgggtgatcaacaatttaccaagtactccagatctaaaaattgcctctgacaggagctcaatgaagtcaggtagctctaggccactaaccttgctgagatcttgaagacacttgtctgtttcagcaggatgaacgttatctgctccacctcccatgccaccaaaaactaaagaaccattgacaaaaaaccctgaagttgttctgaggagttgagaaaaatgacttgatggcaatgcatatcctttcttttgacccagaaaatagatcaagaggattgtattcactaggcgtcgatatctcaccctgatgaaatttgaggtgctgatgcatcttatatcgtgttacttgtttcttgatggaattttcttttgatatatattctgatgacggcaaaaacccacatttggccttaatctccacagctatgcaactgttgcctctcggattaccagaaaataatgagtgatctggtattagaagagcagcatcggcagtgttatcaattgagctcgcattcactctccaagcaggacggctattaagaacattcttttcaacaagctccagaaaatccctagagacacatacacgaaccccaccatcaacatgattagcacccagatgtttgctcataacatgcattacataggcttgagctaagcagtcttgtttgacag

SEQ ID NO: 21374 - DNA, 695 bp, Setaria italica
  Peptide Sequence Number=SeqID_87348
ggtcggtacaaccgctaagtatttgttgcataaggattacattcgccacatgtttgactccagaatcttagatcaatcaacgaaaagctttaccacaccgaggtagcaaaactataacactacaagctcactagtacaaaaatttgacgatgggttctcttcactcctcagcccctgttactgactgaatatgcaactttcacaggtctgccttgcagttcagactgattcattgctacagctttctcaagcgactcatcatcttcaaaatcaacatggcagaagccacgagaactgccggttcttttatcaatggcaaatcgcatcgacgcaatcttcgatgacttgaagaaagctcgcaagtccttttctgtaacattccatgagagattgccaacatatgcggacaggcagcccacagacttctcagggtcagtttggaactctgccttccttttcttatttgagctagcagtaaccctgcatctttcaaccctcatatatctgttaccaattttgaatccatcaagctcaatagacttcactgcatcttcgtctgactcgaagcagacgaaggcgaggccgcggaagttgccggaatccgggaagcgagagagctgcaccgaccggagggggccgtagaactcgaacagcttccggatgtccacctcggtggtcgtgtagggcatgccgct

SEQ ID NO: 21375 - DNA, 619 bp, Setaria italica
  Peptide Sequence Number=SeqID_87349
cacatataatcaagctggacatgcatggtaatgatgatacacgagattattcgacaaatatatgtggcacatatatatgtataaggaggagcgactagcaagcaacatgtattcgaggatatgatctcaaatgggttgtggctctagtttggtatgtccttgaagtgaggcttagacatggtcggggtagggtcgtagcgcccgtagtcgtccatcttcacctgcttgagaattctctcgtggaccaccgccgccgcttcgtcatctccctgcagctgctgcatggattccgacgtctccatggattctgcgtcatctttgtttaccagcttcctatgccctcctgccatggaggacagcaagagcgaagcgaagacgacggcaacaagatagctggacttcctgggctccatggcgctcatggagcatgcaaccagctaacctgtcctgcgtttcctcagcttgaagagagagggaccgagagaaaagctagggaaggaagagcctgcagacgatatggcaggagatgagaggagcctgcctttccttggtttggacacaaaggaacctgcagatgtgagttgtccgcaggaacaaattaaaaggaggcatgcactag

SEQ ID NO: 21376 - DNA, 215 bp, Setaria italica
  Peptide Sequence Number=SeqID_87350
gcagccacattagagttagcaacccgataggcgatgatgtcctgcttgatgatgtcaagtagttgtcctgagttcagtgttttattgtcgaagacccgacggtagcgttcctcccataggttccaggcagtgtagatgagtacctgtaagtgcagttccctggaagatccccctgcgttccttttcttttactcaatgaaataagaataaggtgg

SEQ ID NO: 21377 - DNA, 1517 bp, Setaria italica
  Peptide Sequence Number=SeqID_87351
cgtcagcgtccgggacgcggaaaattgcggatcgggtgggggcgccgagcggcggcaagagcgggggagttggtggaggagagcagcaatcggaaggatgcactcctagtcagagtttgaagagccctggtgtggataatgggggtcgccctgtacctggaaatgcttgcaatctgggcaacggcggggtgaagagctccggattggaaggtgctgaaaatagcaggggcgctaacatcggtgtcgaaactggtgaggactgcaatttggggagctccaattgtgatggtagtgtgaaggatgctggcacacaggatttagggggtaccggtgatggaccagctcgtgaacctgaggttggaagcaatgtaggagtggagaagagcttttcccagggtttgaaggagtcttttgtggatcagactcgactaaagagcaatggttgttctgcttcagatctcaggttggaggacccagagagaaatgttgggttgggagattccgcttgtcacactgcaaaggagtgtggtacggatgatggggcggccaagaagagtaatgcagcagccaaaggttgcagtttggcaactcctggtaacaatggtaatggaatatattgccgcaaggggcggaaggcagtcgtgccatggagattccaggttgggtacaagcgatcattctccaaagcttttggctccgataatggatctcctgatcttccagtattcaggtttgatgacagttcaacacagtgcgctccagcaactagaagcagtgtgcggtattatgcaagtgctcattctggtgttagagtttcagctatgcgtgacttctctgtaaaaggtgaaaatgagactggttctggatataagaagaggaaaaccaataatgatgatcaggataaagcaatgccaaataatggaggtgtcatcgttagagaaagcatcatgcggtctctacaggatttccggttaatttatcgggatcttttggatgaagaagaagacaattcgagggaagaagtgcttaacgtgcgacctgatctacaggcttacagaattttcagggagcggttctccacagagtgtgatgataagaaatacattggcagtgtgcctggaatatatcctggtgatatctttcatttgagggtagagctttgtgttgttggtctccatcgcccacaccggttaggtattgatcataccaagaaccatgatgggaccagtgtcgctattagcattgtatcttatgcacaatcttctgacatcaagtataatctggatgtcttggtgtatactggttcggtggcagttacagtcaatcagaagatagagggtaccaacctggcacttaaaaagagtatggacactaatataccagtccgtgttattcatgggttcaccactgctaatggaaaaaagaagtttcctacttatatatatggcggtttataccatgttgagaagtactggagggagaaagagcatggagaccgttatgtatatatgttccga

SEQ ID NO: 21378 - DNA, 453 bp, Setaria italica
  Peptide Sequence Number=SeqID_87352
gaagccatgttgcctaagcagacaaaaccggagggcaacgatatgcaggtcattggacatgccaacatctagcccctcactgtgaatccgcgctgatctcctcgcggaaatggttgtctacgccaaggcgttcgagttcatccaccaggttcaccatggcagacacgctcatggctctgtcagcaccaaacatctggcgcacttcccccttgagttcatccgccctctctctcatccattcctccgacctctgcaagggtggagggagtgtaggtgacaaagaagtcaccccacacgcagggctcaaaaggccggccaacggcggcaatggcggccggtgcagctgttgtgtcgccggcggtctgctggttaactgaagccttgctcgcagccatgtatcagctgtatatgcctaatacatggacttggctgcaatgcttcactacttgtacg

SEQ ID NO: 21379 - DNA, 252 bp, Setaria italica
  Peptide Sequence Number=SeqID_87353
cgccgtcgactgagtccgtgcccggcgccgccaccatgcagaaggggtccgccggcctcgtcgccgccctcgtcgccgcggccgtcctcgccgccgccgccgcgtgatcgcaatcgcatacgccggttgttccatccgtcttgttcgtgcgtaggagtcgctacggattattgcgttgctccattttgcgatttgttgagcttattcttcctcttgattcatcacagcattccttgtgaataaaaatacgca

SEQ ID NO: 21380 - DNA, 536 bp, Setaria italica
  Peptide Sequence Number=SeqID_87354
ttggctcctgccgtcaaaggcactctgagtgttcttcaggcttgctcagcgaatgatgttcagaaagttgttgtggtttcatccactgctgctgtttatttcaatccgagttggccccaaggtagaatgaaagatgagagttgctggtcagacagaaatttatgcatgaagaacgaggactggtacagtgctgccaagacaattgctgaaacgacagcattggagtacagagagaagaatggactaactgttgttacagtttgcccttgtatcgttttaggtccactcctgcagccggtagtcaatgctacgagtgaattcctcatctacattataaaaggagggcctagcgtgatgaaaaacgtgccatggaacatagttgatgtccgtgatgtggctgatgctctgcttctggtatatgagaaagtggaatcatctgggagatacatctgcgcaccagattggatcaccacaaaaggcatggtgaacctgttgaagaaggcctaccctaactacaattatgtaaactgcgacgg

SEQ ID NO: 21381 - DNA, 457 bp, Setaria italica
  Peptide Sequence Number=SeqID_87355
tacatcagcagctgcaacattggcaatcattggaagcaaaatttttaattgctaacttcgatgttaaatcagattctaagtttgttttctattttttgttgttctgtactattatatacctcgccctcgtaaaatcatgctccggtacagtagtttccataacagcactgaaattcctttaccttgattgcaggagggcctagcgtgatgaaaaacgtgccatggaacatagttgatgtccgtgatgtggctgatgctctgcttctggtatatgagaaagtggaatcatctgggagatacatctgcgcaccagattggatcaccacaaaaggcatggtgaacctgttgaagaaggcctaccctaactacaattatgtaaactggtgactacgacatcccaattatattgattgaacttgaatgtctatagctcatcgaccttcacaattgcatcttt

SEQ ID NO: 21382 - DNA, 278 bp, Setaria italica
  Peptide Sequence Number=SeqID_87356
ctcggcaattgccatacatagaggatgaatttccccatctgttgttcttgggtcatcgttagaagaagaaaaaaaagaactactctacaagcattcatgtactcagattgtgtagcctccccttcccagttgagctggctcctcttcttggatgagcttcactctttggatgctaccaccagcagccccagtgcagcgatcagcacgtacttgagaactggtttctccgtcatggcaattgtaagccacccagcataaggcagatagctgtgtttgtg

SEQ ID NO: 21383 - DNA, 516 bp, Setaria italica
  Peptide Sequence Number=SeqID_87357
tagttaaagctgtttgctcattatcctcttgagcctttcttgtggtgtttctttcttttctgtctggggagttttaccagttactccagaagcacccttgcttagtttggctagtgctgctgatgtactgggaaggggtttcaatagttttgcacttctttcctgttccacagacaaagaagatgcaggatcactgtgaagtgcctcaagaatttgaccacctgacgacctgcaaggattagaacattataggcataataattcgcaggagcaaagaaacacaggtcacgaactccacagctgattgtagatgtatatgtgttaaatcttctccctgctcagcaacacatttaggaaatcataaaatgcatgcctatctacaaattgactttattttttacatcataggtaccatcatgaccatatcttcacctatcctattcctgacacagtcagctggagcctattatcctggtattctaaagctgactgtgtcaggaataggatacctatcct

SEQ ID NO: 21384 - DNA, 479 bp, Setaria italica
  Peptide Sequence Number=SeqID_87358
tctttttttaccccctaaaattccttggctatactttccattcgttcatcactgctatcatcactactgaagtccttgtcatcttcatcatcttcttcctcttcctcctcatcatcactgtttaggtcttcagattcctcatttccatcacctttatacgagtatccaacctgtgaatatgcacctttgatagcaggaggctgtgaggattggggtttctcaaagctaaaaggaagaacaacttttgcctccagctcttgcacaacatgctgcaaacccgtctcatcagaaactgcgagaagaaactaagtaaatcttcagttaaccagcaataggaattgagaaatagcaccctttctgtaataacttaggaaggagcagaatgtgagccaggacaacccctcaagtgatgtaaatggaagcaagacatgaaatttatacgacaacaacaatggaagagagaaaccaaaaaggttacc

SEQ ID NO: 21385 - DNA, 1207 bp, Setaria italica
  Peptide Sequence Number=SeqID_87359
accttcttgggcttctgctcctgctacggcttctgctataccgccgccttcttggtggagaacggctaagacttctactgcggctacgacgcctgtatcgacccacttctgcaagcttttcctgtttttgccgttcttgttctcgtttctttgcaatctcagcagctgtgtcctttcgaatttgcttgttaagctgtttgctcattatcctcttgagcctttcttgtggtgtttctttcttttctgtctggggagttttaccagttactccagaagcacccttgcttagtttggctagtgctgctgatgtactgttaacagaaatgacatcttagtaatgattgaaaacactgagataatgttccattaacagagacattctcaagttaagacagcatttcatgcccattaaatagagtgaagggttctagacagatacgggatatcaattgcaagcaacttggatgcacagacagctgctctctcttcataacattgtaatcatgatgacaaacctgggaaggggtttcaatagttttgcacttctttcctgttccacagacaaagaagatgcaggatcactgtgaagtgcctcaagaatttgaccacctgacgacctgcaaggattagaacattataggcataataattcgcaggagcaaagaaacacaggtcacgaactccacagctgattgtagatgtatatgtgttaaatcttctccctgctcagcaacacatttaggaaatcataaaatgcatgcctatctacaaattgactttattttttacatcataggtaccatcatgaccatatcttcacctatcctattcctgacacagtcagctttagaataccaggataataggctccagcagagaaaagttcgcccaacatatatttgcaaatattaaaagttgagtttcccgaccggctaggtatgtcaatccgtattggagatgaaggcggagagatccctgaaacttttggttcactgctgtcatctgaacctccaaattcagtaatgtattcaacccttggagccttcggcttgcttcgataactgctttcagcatgtatgccacgtccatgacgtctagaataggatggtgaacgagatcttgaccgtgaccttgatcttctgcccctcgaatatgcttcatatgatgggcttctcctttgttccctataaggatcacgataagatac

SEQ ID NO: 21386 - DNA, 607 bp, Setaria italica
  Peptide Sequence Number=SeqID_87360
ctgcagtcatctcttaatcatttcaccgcattattctgtgcagaaatgtaagttgcaagaggacaagtggaaataatcaaaatcaaattaagagcaggcatgtttctcaaagctaaaaggaagaacaacttttgcctccagctcttgcacaacatgctgcaaacccgtctcatcagaaactgcgagaagaaactaagtaaatcttcagttaaccagcaataggaattgagaaatagcaccctttctgtaataacttaggaaggagcagaatgtgagccaggacaacccctcaagtgatgtaaatggaagcaagacatgaaatttatacgacaacaacaatggaagagagaaaccaaaaaggtaccgacatcctctacgacgatgcttaatcaaatcccgataacgttcaaaattaacaaattcctctaactcttcctcttcttcagacttttcttggactcgaaaaggacgagagcttggatctcggatgaagtcaagtagagcacgaccatcaaatctgtcaatcaaaacatcttgctttccattccaagatatccaaacctgatgctcatcggctgcctggtacagcgcgtcgtcgcggtggacg

SEQ ID NO: 21387 - DNA, 1564 bp, Setaria italica
  Peptide Sequence Number=SeqID_87361
ttttttttgttttaacaaaaccttctcaagctcaagaagacaacaaattaaccgttctccacgttcaacaaactgcactgaagtttatttagctgataacagcacaacaccggaatccattcatacagttatactctcaaccataataatactaatcgagcgaacaaggaagcttctcatgactaggatatgggaagggaaaaggctaataactaaaatatggtaaaactacaatggaaagcacttcatcagcagagctgagatgatttcagtgtcttgacctgcttctgtaccttggtgagcgagagggtgaccgtgaactggagcgcgagcgagaacggtaccttcttgggcttctgctcctgctacggcttctgctataccgccgccttcttggtggagaacggctaagacttctactgcggctacgacgcctgtatcgacccacttctgcaagcttttcctgtttttgccgttcttgttctcgtttctttgcaatctcagcagctgtgtcctttcgaatttgcttgttaagctgtttgctcattatcctcttgagcctttcttgtggtgtttctttcttttctgtctggggagttttaccagttactccagaagcacccttgcttagtttggctagtgctgctgatgtactgggaaggggtttcaatagttttgcacttctttcctgttccacagacaaagaagatgcaggatcactgtgaagtgcctcaagaatttgaccacctgacgaccggctaggtatgtcaatccgtattggagatgaaggcggagagatccctgaaacttttggttcactgctgtcatctgaacctccaaattcagtaatgtattcaacccttggagccttcggcttgcttcgataactgctttcagcatgtatgccacgtccatgacgtctagaataggatggtgaacgagatcttgaccgtgaccttgatcttctgcccctcgaatatgcttcatatgatgggcttctcctttgttccctataaggatcacgataagatacccttcccacagaacgtgctgcctcccgctctttttccctctcaatttgagaagcttttcttctttctctacggctcaattttttaatggaaggatcgcctttaataatttctttctgccgcttctcttcctctttggcctttttgtccatgtaaacaagccagttatatctttttaccccaaattccttggctatactttccattcgttcatcactgctatcatcactactgaagtccttgtcatcttcatcatcttcttcctcttcctcctcatcatcactgtttaggtcttcagattcctcatttccatcacctttatacgagtatccaacctgtgaatatgcacctttgatagcaggaggctgtgaggattggggtttctcaaagctaaaaggaagaacaacttttgcctccagctcttgcacaacatgctgcaaacccgtctcatcagaaaatcctctacgacgatgcttaatcaaatcccgaaccagcaataggaattgagaaatagctctaactcttcctcttct

SEQ ID NO: 21388 - DNA, 843 bp, Setaria italica
  Peptide Sequence Number=SeqID_87362
atcaatattttgaatgcatgataaattatccgcttgaataccttgtatttgctatgttgttggctgctagaacaccatctagttgttggtgaaaggaagccatattttgagaaaattctacattggtctgtttgcacatttcatcacaaatgacattatgacaaattgcatgatcaacaacattcatcctaacaagcaaagatggagtaaatttgcagatttgggatggctaagcctaaaagttatttatatttctaacactctaaacctggctgatttctcttctgttacatctgcacatgaacctttttttctccttgttgtttaatatagttcggtaagaccctccactactatttcccaaggaaaatggaactattactaggaagttattagaatggacttcaaaaaatattttacgttgtctacgggtgaacatgtaattgcctaattgccattctgttcatgtttacctaaaaataatatgtttagttaaattacctaagttaataaacttgacactgttttatgcagatatgcatgtcattgctaatatctgttggtcgtgtgatttgctaagttcgtagcaagattagcttgcaatgctccatgctgcataaatgaactgactcgcaaatagataaattatttatttttcctttatgctgaatgttagagaggtaaaccagccttagataatgaggaacataacctgataactggacctagctaatgtttatttttaccatttggtatgacttgtaccgtagctgttatgaaatgctgcaaggtttagttagcctttattttatcaagaatagaactaagtaaagttaaactaaa

SEQ ID NO: 21389 - DNA, 175 bp, Setaria italica
  Peptide Sequence Number=SeqID_87363
gggggcgtcggcggccacgagtgccacggccaacggaggccctccacggcctccagctccgcgaagtccatcggaatcgggccccgatcggggtggcgggcaccgcggtggagtggacactagggtttgccctttgccgccgtcgtcttccaggcctccagggtgctgccttttt

SEQ ID NO: 21390 - DNA, 399 bp, Setaria italica
  Peptide Sequence Number=SeqID_87364
gccgcgctgagaaggtcttgaagaacctatcacgggtcgagagcaacaagcagttgatggaggactctgtggtgagctccgcagttgtggagctcggtaagatcctcgatgaagctcaggagctcgttaagaagtgccaggtgaagaggaatatcatatgtgtttactggacagcgggcaagctgtctaggaaactgagccggatgaaccagagtatatcggatagaaactcggacttaatgcatgctataatgtgtgctataatgtgctcaccaactcaacgcggtcaccatcctccggtccctgagcccgttcgtgtaccatcatctgcccctgatggtgagatgaacaatcatcacaagcagattgccgacattgcggaccagatcaaggcgagga

SEQ ID NO: 21391 - DNA, 686 bp, Setaria italica
  misc_feature (669)..(686): n is a, c, g, or t
  Peptide Sequence Number=SeqID_87365
caaggtgtcgacgacttagctaaatacagcagcatccaaatgcagatctatgagtaccgaggagagattgaacttggtaggcgcatccgaaagctcccagaggagtcacttaatcatgttgtggagataattacaactagaaactggcaagtcagagttctaatcgaataaccatgaacttgggagaactggatgatgcgactttatggaggctgtattaccacgtggagtatgtactaaaagaaaacaagaaatgattctcaaatctcaatgcttcatggccatagcgtccagcacggattcttagctgaatatcccgtggaagccctacccacaaggccacaactcggaggagcacttgcatgatcgttctgaccgggtgcagtactttggaatccccatgttttgcagcattcgcattggcgaatcagcttgtatgtaggcggtagcagcatctgtatgtgcgcatgggcatatgtgctatcagtgagggatgtagcatcaaaacagcatcacgaatagcgtgcagagattacggggaaaaaaagtagtccctagatttagagaaacttgtgttgtaaccacatgggctgtggtggcaaatgaagtttttttcatgccagattggcatctgttatggaaaagcgtcactgcaaattttacatctannnnnnnnnnnnnnnnnn

SEQ ID NO: 21392 - DNA, 2103 bp, Setaria italica
  Peptide Sequence Number=SeqID_87366
cacacccgtaacaagtgttgcgtgccggcacccagtgcctgcctaactgtagctaactaatagctcttccactgggcgccctgaggctgcttctcctctgacggagcaggaggtgggggagcaatggcggctgaggatgggagagaggagaagaggggcgcggaagcggcggtcgcgaggaaggcgaagaagcagggagggttcaggactatgcccttcatcctagccaacgacttctgcgaccggcttgcctccgtgggtttcacctcgaacctcatcacgtacctcacccttcagatgcacctgccgctcgtccacgcctccaacatcatcaccaactacaacggcacggcgaacctcaccccgctcgtcggcggcctcatcgccgactccttcgccggccgcttctggaccatcacgttcggctccttcgtctaccagctcggcatggtctgcctcaccctctccgccgcgctcccctcgctgcatccgccgccctgcgccaagcacgccgccgactgccagcgcgcgtcctcctaccagatcgccgtgctctacctgtcgctgctctgcacgtccatcggcaccgggggcacgcgcccctgcaccgtggcgttcggcgccgaccagctcgagctgaacgcgcaagggcgccggggcgccaggcccatgtggagcttcttcaacctctacttcttcaccgtcgagctcgccaagctcacggccgtgaccgccgtggtgtacgtccaggagaacgtcgggtggggttgggggctcggcgtgcccaccatcgccatgctcgccgccgtgattgccttcgtgtccgggtactcgctctacgtcaggatgccgccggcgggtagccccatggtccgtctggcgcaggtcgccaccgccgcgttcaagaagcggaaagccaccgtgccggacccgagcctcctgtacgaggacaaggagctcgatgccggcatctccaccaccggccgccttcttcacaccgaccagctaaagttcttcgacaaggcggctatagtgacggacggcgacgtgctgccgtccggcgagccgaagctgtggcggctctcgacggtgcaccgtgtcgaggagctcaagtcgatcatccgcatcctgccgatctgcgccgccggcatcatcctggtgacatcgtcgtcgcacaaccacagcttcgccattcagcaggcgcgcaccatggaccgcgacctcacgccgcacttcaagatcccgccagcgtccatgctcatcttcaccaacctcgccatgctgctgacactggccttctacgaccgcgtgctcgtccgagtgctccgccgcttcaccggccgccccaacggcatcacccacctccagcgaacgggcgtcggcttgaccatcgccatgctgtcgaacgcggtggccgccgtcgtcgagcgacagcgcaggtccgtggctgccgcaagcgggctgctcgacgatcccaaggccaccctgccgatgagcgtcttctggctggtgccgcagttcaccatccacggcatcgccaacgccttcatggacgtcggtcggatggagttcctgtacgaccaggcgccggagagcatgaggagcacggcggcggcgctctactggctgaccttctcgatcgggagctacctcggcacgctgctggtgaccatcgtgcacgccaagacgcggcggagcgggcagtggctcccggacaacctcaaccgaggtaagctggacaactactactggctcgtcgtctctctggaggtggtcaacctcgtctacttcttcgtctgcgtcaagtactacacctttaagccgttggagacggtcggaggagaggaggaggtcgagctctaccatggcagtggcaatggcaccgatggcgccaagaagcagggtggaagcttcaagtagcttggtggttgcttcgaccatgatccccaactagaagacttgtgctgggatgaaataatggtatttagataacctttttgtcatattaccataatcttaccgattctaagaactttaccagtagcacactgtgtaaggtaattgttcgagaaaatgcaggagtatctacttatttaaaaaaaa

SEQ ID NO: 21393 - DNA, 591 bp, Setaria italica
  Peptide Sequence Number=SeqID_87367
tctttgtgcttgaatggtttcaacacactcatcaagggggagattgagaaaatcaagttgatatgaaccttgatttaattgtgatgagcgtttgacaaatattgaaatggctttgatggcattttgggattcatgaagctcttgtgtctttttcttgactcttcggttgtgttaagtttttgtctcttctttgggaacctagagttttttgttcggagcttgcatgatcctttttcatatcaagttgccttgtgtttccttttatttggcttttgggcacttgaatgagttctcttttgctttcaaatcatcttttgtcaatgcacttatcaaggaggagattgagagaccaagttgacatgtgtcttggtctatttgtgatgagtgattaactagatgatttgaggctttaccggttgagtccatattccatatgcacttgattatgctaacggctaaccagatgtgtgagttgtgttgcggtgtttgtataaaacatatcttgtgtgttgtgtatcttggcttgtgatgtgcaggtgtaggatgcgacatggcggtcgatggcatgaggtgaaggtcaagcgaaaggtt

SEQ ID NO: 21394 - DNA, 572 bp, Setaria italica
  Peptide Sequence Number=SeqID_87368
tgattttctttcatcttggaaagctaccaaaatacaggaaaaaacacaattgacttcagtgttgactcaattccaaagagtagcaagaaattcaactttgacaacctggatgatttcggacttgatggagcctttgacaaattaccatcttttaaaatgggcatgtctgatctggatttctctagtcctcttaagaaaaaaggtgaagcacagcagttcaaatggtgatgatctttctgaagggaaaaaaggaaactgaaaaaggacatttttctccttctcctttgatttcaatgagctgggaaagtttagtcttgatgctaagctaggaattaaggaaaagactatgagtaaaggtaccggtaaagttgaccctgtctctttagagggtaacaaggatacacaaagaggccttttggccaagggcactgctattcttgaagataacaatagtaaggacaaacaaacacaggatgtttgtgcatcaagacccttatccggcaaatcatgagattgtaaagaacgccagtcgactggcttcaaatgttaatgctgccgcttcatctgacaag

SEQ ID NO: 21395 - DNA, 2178 bp, Setaria italica
  Peptide Sequence Number=SeqID_87369
agaataacatggcaataattttgcttcagaatagatctgaatggtctgaatggccaactggcatgatacgttcgtagtacacgtgtgccgcaacaattacatgaaactcgcagattatatatgtacatcgtacagacaagtagtacacggcatcagctctatatattcggagtatttatttagctgcgtgatataacggtcataagtcatagaacacgaccaaggggcgacgcccgaacctgggaccaaactcaccacgctcgagggggtgctccggacccagcttcgttcagcctgtcgagcagggtgttgaaatccatcggctgcccgctctcggccatcctctgggtcacgttcagcacctgctccctaggatatcccattgttatggccttctcgatcatttctccatagggatggccacgcatcatatgcgaccctggatggctcatgccaccaccacctgggggcatctgtggtgtctggactgctggagggccgctgggcaggtagccgtaacctgcaccgtagccttgcggattgctctgtggtgcgtattgtgcaggtccaccggcatatgaccctttgcttggaggtggcccataggagccctgacttgaaggtgggagctggtgcctttgcatgctgtgctgtggcggtggctgagacggtggaatgccaggtcctccgtatgaatatggtgcttcagatcggctcacacctgacggagcagcagtgttgtattgcccttgcatagccacatggccaggcatagtttcaggggcggggttcaagggctgctcgggtggataatgagggtaattcggtgggggttgaggaggtctcatctgagtttgcacaggtgggtgctgaggttgcattgcctgtggaggaagctgtgggttagattgctgtggttgcactgatggtggagggtattgttgagaactagattggggctgctgcactggttgtggaggaaactgctgcacattagataactggggctgctgtgcaggtggaggaaaagtctgcgagaaagtctgctgtggctgagccaccggtggaggagttggctgggaggattgctggtgccactgctgctggtaaggagggtaagactgcggctgcgtttgatttccagcctgaagcggttgagatgaagcatggaccggaacatcttgagctgggggtcgtgctggtaagtactgcacctctggttgcaattgctgcccctgtgtgtcctggatacctggagcttggcgctgtgggtagtagacgatggcttggctaagaacatagcggtcctgctgtggcacaggaggggcaggggctgattgttgcgcaggtagatccttgtactgttggactgcttcagaagctctaggtgcaagtgatgtctggttcacctgatgtggcaaaacaagggccaactgctggcctgatgtatcaggcttttcttcaagcttcttgggctcaggaatagatggtgttggtgcatcttccttctttttagatgtatcttgtgtaagttgaaatttggccaattccttctgagcttcagctaactcctgtttgtccctaagaatttggacagacctgtgtacttcatgtagatgcttctcaagagacttcagcctatgatcagtcacatcacgaagcacatcgcttcgaagttcacctatggacctctcaagcttatagcaatagatctccaattgtgaaagccgactagtgattccctcaagagatcgtagcaaattatcagcatactttttcatgcatttctcaacagcagaaagtacatcctccttgctataactttcttgttcataagctttcacaaacggtcgccccaatctgctttcatgaaaatccttatcggccggatcggggcgcttgggctcggatgtggcagcgaagtcgtcgtaggagcagagcacgtcgtcggcgccgaagtcgaagctgcgggagccgcctccgcccccggagccgcggcccgaggggtcgccggagccggacatcgcggggctagggttttgcccggccggcgggggtgagcggcggcttgcttggaggagaagggaaaggggaggggttcgggtggtggtttcgcagagaaaggggaaggaaggtgaggaggaggaagagagattagtgtgaagaagggtgacgtct

SEQ ID NO: 21396 - DNA, 218 bp, Setaria italica
  Peptide Sequence Number=SeqID_87370
ggggtcggctggcgtcgtgggcgtgggcgtcgccggcgccgccgtggggccctgctgcgccgacgccgtggcggcggccacgccgagcaccacgagcacgcgcacgagcctccgcatggcctgcatggtgatcgctaccgctagctagcgactgcctaagtgcagtgtgcacccgacgcgacgcgatcgcaagcaatgcagtggagctcgatgatcaa

SEQ ID NO: 21397 - DNA, 252 bp, Setaria italica
  Peptide Sequence Number=SeqID_87371
gaggctcgccaccgacgtcatcggacaggcggcgttcggcgcggactttggcctgtcgggaaagccgccggtgcctggcgacgaagattcgaagggtgccgacgacggcggagctgcggcgaaggcgtcgtcggagttcataaacatgcacatccactcgaccacgtcgctcaagatggacctgtcggggtctctctccaccatcgtcggcatgttcctgcccttcctgcagaagccgttgcggcaggtgct

SEQ ID NO: 21398 - DNA, 164 bp, Setaria italica
  Peptide Sequence Number=SeqID_87372
ccaagtcagcgaaggagacggtggagtcggactccaccggcatgctctcgaagcagagctgaatcatttggcaaggaaatccttcatgctctcggggaagatgatgccagggcgggatgccatcaagctcgctggggaggatttagtgaccgacagtcccaccg

SEQ ID NO: 21399 - DNA, 720 bp, Setaria italica
  Peptide Sequence Number=SeqID_87373
aacaattctgagaggttgttatctttgtattgcatttgccagagaaagagcccatctcaagcacaggtaagccagtagaaatgaatgaagatgaccacatggacttccccatcccaagatgcttagctgtagaagagatccccaatgtagtcaatcgcttcagagttgctgcaagaaatgctatggatgctggtacgttgataattgacaaaagagaaaaataaaggcaattaaataaataataagccaactattactatgttcacagtatcataatggacaaaataactggcttctgcagaaaaataaaggtaattcaagttgcagttgatctctctaagataggttcttgatttgcttgctaacaaacattagatattctatttttgtggtgtaccgtctgaaacatgtacggacctgacatgatcaacataataacattgtatcaactgcaggttttgacggggttgaaatccatggttcgcatggcttcctccttgagcaattcatgaaagatagcgtcaatgatcgtactgacaagtatggaggcagcctacagaaccgctgtcgctttgcccttgaggtagtagaagccgtggtggctgaggttgggtccgaccgtgtagggatccgcctctctccttatgccaactaccttggctgccatgactcagacccagatgccggtgggtcgtcgtacatggctacaaggaactgaac

SEQ ID NO: 21400 - DNA, 433 bp, Setaria italica
  Peptide Sequence Number=SeqID_87374
aaactttatgaaaccttactttgcctctgatagtctctgctgtatctaagtgtcatcctatcaggagatgttgtgatcaacactaaaagcaaggcgctcctggttcctcttgaagagtggtagcagaggagcaaggagagcaatcatggagtctatacctcttctgagtccttgtgaaactggaaggttcaggttttcgcacagaattgtgctggcacctttaacaagaaacagatcatatggcaatcttccacaatcacatgccatgctgtactactcacagagggctacagagggaggtcttctgattgcggaagccacaggggtgtcatctgatgctcaagggatgagttaattctgcacaccccagggataatggaccaaggagcaaagttgaggcctggaagcctgttgtggatgccgtgcatgcgaa

SEQ ID NO: 21401 - DNA, 1091 bp, Setaria italica
  misc_feature (1071)..(1091): n is a, c, g, or t
  Peptide Sequence Number=SeqID_87375
taaggaacttaccccaatacccaaagaatgcttagctgtagaagagatccccaatgtagtcaatcgcttcagagttgctgcaagaaatgctatggatgctggttttgacggggttgaaatccatggttcgcattgcttcctccttgagcaattcatgaaagatagcgtcaatgatcgtactgacaagtatggaggcagcctacagaaccgctgtcgctttgcccttgaggtagtagaagccgtggtggctgaggttgggtccgaccgtgtagggatccgcctctctccttatgccaactaccttggctgccatgactcagacccagatgcgttgggtgtctacatggctcaggaactgaacaaacgtagcatcctgtactgcagtgcagtggaacctgagatggtcacggtggatggcaagatgcaaatcccacacaggttgcatgaaatgaggaaggccttcaatggaatgtttatggttggtggagggtatgacagggaggaggggaacagagttgtggctgatggatacgctgacatggtcgtatatggtcgcttgttcttggcgaatcctgacctgccaaggcgattccatctgaatgctcctctgaataggtacgaccgatcaacattctataccaatgatcctgttgttggctacacggattacccgtttcttgaggactgtgaattgatgataaatgaagaaaagttacaggtttgaactaagtttaggtatttcaacacatgaattgatgattcggtcacacctgtattaaatggtaatatgctacagaatgaacaatggttctctatgtattgttgccatctgtggactgcgggggtcctgaaacttgaaaatcacagattgcatcaaacaaaaaacacgttgagttggtggcgtttggaagttaggtggtgggaagccatctaaatcatgcttatctccaacttctgatggtaatagtttgtcatcatatacacttacgttgtcatggcttcgttgtgtgtgttgtaagcatgatttcagatactctggaaagtctgatcatatatctgaccgaaaacctnnnnnnnnnnnnnnnnnnnnn

SEQ ID NO: 21402 - DNA, 737 bp, Setaria italica
  misc_feature (165)..(165): n is a, c, g, or t
  Peptide Sequence Number=SeqID_87376
ggatagagatcctcatttcaagtggctgtttctaggatgtcttggcttctatccatctaccataagttgagacttcagtgcacattaagcaaaagagcacttccttctgcccacatgtctcaaagcagcatcaaagaccatatgagctgaagggaaatcagcaancttgcaaaaggccttaatcaccaagtcaaaagaagttatatttggaactatttcattctgtagcatctcatccaaaagaggcatggccttattaaccattccccgttcacagaaggacttgatcaagctattgtaggtcatcacattaggagaaattcccttatccttcatttcactcattagtttaatgatttcatccgaattgtgtttttcttcaaatccccgaatcaataaattgtatgtccttgtgcttggattacaacctttcttttccatgtccctaagaaccttaatagccaaagaggtctttccatgcctacaatagccatgaataaaggtgtcgtatatgactgaatcaggggaaatatctttcactatcatctcgagtaatttcttctttgcttcatcaaacctaccttctttgcacaatgcacttatcagaatagaataagtaattcgatcaggaagacatctttgtctgctcgaagaatcactagttacagcaaggaatgaattccctagtcggccaagagccacatttccttcttgccacatcccatcaacaattgccc

SEQ ID NO: 21403 - DNA, 1186 bp, Setaria italica
  misc_feature (33)..(33): n is a, c, g, or t
  Peptide Sequence Number=SeqID_87377
gttgttttagcacatacaataaccttcatttanacacgcgatcaggtagaccagaaagagtggccctgagaggtttgaaatttgatgtgtagacatcaacatctccatacttttcgatagctttctcttcagtaaggccaacttgtccaattggcggttgagaaaacacagcagatggcacagccctgtagtctggtttggtaggttcatttccaaaaatggtcctggctattgccccagcttccattaatgcaactggcgtcaggtttagcctattagtgacatcccccacagcccagattgaatcaactgagctgcgagaatactcgtcaaccagaatagcaccatgcttgtccattttgaccccaacatcttccagtcccaaattctttgtgtttgcctttcgacctgttgcaaacataacatgtgagaacccactgatagtttctttgtttgtcttcagagtcagcaaaccgtcatctgatttaattactgcttgaggagtttgttctatatgaaatttgacacccctcaaagacatctgttcggcaacaaaatccctgatctcctcatcaaagcctctcagtacttcttttgccggataaaaacatgaacatcactcttcaagccattgaaaataccagcaaactccaaagcaatatatccacctcccactattgcaatcttctcaggtctggaaggcaaatccaatgctgcatcagaatcaatggcatgctctattcctggtatgtttggcttggacggtcggccaccaacagctaaaagtatgtttttggcagtgtaaagcttgccatccacactgacagtatgtgggtcaacaatctttccacggccttcaattatagtaacacccgattttttcaatgtatttgtctgaagtccgacaagtcgttgcaactccaaattcttgttggttatcagagttctccagtcatgctttggatcagtctcatacatccacccaaagccacggctctcttcaaactcatgagaatacttggatgcatacaccaacagtttcttcggaacacagccacgaagcacacatgtgccaccgactccacgagggtgttggacgcgacggtggcgaacggcatctcacacacggcggcgcgggcgccgtagagggccggaggcgacgcgcgacgcccgcatgccccccgct

SEQ ID NO: 21404 - DNA, 284 bp, Setaria italica
  Peptide Sequence Number=SeqID_87378
cggagccgcccgcgccggcggctccgcccatgctgccgcccttgtgccctgtgaccatcctcctgtgatgcttcatctccaccgtcctcacctcgtgcccaagcccaagagtatccaagcctcctgctggggctctggatcttcaggtccttcttgccatgcaattcttcttgtatctggagatgaggcctgagacgatgccctgcggatactccggcgcttccctcagctgcaaggatgaggaggaagatgagggataatgcaaggatgcctttctccatctt

SEQ ID NO: 21405 - DNA, 191 bp, Setaria italica
  Peptide Sequence Number=SeqID_87379
ttgttcagcccaattgttacaagaaacgtgtttactaagttacatttctcttgtttctatattaaagcaatagctttcttttccccatttttcaaggatagtgttctgaaggccgggtcttgagaagctgaagacttgatgaatgggttagaaattaagctcaaggtttcaacatgtatcttgtaccaata

SEQ ID NO: 21406 - DNA, 240 bp, Setaria italica
  Peptide Sequence Number=SeqID_87380
cacctccccgtcggtttgatttgctttcatccgctctgcactagcacaccattctctgcatgctcttatcctggcaaatacagcttctcgaaatgattgtcgtgcttagtgcttacccacacaaggccacagagtttggataatgcatgcagatgaacgcagtggtcaacgctaatacgaatctcgtatcaagttacatgcagaatcaacggccagaatccaaaacagaaacatggccag

SEQ ID NO: 21407 - DNA, 623 bp, Setaria italica
  Peptide Sequence Number=SeqID_87381
gacgacgacgaggccagaaaggtgcagctgagccggaaccgcgtcgtcgttcaggtcctcgagatgggcatcatcgtgcactcggtggtgatcggcctgggcatgggcgcgtcccagagcgtgtgcacgatccgccctctggtggccgccatgtgcttccaccagctgttcgaggggatggggctcggcggctgcatcctgcaggcggagtacggcctgaagatgaagtccgggctggtgttcttcttctcgacgacgaccccgttcggcatcgcgctggggctcgcgctcaccagggtgtaccgggagaacagccccacggcgctcatcgtggtgggcatcctcaacgccgcctccgcggggctgctccactacatggcgctcgtggagctcctggcggcggacttcatggggcccaagctccagggcagcgtcaggctccagctcctctccttcgccgccgtcctcctcggcgccggcggcatgtccgtcatggcaaagtgggcgtgatgaattgaagtactcgtgctcgtgcagagcgctatcagcagctttgtttattttgcatggatgatgcaactaggctagcttagcttagctgtcggtgttcgcgcgcgtctcac

SEQ ID NO: 21408 - DNA, 765 bp, Setaria italica
  Peptide Sequence Number=SeqID_87382
cacagagggagggatggagggtgacggttcagtggtatggatggaagaaactgggaaaggaggcggtatggagatagagagggagttcctgcagctgatggactatatcccttcatgcccactctgtcaatgtgcagctgcctggaaagaagattctggtgacgtactactaccttactccttccaatttcccattaaaccatcgcttcagattgagttagggtgttaaacattgtacatgaaatgtatttttcattatgcgcattgttcagcataaacttgctcacattcagagaagtttgacttgatgaatctaaaagtttcaagtagggagggagtacttcatagttgacagccaaatcgaacttgcaatatttcacatgaaaatttggaatgcaaagcttatttttgagagaggagaaaagttaatgctgtatgacaaagctgtggcagtctcagttcaggccagacttcatgagttatgaccagggttttactaaattttagcaacctacatcctaggtgttattcaaatttctggtttcctttagcttacatctatggtgtaaggtgcaggttagatcaaattgtgcagaaactttttgatttgcctacacgggaaggtccttgataatgtctctggaaatgctgtttattataatggatagagaatgtttcacacctttactacatgtttctttataggtacctttgttacagaacataacaaagactgagtgttcattctttatcacacaaactttt

SEQ ID NO: 21409 - DNA, 185 bp, Setaria italica
  Peptide Sequence Number=SeqID_87383
agatagaaccatcgagtaaacaggttcccatcatcttgtggaccagcttcctgaagataactcagtagtatttgttgcacaatatccaatgctggcacctcagatggtgcggcagatttcttactaaccgaggcagcagttcttttgccattctctttagtttgtaactggcaatacgactgtaa

SEQ ID NO: 21410 - DNA, 710 bp, Setaria italica
  misc_feature (672)..(710): n is a, c, g, or t
  Peptide Sequence Number=SeqID_87384
aagtaacaagggacaatgaaatgggttagggaatatgcaattagaacggttaacacagttgatgctgtgttagttgatgagaagcttgcatttgagatagatgggccaacacacttctccaggaatttaggtacacctttaggccatacagcatttaaacgtcgctacattactacttctgggtggaagttagtttcctcttgacaattacagtgggacgagctccaaggtgagtttgagcaattggaatatttgaggaggatattagacatagaggctgaataaatgccacagttgggcaatagagattgagcaaaaaggcttctggaaaggacaactacacggacctccctagaagtccaggccattttcctgcacgtttttgtgaacctgtacgtgagcttcggaaacttcaagttagcacaaaattaaggtgtgccactgagctgtagggagttttaagttagctgagcattagtgataagaaatacagtttgaagtaaactgtaccgtgctaattttgagagatactttgtactgaagactgaaagcattgcttaaagtcaattcttgaacattgtaacatatgtatatcgtactatgaacaatgcaatgaacaatgaagtctctatagatgagccgttatgctgaacaaaaaactaaaaaaaaaannnnnnnnnnnnnnnnnnnnnnnnnnnnnnnnnnnnnnn

SEQ ID NO: 21411 - DNA, 344 bp, Setaria italica
  Peptide Sequence Number=SeqID_87385
taacaagtgcgatctggctgagagcagggctgttgaaactgcagtagcacaggtcaaactttcaattaaaagagatagttcactgttgtatattttgtaacatcagcaatgcatatcagtgcaggcttttgctgatgagataggcattccattcctggaaacaagtgctaaggaatccatcaacgtggaggaagctttcttggcgatgtctgcagcgatcaagaaaagcaaagctgggaatcaggcagccttggagaggaaaccctccaatctagttcagatgaaaggtcagccaattcagcagcagcaacagcagcagaagagcagatgctgttcgacatgaa

SEQ ID NO: 21412 - DNA, 715 bp, Setaria italica
  misc_feature (659)..(715): n is a, c, g, or t
  Peptide Sequence Number=SeqID_87386
tgagatggatgggaagaccattaagctgcagatttgggacacagcagggcaggagcgattcagaacaattacaagcagctactaccgtggagctcatgggataattatcgtttacgacatcacggacgtggagagcttcaacaatgtcaagcagtggttgagcgagattgacagatacgccaacgacagtgtatgcaagcttctcgtgggcaacaagtgcgatctggctgagagcagggctgttgaaactgcagtagcacaggcttttgctgatgagataggcattccattcctggaaacaagtgctaaggaatccatcaacgtggaggaagctttcttggcgatgtctgcagcgatcaagaaaagcaaagctgggaatcaggcagccttggagaggaaaccctccaatctagttcagatgaaaggtcagccaattcagcagcagcaacagcagcagaagagcagatgctgttcgacatgaaggcacaacgaccctgtcttggtttcttacaggaatcaggaagatggtgtatctgctatatgtgtttctctgcctgatcttttatcatcagacacttacagagttggaaagtgtactaggaagaaactcgagatatttaggtgctgcaaacatatatcgtaatccgagtcagaaactnnnnnnnnnnnnnnnnnnnnnnnnnnnnnnnnnnnnnnnnnnnnnnnnnnnnnnnnn

SEQ ID NO: 21413 - DNA, 847 bp, Setaria italica
  Peptide Sequence Number=SeqID_87387
cggagaagcaggcccttgcgcaggggcccggcgggatcgagggctacgggcaggccttcgtcgtctccgaggaccagaagctggactgggccgacatgctcttcctctccacgctgccgcccgagtaccgctccctcaacttctggccttcccgccccgccactttcggcggctcgctccagcgctacgccgcggaggtgcagcgggtggccgccggcctgctccgagccatggccaggaacctgggcgtggcggacacggaggagatgacgaggatcgccgccgcgcagggcatgcggatcaactactacccgccgtgcccgcaggcgcacgacaaggtgctgggcctgtcgccgcactccgacgccgtcgggctcacgctgctgctgcaggcgagccccgtggccggcctgcagatcaggcgggagggcgcctggatcccggtggagccgctgccgggggccctgatcgccaacgtcggcgacgtcatcgaggtgctcaccaacggcaggtacaagagcatcgagcacagggcggtggtcaacgcgcgccacgagcggatctccgtcgccgccttccacaccgccatgttcggcggcacgtacgggccgctggaggagatcatcgtcggacaaggcgaggcgccgcgctacaggaccgtcggcgtcgaggactacgtaaagctcgtgctgtccagcaagctcgagggaaagaacatcatggacgccatgaagatcaacaatgctccttgacaaacacctaccatgcccttggatcctttttcttttctagttgtgatgatatatagctccatttctgaataatcctaatgggaattactgttagt

SEQ ID NO: 21414 - DNA, 1708 bp, Setaria italica
  Peptide Sequence Number=SeqID_87388
atttgctactctgttccttatatagtgccctataccactgttctctcggactgtagatatcttcgcctctacatgtacaattacttgcgtaaattacttcataaaaaaagttgccctgtgcgcgccagcactagctgaagcttatgaaagaaccagcaatggtctcatctcatggtctggccatgctgctggactgctgtgcgctgcagttgcaggtcctctgttcctttatccacactccaaatttcttagctgcaccgcccgtcttgtgatctttttgcgctgttgaggttttattcactgcatcggcgtcgaactctgctgcaagcttcaatggcgtgtttcagaggtaacacttcattgagggattggtattctgcagacagttcctatgatcttctaaatagttgtaccatctggaatcactgcatttttaagcaccacagttatcccagaacgaatataaaatccttccgctggcctgtccgcttcttgcacattatctgagttcataatgacaacattctttccgattcgagcatttttgtcaataatacagttccttattatagtattttctccaacaccaactggaacttttccatcagacagttcagaacatctctcagcttcagtttggtagtaatctgcccccatcatcatggtgtccttaagctgcaccccttgttctaatcttgagcggataccaatgacagagtgctcaacactgcactctgttagaaagcaaccatgtgaaactatagagttcaaaaccttgcaattttctaccctggttggaggtaaaaatctaggagatgtgaaaataggcttcacaggatcgtaaaaatagaagttgggagtctgatcagtgagagcaaggtttgcttcaaagaaagactttattgttccaatatcttcccagtaaccatcaaacaaataagcctgcacatcatagtcttttgcagccatcggaataacttctgagccaaaatcattagctgtaggataatggcctctcagaagctttcggagaacatctgccttgaatacatatattcccattgaagccatgtatttgtatgtatctgcaagctctggggataacccaaacaagtccatatccacttgcattgatttcaaactttcacccttgggcttttcaagaaaatcagtaatgcgaccattcctgtcggccttcatcaatccaaaatcagaagctcgactctcatccataggaacacaagcaactgaaatatcagcaccagagtcaacatgcttctgcacaaagtccatgtaatccatcctgtacagatgatcaccagacagaatcagtatgttttctatacatttcagccttgcatcctcaaaaagccagaggaactgcctgacagcatcagctgttccctggaaccatttctttccggattccccggctgtctgggtagctgccagcacctctacggacccaccactgaacccaactccctcaccaaagttgtatgtccgcgcgatgtggcggttgagcgactgggagttgaattgggtgaggacatatatcttgtttatcttgctgttgatgcagttgctcatcgggatgtcaatcagcctgtagcatcccccaacgggcaccgcgggcttggccctggtccgcgtgagcgggaagaggcgcgtgccggcgccgccaccgaggatgatggacgccaccgtg

SEQ ID NO: 21415 - DNA, 263 bp, Setaria italica
  Peptide Sequence Number=SeqID_87389
tttgccatgaacgggttgccacgagcaccgcgtgggcaccggcactcgtaccctccagcaatgtttgtacacacgccgaaacacttccccgggagcgcgcactcgtcaatatcttggcatccgccgtcaccggcaaggtaggggttgccggcgtacccgtcctgacactggcacacatatccagtccggtagttgtcggtgacgttgcggcaggtgctgtggctgctgcggcacgcgctcctcgccgcgtcaacgggacacga

SEQ ID NO: 21416 - DNA, 944 bp, Setaria italica
  misc_feature (1)..(50): n is a, c, g, or t
  Peptide Sequence Number=SeqID_87390
nnnnnnnnnnnnnnnnnnnnnnnnnnnnnnnnnnnnnnnnnnnnnnnnnnccttttattccaagtaaagttcttggcagttaattatagtatattacaaataaattggtggaattcacggattcttcaaactggagtggtggaactttacgagtattcccatccattatttttttgtctgatgaaaaacaatggccattaatttttcagtccacaattcatcgcagatctttttttctaagatttcggtctgtcacgtcagtaggtcagcgcccttgcagcagccacatgtcattgtattaacctccatccacgcaaccaacgtggccgcatctttgttttgacttcactgctgtattttacttgctcgctagcttatttcttcttttttcatgctatataataggcgagaaataaatcccaagggcaaaaagggaaaccattttcagattcttttcccccggtcggaagtcggaaccttcccccaagttcccacgcctctgtttttacccttctaaaaactttacaccaaggttaaaaaaagggtagtaccagctaaggttagccaagggtaaaaataaaagagcaagaaaagaaaaaacgctaatccactggcgggccggtcagccggccggccggggcccgtcatcagacggccggcatggtctcgtggcgcagggccgcgagatccgagggcccgcaagcgtcgtcgccgaacgcgaataggccggcgtcgaagccgtcgtcgtcccacgccgccgccgcggcggccgcggcggccgcctccggcgagtagccgccgaagcctccgtctatctcgtcctcgaacccccagatctggccgtcgagcccggcggccacgtccggctcctccccggccgcgccgccggcgtcctccgacgaagaggaggccccccgccggcgggagcccgagctcgtcgtccg

SEQ ID NO: 21417 - DNA, 605 bp, Setaria italica
  misc_feature (569)..(605): n is a, c, g, or t
  Peptide Sequence Number=SeqID_87391
gcagcaactacagcagcagcagcaccaatcagcagcagcagcagttacaacagcaacaacaccttcaacagcagcagcaattaaccaccaccagcctcagtgtgagtagcaacagcagcttaatcagcagcaaatggccatgtcagcaaatcagaatgcacaactagcacagcagttcaatcaggtcccatcaatgagcgcatacggcatgcggatgccgcctgtgaaagtagaagccttccacgaactggtgagtggggactcgtcgctgaagcaggataacgatccaaacaagctcacttccccaaaataacagacctcttgttgcatataacatgagggaacacacatggcctgtgcaggtgcggtgtacaaagggattagcgtttgcgatttgttgttgctctccgtttattatttccggcacgaacctcacctacatcgcccagcttgattgcatacagcaacaaggcaggccggtgcactgtagatgtaaggtatttggctagtttattgttcttacatacagctcaatgcaaaaggactaatactagtttcgcatcgtcatnnnnnnnnnnnnnnnnnnnnnnnnnnnnnnnnnnnnn

SEQ ID NO: 21418 - DNA, 279 bp, Setaria italica
  Peptide Sequence Number=SeqID_87392
gtccccaattgcgttgcacaagcctccatagtagagagtggtgcaatcagccatagtgcaagccagcttcaagtgatttcctacattgtttagattttggccagggttcgcaacacaccactgtggtggaagatatggtacatctctagcgttcttcagaaccgggctgcctagtccaagattcagtgggtatttggcctgcccatcaaatgagaaaattccccagtgtcgctcaaaattaccaggcagtatgctcttttgctcttcatcaagtaggct

SEQ ID NO: 21419 - DNA, 519 bp, Setaria italica
  Peptide Sequence Number=SeqID_87393
ccgccaggcccatgtcgcggctcccggagcacggcgggagcacgccgccgcacagcccggcgttcccggccagctcgtccgggttgatcgatcgcaggacgccgttccccggcacgggacctgttaaattgttgtacgcgaggttgagcgtctccagcgccggtgagctcccgaagttctccgggatgccgccggtcagggagttgctcgacagatcgaggatggccatcgcgggcatcttggcgagcgccttcggtatctcgccggtgagccggttgtgcctgaggttgagcttgaccagcctctggcacgacgccaggctggacggtatcgtgccagcaagccggttgttggacaggtccagcgcggccagtgcggggcagtcctggaactggtcggggagctcgccggagatgatgttgtccgacgccaggaagctctgcaaggtcgggatcgtgaagaggctcgacggcagcgagtactggaggtggttgtgagaaacgtcgatgaacgacagcg

SEQ ID NO: 21420 - DNA, 337 bp, Setaria italica
  Peptide Sequence Number=SeqID_87394
aaagcattgcggatcagctgatgtaagtttactggaatactccttgaggcaaaggcttgtaccctgaataaatttgcacattgatgggaaatcacgcgcgcaccaaaaccggacggagcattttcgctgctgctacagatggctgtgagtacaccgccatcgcgcctccccaccgtcttcgacgccgcgctaagccgacgaagaacggcgcgagcaccagccacccgccagcctgccatgcccgatgatcgccacgggcctccgcgccgccgccgccgccgccgccgcctatcgagtgagaaagggagaaggaaggtcacaagaggatgaggacggg

SEQ ID NO: 21421 - DNA, 371 bp, Setaria italica
  Peptide Sequence Number=SeqID_87395
aaagttcaaattaattcttatataaaagacatctggctgcaccagaaagagaaacacacatcctttagtatggctgttcctttcttattatccttacaaaatatatagtcataaccatataaagcaacatgagacaagtgaattacagcattgcggatcagctgatgtaagtttactggaatactccttgaggcaaaggcttgtaccctgaataaatttgcacattgagacctgcactaatgcaacatagttaagattagctaaaaatatttctgaacaaagacgcatactaaggccctgtttggcacggctccactcctaaactccagcaactctatcaaaaaattcagccaaacaccccaactccaaaa

SEQ ID NO: 21422 - DNA, 966 bp, Setaria italica
  Peptide Sequence Number=SeqID_87396
ttacctacttagacgggacccaaccttgggctaacctcgatgagccgatgtggcataaagctgccgctcctttctggttagcttcttgtagttgctcaccctgagtttggcaatctttgcctcttcctcggctgtagcttctctaaccaccactgtcaatctgcacctgggtcgcaccatgacaccacacctccccttggcatggtaagacagcctcttcaggtaaagtccctttcccacaaaggcctcctctgcagtttgaaaggttacaggaaagtacttagtttataacaaatataggggatggcacatgctttgttaaaaaccttaccaacaatgagcttatcaggatccaatccgtggttgtgggctgcatttgcgcgagcagaatggatcacctggtaaacagttttagcagcccttttaactgtcacttgcagctgcaacaaggcatcttccacacgcatacctcggaccagctttgctactagattcaccttctttgggctctaaaacagccaaaaagcttcagaaaatcagagataaaaacatctcttaatgatatatattacagcaaaagcaacatgcagtgtatcaattgatgaaatttgtgcaacctccttctctgttaccatatatgcttagtactattgtcaagtgtttttagaattcaaattgaaccgaagttaagccattagtgcagcttctagaaacaggcactcagcaacatagaatcagcaacgtgcatccctgcgaccattgaaaggctcgggacaaaatgtttttgttgttgatgatgacataaccactgatacctcatgaagccatatttagctatttcaaagaacacaaagtctaaatgcagcaaatttatgatattttccacattaatagatatgccatcagcaatatactcacatagccaataaatagtttcatggaaagatataactagtactacagtgt

SEQ ID NO: 21423 - DNA, 802 bp, Setaria italica
  misc_feature (1)..(72): n is a, c, g, or t
  Peptide Sequence Number=SeqID_87397
nnnnnnnnnnnnnnnnnnnnnnnnnnnnnnnnnnnnnnnnnnnnnnnnnnnnnnnnnnnnnnnnnnnnnnnnatttgtcaaattattgattgtataagagaactgttggtaaaacacactgtcctacagtcaaggtaacatggcaatgtcttgacaggtttcatgcagatgaaacaaacaaatagaacaaggctggctcagcaagcaaaccagaccctgaaatatctcatgtaagagacataattgttctttggcaaattctagctgtttccaagtgcaaaacggtgaatgaaggcagacactgcattacagaaactatcactacgccgtagcaccagcctcttctttcctcttgcgggcccaccttgggctaacctcgatgagccgatgtggcataagctgccgctcctttctagttagcttcttgtagttgctcaccctgagtttggcaatctttccctcttcctcggctgtagcttctctaaccaccactgtcaatctacaccttggtcgcaccataacaccacagctccccttggcatggtaagacagcctcttcaggtaaagtcccttttccacaaaggcctactcaacaataagcttatcaggatccaatccgtggttgtgggcaagggaagcagttgagcagtcaaacgttcactaaagaggacctggtaaacagttttggcaaccctttttaactgtcacttgcagctgcaacaaggcatcttccacacacatacctcggatcagctttgctactagattcaccttctttgggctctatttgattattcttttt

SEQ ID NO: 21424 - DNA, 542 bp, Setaria italica
  Peptide Sequence Number=SeqID_87398
agcgcgcccaccacgcacgtgtacgtcgcgcagttcggcgccacgccctccacctcccgggcctccatgccgcggtacacctccacggcctcatccaccctcctgtgccgcgccatcgcccgcaccagcgcattgtaggagacgacgtccggcgcgagcccggcctcctcgcgcatcacgcggatcagctccctgacctcgtcgacggtgccgttggcggacttgtaggtgatccgggagttgtaggcggcggcgtcgggggcgatgccgtggtcctgcaccatagcgcgccacagctcctcggcacggtgcgggaggcgctgcttgtagaaggagtcgagcgcggcgacggtgtgggaggggagcagcggcgcgagggccgcgtcgatatcggcgaggcgacccgcgcgggcgagccggcgaagctgggcgataggtactggaagctcggtttctcagcggccgcggcggcggtggagaggagccggcggccggcggcggagaaggtggcggcggccatggctgcggaagtgcggaactgg

SEQ ID NO: 21425 - DNA, 758 bp, Setaria italica
  Peptide Sequence Number=SeqID_87399
atggtgcgaccaaggtgtagattgacagtggtggtaagacagcctcttcaggtaaagtcccttttccacaaaggcctactcaacaataagcttatcaggatccaatccgtggttgtgggcaagggaagcagttgagcagtcaaacgttcactaaagaggacctggtaaacagttttggcaaccctttttaactgtcacttgcagctgcaacaaggcatcttccacacacatacctcggatcagctttgctactagattcaccttctttgggctctgtttgatatccttttttatggcttggacctttagtcgcttaaccacagctccctttttgtcagtttcttcaccgtcacccagtggaggtgtcaaaggagaagaaataggaaccatggcatcatctgcaagcaagttccttgtagtcgatattccagcattgcggatcagctgatgaaagtttactggaatactccttgaggcaaatgtttgtgccctgaataaatttgcatattgacctgacagctccctgaccttgtccaccgtgccgttggcggacttgtaggtgatccgggagttgtaggcggcggcgtcgggggccttgagagggtcgtgcgccatagcgcgccacagctcctcggcacggtgcgggaggcgctgcttgtagaaggagtcgatgagggcggtgaagagctggagcgacggcggcgccccgacgacggctcccggaggaggtggagcgcggagtcggcgccggaggtgag

SEQ ID NO: 21426 - DNA, 1173 bp, Setaria italica
  misc_feature (8)..(8): n is a, c, g, or t
  Peptide Sequence Number=SeqID_87400
gttttttnttttttttttttttggttctcagcaagcaaaccagatcctgaattatctcatgtaagagacattattgttctttggcaaattctagctgtttccaagtgcaaaacggtgaatgaaggcagacactgcattacagaaactagcactacgctgtagcactagtctcttctttcctcttgcgggcccaccttgggctaacctcgatgagccgatgtggcataagctgccgctcctttctagttagcttcttgtagttgctcaccctgagtttggcaatctttccctcttcctcggctgtagcttctctaaccaccactgtcaatctgcacctgggtcgcaccatgacaccacacctccccttggcatggtaagacagcctcttcaggtaaagtccctttcccacaaaggcctcctcaacaatgagcttatcaggatccaatccgtggttgtgggctgcatttgcgcgagcagaatggatcacctggtaaacagttttagcagcccttttaactgtcacttgcagctgcaacaaggcatcttccacacgcatacctcggaccagctttgctactagattcaccttctttgggctctgtttgatatcctttttatggcttggacctttagtcgcttaaaccacagctccctttttgtcagtttcttcaccgtcacccagtggaggtgtcaaaggagaagaaataggaaccatggcaatacaataactaagaacgacgttaaaccttaagtaacatagttgatattccctgcaactaaatgccaagtccatataaatagttagctagaaacttaatacaaaatgacatgtaatttttgccccatacatagaacatgcaggagatgcaagcgaagtgatgggaataccaatatgacacccaccacataactgaacaatgacaaaagtattttgttaagcattttctgctggtatcaaacggaaatgattgcaaagttcaaattaattcttatataaaagacatctggctgcaccagaaagagaaacacacatcctttagtatggctgttcctttcttattatccttacaaaatatatagtcataaccatataaagcaacatgagacaagtgaattacaagacaattaagtaacggtaaattaactaaagtaacttaagtaaattaagttaaa

SEQ ID NO: 21427 - DNA, 423 bp, Setaria italica
  Peptide Sequence Number=SeqID_87401
taggttagtacgtaagcgtatacggacggacggcggacgacgaccagcaggaggaggcgcccatgtcgcctcagcacacggtggcgtccatccaggaggccctgcgcgccgtcatggagcgcacggcgtcgccgtcggccgccgaggagccgggatccgcaccgtcaggggcaggcgccgctgggctcaagcggcagcgcacgacgagcctctcggcgatcctcgagaacaggtccatctaaaagctaacatccgcgccacttgatgagatgtgcaaaacgaaacgaaacagcagtagaaaagaacaccacaatctctcatagttgatcttgctcataataccatgcaactagctagctacttatgcatgtttgccaagtacgactattttttctagcttattttcatttatttatagtcttc

SEQ ID NO: 21428 - DNA, 204 bp, Setaria italica
  Peptide Sequence Number=SeqID_87402
tggacatgttttctgttggggttggtcacggataacccaatcatcattctgcaatcgttagagttctctctgtcaaccgtgatttagtgcatcattagggttacttggagtgctgaagggggagacttggctagttctaattatgtaacgcttaagatttggcaaatggtaatgctgtggtcatggttgaacagttaacgtcgc

SEQ ID NO: 21429 - DNA, 679 bp, Setaria italica
  Peptide Sequence Number=SeqID_87403
aaaattgggatatgatcctttcggaacccagccaatttaaggacaaggaaaatgtgattgcattccttgacagcatactcaatcaaggtggagaactcatggttgtgctgcaagatgaataacggtactgccccaaatcccaaaggctacaaatagcttcttctatgtgacttgcccatatttcagaattgccatcacgatgagatcacagacatctacagcataaatttctttaaaccttgaggtttaataactgagcataatgaacgtaatggtaaatggaagcttcaatctgtgaaatatacacctcgcatgtttctgctgtgggcatgggatcctctgcttgattgattgttgtgtccatctctgtcatataccggattgccgacaaggtatctgcagcaggcaaaacataggcttgcgaaatgatgggaagaaagaactttggttctcagcaagagcatgttactatggagatgtgcagaacttaagtggaggatgaaggagtatttgctgctgttgtaattatatttggataaccaaagtagtcctggcatgttcttagaatttgtctattctttctgcaaggatatgtacattacacagtgactatagacaaccgtcttacaaaattgatcatcgctaggttaacaacacatgctattgggcttatcatagg

SEQ ID NO: 21430 - DNA, 678 bp, Setaria italica
  Peptide Sequence Number=SeqID_87404
aatacgaaccaacgtcgggcgcggcacgcccaagaggtccggcgcgatggagaccttcatcttcgccatgttcaacgagaaccagaagagcggggatcccacggagaggaacttcgggctcttctacccaacaagcagcccgtgtactcgatccggttccagtaagaagtagcatgtcggatcgatcgataccaataaacccatgctatgctatgctatgctatgcatgaagatgatgatgggagatgcatgcatcttctaaataatgatatgattaagcagtggtaattggctgcaacgtgcacgtgccgctgctggccaacgtgtacccctacttcgcctaacgggcaacccgcgggacctcagcctcggctacgcgacgttccagccgggcacgacggtgagggacggcggcaacgggctgacctacacgaacctgttcgacgccatggtggacgccaccgtcgcggcgctggagaaggctggggcgcccaacgtgaggatcgtcatctccgagagcgggtggccgtcggccggcgggttcggggcgagcgtggagaacgcgcggaactacaaccaggggctgatcgaccacgtcgggcgcggcacgcccaagaggtccggcgcgatggagaccttcatcttcgccatgttcaacgagaaccagaagagcgggga

SEQ ID NO: 21431 - DNA, 351 bp, Setaria italica
  Peptide Sequence Number=SeqID_87405
gtggagaacgcgcggaactacaaccaggggctgatcgaccacgtcgggcgcggcacgcccaagaggtccggcgcgatggagaccttcatcttcgccatgttcaacgagaaccagaagagcggggatcccacggagaggaacttcgggctcttctaccccaacaagcagcccgtgtactcgatccggttccagtaagaagtagcatgtcggatcgatcgataccaataaacccatgctatgctatgctatgctatgcatgaagatgatgatgggagatgcatgcatcttctaaataatgatatgattaagcagtggtaataaaagtgcaacgtgcacgtatgacgtatgaat

SEQ ID NO: 21432 - DNA, 193 bp, Setaria italica
  Peptide Sequence Number=SeqID_87406
cgccccagccttctccagcgccgcgacggtggcgtccaccatggcgtcgaacaggttcgtgtaggtcagcccggtacctggcgagcaccggcgcgccgctgctggccaacgtgtacccctacttcgcctaccggggcaacccgcgggacatcagcctcggctacgcgacgttccagccgggcacgacggtgag

SEQ ID NO: 21433 - DNA, 392 bp, Setaria italica
  Peptide Sequence Number=SeqID_87407
ttcggggcgagcgtggagaacgcgcggaactacaaccaggggctgatcgaccacgtcgggcgcggcacgcccaagaggtccggcgcgatggagaccttcatcttcgccatgttcaacgagaaccagaagagcggggatcccacggagaggaacttcgggctcttctaccccaacaagcagcccgtgtactcgatccggttccagtaagaagtagcatgtcggatcgatcgataccaataaacccatgctatgctatgctatgctatgcatgaagatgatgatgggagatgcatgcatcttctaaataatgatatgattaagcagtggtaataaaagtgcaacgtgcacgtatgacgtatgaataaaggacaagattgttgcaatttttaccc

SEQ ID NO: 21434 - DNA, 618 bp, Setaria italica
  Peptide Sequence Number=SeqID_87408
tctagtaagtagtcggggtattccctacggtagtaggtaactttcgggctcttctaccccaacaagcagcccgtgtactcgatccggttccagtaagaagtagcatgtcggatcgatcgataccaataaacccatgctatgctatgctatgctatgcatgaagatgatgatgggagatgcatgcatcttctaaataatgatatgattaagcagtggtcttcgcctaccagggcaacccgcgggacatcagcctcggctacgcgacgttccagccgggcacgacggtgagggacggcggcaacgggctgacctacacgaacctgttcgacgccatggtggacgccaccgtcgcggcgctggagaaggctggggcgcccaacgtgaggatcgtcatctccgagagcgggtggccgtcggccggcgggttcggggcgagcgtggagaacgcgcggaactacaaccaggggctgatcgaccacgtcgggcgcggcacgcccaagaggtccggcgcgatggagaccttcatcttcgccatgttcaacgagaaccagaagagcggggatcccacggagaggaacttcgggctcttctaccccaacaagcagcccgtgtactcga

SEQ ID NO: 21435 - DNA, 348 bp, Setaria italica
  Peptide Sequence Number=SeqID_87409
cgcgacgttccagccgggcacgacggtgagggacggcggcaacgggctgacctacacgaacctgttcgacgccatggtggacgccaccgtcgcggcgctggagaaggctggggcgcccaacgtgaggatcgtcatctccgagagcgggtggccgtcggccggcgggttcggggcgagcgtggagaacgcgcggaactacaaccaggggctgatcgaccacgtcgggcgcggcacgcccaagaggtccggcgcgatggagaccttcatcttcgccatgttcaacgagaaccagaagagcggggatcccacggagaggaacttcgggctcttctaccccaacaagcagcc

SEQ ID NO: 21436 - DNA, 454 bp, Setaria italica
  Peptide Sequence Number=SeqID_87410
ccaatgttggacgccaccgtcgcggcgctggagaaggctggggcgcccaacgtgaggatcgtcatctccgagagcgggtggccgtcggccggcgggttcggggcgagcgtggagaacgcgcggaactacaaccaggggctgatcgaccacgtcgggcgcggcacgcccaagaggtccggcgcgatggagaccttcatcttcgccatgttcaacgagaaccagaagagcggggatcccacggagaggaacttcgggctcttctaccccaacaagcagcccgtgtactcgatccggttccagtaagaagtagcatgtcggatcgatcgataccaataaacccatgctatgctatgctatgctatgcatgaagatgatgatgggagatgcatgcatcttctaaataatgatatgattaagcagtggtaataaaagtgccacgtgcacgtttgacggt

SEQ ID NO: 21437 - DNA, 484 bp, Setaria italica
  Peptide Sequence Number=SeqID_87411
ctgacctacacgaacctgttcgacgccatggtggacgccaccgtcgcggcgctggagaaggctggggcgcccaacgtgaggatcgtcatctccgagagcgggtggccgtcggccggcgggttcggggcgagcgtggagaacgcgcggaactacaaccaggggctgatcgaccacgtcgggcgcggcacgcccaagaggtccggcgcgatggagaccttcatcttcgccatgttcaacgagaaccagaagagcggggatcccacggagaggaacttcgggctcttctaccccaacaagcagcccgtgtactcgatccggttccagtaagaagtagcatgtcggatcgatcgataccaataaacccatgctatgctatgctatgctatgcatgaagatgatgatgggagatgcatgcatcttctaaataatgatatgattaagcagtggtaataaaagtgacaacgtgcacgtatgacgtatgaat

SEQ ID NO: 21438 - DNA, 206 bp, Setaria italica
  Peptide Sequence Number=SeqID_87412
ggcgatgcgcaacctgaacgccgccctcaccgccacggggctcgggagcatcaaggtgtccacgtcggtgcagtccaacgtcatcgccaactccttcccgccgtccagcggcgtgttcgcgcagggctacatggtggagatcgcccggtacctggcgatctccaccatgtagccctgcgcgaacacgccgctggacggcgggaagg

SEQ ID NO: 21439 - DNA, 493 bp, Setaria italica
  Peptide Sequence Number=SeqID_87413
gccgggcacgacggtgagggacggcggcaacgggctgacctacacgaacctgttcgacgccatggtggacgccaccgtcgcggcgctggagaaggctggggcgcccaacgtgaggatcgtcatctccgagagcgggtggccgtcggccggcgggttcggggcgagcgtggagaacgcgcggaactacaaccaggggctgatcgaccacgtcgggcgcggcacgcccaagaggtccggcgcgatggagaccttcatcttcgccatgttcaacgagaaccagaagagcggggatcccacggagaggaacttcgggctcttctaccccaacaagcagcccgtgtactcgatccggttccagtaagaagtagcatgtcggatcgatcgataccaataaacccatgctatgctatgctatgctatgcatgaagatgatgatgggagatgcatgcatcttctaaataatgatatgattaagcagtggtaataaaagtgc

SEQ ID NO: 21440 - DNA, 514 bp, Setaria italica
  Peptide Sequence Number=SeqID_87414
tacccctacttcggcctaccggggcaacccgcgggacatcagcctcggctacgcgacgttccagccgggcacgacggtgagggacggcggcaacgggctgacctacacgaacctgttcgacgccatggtggacgccaccgtcgcggcgctggagaaggctggggcgcccaacgtgaggatcgtcatctccgagagcgggtggccgtcggccggcgggttcggggcgagcgtggagaacgcgcggaactacaaccaggggctgatcgaccacgtcgggcgcggcacgcccaagaggtccggcgcgatggagaccttcatcttcgccatgttcaacgagaaccagaagagcggggatcccacggagaggaacttcgggctcttctaccccaacaagcagcccgtgtactcgatccggttccagtaagaagtagcatgtcggatcgatcgataccaataaacccatgctatgctatgctatgctatgcatgaagatgatgatgggagatgcatgcat

SEQ ID NO: 21441 - DNA, 582 bp, Setaria italica
  Peptide Sequence Number=SeqID_87415
ttacatcgccgtcggcaacgaggtgccccccggcgacgccgcggggatcctcctcccggccatgcggaacgtgcgcggcgcgctcgtgtcggctggcctcgacggcatcaaggtgtccacggcggtgaagatggacgtgttcaccgacaccttcccgccgtccagaggcgtattcagggacccctccgtgatgtcgcccatcgtgcagttcctcgccggcaccggcgcgccgctgctcgccaacgtctacccctacttcgcctacaaggacaacccgcgcgacatcaacaccaacttcgcgacgttccggccgggcacgacggtgagggacggcggcaacgggctgacctacacgaacctgttcgacgccatggtggacgccaccgtcgcggcgctggagaaggctggggcgcccaacgtgaggatcgtcatctccgagagcgggtggccgtcggccggcgggttcggggcgagcgtggagaacgcgcggaactacaaccagggggctgatcgaccacgtcgggcgcggcacgcccaagaggtccggcgcgatggagaccttcatcttcgccatgttcaacg

SEQ ID NO: 21442 - DNA, 594 bp, Setaria italica
  Peptide Sequence Number=SeqID_87416
agaatacaatagacaattacttacctacttagaatactactgtgttctgcatggactaacaatgatatatgctcactagctagtttacattttggcacgtcttacatttattagtacccctcattcctttcgagtttaataattagacaaactaattaagcactcaccatatccacgcatgtcgctgtaagatttgcgctgcatcatactaataagttcattcccaacacgttactgtaacttactctctccgtcccaaattctttccattttaacttttctagatacatcacttttgctgtatacctagacataagtgtgcatttatatctagtgtatctataaaaaaagctaaaacaaatattaatttgagaccgagggagtaccatacgcaacatacccagtggcatcaacatgcagctaacagtttgtgtgaataatcttatcgtcaacgccgcagccgtgcaatccatcggcgtgtgctacggcgtcctgggcaacaacctcccgtcacggagcgacgtggtgcagctctacaggtccaggggcatcaacgggatgcgcatctacttccccgacaggcaagccctcgac

SEQ ID NO: 21443 - DNA, 670 bp, Setaria italica
  Peptide Sequence Number=SeqID_87417
tacgttacctacggacaaagactacgaacaaataccaagacccctaccaagacgacggcgtcgtgggtccagagcaacgtgcggccctactacccggccgtgaacatcaagtacatcgccgtcgggaacgaggtcgcgggcagcgccacgcagagcatcctcccggcgatgcgcaacctgaacgccgccctcaccgccacggggctcgggagcatcaaggtgtccacgtcggtgcagtccaacgtcatcgccaactccttcccgccgtccagcggcgtgttcgcgcagggctacatggtggagatcgcccggtacctggcgagcaccggcgcgccgctgctggccaacgtgtacccctacttcgcctaccggggcaacccgcgggacatcagcctcggctacgcgacgttccagccgggcacgacggtgagggacggcggcaacgggctgacctacacgaacctgttcgacgccatggtggacgccaccgtcgcggcgctggagaaggctggggcgcccaacgtgaggatcgtcatctccgagagcgggtggccgtcggccggcgggttcggggcgagcgtggagaacgcgcggaacttacaaccaggggcttgtattcgacctacgttcgggtcgtcggtctacgtccctaagtaggttccggtcgtct

SEQ ID NO: 21444 - DNA, 1209 bp, Setaria italica
  Peptide Sequence Number=SeqID_87418
tttaggtttaccggttttcgaataggtagctcaggccggagcaactccctcgtagaaagatttgggagtgcccagcagagggtttcaacaatggcgaggcagcaagttgcttccatgcttgcagttgctctgatccttggagcatttgcttccattcctacaaccgtgcaatccatcggcgtgtgctacggcgtcctgggcaacaacctcccgtcacggagcgacgtggtgcagctctacaggtccaggggcatcaacgggatgcgcatctacttccccgacaggcaagccctcgacgccctgcgcggctccggcatggccctcatcctcgacacaggcaacgacgtcctcggcaagctcgcatccagcccctccagcgcggcgtcgtgggtccagagcaacgtgcggccctactacccggccgtgaacatcaagtacatcgccgtcgggaacgaggtcgcgggcagcgccacgcagagcatcctcccggcgatgcgcaacctgaacgccgccctcaccgccacggggctcgggagcatcaaggtgtccacgtcggtgcagtccaacgtcatcgccaactccttcccgccgtccagcggcgtgttcgcgcagggctacatggtggagatcgcccggtacctggcgagcaccggcgcgccgctgctggccaacgtgtacccctacttcgcctaccggggcaacccgcgggacatcagcctcggctacgcgacgttccagccgggcacgacggtgagggacggcggcaacgggctgacctacacgaacctgttcgacgccatggtggacgccaccgtcgcggcgctggagaaggctggggcgcccaacgtgaggatcgtcatctccgagagcgggtggccgtcggccggcgggttcggggcgagcgtggagaacgcgcggaactacaaccaggggctgatcgaccacgtcgggcgcggcacgcccaagaggtccggcgcgatggagaccttcatcttcgccatgttcaacgagaaccagaagagcggggatcccacggagaggaacttcgggctcttctaccccaacaagcagcccgagtacttgattccgttccagtaagaagtagcatgtcggatcgatcgataccaataaacccatgctatgctatgctatgctatgcatgaagatcattatttagaagatgcatgcatctcccatcatcatcttcat

SEQ ID NO: 21445 - DNA, 889 bp, Setaria italica
  Peptide Sequence Number=SeqID_87419
gtcgccgtgctcgacctgtccaatctccgcgccgtgcgcgtcgacccgcaggcggcgacggcgtgggtcgactccggcgctacgctcggcgagctctactacgccgtcggaaaggcgagcggcgtgctggggttcccggccggcctgtgcccgaccgtcggcgtggggggacacttcagcggcggtggcttcggcatgctgctgcgcaagtacggcctggctgtcgaccacgtcgtcgacgccgtgctggtggacgccagggggaggctcctcaacaagaacaccatggggagcgacgtgttctgggccatccgcggcggcagcggcgagagcttcggcgtcgtgctgtcgtggcaggtgaggctcgtgcccgtgccgcccaaggtcacggtgttcaacctcccggtgaccgccagccagggcgccgtcgacgtggtcgcgaggtggcagcaggtcgcgccggccctgcccgacgacctcatgatcagggtggtcgtgcagcagaagacggccaacttccagtccctgttcctcggcacctgcgacgcactcctgccgttgatgagcagccgcttcccggagctcaaattcaaccgcacctactgcaaggagatgacgtggatccaatccgtgccctacatctacctcggcagcggttccaccgtggaggacctcctgaaccggaccaccgccgcgtccgtcttcagcagcggctacaaggccacgtcggactacgtccggaaggccatcccccgcgacgtgtggaccaacatcttcacccagctcgcgcagcccaacgccgggctcatgatcctggacccctacggcgggcagatcgccgccgtgccggaggcggcgacgccgtacccgcaccgcgccggcgtgctgt

SEQ ID NO: 21446 - DNA, 452 bp, Setaria italica
  Peptide Sequence Number=SeqID_87420
cccccaggaggacgtcaacttcgggctggagttgatcgagcggggcatccgtgataccatggacgtgcacgcgagggaaggaattcgggtgcatgtcgccggtgatcgctcaagaatgccaacttctctgcaggacgctgctcgtgaagctgaggagatgaccaggaacaactcgcagtaccattgcataatcgcgacctgctacagcgggcggtgggacatcgtgcaagcgtgccgggagctcgccaccaaggtgcaggacaacatgctccggccggaggacatcgacgaggagatgctcgccggccacctctccacgaacgctctgggagagttcggttgccccgaccttgtcatcaggacaagcggcgagctgaggctcagcaacttcttgctgtggcagtcggcctacgccgagctctacttcaccgacaccatgtggcctgtatttt

SEQ ID NO: 21447 - DNA, 1200 bp, Setaria italica
  Peptide Sequence Number=SeqID_87421
ctgatataccatatggtaccaaatccgatatttggtccctaggatgttgcatatatgaaatgagtgctctcaggcctgcatttaaagcttttgacatgcaagctctgattaacaaaatcacaaagtcgatagtatcaccattgcccacgagatattctggtgcctttagggggcttatcaagagcatgctaaggaaaagtccagagcacagaccaagtgctgcagaactgctaaagcatccgcatcttcagccttatgtgcttcaagtccagttgaagtctagtccttctcgcaacatgtctccaatctatcagtctctgacagacaaagttaagaagatgacatttcctagcgatgtaactgattctgtgcgaagaagggtggcaagaagaaactcgttgggaaatgagaggactgtaacattctgcaaaccatctcctgagcggaactctattagctctactcggagcatcaaagaatatacaactactcagagtgtcaaagagttctccatcgacagcagtcaagttgatgatgaggttaccagtaaagctgttataacaaagacatcaggcattctaaggactcccaagagtactccttccaagtcattgacaactagaaattggctggatcctccaaaaacatcttatagcagaacaaaccacagcgagctgtcctcaagaacacctctaaacaaaagcgcccgtacagctcgaagagcatccctcccgctgccaacatatggaacgccaagcaaccgcaccatcagcatcctggaccggctagactccccagacgtgtccgtcaatgcacctcgaatcgacagaatcgcggaattccctctggcttcatccgaggaccccttggccccgatcaacaacaagctctctccagctcccggctacggctcgtgctccacgcctccctccatcaaccgatcgatcaccaaggacaagtacacggtccaggtgctgcacaccggcgatggggacaacgggagcgactcctcagggcgcaatgctaccgccgcgtcgagcagagggtccaacgactcgaggctgcagcggttcgacacctcgtcgtaccagcagcgcgcggaggccctggaggggctgctggagttcagcgcccagctgctgcagcaggagcggtatgaggagctgggcatcctgctgaagccgtttcggtccccgtagt

SEQ ID NO: 21448 - DNA, 428 bp, Setaria italica
  Peptide Sequence Number=SeqID_87422
aataataacataaaacatcctacacatcaacgagtgaaggtacctattggcaatcgtggcagagtggcaattgagatcaaccagatggccactgatgtaaaatacctgcacttgatgaggtcctgcccacttgctcagcgcatgtgcatggtacatgaagagtgaaggaatgcaagggcatcctattaagatcacttgtagaatagcagccagcctgcctccttggccgcgttgcagctcaaccacaccgaggtaaccgctgcagttcagcgcccaaataagaagcagcatcagcaagaaagttatcattggaacccttgaaagctgaaacgagtgcttcaactcgcatcaaagccgacactgatatcgacaggatcattccctgggctagatattgtctgcatgaaaagcctaggccatatagtaag

SEQ ID NO: 21449 - DNA, 480 bp, Setaria italica
  Peptide Sequence Number=SeqID_87423
tggcttacaatccgtgctacaacaccaacggctacgccagccaccagacgtcagttccaagaccgccgccgcagccccagcctccgctcctgccgctgccggcggcgcaggccccgccgcaatgctggagccgtccggtgtcgcgcgccaagaagccgcgctgctacgacgccgcgccggggcccaacaagctcgccgcgcctgcgacctcggcgcccatcaccgtcgcggcgccgtccaagaagaggacggcgccagcggctactggactggaggtggagtggacggggacgggctcgctttactcggtgtcgccaccgccgagtagcgtgccgatgccgacgtccctgctgctcaccgtcacggcggcgaggaaggcgccgacggcctgcgccgtcgaggtggccggcgccggctgtggtggcgtggatgtcggcgccacggacgagctccggcggctgctccgcctctagctccgat

SEQ ID NO: 21450 - DNA, 512 bp, Setaria italica
  Peptide Sequence Number=SeqID_87424
agttatgtacagttgtttaatatgaaactgaattactgaaactgacatgtgagcattgattttatcgataaccgtatatttggaaaataggtctagggaacactattacttttgttcattggtcgcatctcattgctaaaaattttcttggctgcaggacaatcatcttttgttcataggacactagatattgtaaaaattaagagtcctgcaaacagggtgcattttattagtctcctgtggacaaattaacttgtgaccactatttcactttttaactgttgacttgccaatccttgaaacatatttcagacgttagcccatgatggccattcttatgctcggggagaaaacattaaagttcaatgagcgttcaagtcaatgtggagaagacagggaagagaaacaaaatgattttgagtatgactggtggctaggctgtaacaattgtcgatttggagttttgaacagatgaccagagaatcttgtatgcatgtacaattaaaatcatt

SEQ ID NO: 21451 - DNA, 1845 bp, Setaria italica
  Peptide Sequence Number=SeqID_87425
tttaggaaaagaaagcaggagaagctgaaacgttgcttcatgacttgggaattgcagacccattttcagtaagacactctcctcgtggaattttctgcaccaggacactaaatcttcgatctatcagtgtgattggctatgatatggattatacattaattcattacaacgtgatggcctgggaagggcgtgcatatgattatgggatggacaaccttaagagcatgggtttcccagttgatgaccttaaatttgatcctgatctggtcataagaggtcttgttattgataagaaaaggaaacttggtcaaagctgatcgttttggttacattaaaagggccatgcatggtacccagatgctttccacttcttctgtgagtgaaatatatggaagagaattggtggacctgcggaaagaaagtcgatgggagttccttaatacccttttctctgtttctgaagctgtcatgttcatgcagatggtcgacaagttggatcaggggctggtgccagctgaacttggaccattggattacaaagggctgtacaatgctgtttccaaagcactttttcgagcacatgtagaaggccaacttaagagagaaataatggctgagcctgagcggtttgtagagcctgatccagaactgcctttagctcttcttgatcaaaaagaggctgggaaaaagttgcttcttattactaactcggattaccactatacaaacaaaatgatgaatcatgcattcaatcggtttcttcctaatgatgtgggatggagagatctttttgagatggttatagtctctgcaaggaagccagagtttttccaactttcacatccattatacgaggttgtaacagacgatgggttgatgcgcccctgttttaaagcaaattcaggtgggctatactctggtggcagtgctcagatggttgaaaagtcactagagattcatggggatgagatattatatgttggagaccatatttacacagatgtaagccagtcaaaagttcatttacgatggaggacagcattaatctgcagagaactagaagatgagtttgatgcactggtccaaagctatgatcagaaagaaaagcttgtcacacttatacaacaaaaagaaattgtgggggatctttttaaccagcttcgcctggctcagcagagacgctctaattcacgtcctgcacagacgcttgctgcaacttgtatggatgaccatgagcttacagaaagcatgcaaaagttgctcattgttatgcaaagattagatgaaaagattggacctatgctggaatcagatggagaactttttaataaaagatggggttggctgtcacgtgctggcttgtgggataagagtcatctgaccaggcaaattgaaaaatatgctgatatatacacatcaagggtttcaaattttctacactatactccattcatgtacttccaatctcaagaacagacgttagcccatgatggccattcttatgctcggggagaaaacattaaagttcaatgagcgttcaagtcaatgtggagaagacagggaagagaaacaaaatgattttgagtatgactggtggctaggctgtaacaattgtcgatttggagttttgaacagatgaccagagaatcttgtatgcatgtacaattaaaatcattagctcatagtatgctgaataaatcatgtagctcataatacgctgagtaaatcatgtactagtagttttgtcgtggccaaagaaaaaggttgtatttggtgagccacaacgacctatgttgtgtataccttcaatttgcattgtatatgtaaattgtgaagtatgacaag

SEQ ID NO: 21452 - DNA, 867 bp, Setaria italica
  Peptide Sequence Number=SeqID_87426
gagtcatctgaccaggcaaattgaaatatgctgatatatacacatcaagggtttcaaattttctacactatactccattcatgtacttccaatctcaagaacaggtaaacacacagctccatacaatctgctgcactgttgactttgccatttttctattgtcatgtttattggtccaggctcgaaaaatgcatttttcgtattcaatgacacgatactaattacatcaataaaaaatattatttcggctatcttggagcttgtgaagaatattagacatgctatgtaggactattttggtcacatttttctattatggtgagtatgaaagctgagcgatagcttggctggtagtgtctcccatcaaaggggtcaccgtcacccacctgggctcgaattcggggtgcttacaaatgtgggtacctctctaagaactggtttaagcgagtttcacatccagcctgggggtgtcatcacccttgttcatagtgtttattatggtggatatgaccttaaaagtatccatcatccaagtatgaggtagaatgaaagagagtgatacaagcatacatatgagtaagggcgaagcacatttctcttattttgaaaattgatatagtactactacatcaatataaagtatattgttaatgttatgtacagttgtttaatatgaaactgaattactgaaactgacatgtgagcattgattttatcgactaaccgtatatttggaaaataggtctagggaacactattactttttgttcattggtcgcatctcattgctaaaaattttcttggctgcaggacaatcatcttttgttcataggacactagatattgtaaaattaagagtccttgtct

SEQ ID NO: 21453 - DNA, 693 bp, Setaria italica
  misc_feature (1)..(31): n is a, c, g, or t
  Peptide Sequence Number=SeqID_87427
nnnnnnnnnnnnnnnnnnnnnnnnnnnnnnngttgggagtaccggagattctcttgtaacaaacacatactgtatatagtacatacatcattattacattatttatttatacgcgcacgtatcaacccgaagactagagctcggtagatacaagcaggggagtacatcaactgatcaacacctcacggaaataaatacgcataccggcatacgcggcactaagtacgtatacgtacggtacggaaacaagcgacaccacggtgcctctgctgcataatagtgtccctgtgaagtgggccacgccaccgagtccacagcaagcgcagaggccggccgcacgcggcagtgccaacaacggaattagcaggacggcacgggcaccttgcacgcggccatggccttcttgccgttgggcgagctgacgtagcgctgcaggtttgggtcgcgcgcgtacgtgcacatgcacggctgctgctccctcatcttgctgcagcacgccgcggtgggcggcgagttcccgatgatggcgcccgcgcacggggtcagctgcgtcgcgtcgcacgtcgccgcctccgcgccccgcggcgccgccgccgcgcacagcagcaggaccgcgagggccgcgaacaggagctgagccggcttcatggctagtgtagtgtgtgctacgaggtctggtaggatcttgaattt

SEQ ID NO: 21454 - DNA, 289 bp, Setaria italica
  Peptide Sequence Number=SeqID_87428
gcagtaggggtacatggagaggaaaagaaaggagatggagaaggccaagtctgggctgaggctggccatggaggagctctgtttatgcagtccaggagatgtggaggagaagcaggagcaggtgcagccaaggtcatccaccatggacctcctctctgtctccaagcagctcctccatgtccttggttggtaactcacatatgctctttcatatgcaatttcttgactgaaagattttcatttccagttgggattcgattgattgtcagctggtttattttagcaggtc

SEQ ID NO: 21455 - DNA, 277 bp, Setaria italica
  Peptide Sequence Number=SeqID_87429
gctgatgggtaactgtcaagactttgaggatcttgcggaagatgcgaaaatgttgacctatgctgtccagcccatgttagaggagatcgatgcaatctcggtcagagttttgaacttcacatctgtctattaccaagataaaagttgcaatgaaagatcagaatttcttgctcatacatgcagtatatatatgtgtggtttgcaggctaaacacaacttggacaagatgaaatcctcttaggattttgccgatcgcctgtacatagctgcataatcg

SEQ ID NO: 21456 - DNA, 356 bp, Setaria italica
  Peptide Sequence Number=SeqID_87430
tgtcaactcaggtcgataagtttctcaaaatatttactggagaggctgctgaaagccccagaattgagcctgagagagattgtggaagaagcctatgctagtactctaaagccatggcatggttggatctcatcggctgcttataaggtattagctgaacatttgcagtgcattccaggcgattacaatcaaatttctgaaaactttttgttcacggatacacttgtttgttgattacatttgtgattatggttttgcagaactaattctgcaattatttacttggtttaatttttgcccatgacctaatttgttgagtcatagttgtcaggtagcaatgaagctcgtcccagaaa

SEQ ID NO: 21457 - DNA, 1023 bp, Setaria italica
  Peptide Sequence Number=SeqID_87431
gcagtaggggtacatggagaggaaaagaaaggagatggagaaggccaagtctgggctgaggctggccatggaggagctctgtttatgcagtccaggagatgtggaggagaagcaggagcaggtgcagccaaggtcatccaccatggacctcctctctgtctccaagcagctcctccatgtccttgatgagattggaccaacgttgctagtcctgaggcaagacattcagcaaaacattcagagattacaagatctgcatgaaagagactcttccaaatatgtgagcttgacggcgatagttacagaggaagtggagcaagagacagcaaagaagaccaaaagctgcaccagagctatcatctggttgtctaggtcgataagtttctcaaaatatttactggagaggctgctgaaagccccagaattgagcctgagagagattgtggaagaagcctatgctagtactctaaagccatggcatggttggatctcatcggctgcttataaggtagcaatgaagctcgtcccagaaagagaagttctcatagcgctgctgatgggtaactgtcaagactttgaggatcttgcggaagatgcgaaaatgttgacctatgctgtccagcccatgttagaggagatcgatgcaatctcggctaaacacaacttggacaagatgaaatcctcttaggattttgccgatcgcctgtacatagctgcataatcgtacctaaccttgcgtcgtacttgtaatagtgaaaggccttatttttttggtgttctcttgtaggttgcaagtgacaatttgaatgtgcaaaactcgttgagtgtattccttcccttgtagttttagtggatccaggctcgatcgaatagtgcatgttttcttcaaaaatcaaaactagctacttctttcttcctagctagacagagagttgtgcttatccttgtagtttagtggatcttgtccttacagttttttgagtgttatgcagagaagaaatgatctgtttgataaaaaaaaaa

SEQ ID NO: 21458 - DNA, 901 bp, Setaria italica
  Peptide Sequence Number=SeqID_87432
aaatcaaacattgcaatagcactccccattatctcggagaataaatcagtagaatgtcttcataacatctggttcgcgacagaaaataaggcatggtgattaaataaataaacatggtcaatcaaatccaagctacactcacttttgttctgtaagaattcgtgactgcatgactcaattacaacaccacagggcacgctgccctgggcatcaaaccgttttgaactgctggcagtatagttagaatggcacagggatttttttttgattcagctgtgcaattgcagtctcaacatcgttggaattgaaacaaaacattacttcatcaatcatcaagatgtatcacttcagcttccactgatttccttctccttagccttgcacatgtcatctgctgactttatgaacttcttggtcaattcttcaatctccttctcaagcctctttacatcatccttcggcatgctagatgcagatttctttattgtatcaagggccttttggcgtgctcttctaatactttgcttaaaatcctcagcagatttagtaacaaccttgcacagtgcctgtatattctccttcgtcaacggagggatatttgcaataatcctatttccatcaggagtaggattaatgcccaagggtgaagagataatagcgttctcaatagacttcatggaactaggatcataaggcatcactgatagagtatgtgcatccaggacagaaacaacggcaatgtgattcaacgcaactttaacatctgcagtctccaccatgatatggtcaagcatgccaggattagttcttccagtccgtagtttgctcagctctcgcgaaagtgcgatgactgcagcatccatttgggaagtggcagcttgattttgtacggtttggtcct

SEQ ID NO: 21459 - DNA, 1661 bp, Setaria italica
  Peptide Sequence Number=SeqID_87433
gtggtaggagataggagtagcagcagctatcccagctcgctcaatgcgcctcaatgctggagcagcagcatcagttgctgctaatgtagtttcttttccagaattcgtcaagaccccaattagttcaattgccacttgggtcagctcagcttgccatcttccactatcacccccagatgtctgggcactggtatcgcggatcagttctgataatttcttgcccacctggagctttgtcagtatatgtgcaattgcatcgtctctggccaggccaagcaggacacggcaggcaagggctcgaatagaatctatagccacaggatgtgtaaccatccgagaactgagaagctgtaaaagaatttttatgccattgttggctcttacgacttctcgagcttgacgatatccttgttccaattgagcagcaagaccaggacctccaactccaactcctaacgttattcttcgatcaccgactactccagatggtacaacaggtgtgcaaggagttccttggtgtaaggtattattcctttcagaaggattgccgtcaccagatcgttcacgagattcaccatgatttgctacaagattcctatctgaaacacttttttcaaagttcttgtctctgctttctgaaacaagcgcttgtgcagctgcaggttgctgattggcagttgaggatggcttgttgctgatagaaggaggtgggcatacaagattgacgagaacattcaatgctggacagatcacctcatgatcaatatagtcgaaacttttcactgcgtctaacaggacagccataccaacacgattgttgcttaatgtggcatgcactattggtttgcggacgtgtgggtgtggcataagtgttataatgtgaagaactccaaatgcgtattgagttagatcacgtagataccgatcaccatgtgcctgaaacttgcacaactctagcatcgtcatgtgaccatttgaggcaacaaatttgtccaacacaggccaacgggctcttacaagagcggggcctaactttctgtcccgctggatctgacgaaagacagcatccatggcctcattgctaatgtcaaaaggtttgtaaccagctcttgcactagaagtattccgagcaatactacggatgcttttgcttggccgaatggaatccacaagctgaaggagatgagctctaaagtattgccgtagtgcaacacatgtatggtatgcaacttgcttctctgatgcagtcaaaacttcggcaggcaactgatcattcccttgatttatatgggaggatcctagtcctccagagttaccactagaccttccggatgcacatccatataggatatcaagaagcttttgcatcccatcccgtgcatcaaataaatccagaacagctttgaacacaaaagcagcagcgaaaaaaatggcagcacttttctagctaaatcttgtgggcacccaagaagttgaagtgctagttcaacaacactgtcaagagtgtcggatgagagtgcacaaacacgttccattgtagactgaagagacccaaaagtaaataagcaggcagaaagacccatatatgtctgagtaatcctaggaacagagaggatcttctgaataccaccacgatcaacaagagagcagcaaatttcggt

SEQ ID NO: 21460 - DNA, 964 bp, Setaria italica
  Peptide Sequence Number=SeqID_87434
cttaatcacaccaaagtgcacaagctaacctaagctctctctcagcagtatacgctgacaatggcaagattcgctgcagctaccgtcctcgtttgtgcagcattgctcttgtgtgttgagcaaagtgcaggaagcttggcctctgccgatccactctccaccttgtttcctgcaaattcccggcctccgccagtgatgatatattgcaagcagaacaccgagctgaatgtggccgttggcgacgatggcaaagttgttctggccgtcgccaaattcggcgaattcaaacagctatggtggaagctccccttgccggccttggtccatggggagggccacaagttttggctggtgaacgtcgccacggaacaggccatcgcgaccccaacagacgacaacaaaagggaggtgaaaatggctccattcaacccttgggacaaggcgcagctatgggtgccggacacgccagatgccgacggcttttatcaaatcaaggtgtccgcagacgaatcgaaggctctcaacggcctgggggggagtgtgcataaagggacggtcgtcgggatctatcctggtaatccagtatctgctaacaccctgtggaaccttaccagcatctggcccttcccattccactacttcccttgatgaatccatgcgcaggactcagggagttgaggctagccgttgtgctcgcgtttgctgaagaataaagagtcccttatttcctctacttttcgaaatgcttcatcaatagtgtcctcgtcacatgtttccacaacaagtcaataaacacatctgtgcactggcgttgttgttatcattttttccttaattaattttgagaaattccctgtttcgattttgctgaattgcatgcacgcaagcactgtaattcaatctctgaccttaagtattgtttcgttctatctggttgctgtcaatgtttcagagaaaaaaaaaa

SEQ ID NO: 21461 - DNA, 199 bp, Setaria italica
  Peptide Sequence Number=SeqID_87435
ctgttccacgccagccgctcctccaacggtgcgtcgtcgccaggaggctcctgcccatccggctgcggctgcggctgcggtttggagggcggcgctcgccgcctcctcctcggcggcatcgcgtcagctccgccgagagcaggatctcgcgacgcgaggggatgcggatggagatttggggggaggagagaaaccctcg

SEQ ID NO: 21462 - DNA, 612 bp, Setaria italica
  Peptide Sequence Number=SeqID_87436
gggttatctgacagcatcattgcaattctggaaacttagcatctacagcgttatttcctgatccataatataatatacatttcttggataagctcaagtgtcggcaaaagaaccagagttctgggtaggaatcattgggtagaagaggaaatgtggtaggcagatttcactttcttttccaagagggcaacatgcttgtcgagcatggacaccaccgcctcgaactcagtcacctgttgatcaattgcatcaatatgcgatacatactcgtcaaagccttggtttttctcgttcagctgctccacaaagactcgcagaccagcagcaacatctccatagttgctgtattcctgtgctacacggtcgttcatcttctcaagcagagccagctgactgttagtcccctggagctcgccgcggaccatgagagagacgttggtgaagagctcggccagcgactccgcaagctcgtcccgctgccccgccgccgccgtctccgcctccgccaccgccgggttcgcactcgccatcgccggcggtcgctttcctctgtgccgctccgtgcggaactaggccgtagctttcggtggtctcccctctggccgagaccgg

SEQ ID NO: 21463 - DNA, 679 bp, Setaria italica
  Peptide Sequence Number=SeqID_87437
actgtgacacgtataatttatgtaccaagagagattgttataaatataatatgcttggattatgttacagatatgacgtgtaaactatcctttcatccgacgtattctgtgttcaccacactgcttccgatcagtggccacaggtaacgctatgtaccctccaatgtacaagcgttacctgtggtttgcaccctgctatcccagggaagtgtatgccgaattgccgaggtgagctttcagaggcagagttttctctgtgtcaccttgcgttgcagcactgtggcctcccttgccgcagcttctcccataggcacaccatctgcgctggcgactggtagtgcgcggtcaggtaatcgtcgacgcagccggactggcagagcctggggctgtggacgtacgccacggagttcccggagctattgaaccgccccacccacatccccatgctcacatcctccatcttgaacagatttaattttgtatactccatatcagatgcgacaaagtttgcaatgtcagaagaaacaatgtagcctgcaccatcggcgtagggcgggtactcttctctgggccactcctcgtatgagacagcccattttccctcccgcagtggcctgtggtagtaattcatgttccccagatacaagctttgctgtctgagactttcttgacttcagcc

SEQ ID NO: 21464 - DNA, 337 bp, Setaria italica
  Peptide Sequence Number=SeqID_87438
tgccaacctgcattgctaatggctcgggcacaacacgctatgattgtactgcatctcatgttcatctttataaactgtatcgtggcatgacttcggctgtatgttttctgagcaattaacaagcctttttggaatgttttatggttttattcatttagttaattaccttgtatttgcatgcaggtcatacaagacatctcttttagccattttagccaatggatatctattgtttcatctcgaggtacctgccatatatttacattgtccccttttggtggtgatgccagtctgcagccacagaaatcgcacagtgatgggccacctcttgccccat

SEQ ID NO: 21465 - DNA, 589 bp, Setaria italica
  Peptide Sequence Number=SeqID_87439
aatcagaactcgatgactgccgtgagttaactgaagctgttactgatgctgacagcagcagcagccactgcgagagagagaagcctgaggaagatggggataatgatgacatgcttggaggagtttttgccttcagtgaagaaggttgaacttactatgctgctttacttaagatataatgaaaaacagtgcccacaacattcagtgtgcaatataatgtagaggatttggtgaaattttagtaggctttcatggaataaaggcaatttactaatccgcggattcacgattaagggagctggatgttgtcgagaagttgccattgcctgccgcgacgccgctccctttgtgttgatttgtacatatactgtaagacccatttgttttgtgccatacttccgggacattgggtggttctgaatcccgaccttggcagccatatttgttgacctcctcctgccaaggcctgtgaatgttccatgtttatttgtacatactttctgttttattggaaaaaaggaaatctagcaaaaattaatgtgacataactgtataaagattcagtaaaggattttcattaatttactaa

SEQ ID NO: 21466 - DNA, 1988 bp, Setaria italica
  Peptide Sequence Number=SeqID_87440
tggcccgatgcgtgttggcccgagatggttagcatatgccacaaattctcctttgttgtcaaacacaggccgtttaagtccacagaacctcacaccttcgccaggagtgagcccatctacttctcctagcagcggaagcttagttgctagatatgcaatggagtctagcaagcaattagctaccggtattattaatcttggtgacatgggatataaaacgttgtcaaagtattgccaggagcttttgcctgatggttccaactcccctttgtcatcaagcccaggaaggagatctggtaaaattccttccactgtgcatccagtggaagctgacaatgcaggaatggtagtcatcaaggatttcacttccaaagttgttatctcgcagtttagggctcacacaagtcccatatctgctctttgtttcgaccctagtggaacacttttggtgacagcctccgttcatggccataacataaatgtcttcaggatcatgccaacctgcattgctaatggctcgggcacaacacgctatgattgtactgcatctcatgttcatctttataaactgtatcgtggcatgacttcggctgtcatacaagacatctcttttagccattttagccaatggatatctattgtttcatctcgaggtacctgccatatatttacattgtccccttttggtggtgatgccagtctgcagccacagaaatcgcacagtgatgggccacctcttgccccatgccagtcaaggccatggtggtcaaagccgtcctttcttatggatcaacagcttcaccaagttccttcaactgtaacaaactcagtagtcagtagaataaagaatagcacttctggttggctaaatactgtcagcaatgtggctgcttctgcaagtggaaaactatctgtaccatctggttctgttactgctgttttccataattccatctaccagggttctttgccagttccatcgaaggctaatgctctggagcatctgttggtgtattcaccatcaggtcatgttattcaacatgaacttttaccttcgggttctgagtcctctggtaacagcccgagagttggttcgggtcctaattcacaactccaagatgatgagatgcatgttactgctgaaccaattcaatggtgggatgtgtgccgcaggacaaactggccggaaagagatgaaaacattgcaaacattgtattatataaccaaagaaactgtatgatggctatggatgcttctgactgtgaagacagcgaacactcggattccactccatcaaatgatggtagctctgggaaagagattacgagagtccgagaaaggtcaagctggtatctatcaaatgcagaagtacaaataaactcatggaggattcccatctggcagaaatctaagatttgcttctatgtgatggaccatcctgctgcggagtcaggggaaacagttagcagtagcggtggagaaattgagattgagaagttacctcttcacgaggttgaaatcaggagaagggaattgctccctgtattcaagcagttccactatactgagcgaaattctagtgacaggaatattgcaaatggaggctttcagaatggcttgtcccacattggtgatgcacattatagctctgtaaaggataatggtgaatatgaacccaagccagtggcccctatatctggattttacactggtatgaggaaaacagcaaacatgaatggtgtagctagtcaaccattgtctggacctagctcaactgttaatctgcagcaagtggggaagtgcaactctattgaatctcctgatgctgcaagtttgtctgcccatcacaaagcagagaacaagagcaacggctatgtatcaatgccacctgaaactaatgcatctatcagaccattgaacagctattccctcttggatggacctcttgatggagttgcttgttcttccttgtctaaactagtcgtct

SEQ ID NO: 21467 - DNA, 2315 bp, Setaria italica
  misc_feature (2224)..(2224): n is a, c, g, or t
  misc_feature (2304)..(2304): n is a, c, g, or t
  Peptide Sequence Number=SeqID_87441
cggcagcgtgggggcggaggaggaggaaagaggctggcgaggcaagcaaggaactaacgaacaatcgggtgcccgtggtggtggtctccgggctgggggaggggagggagcggcggggagggatgaggcgggggaaggggggaaggaatggactactgccgagctcgctgcggatcatatcgtcctgcctcaagacggtgtcctccaacgccggctccgtcgcgtccaccgtgcgctcggcgggggcctccgtcgccgcctccatcgccccccaggccgaggacgagaaggaccaggttttgtgggctggattcgataaactagagcttcatccatcatcattcaagcatgttctgctcgttggatattcaaatgggtttcaagtgcttgatgttgaggatgctgcaaatgtttgtgaattggtttcaaaacgcgatggcccagttacgtttctacaaatgcaacccactccagtcagctctgaaggtgctgaaggattcagagcatcacatcccatgcttctggttgttgctggtgatgagacaaatggcctgggtgcggttcaaggtggccgcttaagtgcactgatcagagacacaaacagtgagcctcaagctggaaattgcatttctactcccacagttgttcgtttctactctttgaggtctcacacctatgtgcatgttcttcgatttcggtctgctgtatatttagttcgctgcagcccacggattgttgctgtagctcttgcagctcaaatctactgctttgatgctgttactcttgagaacaagctcagcgtcttgtcatatcctttgcaaggtgcaccaggggtaaatattgggtatggcccgatggctgttggcccgagatggttagcatatgccacaaattctcctttgttgtcaaacacaggccgtttaagtccacagaacctcacaccttcgccaggagtgagcccatctacttctcctagcagcggaagcttagttgctagatatgcaatggagtctagcaagcaattgctaccggtcttattattcttggttaaaggataatggtgaatatgaacccaagccagtggcccctatatctggattttacactggtatgaggaaaacagcaaacatgaatggtgtagctagtcaaccattgtctggacctagctcaactgttaatctgcagcaagtggggaagtgcaactctattgaatctcctgatgctgcaagtttgtctgcccatcacaaagcagagaacaagagcaacggctatgtatcaatgccacctgaaactaatgcatctatcagaccattgaacagctattccctcttggatggacctcttgatggagtgctgtctcctgcaaacagcgcatgcaagcctgaaacaactaataattctgtgctcagcaacggtgcaagcactgatataccaaatgggtgtctcgccactgtcaattcaggacagcaggaggcgtctgattctcacaactcagtggagtttacccagtatttccaagagggctattgtaaaatatcagaactcgatgactgccgtgagttaactgaagctgttactgatgctgacagcagcagcagccactgcgagagagagaagcctgaggaagatggggataatgatgacatgcttggaggagtttttgccttcagtgaagaaggttgaacttactatgctgctttacttaagatataatgaaaaacagtgcccacaacattcagtgtgcaatataatgtagaggatttggtgaaattttagtaggctttcatggaataaaggtgcgcacatattctcatggtaaagtttgtgcttgatgttcacgttccagaagtgaagttcttctctccaatctgaggccaggatccctccaggcaatttactaatccgcggattcacgattaagggagctggatgttgtcgagaagttgccattgcctgccgcgacgccgctccctttgtgttgatttgtacatatactgtaagacccatttgttttgtgccatacttccgggacattgggtggttctgaatccccgtaccttggcagccatatttgttgacctcctcctgccaaggcctgtgaatgttccatgtttatttgtacatactttctgttttattggaaaaaaggaaaatctagcaaaaattaatgtgacataactgtataaagattctagttaaaggttatttttctaattctctttanatcccatgtcaccaagattaataataccggtagctaattgcttgctagactccattgcatatctagcaactagcttccgntgctaggagaa

SEQ ID NO: 21468 - DNA, 304 bp, Setaria italica
  Peptide Sequence Number=SeqID_87442
tgtctgcatcattaagtgattgtcaacaaataagcaaattatgtttgtggtgccaagatttgccttacagaataggtgtatttttactgttcatgtgggtagactttagaaatgctggagaagaaagagcgtttccttcagaaaaagtgttctgctgaaatttgaaaaggctaaggattatacaaaatcgaagaacaagaatggtaagcaagcattactttggagagaaaaaactcatctgtcagtcttacatgttattacaatcttgtgagaatttttcatacataaatgttaaacttgcaga

SEQ ID NO: 21469 - DNA, 1198 bp, Setaria italica
  misc_feature (206)..(206): n is a, c, g, or t
  Peptide Sequence Number=SeqID_87443
tttcctatcgtggtaggatgtgtatagaagaatataaatctaaattctagatggtcagctttatttttaatcctagtcaaaatttgtttagcacataccaattttgaggacttagtatatttggtgttgacactatggatgtatctgttttgcgataatgcgcctctgtctgcatcataagtgattgtcaacaaataagcaaattntgtttgtggtgccaagatttgccttacagaatggtgtatttttactggatttgcagcttctgttgctcaggccatcattatacaagattgagaatcagcaacgactgcaggaagatgctgaagaaattgctgccaaagactaagagcaagaagaagaaggaggcagcctcctctgcgatacccacgttggatcggctccatgagactttagaaatgctggagaagaaagagcgtttccttcagaaaaagtgttctgctgaaattgaaaaggctaaggattatacaaaatcgaagaacaagaatgctgcaattcagtgtctaaagaaaaagaagctgtacgagacacaaattgagcagctatcgaattttcagttgcgagttcatgaccagattataatgcttgaaagtgcaaaggcaactactgatactgttgatgctttgcgctctggatcatctgctgtcaaatctattcagcaatcactgaacatcgatgacattgaaaacgccattgatgaggcaaacgaacagacagaaaacatgaggcagatacaagaggcacttgcaacgccagttggtgcttctgctgattttgacgaggatgagctagaagcagagctggaagatctggaggaggaagagcttgaggaagagttgcccgaaccaccagcgaggatacctgcgcctgtggaaccattagcgaaagcagcatcctcgtctaggcaaggcagtgatttgagtgaactgacaaaacttcaggcagagatggcactttagttgtagcttctagcttttgcgctgacattgggaggattggcgacattgcaatctctctgtgttcatcgatatcgtgccatcctggtgcttacttggtgtgaatgctgtaaattcaggttgttgtaccacctagttagtttgtactgtagcatggtgttttgatcaggattctgttttgatcatgtaggcgtggcattgaaaactgagacacgcaaaaa

SEQ ID NO: 21470 - DNA, 455 bp, Setaria italica
  Peptide Sequence Number=SeqID_87444
ccttggccaccttgtatgccgcgaactctgccggccacccacgcgcttctgccacgccggcctcgaagtctttcaggaacatgtccagcagctcgtcaagcctctcctcggtaaggttgtcgatgtcgttcatctcttgtttcagctcctcgtttctgaaatgccttagtagcccaaagtcggaggagacattaacgattcttccatcagaggaggcttggaggagaggcaggaaggcctcgatcacgtgctttgtgccgtagtagtttgtctgcaggccttcttttgcagcgtcatatgtctcccagcaatttccccacaaccattcaagcctctcgcccctatccatgcctttgaacttttcaccgctagctaccggaccatcaacaggatcttgggagcacataaccccactaaccgcggcattatttacctacaaatcaacagctcacaaa

SEQ ID NO: 21471 - DNA, 457 bp, Setaria italica
  Peptide Sequence Number=SeqID_87445
cgacgagtacttcccgatggtggcgctggagctccacgagcaggggaggcacctggacatcatcgacgcgaggctggaaggccgcgcagacgaggccgaggtggcgcgcgccgtgcgcatcgcgctctgctgcctgcacgaggaccccgcccagcggccgagcatggccgccgtggtgcgtatgctggaaggcaccgtgtccccaccggaaccgcgcgtcgaggcgctcgggttcctacgcctctacgggaggggctacgccgtgccgaccacctcactggtcgccatggccggcacgtctggctccgcgggcacgccgtcgtcgacggctggcgcctcgcagttgaccgactcgttgcagggcgtgtcagagccaagatagcagcacaagattcagctcctgcgacgtggcacggatcagaggctgaactaatctggtgccgacgtggcgccggag

SEQ ID NO: 21472 - DNA, 205 bp, Setaria italica
  Peptide Sequence Number=SeqID_87446
cccagacgattcattcatacacataggacagctcgctttgttgcaaggaacacaacagagaggatcagacgatttctgactgctaattgatcagcacccgtcagccagtcaggactcaggacagtcaccaacgtggcatcgagagatgagctagcactagcagagcgccaccgcccggtccaccgcggcggcggccgccttgacc

SEQ ID NO: 21473 - DNA, 580 bp, Setaria italica
  Peptide Sequence Number=SeqID_87447
cctcatcagcggcgggatccagatgatcgtctgccaggtgatcgtggcggtgatcctgggcgtgaagttcggggcggacaagcagctgtcccggagctactcgatcgcggtggtggtggtgatctgcctgttcgtgctggcgttcgggtggtcgtggggcccgctggggtggacggtgccgagcgagatcttcccgctggagacgcggtcagcggggcagagcatcacggtggccgtgaacctgctcttcaccttcgccatcgcgcaggcgttcctgtcgctgctgtgcgccttcaagttcggcatcttcctcttcttcgcggggtggatcaccgtcatgaccgtcttcgtatacgtcttcctcccggagaccaagggcgtgcccatcgaggagatggtgctgctctggcgcaagcactggttctggaagaaggtcatgccggacatgccgcttgaggacggctggggcgcggctgggggtcacgctgccaacaacagccataagtgaagaagcatgcgagtggtttcatgtagtactccctagatgacgaggcagggtgagctgtaggaggaatggagg

SEQ ID NO: 21474 - DNA, 382 bp, Setaria italica
  Peptide Sequence Number=SeqID_87448
cacgcgcccgatggaggcgccccgccgcgcccccgccgggtcctcccagcgccgctccaagcgccgccacagctccccggggcgggcctccccggagcatcagaagcgccctccccgggtttggagccctgaagacgagatcaccatactgagtgccctcgttgagtaccgtgccaagaaaggccagctcccggcgtcgattcaggacacaggcaaggtacacagccagattagtggtcagctcactgctaatgcgtccactacccagcttagtgataaggttaggcgcctgaagcataagtacaagttgctgttcacccgtgcaaggaatggacgggatcctgacttgccaacgcagcatgagcgtgatgtctatgaactt

SEQ ID NO: 21475 - DNA, 458 bp, Setaria italica
  Peptide Sequence Number=SeqID_87449
taggacaatttaagaatttgaaaaatggcaatggcaatgcacttgcggctgtgggtagggctagccatggcaatggtagtgggagagatgatgctgagaagggaaaacaaatgtacccttacctgtgggaggctgttgcggagctatcgaaggagcacccgagcggaccaatattcagaaaggcatttggtgtacttgagaagtcaaaggcacaagctatggaggagaagctgcggaagttcagaatgtcaaagctatggaggagaagctgcggaagttcagaatgtcagagataaggcagcagctgcatcggatggacctgatgaaggagacaatgcagatggtgcttgatgcactggagggttcatactgattaggttgaatttgacgaactgctggattctggaatctgtggttcggtgagtatgttgctcgaaaaagggggcctaaggtcttcc

SEQ ID NO: 21476 - DNA, 991 bp, Setaria italica
  misc_feature (5)..(5): n is a, c, g, or t
  Peptide Sequence Number=SeqID_87450
taaanaaataaaataaaagaaaacgtaaaaccaaaaactaaaaacccaaaagaaacttaaagtaagaaataagtggtcagctcactgctaatgcgtccactacccagcttagtgataaggttaggcgacctgaagcataagtacaagttgctgttcacccgtgcaaggaatggacgggatcctgacttgccaacgcagcatgagcgtgatgtctatgaacttagcaagaaagtgtggggatttaagagtggtgatatcttaggaggatctcatgcgtatgaggatactggagatgcggagagcaatgaggagcaggagattgaagagagtgatgatgctatggagaatgggtgggagcaccatgaacggcagggcaagaaaccaaaggcatttagatttgaaaatggcaatggcaatgcacttgcggctgtgggtagggctagccatggcaatggtagtgggagagatgatgctgagaagggaaaacaaatgtacccttacctgtgggaggctgttgcggagctatcgaaggagcacccgagcggaccaatattcagaaaggcatttggtgtacttgagaagtcaaaggcacaagctatggaggagaagctgcggaagttcagaatgtcagagataaggcaacagctgcatcggatggacctgatgaaggagacaatgcggatggtgcttgatgcactggagggttcatactgattaggttgaatttgacgaactgctggattctggaatctgtggttcggtgagtatgttgctcaaaaagggggacctaagtcttccagttgcctagaatagtcttggtctaatgttatggatatatggttcgttgttctacttttgtggcgaaggatatgatgtccttgatcccaactaaacctagatcaaggagttatgaacgctacttgttatccacccaaaaaggttatgctttatgtgcttaggtgctaacttatgcctatttgtcaaaaaaaaa

SEQ ID NO: 21477 - DNA, 979 bp, Setaria italica
  Peptide Sequence Number=SeqID_87451
tcggagtcatttcaaactggtgtaggaagcaaaacgaagccatgcaccaaatttttcagtacctctggttgtccctttggcgagggctgccattttctccattgcttccctggcggctaccaggcagtttcaaagataaccaacctgggtggcccagcagttacacctcctggaagaatgatgatggacgggccacctacacccaccatgaagactcgcttgtgcaacaagtacaaaactgcagatggatgcaaatggggggacaaatgccacttcgcacacggtgaaagggagcttggcaagcctatgttgatggacagctctacgcacttccccatgggaccaggacccactggtcactttgcacctccgcctatggtcaaccctggcatggccactccagcaagctttggtgcttctgccacagccaagatcagtgttgatgcatcccttgctggtcgcatcattgggaggggtggagttaacacaaagcagatatctcgagtcactggggccaagctggccatccgggaccatgaatcagacaccaagttgaaaaacatcgagcttgagggcacctttgatcagatcaagaatgctagcgctatggtcggggagctgattgtcaacatcagtggcagtgcccctccaccagcaaagaacccagctggaggacctcaccgtggaggctcaggaagcaacttcaagaccaagatgtgtgagaactttgcaaaagggtcgtgcacttttggtgacagatgccactttgcccatggtgaaaatgagctgcgcaagcctgctgctgcttgagatccatgtctttgtcagtactttgtagtgattagtcaatgtaactcaaaacttgatcttggatgatggatttgctgacttctttaggcctatgctactgaatctgttttctgtttttcttgaacgttctattgtgacctgttttgggagcctggtggttcttctaccc

SEQ ID NO: 21478 - DNA, 422 bp, Setaria italica
  Peptide Sequence Number=SeqID_87452
tcctattggtctctgagcttttaggaaaggctactcctgatactatggaagaagtgcaccatctcacccatctggaaggtagtcaccatctggaagctgatcaaaatatatcttctggagctttactacagccaaataagaagttcaagatgcatgctgagaaatcaaccattcaggctgtgcctatggttggttttgatgccatgacaagagcaaagtctacgcttgaagatttttgcagatcgtactttatgtttcatggattggacgctaacaatccacaatccattttcaaatatctgcctgttctttctttcacagagagctatatatatcagttagatgcttcaaatgaggactctttgaatctaatcccagacaataggagttcatcaaaaggggttggaaaggaaaaaggaagc

SEQ ID NO: 21479 - DNA, 577 bp, Setaria italica
  Peptide Sequence Number=SeqID_87453
agtgcatgtagttcagagagtacaaatgatggtcttcaacatgccagcagaaagaatgaaaagcacatgccaacatatacccaagggatcaaaacaccagagatgtcaccaccctcaaaagatagaactgaaccttgtagtcttggcaaattgtttagattccaaccagattctgcatacttacgctcaacatcagatttcatttcaggagataactttggaaacccgctgccaaaagttccagtctccaaatcagcaccatatattacctctatctcttctgtcggcctttcaactatgcgccaatactcgccttcaatatcttccaccgatggtggtaagtcaccacatgcatctttgataaaatactgatcactgaaggcatctgcatacttctgaaacatctgtagtgtgaactctggtcctggttcaaatccaaacctctcttggttttgctgcattccaatttgattatgattaatttcttcagtctctgagagccttctccgcttcttcatcattccacctcttctgctcttcttgggtattgtattttacggtttttggtagttctttt

SEQ ID NO: 21480 - DNA, 1328 bp, Setaria italica
  Peptide Sequence Number=SeqID_87454
ccagccgatggaatcttgggaggaatgaatttcagtcagtcatcagaaggtgcgctctgccactcaggtaacgaggaatgtcttggctgcctccatcgagatgcacaatcagtaaaagtttatatccatgtaactgcgtggataagttgggtatggtaattcgtctacccccaggagagaggcagaacgagtaatgccgctgaactgagtttggctcgaaatctgaacctctgctgtgaaaatgctgtacacaggcctgtgatccgagaaccgagactcaccgcgcacgtaacacagttggtttagacctcggccataccatagaatacggtcacaccatgccggagttcttcgcttctcatttggatgcatatcatcgcctgcatatctatcagagttgtacgagtatttgtatgtgggaggaaagtaaatccgcccttctttccagcctgcaaagacccgaccaaatctttgctctatccgaagctggtccttttccaataactgtttccaattgtgcatctcaactaaagccttcactgagcgataggaaagagctatccggtaattcagatcaccaagccaaataatacgatcatgatcaagaattgtctctggagacttcttgtcacttgctccatgaacatgcggaaatctggtcttcctcaaaatttccactacatccgcatttcgtctaagttgatcaccatctttctggcctgatgttaagtgagtgcacacaaagcagaagcttgtctgatgcagagacatactgattgatattgatcccttatttccaagatagcccatcaggcctctaccaacgcacgaaaccttcaagttcttcacatgctctcttatgtcgctccgtacccacaccatgagaaaaattccaaccatttgcttgcttgcaactaagcaatacctagaatcagtgcatagtggagcaccatatccacatggcattggtggaaagaatataccactaggggattcctcgtcaatattctcatcatcagatgacccaccacatctcatactagtgtcaacgtcacttggccggctcccgaagctaatccggtcacaaacactgaaacgacggtccactaacgagtgtggatccatcatgtcaatccttgaactacgattgaaggactggaatgaacgtcgatggaagaatgacgagttccgttgtcttcttgatgatcgctcaaagtcaacattgagctccacaataggatctggagccggtgatgtggtaattgtagacaccagagccttgttgatccttgtattgtttaagttgtagttgttcttacttacttaaa

SEQ ID NO: 21481 - DNA, 330 bp, Setaria italica
  Peptide Sequence Number=SeqID_87455
cgggagtgggcggtgactctagaggagtacgtcgggatggcgcaggacttcttcctcctcccgcaggtgatcggcaacgtggtgtggcggatcaactgcaagccgctcaagaagagctactacgccggcgtgacggcggtgcggctgctgccgcacctctacgactacatcaaggcgccggcgatcaacccatacttcgcggaggagtacgagttcgtgaacacgagcctcgacttctactcccggttcggcgacgtggccatcccgctggtcgccgtcgcgctcgccgccgccgtgtacgtgcagcagcggtggaactacaagatcatc

SEQ ID NO: 21482 - DNA, 410 bp, Setaria italica
  Peptide Sequence Number=SeqID_87456
tcaacaactacctcctcccggtctactccgactcgtggacctacaacggcgacaccttcgtgaagcacatggtgagcaccctggaggcccagctgaggctcctctacgcgctgggcgcccggcggctcaccttcttcgggctgggccccatgggttgcatcccgctgcagcgctacctgacctcctccggcgggtgccaggagtcaacgaacaagctcgccaagaacttcaacacgcaggcgggcgcgctggtggcgcggctgtcggcgtcgctgcccaacgcgacgttccggttcggggaggcgtacgactacttccaggacatcatcgaccggccctacatgtacgggttcaaccactcttcgtcgccatgctgcacgctagggaggataccggcccacgctcacctg

SEQ ID NO: 21483 - DNA, 321 bp, Setaria italica
  Peptide Sequence Number=SeqID_87457
accttctcctccacagccgtctagggtttgcgagggagggttttccggcgagagggcggagatggcggcggagcgtgcgaaggggacggtgaagtggttcaacgggaccaagggcttcggcttcatcagccccgacgacggcagccaggacctcttcgtccaccagtcctgcgtcaaggccgacggctaccccaacctcaaggacggcgaggccgtcgagtacaccgtcggcagcgaccacgacggacgctccaaggccctcgacgtcaccgcgcccggcggcggctccctccccgggcggggagcgccccgacagcggcg

SEQ ID NO: 21484 - DNA, 173 bp, Setaria italica
  Peptide Sequence Number=SeqID_87458
gtggaaatattcaacttcgtgcctgccccaggctatgaggcatatggagaacccatcaagcaagtcaagaatttcatggtagagtctctggagcaaaatggaaaatctcatccgtcttcttatccaggtccttcggtcgagttccaagcttcagactggagatttgttgatgg

SEQ ID NO: 21485 - DNA, 760 bp, Setaria italica
  Peptide Sequence Number=SeqID_87459
aagcagacgagtcttcaaaaacaatgccaccaagctcaatctcctcttcatctatctcctttgtgcaagtttcaacgacatcattagggatcccctttttcaaatcaggcccttcatcattacctagactgtcagatttattttcagctacccctaaatcattctgaccaccctcaatgtttgcagtttcagaatttgatgagacaggatgtgcagaatgggttatatgttccttcgagcttccatgcttggaattcttttttgcagccttgctcttccgcctatttggttttgcttcaacaacttcaaaactttctaagcagtgatcttcccatgtggaggaatcattcgaatttgcatcatcatcctcctcttgctgttccatatactgccgaatccaagcagcttgcgatgaccgcccgtcatccaatgatacattctcctctctccgcccaccaattctgatttccaactgctcggtgctcaccttcacctcctcaggttcacgactctgtggaacccaattgtccttggctgtggacagtaccttaacagaactttcacctagtttgcgagaagaggtggtgctggtgccaccgctggagaacttcagggggagctcatcgcctggcagattaaagcacagccagtccaacgccgactcaaacgtcgccgaatccggtatagcagagagcgcctgctcgatttgcgcggaggagaagccctcgagcgcgagcttgtcgtacacgccacgcagccg

SEQ ID NO: 21486 - DNA, 433 bp, Setaria italica
  Peptide Sequence Number=SeqID_87460
tagtggtcagaggaaaattacttccgatcaaggaaacatgtacctgttggatgatatgacaagttgttggtgattttctcggagggatggccaagtttggaggtgtattctctgcggttatcctggttgtgctgctcccctgcttggatgttgcattggggcagagcactgacacttcagaggtcaatgcgctcagggctatcaagggaagattagttgatcctatgaataaccttaagaattggaataggggagatccgtgcagatcaaattggactggggtcttctgccacaaagtgaatgatgatacatatcttcatgtaacagaattacagttgtttaacaggaatctctcaggaagtttggcaccagaggtcagtcttttatctcggctgaaaacattggattttatgtggaacaacttaactggtag

SEQ ID NO: 21487 - DNA, 1815 bp, Setaria italica
  Peptide Sequence Number=SeqID_87461
aacccgcaacgcctgcggcctgccgggccagccatggacgcctccctcctcctctccgtcggcctggcggcggtcctgatcccgctctccctcgcgctcctcaaccggctccgcgtcggccgcctcccgcccggcccgcggccctggcccgtgctgggcaacctgcggcagatcaagccgatccggtgccgctgcttccaggagtgggcggagcggtacgggcccatcatctccgtctggttcggctccggcctcaccgtcgtcgtctccacctcggagctcgccaaggaggtgctcaaggagaaggaccagcagctggcggaccggccgcggaaccgctccacgcagcggttcagccgcaacgggcaggatctgatctgggccgactacggcccgcactacatcaaggtgcgcaagctctgcaacctcgagctcttcacccccaagcgcctcgaggcgctgcgccccattcgcgaggacgaggtcaccgccatggtcgagtccgtccaccgcgacgccaccgccccgggtaatgaaggaaagccagtggtagtgaggaaccacctttctatggtggccttcaacaacataacaaggctggcatttgggaagcggttcatgaatgcaaacggtgaagttgatgagcaagggcgtgagtttaagactatcgtgcacaacgggatcaagattggtgcatctctctctgttgctgagtttatttggtatttgagatggttgtgtccacttaacgaggagctctacaaaactcacaatgagagaagggaccgcctgacaatgaagatcattgaagagcatgctaaggctctcaaggagagtggtgccaagcagcactttgtggatgcacttttcaccctcaaagagcagtatgaccttagcgaagacacggttattggacttctatgggacatgatcactgctggaatggacacgacagtcatctcagtcgagtgggcgatggcagagctggtgaggaaccccagggtgcagaagaagctgcaagaggagctcgaccgcgtcgtcggccgcgaccgcgtcatgttggagaccgacttccagagcctcccctacctgcaggccgtcgtcaaggagtcgctccggctgcacccgccgacgccgctcatgctcccgcacaaggccagcacgagcgtcaagatcggcggctacgacatccccaagggcaccaacgtgatggtgaacgtgtgggcggtggcgcgcgaccccaaggtgtggagcaacccgctggagtacaggccggagcgcttcatggaggagagcatcgacatcaagggcagcgacttcagggtgctgccgttcggcgccggccggcgggtgtgccccggcgcgcagcttggcatcaacctcgtggcctccatgatcgggcacctgctgcaccacttcgagtggtccctgccggagggcaccaggccggaggacgtcgacatgatggagtcccccgggctcgtcacgttcatgggcacgccgctgcaggccgtcgccaggccgcgcctggagaacgaggagctgtacaagagggtccctgtcgagatgtgagctgcctgccgccgctgtggaattcactgctcggcctgggcttttcttcttgctgctattggttatatactctctgctgctgctttcagctaggtgctttatatagagtgttgtaaaatgtgaagttgcatttctaatctcataaatatgtcacatgcggatccttcaaatgatgattatacactcacgttcatttcttatagattttcatggtgtagttgaagtgaacatatcgttttaaaa

SEQ ID NO: 21488 - DNA, 339 bp, Setaria italica
  Peptide Sequence Number=SeqID_87462
ttaatttactaatttttacgtacctaagtcgttgtttactttgccctgagcagtccattcattccagagctctgatagtttaacatgtttttataatgcatcaggcatatggtaggggcaactgattgcgcattagcatattctaggaatgattgatgtctcctggaggttgaaccagccagcttgtcacttgccaatgcacgctctctaattaagaagggaatgggttaagaggcaattcatgattaaagggtaagctttgataccaatcgttaagaaaacaaactattaaagtatagcccacagacagcaaagcagtatggtagagaaaaagcatga

SEQ ID NO: 21489 - DNA, 424 bp, Setaria italica
  Peptide Sequence Number=SeqID_87463
gggcggagagcttggtgcgcgtcaggtcgcccgtcgcggacctgccggcgacggggttgtaggggtgcgccgtgcacttgcacctgaagcggtcttcctcgtcggccttgccatagccggtgtgcgggcagccgggcgggtggtagctgtgggcgtgggcgcagtcgtggtggtggcactggagcgtcgggtgcgcgcggtcgcaggtggaccagatgagcgggccggagaggtcgaggacgagcgggcggctgtccttgagcggggaggtgtagagagaggttgccgggtccttggtgatggccgtcaccaggggccgcttgccgccctgagctgccgctgccagtgtgcaaggggacaaggatgccgccaggcagagggagacggcgagcagcagcgccatcttgggcggctcaaggagttg

SEQ ID NO: 21490 - DNA, 566 bp, Setaria italica
  Peptide Sequence Number=SeqID_87464
attgctggtcaattccatgtgtcattgtgctcacttggatcttcttgaagacaaagtacgggttgaggaagttcgttggcgttggagtttgtgtggctggccttgtactggtagtgttttctgatgtgcatgcctccgatcgagcgaaaggagacaaccccttgaaaggtgatttgcttgtcattggagggtccatgctttatgccgtcagtaatgttactgaggagtattttgtcaagaaaagcagcagagttgaggtgatggccatgcttggtgttttcggagcaattataagtggtatacagataagcatacttgaaagacacgagctcagatcaacccactggaatgctggtgcgattcttcccttcataggatttgcactggcaatgttcttgttctactcagcagtaccaattatactcaagatatgtggtgcaaccatgctaaatctctcactactgacctcagatatgtgggctgttttaatccgtatctttgcttatcatgagaaggttgactggatgtacttcgttgctttttgccggcacagctgcgggcctttg

SEQ ID NO: 21491 - DNA, 831 bp, Setaria italica
  Peptide Sequence Number=SeqID_87465
cggcgcgctgatgggcgccgtcatcctcggcgccgtgaacctcggctccacgctcgtgtccaccgtcaccgtcgaccggtacggccgcaggccgctgttcctgaccggcgggttcttcatgatcatctgccaggtcgcggtggcgtggatcatgggctcgcagatcggcggggacggcgggtccgtgatggcgaggccgtactcgctcgcggtgctggcgctgacgtgcgtgttctcggcgtcgttcgggtggtcgtggggcccgctgacgtgggtgatccccggcgagatattccccgtggagatccggtcggcgggacagggcatcagcgtggccgtcaacctcggcgccacgttcctgctcacgcagacgttcctctccatgctgtgcgcgctcaagtacgccaccttcatctactacgcggcctgggtcgccgtcatgaccaccttcgtggtggcgttcctgccggagaccaagggggtgccgctcgagggcatgggcgccgtctgggagcgccactggtactggggacggttcgtgcagccgccggtgaaggttgctgacgaggaaccctgatgaactgatggtggccgcttgcctacttcgtttgtggcggcgtcaaacttcctcggacgtttccattagttaatcgctttatgtttgtctgttgtgttcgtcatccgaggaagacttgtgcgagtaaaaacgaaatcagtgctcactcatgcctgtgccttttgtaatacgtcatgaaagattgaataacaggattagtgttgttgatcaacgtaattaaaatattaaaataattttacctttcctataaaacc

SEQ ID NO: 21492 - DNA, 592 bp, Setaria italica
  Peptide Sequence Number=SeqID_87466
cttttccttatagtttggcttcttcttcttcgccttccgcactctcgaagctcttgccattgatcgatcaatagccaattctcctaaggaccaagcactccaagtgtcatttgtagcgagatggcgatcccggtgattgacttctccaagctgaatggtcctgagagggctgagaccatggcggccattgccaccgggttcgaggacgtggggttcttccagctggtgaacactggcatccctgacgagctgctggagagggtcaagaaggtgtgcagcgactgctacaagctgcgggaacagggcttcaaggagtccaaccctgcggtgaaggccctcgccgagcttgtggagaaggaaggcgagggactcgcaccaaagaagatcgagaacatggattgggaggacgttttcaccctccatgacgacctgccatggccttccaaccctcctgccttcaaggagacgatgatggagtaccgcaaggagctgaagaagctggcggagaagatgctgggggtgatggaggagctgctggggctggaggaggggcacatcaagaaggccttctccaacgacggcgacttcgagc

SEQ ID NO: 21493 - DNA, 517 bp, Setaria italica
  Peptide Sequence Number=SeqID_87467
agcggctcgagagaggcagcaagccttaggtgagaagagagaacggagaagtgagatggagaagcggcctcttggcatggcggtgttcctgatggccttccttgtcatctccggcatgcacactgccccagcccaggcagcaggacggattatcagccgcgggtcgatgaacccaaacattccccacgattctccgctggacccgaacaaggccggcgatccgtaccccggtcgtggccgtgcgtgcacaagtatctaccactgccatggtgcagcagagccatgagcgtgaagaatgagccttggaacttgaagaaagaataacgctggaacagctttgtctcccgagatcatcctcggttgaaatagaacaagacagccaggaaacgtatcctagtcgtgtatcaagtgaatgatgttctagtcgtgtagtatctacttgtgtatgtttgctgtgtgcatgtgctgaaatccggtgatccaggcaaattatcaagttccagtgaaacagtgaacg

SEQ ID NO: 21494 - DNA, 350 bp, Setaria italica
  Peptide Sequence Number=SeqID_87468
atagatgattaggttatgggggtggcccatgttctgcaggagcaactgctgttctagattttgttgctcaaatccttgctgacattatatcagagcagtttaaagcagcacttttttattgagagcgtttttggagtccgtacccttgtttgttgatattgaatctgctcttgtttttcaaggcttgtgcctaagcagattgatgaacttccttgaaagaaagctcttgcttgatgatgaagaagatgggaagaaacttgacaagagccgctggtctgccaatttggacccactttgctggatgatagttgatcgtgtgtacatgggctgctttccaaccccactcaggg

SEQ ID NO: 21495 - DNA, 1006 bp, Setaria italica
  misc_feature (45)..(45): n is a, c, g, or t
  misc_feature (1001)..(1001): n is a, c, g, or t
  Peptide Sequence Number=SeqID_87469
ccggaacctacagctccgacacgctcacgctgggacccaacgttntcccgggcttccagttcggctgcagccgcgccggatcgggcttcgaggtcgagaagaccgccgggctcatgggcctcggcggcggcgcgcagtcgctcgtggcgcagacggcggcgacattcggcccggccttctcgtactgcctcccgaccccgcaggcctcctccggattcctcacgctcggcgcgccgagcggcggcggcggcaacttcacgacgacgaggatgttccggagcagggaggtcccgacgttctacatcgtgttccttgaggagatcagggtcggagggacgcgggtcaacgtggcgccgacggtgttctccgccgggtcggtgatggactccggcacgatcatcacgaggctgccgccgagggcgtactcggcgatgcggtcggcgttcagggccgggatgctccagtacccgcgggcgaagccgctggagatcctcgacacgtgctacgacttcggcaacctgaccagggtcaccgtgccggccgtcgagctcgtgttcgacggcggcgccgtcgtcgacctcgacgttcacgggatcatgatcttcgactgcctcgcgttcgcccccagcgacgacggcggagccagctccgtccccagcatcatcggcaacgtgcagcagcggacgttcgaggtgctgcacgacgtcggccggggcaccattgggttccgggctggagcttgctgatcagcgcgccaatgcatcatgtatacgaacgagatatttgtcgttgcagggagatagcatgttgaccaactctctcgtgtttgtgagttcgcttgtgtgtgacgacgtaacgggcgtgaagtgagtaaacgtaaccatcactctagtacttcgattttattacatgtttttgtgcatgattgcagcatgatgtaagcatgcaaataatcaatcgaaatataaacattacagtacgtaaaaaaaaaaaaaaaaaanaaaaa

SEQ ID NO: 21496 - DNA, 239 bp, Setaria italica
  Peptide Sequence Number=SeqID_87470
ccaatgtgccgacaggctgctggacatgcacggatatactagtaatcgttggagcaagtgcctgctccaccacatcggatccagattttcagggctcaaagagtcaacaacacaacacccactactaacctgaccatttcttcggtgattgcctgtctccgagctctttcatccgctcttaccttttcttcctgtccaaagaagatggctgaatcctttgttctcaacactggcgcaag

SEQ ID NO: 21497 - DNA, 240 bp, Setaria italica
  Peptide Sequence Number=SeqID_87471
tgttgagcccgtgcgccttgaagaccgccagcagctggtccatggtctggttcggctcgggcagctggcctggtacgctgctggcgttggagctcaggccgtccagcctgcccagctcaatcgggaaggagggcccgccactcatggcgatcgcgtctcgagtggcgagggcgagcacgtcggcgcaggagacggtgtcggggcaggcggcctcgacggcggccttggcgctccgcaccg

SEQ ID NO: 21498 - DNA, 439 bp, Setaria italica
  Peptide Sequence Number=SeqID_87472
gatgctagtgtcggggtgcagatggagacccctagggaagcatcaatcaggttgttctagcaaaaatcccaaaactcagatcctatgaattgtttacccaggtcagtgatgatcctattggagaccacgaagcggtgtgtgagctcttcgatgaattgagcggctttggccaactctatgctggtgataaccttgacttcaatccacttggtgaatttgtcaactaccatgaagatatgggtgtatccacctggagcggttttgaaagggccaaccatatccaacccccagcatgcaaagggccaagacagtgggatggtgtgcaaggcctacgctgggaggtgttgctgcttgaagaaaaattggcaccctttacacctctggacgaggtcttttgcgtcggtgatagcagttggccagtagaagccaaagcagaacg

SEQ ID NO: 21499 - DNA, 645 bp, Setaria italica
  misc_feature (16)..(16): n is a, c, g, or t
  Peptide Sequence Number=SeqID_87473
caatttgtgggtaagngaaaacatggccatggaagtgaaatggtcaccatcctgactattattaggaagcatatcatctgtactcgcccattgaatttcactcaaagctgactgctctctggatataccacctgaaaataagtattcatttgtgtctccatgccttctgtattgttctctacttggagttctatttgatcagagcaaattgtttgctgttcaaggtatgaaccatttgagagaccatcatgagggtggacagttgcttcttcaaaattagcatggtttgatgcatcccttggaaaatgttgattgtccaagttgtaagttcctggttggttctgtaaatcattgataaacaaaccataacggctagcctctgaatgatcaaatttttgctcgcctccattgagctccatgttagcttccatctggcactctgaagggtccacatgcgagtagtttgaccaatattctacgttctcaagcatttcttcatggctttggaataaatcttcggaaccattggtgttggcagccatctccaaacaaccttgattgaccccgggatgctgctggtcctcctcctcctccccgccctgctcgggcggcgcgggctcggtctcgaggaaggccatgaagtcg

SEQ ID NO: 21500 - DNA, 286 bp, Setaria italica
  Peptide Sequence Number=SeqID_87474
gggcgtcggcggtcggcggccggcacggcgccgtagcgcttgcagaggatggtgtcccccgcgagcgtctccaccaggcgccgcaccacggcgtcccgcgtgcgctgcgtcggcggccagatgctgaacgagaacgcggcggcggactggtcgccgggggccgagggggccggggccggcgcggcggcgagctcgtcggtggccattggcgtggaagcttctggaagctgaaaaccctagggagggatgggtatggacggaggcggggggaatggggagctcgatc

SEQ ID NO: 21501 - DNA, 773 bp, Setaria italica
  Peptide Sequence Number=SeqID_87475
gctcacacttgatactcagctacaacacagcgcttcccactcgcagctcaaagatggccaagaaagccgtggcgctcctcctcttcctcgtgctagtcgtcgccgccgaagcccaccatccggaagcccacgacggcgggcggcacaaggacgccgccgccgccccgacgcacctccacttctacttccacgacacggtgagcggcaagtcgccgacggcggtgcgcgtgttggacccaccttcctcctcgtcgccgatgaccatgttcgggatggtgaacgtgatggacgacccgctgacggaggggcccgagcaggagtccaaccccgtgggccgcgcccagggcctctacatgggctccgaccaggccaagctcggcttcctccaggccatgaacctcgtcttcacctccggcgacttcaacggcagcacgctggcgctgctcggccggaactgcccgctcgacgccgtccgggagctacccgtcgtcggcggcaccggcgccttccgcttcgcccgggggtacgcgcagctgcgcacacactggctcgacttccgcaccggcgacgccaccgtcgagtacgacgtctacgtcatgcactagcactcattcactcatgagtgagtgcgataagattgcaaagaaacataataatggtgtcattgtaaggtttttcaagcatggtgcttcatcacagagtgtttgtttacttttttaaatttttatttcatcagccttcttcttcttttcacagaacttaaaaaaaaaaaa

SEQ ID NO: 21502 - DNA, 406 bp, Setaria italica
  Peptide Sequence Number=SeqID_87476
tccaattccaacacgccgctgcagtccgtcagcccggcgaccgacctcttcttggcaaagatcgatgacgaagacgacgggggctacgacatggactacgacggaggcagggattcctgcagctggttcgggaccagcgatcgctctgctttggaggctcgttcctcgggagccagccggcgttcggcggggaagaacaccgctctcatacgcaggctctggaggtcggcaatcgccgagagcaggaacaagactggaggcggctggtcgccgtcttccaacaggaggtccagcgccaccgcggaagcgcccccagcagcacctccacagcagagcctgagggagaagctcatggaggccaggatggatgatcacaagcctgtccacgcactagtcaaacacaacg

SEQ ID NO: 21503 - DNA, 291 bp, Setaria italica
  Peptide Sequence Number=SeqID_87477
tccttcctccttcctctctgatcgtcctatctcggggcaagatatatataaatacgcaatcttgatctgcgtccatgggtgtctgagccacctgccggcgcgggcgccattgatgagagcaccgttgtttgaggcggcgacggcggccggacgcgatgtccgttgtggcggcggctgctgcggccgtggggcccggcgcagccggggtggcgtacgggcagctgtgcggcggcggcggggcgaggaagaggaaggacgtggtccaggaccaggaggcgggggtggtggtgg

SEQ ID NO: 21504 - DNA, 473 bp, Setaria italica
  misc_feature (425)..(473): n is a, c, g, or t
  Peptide Sequence Number=SeqID_87478
cgacgacgagcacaagaaggccttcgtgaaggaggccaaggagaacctggcgctcctggaagcgcagctcaaggggaggaggttcttcgggggcgacgccgtcggcttcctcgacatcgccgcctgtgcgttggcccgctgggttggggtgatggaggaggtcaccggggtgaccttgctaaacgacgaggagctccctgcgttctgcaggtgggccaacgactacgtcaacgacgagaccgtgaagcagtgcctgaggagcagagacgacctcgtcgcctatttctccgcgaggaaggagatgtacatggcgcgagccagggctactctgcacaagtaatttggacctcccagtgccgttagtttccttgttgcgtttgcgtgttcttcgaagccatggcccgatccatatcttattccacacnnnnnnnnnnnnnnnnnnnnnnnnnnnnnnnnnnnnnnnnnnnnnnnnn

SEQ ID NO: 21505 - DNA, 279 bp, Setaria italica
  Peptide Sequence Number=SeqID_87479
gctagctcaaagcagaaaaaatctttttcctcgaacacgcaggagagctgcatatcattatattaagaagaagaaagcagaaaaatctgtaaagcagtcagtagctctcaaaggtacagtccatggtgaaaccacaacatctaggcatttatttatttattattttggaatgatgaacaattacattttttctcgaatatgcacacttacaattacagtttttggaaaatctagagtgagttgaatcatgtgttttaaactaatctaatatatcattga

SEQ ID NO: 21506 - DNA, 273 bp, Setaria italica
  Peptide Sequence Number=SeqID_87480
gttccaatcaccggcaacagcaaccccaatcaaaggagcccccagctccaggctccagctgtgcccacgcccagcggtcgagcgccaccaccgccgacgccgacgacgacgacagcgacatgggcaacagcttgcggtgctgcctggcctgcatggtcccctgcggcgccctcgacgtcgtgcgcatcgtgcacctcagcgggcacgtcgacgagttcagctgcccggtggccgcggcctccgtgctcgccgcgaaccccaaccacacgctca

SEQ ID NO: 21507 - DNA, 317 bp, Setaria italica
  Peptide Sequence Number=SeqID_87481
ccttcttggattcggccaggcccccatgtcggaacagtgcgcgggcagcgccgcgcggcggtcctacatgcatgcgctccccttcctcctctctgctgcggttgccgaggccgtctcgtcggagcagttgggggaggacggcaagtcccatcgggcagggaggcctcgtgctcccaggtctcgatgcgcatcctccccatcgccgagataagtgccccttcctcatttcttatgcacttcctctccttaatcatctcgctcagttcaaaaccctagcggtgcttgtgatttccgtgctccattcctctgcctgcccc

SEQ ID NO: 21508 - DNA, 439 bp, Setaria italica
  Peptide Sequence Number=SeqID_87482
actcttaggcctattatcagacgttatctcagatccatcacttagaaccagaccatcagaattagcttttgcagatcggaggagtgccttaaggataacatatgccggtaaaccaaaattaagtaccccagtgctgactttgcctgcctttgttccttctatatcttttggggttatcaccccttcagcgaccagatccttgccataatgcttacactctatgaaaaggagatctagcaacttgaatggattgaactcatcaaagctacttttaaatgatgtaacacgctgtggcgctttctttccatcatgcttgtccttgaatgaagcgggccttgagagcgaaccaccatgggaggaagcttcatctttctgatatttaaacctaggaaaacaagatcctggtgccatgtcaagtacatcatttgtattatttcta

SEQ ID NO: 21509 - DNA, 429 bp, Setaria italica
  Peptide Sequence Number=SeqID_87483
tctttcagagcctctccgaggaccaaaccaaaggtggtcttacgggtctagcggagaaactggagcccctagcgagggcttgctaccccgatggtgttggccacatgacgccggaagagctgtcgacaatgttgctacgtgatgggtgcttcctcctcgcttgcatggtggactatgccgacaataagttagcacatagctcaacaagtaaagacagagacccggcgcaaacagtagggggagatgtccaagacggcggctcatttagcggcggcgacaacaacaccgtcgtccgcgacaccgtcttcctcgttgagaaccagatacctttcttcgtgctacagaagatccatgagcgcgtcacaggtgataccaccagctccgccctcgaatccatagcagattatgtccggggaggtgctgcaggta

SEQ ID NO: 21510 - DNA, 239 bp, Setaria italica
  Peptide Sequence Number=SeqID_87484
gggggggggggggggggtggggtcagtaagtctccagcaaccggactggagcatgagcatgccaggggcacctactaggtgatcattttgtcattggcttctgctattgctggttgcggtgttggtgcgacatccatcgggtcagctttggcctcggcagctacatccatcgggtcagctttggcctcggcagcagcagctacatccatcgggtcagctctggcctcggcagcttcata

SEQ ID NO: 21511 - DNA, 383 bp, Setaria italica
  Peptide Sequence Number=SeqID_87485
ggaggagttaattgagttgagacgtttaattgatgagaggaatatctgtcttcagagtttgcaaaatgacttctccaaactctcagatgaaaagcaattcagtgacactcagttgcttatcttgaaagagaagctggagatggctcaggcacttgccgaagaaagtgaagcaattgctacggaatctcggcagatagcagaggaacataaggcatatgctgaagggaaggatgaagaagtcaagctcttggagacgtctattgaagaacttgagaatactgtatgtgctttggaaagcaaagtggacatagtcaaggaagaagcagagaggcaaagaatgcagcgggaagaactagaagtggagctgcagaaagttaggcaac

SEQ ID NO: 21512 - DNA, 231 bp, Setaria italica
  Peptide Sequence Number=SeqID_87486
gggtacggacgatggcaaaccgacctgcagggcgacagctgcggcaggccatcgccgaggcagaggccgagctcgcaggtatctgctcggccatgggtgagccgccgatacatgttagacagtcaaatcagaagttgcaaggtttaagggaggaattgaacgcgattgtcccatacttggaggagatgagaaagaagaaagttgaaagatgggaccaatttgttgatgtca

SEQ ID NO: 21513 - DNA, 529 bp, Setaria italica
  Peptide Sequence Number=SeqID_87487
agaccaatgtcctcatcgaggcggccccggggtcgccggcgaaggcggcggagggcgacggccccggcaggtcgctgtcgccggcggcgtggctccggatgctgacccgggagctgcactggagcttcgtgctcggcgtggtggccacgtacggcgtcagccaggggctcggcggcggcatcaaccgcgtcgcgtccgactactactggaaggacgtgcagcgggtgcagccgtcggtggcgcaggtgtaccagggcgtcacgtccatcccatggatggtcaagccgctctggggcctgttcaccgacgtgctccctgtcgccggataccggcgccggccgtatttcattcttgcaggtgaggagcttggtgctgggctttgttggttttttgttaagagttgtcagttgtgcctgatttctggaacaaccagtgagtggtcttgctcaactaggaacttcaaaattgaaagatatcttgctgaaatgtaggggtacaagtaaaaagttctatgacttggtgctgaaaa

SEQ ID NO: 21514 - DNA, 297 bp, Setaria italica
  Peptide Sequence Number=SeqID_87488
ctggctggcatcatagacgaggtaatctcaataatttggctgctagcatcacttggcctacccagctccctccggattggatggtcgagtgggatccctcctcggtcggcgaggataggggttattgatgtcatgatcggcttcgtcatgatatcgtgtatcgacatttagacttctgctgaactttatcttcgttgtttgaaaccgtgcaaactttatctgaatttcgcaaaactctgatataataattgttaactatgttgataagatgggaatgttataatctctgtaactact

SEQ ID NO: 21515 - DNA, 278 bp, Setaria italica
  Peptide Sequence Number=SeqID_87489
ccggccacggctactgggggggagttcgactgcaagtgcaacggcggccagatgtacatcaagagtgaagacacctgcattgccaagaacatgtcttcgttcgggtggctcgtcaccgccctggtcgtgtcgtgcctcgccggcgccggcgtcgccggatacgtgttctacaagtacaggctcaggcggtacatggactcggagatcatggcgatcatggcgcagtacatgcccctggacacccagcacaacgagaaccagccgctgaggacgcagga

SEQ ID NO: 21516 - DNA, 178 bp, Setaria italica
  misc_feature (176)..(176): n is a, c, g, or t
  Peptide Sequence Number=SeqID_87490
gctggcactaacacaatagtctcaactctccttttgtgaatatctgctggcttcggaattttgaaatcagagtacacaacaggatgattttagcttttaagaaatacatggtagtcttcttctgaagatctagaagatataataaccatatttacattgtctattgtagtctattnta

SEQ ID NO: 21517 - DNA, 830 bp, Setaria italica
  Peptide Sequence Number=SeqID_87491
ttccgattaaatcgatcaattttaccctctcttcctcgtatgttacagcttacaaccgtgcgcgcgagtggtaattatctaagtacaaggcagaatggaaggggagtgaccatacatgtacatgtcaagtacaattaagtacacatgaataatgcagacggatgcagcatggatccatcgatggcgcctctgatttgagctgtcgatctgaattgaatgtgtccgatggtgattccctataccctgcagcttggtgatgattagttgaccttgttgcacttgagcctgacctcccctggcggcccggtgagcacctcgatgctgcccatcttcaccatggcggcggcgaactgctgcgaccagagcttccggttggcggcgtagagcgcgacgagcgccgccgtgtcgttgcggtcgacgagcgactggtccgacgtgaacaccacctcgtgggtctgcacgttccggtagtactggttgtccagctgcagcggcgtcttgaagtcgaggtccacgacgcggtcgcgccggcccgtggcggcggggcacctaccccggagcgcggcgccgagagtggcgttcatggcggggtcgagctgcgggtacaggcggccggagaaggaggagcagtgggagcggccgatggagtgggcgccggagagggtgaccacgtcggcggcggtgaggttcttggacgcgaagcgggcgacgagctgggtgaggttgaaggaggccggcggaaggttggcgatggcctcggaggcgctggagacgcggccgtgaggcggccggagggcatggcgaacctgatgccgcccatgatgcgggcc

SEQ ID NO: 21518 - DNA, 1437 bp, Setaria italica
  Peptide Sequence Number=SeqID_87492
gcagtttctacaagagaaaccatggaagcagcgcagctcttcacgcttggcctggccatcattctcttcctcgccgttttccggcgaaggattatgcacggccgtgccatggcgaagccggcattgatcgagatcagcgactctgctgccgcacgcaccgcaatgatcgaccacgcagacgccttctcgaaccgtccgctcacgttgttcccagtggccctggtcaccgggcagcgtcgtcgccggagcgacagcatcagctcggcccagtacggcccgctctggcgcgcgctccgctgcaacctcacctccgaggctctccacccctcacgcttcgaccagctcgccccgctgcagcgcgagtccatagcggccctcgtcgcatccctgtccgcgacggtcgccggcagcaacggcgacgtggtcgttcgcgacagcgtgcacgccgccgtgttcggcctcgtggcgcgcttgtgcttcggcgacctcgtcggcgacgcgcgccagctgctcgccatgcggcgcgtgatgcaggagttcgtgcgcgccatcggcgaagccaacgtcttcgcccgctcatggctgaccaagctcgtgtactggaggcggtggcgacgctttctcggctaccgtgggcagcaggccgccttcttcctccctctcgtctcggaaagggagcggcggcgacgttccgggtgttgcaacgacggcggcattagaccgtacgtcgacactctcatcgacctccgtgtccccgacgacgacgacaatgacaaggacgatgtcggaaggatgaacatcgatgccgggcggcgcgcgctcaccgacgacgagatggtgagccttttgtcggagtttctcggcgccagcacggagtcggccgtttcatgcatcgagtgggcgcttgcccacctcgtcacccagcaggagatccagaagaagctacgcctcgagatcaccggagctcacggcgagggcgtggtctccgaggagcggctccgcagcttgccgtacctgcacgccgtcgtgctcgagagcctccggctgcacccacctgtcccgttcctcatgcgcgacgttcacacggagggcgtggcggttggcatggacacggttccagtgggcggcacaagggtgcatttccttatacgagacatggcgagggataggaaagattggacggaccccgacgagttccagccggagcgtttccttgccggcggcgaggccgagggtgtcggcgccgtgccggggccgaaggagatcaggatgatgcccttcggcgcgggccggaggtactgccccggtgccgggatgggcatgatgcacgtcaagtgcttcctcgccgccctcgtgcgcgagttcgagtgggcggacggcggcggcgacgtggacttcacagagctggacgggttcttcaaggtgatgaagacgccg

SEQ ID NO: 21519 - DNA, 937 bp, Setaria italica
  Peptide Sequence Number=SeqID_87493
cttccgtgatccatcagactttttcaccgctgctgctgattttgcttcctcaggtgcgtcaggtttattgcgctcctgctcatcttgtgcaccatcgatcttattcatctcgctgtttgatccatcagacatactgtccctgcttttaccccacaacacgctgtaaagtcctccaatcagcaggattccacccaaaatactgccgaggtgaacaatctctcccaagaagaatgaggagcaaaacattgtgaagacggagtagagcgggagccaggctgcgaagaagacgggccccttcatctccacgatccacgcttgcaggtagtaggacactccagtcaccacaaacccagtgtaagcgatggcgagcaagctgacgtccagccggagcttccacctagagaagtccctctcggccactgcggcgacgaccagcgactgcagcgcgctgaacacgcagagtgagacggccacgagcatcctgtttaggggaaactccttgaggattctagcctgccagacggctgtgagggaatacgccatgttattgatgaccatgaggaacgtccctgcgatccatgccgcctttgaggtactcgtgtggccgccggagcccggagcgtgggcggcgaaggcatggtggtgtttaacggggctgagccctggcccggtgtagaaggccatgaccaagacgccagcgaggcagagcgctgcaccgctaaccttggctatgccagaggagctcctcaggttcaccacctccatcctgagtaccagtgccaggcagagggtgaccgcaggcacggcgttgcctgctgctgccaccagcgttgccgatgtaagtttcaggctaacactgtacatatttaagctcaatgtattcccgaacaatgcgcacaagaagagcttcaacagcagcgctaacggcatcgacatc

SEQ ID NO: 21520 - DNA, 1052 bp, Setaria italica
  Peptide Sequence Number=SeqID_87494
caaaccaacacaatcgacagtgtggcctagccatgggcacgttcctaggccatttcctccccggcctggccttcgctatcctcggcgtgtggcacacgctcaacaccgtcagggactacaagctcaggggcgcctccggcttccgctccgccacctggttcccgttcccgtcgccgctgccctggctgaggcgcctggagctctacctcctgctctccttctccgtgctcgccatcatcgaccagctcgtcgacctccccatcctcgcgctctgcctccagcccgacagcctcgagcacgccaccatatacctccacctcgccgtctacgcgtcggtggcgctcgccgccgacgtctccgggcgccgcgacgacgccgccggggtcgggggcgtggtggccgcgctcgccgcgtcggtgttcgggcaggagctgttcctcctccgcttccactccgccgaccacgccggcctcgagggccactaccactggctgctccagctcgtggtggcgggctccctagccgccaccgccgccaccgccgtcctgccggggagcttcgccgtggcggtggtgcggtcggcgtccgtgctgctccagggcgtgtggttcatggccatggggttcgcgctgtgggtgccggcgctcgtgccgagcgggtgccacggcgtcggcgtggaggaggaggggagtagcgcggcgatgcggagcgcggtggcgtgcgcgacggaggaggcggcgcggggggcgacggtgatggccaacctgcagttcagctgggcgctcgccgccgtgtgggtcgtgacggcgtacctgtgcctcagggtggactccgggtgcttggagtacgtgcagctccaggcgcctcccagcggcgtgctcgccggcgacggggacacgccgcggaagattgtgttccccgtcgaagaacaggtgtagaagaaagttggtcgccggtcacttgcctgggattattgcacgtctgggttcgcgtcacactgtcatacttgatacttgtaacctgtaaatgcgctgtgtggtgtgagtgcaaca

SEQ ID NO: 21521 - DNA, 680 bp, Setaria italica
  Peptide Sequence Number=SeqID_87495
acgttgtccccggtggtggggtgcgccgccggcacgtcgttcaccaccgcgtttccccgctgccaaacctgggtgaacttgctccccttccctcccgacagcaccaccgtggcgtacaccaccatctccttcccctccgcgtcgtgctccgccgccacgcccgacaccgggaacgccaggtccccgggcgcggcgggcgccatggacggcgcgtagctgtcgagcaccgtcgggtacgcggcgagggtgccgttggcgcggcggaacgccaccacggcgttggtgccgaccatgccggcgcggccgctggggttgatcccccacgccacccacccgccctcgtcctcgccctgcgtcggagcccggaacgcgacggcgacggtgttggtggccgccgtgtagttgtagtgcagcgtggcgccgaggcgcggcaggtccgcgcacgacgcgtagaggcggccgccgccgttgcccgtgaaggtgtggctcgagcacggcgacgccgcctcggcgacgctgctggtaaggaacgacgagcaggccaggacgacgacggcgagggagacgaaggcgctgctagcggagcgacggtgagcgttgccagataccgccatctcgatctcaggacactgcagccaacttctcctaggatggttggtcggattcgaacgtgtcgtcaa

SEQ ID NO: 21522 - DNA, 253 bp, Setaria italica
  Peptide Sequence Number=SeqID_87496
gtgatgaatgatgaggtcaacttcctcagtgagtattaccactctgtcatccctgtcgtcttcgcgagccccttcttcctcatagcaaactactttcttctccccatagtcgtaaccgtcctgtgcctcatgtctattattctgtgcggcaatggagatgttggatatgcattcaaaagcctcggtagagacaactacaccttgcagcatggagtttcaaaaatagtcagatgccttctagccaaagccctcg

SEQ ID NO: 21523 - DNA, 396 bp, Setaria italica
  Peptide Sequence Number=SeqID_87497
gccgagcttcattccactactactacactgatcgacgatccatgcgtgcatgcacgcgtgcgtccatggtgatctgatctaggtgacgattatcttatcgtctcagtatccatgcagttgttaattagttgtgactttgtgaggagttgagcgtgcagcagctagtgatgtgacatcgtcatcagtgagagaggttgctagctgctactgtgcttttgcttaatttcgatgcagtgtgtgtgttcatcagagtgtgtgagactgaatcagtggctggtttgtgtgccagcagtgtgagtggggtgtctgggaatgctgtgcgtagttgctcgaggtcggtcctgatgtagtctgctctcatgtgactgtaaatctaccgtttgtgccagtgagacc

SEQ ID NO: 21524 - DNA, 506 bp, Setaria italica
  misc_feature (9)..(9): n is a, c, g, or t
  Peptide Sequence Number=SeqID_87498
aatccctgngtgccttccttcaacgcaccgtcccatgtggcacctccttcaggttcaagaagcttatagcactcatcacaatttacttgaatgtagcgtgcaacagctccgaatgcaaagttgtcaactgatataaaatttggaccagcgaagtccagaatcacaccatcttctctgcagataccaatgtgaccgataaatggcaccaaccatgtgatgaagggtattggagtccaaacgatgcaacaaggaaatcgggctcttcttgggtcgatctgaccaagctggcttctctgatcttccatcagatcactcaccagcagtcgtcggccaatcgtcgccggcgctgaggatgtgtcgttcgacaaaggagaagaccggatctgtaacccgtccgccgcagcaacggcagctaactcgccgcccgcggcaactcacggtccctcgtcgtccccacctctcgccggcagctctcggtgccctgagccgcgagctcgtcgccttaa

SEQ ID NO: 21525 - DNA, 521 bp, Setaria italica
  Peptide Sequence Number=SeqID_87499
aactcgctcacgctggcccagatcgaggagctcgcggcgcgcgccggcgggaagaagggcggcatcgcgctggtgttcaccgacaaggacgtggccgtggagggattctgcagcagccggtgcggcaagcacggcgccgataccaagtccgcctacatctgggtgggcaactccgtgaagcagtgccccgggcagtgcgcgtggccgttcgcgcagccgcagtacgggccgcaggggaagcccctggtggcgcccaacggcgacgtcgggatggacggcctggtgatggtcctcgccaccatggtggccggcaccgtcacgaacccctacggcgacgcgttctaccagggccccaaggaagcgccgctggaggcgtgcaccgcgtgcccgggcgtctacggcagcggcgcctacccgggcttccccgggaacctgctcgtcgaccagaccaccggggccagctacaacgccaacggcgtgaacgggaggaagtacctgctcccggccttgtacaacccggc

SEQ ID NO: 21526 - DNA, 438 bp, Setaria italica
  Peptide Sequence Number=SeqID_87500
ctctcatccgcaggcctctcgtctccaactcacgcagcgcagcagcagccagccagccatggacgtcagcggagctggagccaccggcaaggtgaagaagggagcggccgggcgcaaggccggcggacccaggaagaagtcggtgtcgcggtccgtgaaggccggactccagttccccgtcggccgcatcgggcgctacctcaagaagggtcggtacgcgcagcgcgtcggcaccggcgctcccgtgtacctcgccgccgtcctcgagtacctggccgctgaggtaagcaacattcctatctgcccctgaaatgaagtcatgtgttcaatcttattttgcaacgtcgtattaatctcggtgctgattcgccttttgcttccttgcgtgaccaggttcttgagctcgccgggaacgctgccagggacaacaagaagacc

SEQ ID NO: 21527 - DNA, 344 bp, Setaria italica
  Peptide Sequence Number=SeqID_87501
aagtcgaatcccatctccctcgcttcctcccaaacccaaaaccgaattccctccaaatccaccccacccccaaacccctcggagatggacggcggggccgcgaaggtgaagaaggcggcggtcggccgcaagctcggcggcccgaagaagaagccggtctcgcgctccgtcaaggccgggcttcagttccccgtcggccgcatcgggcgctacctcaagaagggccggtatgcgcagcgcgtgggcagtggcgcccccgtctacctcgccgccgtcctcgagtatctcgccgccgaggttctcgagctcgccggcaacgcggcgcgcgacaacaagaagaaccg

SEQ ID NO: 21528 - DNA, 334 bp, Setaria italica
  Peptide Sequence Number=SeqID_87502
tcgtctcgcattcctccgatctctcgagcctttcctactcccgataagtcactcgaagcgcagccgctgccatggacgccaccggtaccggagcgggcggcaaggtgaagaagggagcggccgggcgcaaggccggcggcccgaggaagaagtcggtgtcgaggtccgtgaaggccgggctccagttccccgtcggccgcatcgggcgctacctcaagaagggtcgctacgcgcagcgcgtcggcacaggcgctcccgtctatctcgccgccgtcctcgagtacctggccgctgaggttcttgagctcgccgggaacgctgccagggcaacaag

SEQ ID NO: 21529 - DNA, 591 bp, Setaria italica
  Peptide Sequence Number=SeqID_87503
ctcccttccttaaaaccgtaacccaaaaccgaattccctccaaatcaaccccacccccaaaactctcgcgcccagattccccaatttttctctcctccgaagctttcccgaagcgcagaagcgagcagccatggacgccagcggagccacggggaaggtgaagaagggagcggccgggcgcaaggccggcggaccgaggaagaagtcggtgtcgcggtccgtgaaggccgggctgcagttccccgtcggccgcatcgggcgctacctcaagaagggccggtacgcgcagcgcgtcggcactggcgcccccgtgtacctcgccgccgtcctcgagtacctcgccgccgaggttcttgagctcgccgggaacgcggcgagggacaacaagaagacgcgcatcatcccgcgccacgtgctcctggcgatccgcaacgacgaggagctcggcaagctgctggctggcgtcaccatcgcccacggcggcgtcctccccaacatcaacccggtgctgctgcccaagaaggcggccgagaaggcggccagcggtggcgcaaaggaggccaagtcgccgaagaaggccgccaagtcccc

SEQ ID NO: 21530 - DNA, 485 bp, Setaria italica
  Peptide Sequence Number=SeqID_87504
cggcttccattgctcatctcgatcacgcgatgtcgctcacattggggactgcgtcacgggcattacgacggcgctgcccatcccgacctcctcgtccagaacatcctcctccgtcgcgaccggcggcctcgccttggggtcgaacctcttgctcttggggttggtcgccgggtcgtacctcttgatcaccagcacggacgccgacgtcctgaactcgggcgacaccaggtagctccccacgggtcccagctcgtcgggcctctccaccagcggcgccgtcggcggcatccgccccaccacgaacacgttgaaacccgacagcgactcgatggtctccagcacctgctccctcgtgtacgcctccggctcctcgaaccgcaccgacccgtccttcgccgcgcccacctttgccttgaacgcctccaccgccgcctcgtcggccgcttcctcctcccccgaccccgactgcagccggcggctcggct

SEQ ID NO: 21531 - DNA, 1199 bp, Setaria italica
  Peptide Sequence Number=SeqID_87505
ccttccccggcggcatctcccagtcgaatcggtgcacgaggttcgccagcatgacctcgacggcggccatcccgaagttcatcccggggcactgcctgcggccggcgctgaagggcaggaactggaagtcgttccccttgaagctgacgcccgccgcgctgccgccgtcgaggaacctctcggggatgaactcctccgcgtcctgccagaagcgcgggtccctgccgatggcccagacgttgatcagaacgcgaacaccggcggggaccaccatcccgtcgatgttgcagctggccatggagaagtgcggcgcgaggagcggcgtcacggggcgcagccggagcgactcctttatgacggctctcaggtaggccatgctgttcaggtcggcctcgctgacgatgtcctgtccgctgggcacgatgctcctcacctcggcttggagtctcctcatcacttgtggcctctgtatgagctcaatgacggtgtattccagtaccgaagctgctgtgtctattcccccgaaaaacacatcaagcaggatagctttcatgttctctctggtaaggccgtactcctgccgaacagagagcaagacgtgtatgaagtcgtcatcctcatttttggatcactcgctgctgacatcggtttgttgtgctttttctctcatggtcatcgatcagcctgtccagcagctcgtcccaccttctcctcaatctctcggacttggcgcgaaccaacttgcttagcacgccgaagcgggcgaggaacgggaagaattcctcggcgtggaagccgcccaggagcggggacgtgtcgacgatgagctgccggaacagcttgctccggtcctcgttccgggatgactttcccatgacggcgcggcaggccagttcgttcgtgaacgcgccgagcagatcgcccacgtccaccgcggcgccggcggcggccgcctccccgatctgagccatcgccgtgctcacctcttcctcgcgggcgtggcgtaacagctgcaccctcttgacggtgaggaggtgcgtggtgatgagcttcctcgtcttccgccagtagtccccgtacggcgcgcagccgatgtcggtcgtgccgtacatgacgacgtcggcgacgagggagagcggtcgggacgcgaacacgtggtcgtgtgtgcgcagcaccgcctcggcggcgcgcggcgacga

SEQ ID NO: 21532 - DNA, 398 bp, Setaria italica
  Peptide Sequence Number=SeqID_87506
gaggatcgccgtggagtgcgcggcggcgcagccggggctccggccggcgatggcgcaggtgcgcgcgtccatcgcggagaaggcggcgaggtccattgccaaggccgatcacggtgaccaccatattcagctgagcaagctgttggagctcacatgattcaggattattcttcgttcccattttaatttcctagcagcaaattgcttgtttgtgtctcttttatctgtgtgtttgttcttgtagcattagtactagaatcaccgtttggctgttctcgttgactagggtacaaagatcgatggcgagaacttaggcttgtaaggaaatgattgtgcattgggagaggacagaggttgaccagagtgaaatgtaaatatgatgggatggaattttttaa

SEQ ID NO: 21533 - DNA, 356 bp, Setaria italica
  Peptide Sequence Number=SeqID_87507
aaggcgaccatggaggacggcagctacgtcgcggtgaagcggctccgggagaagatcgccaagagccagaaggagtttgaggcggaggtgaacgcgctcggcaagatccggcaccccaacctcctcgccctcagggcctactacctggggcccaagggcgagaagctcctggtgttcgactacatgcccaaaggcaacctcaactctttactccatgctcgtgcgccggatagcagcccggtagactggccgacgaggatgaacatcgcgatgggcgtggcgcgggggctgcaccacctgcacaccgacgccaacatggtgcacggcaacctcaccagtaacaacatcctcctgga

SEQ ID NO: 21534 - DNA, 272 bp, Setaria italica
  Peptide Sequence Number=SeqID_87508
ctgcgtatttgcaggttaccttagttcttagaaccaaccgcgctaaagattcgaaatgcaaggcagtgtgatgaccaccttctccctgagaccaaggcagtgcaacgggagctgccttctcgcatcagcagcatcacagcggccatgtatttcttggaggcgtcggcagcagaagcacacgctgcaacgccagcaaatgcaacagcgttcagtggcaacagtacatcatgataatcttgaggttgacgatcgcttgagcaagaacccatgca

SEQ ID NO: 21535 - DNA, 225 bp, Setaria italica
  Peptide Sequence Number=SeqID_87509
ggggcggtgggtggatcgtctggctccacttcgctggacgaagcgtgagcggtcactggcatgtggggtccgaagccgccagggcccacatgttggatcaggcaaaaccaaaggccttccggaatttgcctgattggtgattcagccgtgcagactttgcgctaggggaagaatagccaggttacctacctgatcagcattgcagcagtacctttttcccctgtg

SEQ ID NO: 21536 - DNA, 428 bp, Setaria italica
  Peptide Sequence Number=SeqID_87510
aaacgaaaagttttttaaagaaaggttaacaaaacccaacaaataatactacggaaagggacaagtaatcacagcaggcctgctgaagagacatcatggaatgaaccctctagctctcctgttgtgactgacttactttcagagtttaacaatgaggatattgaccgtgctatagcgctctctctattagaagaggaacaaagaaaggcaaagacaatagacaaggatacacatttggaggacgatgagctacttgcaagagctatccaggaaagcttgaatgttgaatcgcccccttgcagaaatggcagtgccagtggcggcaatacatatcatccgcctcgtgaacctggcgccgccaatggtggcagtacatatcaaccacctcgtgaaaatggcaccgcaaaattggttggtctaattgtcta

SEQ ID NO: 21537 - DNA, 438 bp, Setaria italica
  Peptide Sequence Number=SeqID_87511
tcgtgggatgcaggggttgactttgccgcctcgggagggagcgccgccgcgtgtgcgatggagcggagtgatgacgacggcggacggatgggtcgttgacgacggaggatcggagatctctggttggctcctcctcctccgcgctcggtcgcctttccggggcgatgatggcggcccgctacctggcacctccccctttttccctccgtccgtcggaacgatttggatttgccccacgagctgtagaggcagcgagcctgggggtggagcggagcagctggagctggagctggagctgggcgcgcacgtgtacaagagcaagtacagcggggcagagggccggacgagggaggaggaggcgttggggttggtgcgcggcggggtcgatggatgctgctggcgccgcctgctcttgaccttgccccttgtcccttgtcc

SEQ ID NO: 21538 - DNA, 117 bp, Setaria italica
  Peptide Sequence Number=SeqID_87512
tgtgtcataactacttctagcacggcgcagcaagaatctgaagggccactggaatcgataactggcacagcaagggatccacggacctcatggcgcacggcatgatccaccctcaaa

SEQ ID NO: 21539 - DNA, 678 bp, Setaria italica
  Peptide Sequence Number=SeqID_87513
gcacacatatttccagcagaaagatgaacatcacaacgacagcggacttcataatatgaaattcattactactagagcaggcatgcaacttgactgatgtctgggtggttcaacacggggactaacagtcagcatagtacttgacactttgatagcatacaagtccagcaccccttatttatagcacaggaaaactctcacgtcgagctaagcagtggtggtggtggttttttttgaggtagaaccggcgatcgctccagcctcagtcagcagcggcaccagcttcccatcattgttcagtgccatggtatcgtcgcagccaccgatatgcttcccactgatgaagacatttgggacagtcctctgtccagtccattccttgagagcatcctggagctcagatccatcactttccacatccagctcaatggccttgaaggttgcccccagtttctcgaacagctgcttcacacggacgcagaaagggcagtaagacttgctgaagacgacgacgggcgcggaggcgacgatctccttggccttggtgagcgccatagctctggattccgggcttgaggacgaagaggaggcgattcccatccgtgcctcgtccgcctcgactcgtatataaggcaggggacgacgaagagaggcgccggggaggtagttggggtttgg

SEQ ID NO: 21540 - DNA, 2181 bp, Setaria italica
  Peptide Sequence Number=SeqID_87514
tttttttttttttttttttgtttgtactttgcgagcggaacctttgggccctaattagtcaaggtttggacaataattcacaaatacaaacgaaaatgctacagttgcgcatttatggtaaacttccaactttggcactcccaaattgaaactaaacaaggcctaaagctggcgccggtacattgtcatcccggcaggagcaggcgtatgtcacctcagccgattcaatttcaagccatccgaggaccaaggaccaccgccgtgatctgctccgcctccggccgcatcagtacacgagccctgaccaagcgaccattgagagcagatcaggcccctcagcaatgcagcagccattaacaccgaaggcaggctacgagacggccaagaccggccggagacaggccggcagagttcacatgccatggcaggccacctttagagacacagcttggcaccttccacatcacgccgctactgcaacctccaatgactccttcagatcaccaggccaaggccggtccgctagccacagtacccgactgtgtttgtgatgccatgaatggaatggccaagctcccccgacagttacatcgacagtacatgactgtggcgctcaacggctcaagcatagcataggaatgggatgacaaggaatctatagctggtggtgacaatggaatatggcgcggccaggtgaatcctggcacgccggaaaaatagggagggcaggcagacagacagacagggacatagcgagacactacttatttagctcctatctataaactcacgatgacctccactccagacacatgcttggattggatcggatgtccatcttctcccggaaagccggcggtgacggctgcttcggctttaccttgccacatgccggcgctctgctctgctctgctctgcttcacaggtcgtgctcgggcttgtccaggctgccactgtcgcagtcgaccatccggcttgagccgcgcccgatcctggagaaggaccccatggcggacgagagccccttgaagctgctgctgccaccgtcactgaggttgtgagaccgccgggaccgccgccgggcgagctgcggggaggagactgccttctcagggtcggggtcactagacgtgcttgtccgggccaccagcagccgcgagatgctgccgcggcagaatgggcaggccggcgacggcagtgtcagggtcgtcgggttgggcttgttgtggcagcacagcgccagcgtgcacggcgcgcacatctggtgcccgcagtcctgcacctcgatggtgcaggcctggtcgaagcagatgcagcacagctctgcatcgctcacctccgaggatgcatcatccataacatcggcggcggcgcaaggcgaaggagatggcagagagtacttcgtgcccttcaagatcttcttctccctctccctgttggcttccatcagggccgcttccaggagagcctttgcttccggatcaagctcgctgatgaactttagaggtgaaggccacaccatgggctccgctgatgaagggtttagcaaagctgcacacgcttcatggttgcgcttcagcgcgacagcatacgggatcctccctgccgagtccctttggagacgatctgcgccccaggcaagcagtttccggatgcaatccaggttcccgctgcgagccgccagatgcaatgatgtgctaccagggaacccgtatgagccggtcaaagcggacacaatggcgccgttctccagcaacatctgcaagcaccctggccgcccctgcctggccgcgagatgcagcggcgtggcgccgtggtcgtccctgacgttgacgaaccgggcgaaaccccatgagtcggccaccggcgtggtctgcgccgccgagaggatggcctgaaggcagtcgacatggccgaagtaggcagcgtggtgcaggcagctccgcgcgtgcaccgaatcgaacattaagatattggcgccggcctggaggagcctgagcacgcagtcgatcttgccgtgcatcgccgcgagcatcagcggagtctgcttgtgccgattcaccacgtccggcggcaccccgtgatccaagatcatggacagcacctcgatgcgcccattggcggcggcgatgtggagcgcggagaggcggtcgtagagcgtggcgcggcgcgcgagggaga

SEQ ID NO: 21541 - DNA, 322 bp, Setaria italica
  misc_feature (1)..(14): n is a, c, g, or t
  misc_feature (28)..(28): n is a, c, g, or t
  Peptide Sequence Number=SeqID_87515
nnnnnnnnnnnnnntttttttttttttnttttttttttttgttgttacaacatgcaaatatgacatgtttattcttgcaaacatgcaaatatgatggcaaatataaagcatacaaagaaaataaagcaaaaggagatgcacattatgatggcaaatataaagcatacaaagaaaataaagcaaaaggagatgcacattagagcacaaagccagttcccttcagtttctcttccacgatgcaatctagctttctccccatctcttggctcatgtgattcacccaatcccccacctttccctttcctgaagaacactgacttct

SEQ ID NO: 21542 - DNA, 1309 bp, Setaria italica
  Peptide Sequence Number=SeqID_87516
gtaaaccacatgaacataaagaaccaggaaggccaatttcttccatttcttcactcatgtgattcaaccgggtccagtttctcctttcttcagtgattgtcggcaatcatgacgtgtttaagagagaagaaaagtagaacatgcaaatatgacatgtttattcttgcaaacatacaaatatgatgtcaaatataaagcatacaaagaaaataaaagcaaaaggagatgcacattagagcacaaggccagttcccttcaatttctcttccacaatgcaatctagctttctccccatctcttggctcatgtgattcacccaatcccccaccttccctttcctgaagaacactgacttctcaacaattaggttgccacgccggaccaggtcacctgtctggttggtgtccaagctgctaagcttatcaaagctgcacaaccgcaccacctcctcaggtatcccgtcttcttcttccttgatactgaaagggacaccgaggaatgttgcaagtctgatgacatgcttcactggttctgacatcatatcttcatacttgagaaaaagaattttgttagggcatgcgatgctctccctccagtactcaaggcaatgctcccaaaaaggtccgtagggtgagaaaccttcggaaaacatgttgaaagcagcctcaaagtcgatgctatgttccctatgaagctttttctcgaagtgccaccgggacacaagggcgtcctttggatctcgacaaacgtacacaatacgacaaccacaagtagctaaggaatttgggaacaacgagaggggcatatgggtagcaagaagccttggagatgggagtgtctctacataggtcatgtcaccatctcgagggatctcgaggaatggcaccacctcctggggatgacggaagagaagagggtgattgccaaactcataccgggagcgattggtgattgcgaaggcgagggccttgatccacgtggtgccacacttggggttcgttgcgagaacgatgtcgtcgtggcgagcttcgaaggtgttctggaggcgcatgatggttgcagcgaaacgtggacggagccagtagttcttgtagagcaccaatggctccgaccacccctccctcgtcggaagtttggatagaggatcatcagtgccgtggctatttgtggcgcttccctccatggcttgtgccatagctcagctgctttggagtgttcttgcgcgctctgcagctgggacgatggattgggtgggtgcgtgtagacctgcggattgagcagctctgctggtggctacgatatagtaatt

SEQ ID NO: 21543 - DNA, 257 bp, Setaria italica
  Peptide Sequence Number=SeqID_87517
aaggttcctttcatgcccaaaggacatcctttccactatttaatagcataatcagtgttgaagcgattgatgaggcggaaggagagttccagaataagcgttatattttaccaagaggaagttgcttcttgatgtccgacttcaaacgtgttcaagatctcattcctggtagttcagatgaagggtataatcttatagttgttgacctcgtatcattcctttcgtgggcagctgagcctgagatggaagagagaaag

SEQ ID NO: 21544 - DNA, 530 bp, Setaria italica
  Peptide Sequence Number=SeqID_87518
tctctttaattatcatttcaacatttatagattgtgagttaggaaccttgtagagtgataaatcattcattcattatgctgcaggtaccctacacttcccaacagatatttgctgtaccttccagtgcaagaacttgcccatacagccggagcccttcttgttttgtggattacaaatagggagaaactgcggatgtttgttgagaaagaattacttccttcttggggggtgaaagaccccactgtgttttattggctgaaggtgaaacctgatggttctctaattggtgatctagacttgttccatcacaggccttatgagtgcctccttcttggctacataaatgttaacacagatgctaagcaagaattaaacttcaagttattagaaggaagccaagtaatcatgagtgttccaggaattactatcagaatatattccaggtcctaaacctccaagatgcctcgagctttttgccagagagttgtttcccagatggacctcttgggaatgagccacttcattttca

SEQ ID NO: 21545 - DNA, 1252 bp, Setaria italica
  Peptide Sequence Number=SeqID_87519
cgagcagccagagaagcggaagaagcgcaagcgtaatcagaagccgaagccgagggagctcaatgccatggagcggatcgctgaagcgcgacaccaggaagcgaggactttactgttgagtgcacatgaatcactcattaaggataaatatctactggaccacctttccaagatgatcgagggcaaggagcacacacttgatgtgggaagtggtcctgagaataatttcatcgagcttgggacctcatggcgagcaccattctatgagattactatttgctttcggaaaccccttgttctgggcaatggggaaggttcctttcatgcccaaaggacatcctttccactatttaatagcataatcagtgttgaagcgattgatgaggcggaaggagagttccagaataagcgttatattttaccaagaggaagttgcttcttgatgtccgacttcaaacgtgttcaagatctcattcctggtagttcagatgaagggtataatcttatagttgttgacccaccttgggagaatggatgtgttcgtcagaaagaagcgtaccctacacttcccaacagatatttgctgtaccttccagtgcaagaacttgcccatacagccggagcccttcttgttttgtggattacaaatagggagaaactgcggatgtttgttgagaaagaattacttccttcttggggggtgaaagaccccactgtgttttattggctgaaggtgaaacctgatggttctctaattggtgatctagacttgttccatcacaggccttatgagtgcctccttcttggctacataaatgttaacacagatgctaagcaagaattaaacttcaagttattagaaggaagccaagtaatcatgagtgttccaggtgctcactcaaggaaacctccccttgagaaattactatcagaatatattccaggtcctaaacctccaagatgcctcgagctttttgccagagagttgtttcccagatggacctcttggggaaatgagccacttcattttcaggattccgtttacttctcagagaagtaatttgattggcaatagcatggtgctgaagaagcggaagagaacaccctagctccagacgaactggtcgcctgcctgctgtcctaccgtgacttcttgattcccagcagcacttgattggtagcaaggtcaagcgaatcctatctatctaggctggtctgggagctgacatcccttattactctatagttccac

SEQ ID NO: 21546 - DNA, 454 bp, Setaria italica
  Peptide Sequence Number=SeqID_87520
attgtcaaggacataaagaaaggcatcaacccaccttctgctagtctcatatacttcactggcccatacttggcgacaggattcagaattggggcagtagctggaatgataggcctaacggaagcaattgcaattggaagaacatttgctgcactgaaggactaccagattgatgggaacaaagaaatggtggctctaggaaccatgaacattgttggttcaatgacttcttgctacgtagccacgggtaacaattaattcagcctaaaacaattcgtagcccatacagatgtgccatttttctgacagaagttgttccccataggttctttctcacggtcagcagttaattacatggctggctgcaaaacagcagtatcaaatgttgttatggcaattgttgtaatgcttacactgctgttgatccaccccattgttcaagtacactcccaat

SEQ ID NO: 21547 - DNA, 596 bp, Setaria italica
  Peptide Sequence Number=SeqID_87521
agtgaagtatatgagactagcagaaggtgggttgatgcctttctttatgtccttgacaattgaaacaccatgcttgtctgcacgagtgatgtacacaaaaaaggtggatatgatcactgaaatgagcggtgcgattgcggagacccaaaagaacctcttattcttcttcccaatgtacttggcaaccagaaggaatgccaggaaggatgcgccgatcagtattgtctgccaattccacccatggtgaacattgccccagaccgattccatgactgagataatatcacttttcttggtgaaatgtgcaattccaaggaaacctttcagttgctgaagagcaattgtaatggcagcaccggccatgaatccgacgatggcagcatgagacaagaactctatgagaaaccctagcctgaagaatccaagcgcagcctgagtaacccctgcgaagaacgtcgcggtgaacgccagccggctgtactccagtgggtgcgtgttcgggtcaatctcattctggaggagagtaccgagcaacagcgacaccacagccacagggccgatggctatatccctggagctgcccatcgccgcatata

SEQ ID NO: 21548 - DNA, 1562 bp, Setaria italica
  Peptide Sequence Number=SeqID_87522
gaaagtcatcaacccaccttctgctagtctcatatacttcactggcccatacttggcgacaggattcagaattggggcagtagctggaatgataggcctaacggaagcaattgcaattggaagaacatttgctgcactgaaggactaccagattgatgggaacaaagaaatggtggctctaggaaccatgaacattgttggttcaatgacttcttgctacgtagccacgggttctttctcacggtcagcagttaattacatggctggctgcaaaacagcagtatcaaatgttgttatggcaattgttgtaatgcttacactgctgttgatcaccccattgttcaagtacactcccaatgccatcctttcctctatcatcatatcagcggtgcttggcctaattgactatgagtcagcctaccttgtctggaaagttgataaattggactttctagcatgtctgggagcattcctcggtgtcatattttcatcagtggaatatggcttgctcattgcggttgcgatatcacttgctaaaattcttctccaagtaacacggccaagaacagctttactcggaaaccttccacgaacaactttatacaggaatgttgaacaatatccagatgccaccaaggttccaggggtgctaattgttagagtggactcagctatctacttcacaaactccaactatgttaaagagaggatcctgagatggctcagagatgaggaggaacaacaaaaggaccagaagttagccaaaattgagtttctgattgttgaactatctcctgtaattgacatcgacacgagcggaatccacgccttggaggagttattaaaagcacttgaaaagcgcaagattcagctggttcttgccaatcccggaccagacgtgatccagaagctccgcgcagcgaaattcacagaactgattggtgaagacaagatattcctgacagtcagcgacgccgtgaagaaatttgctcccaaggtggtggataatgtctgaaggggtttcagagtcatgtacaggaggggcaacgggaagtctagctattcttttccagtgaccggtgtgaatttatagagctagaagcagaacggaacgggagtaaatgacaaggtctgccaaatggtgaataaagaagatgcgctagagttggagcgcatcacgttttgcgagatgtggttggataaaaagcagatgttggtggcctagttgggtgtctatgtcagtccgtggttgtggggtatgttctctgttggcaggcacttccgagattgaaggtttgatggatcagaagataccgattcctgacgattaacacatcaccattcatcgttgaaagaagagtcacctgtttgggatttcagtctccacgtctatatcttatagtaattatccccttgtttctcgtaattccaggctttatgatgaggttttcgttttacatttgcctatgtatattctgttacgctgatgcattcctaagggttccctgaaataaaaggattgattgtgtagcgtgaggaatttattgaagaaggaaaaaaaa

SEQ ID NO: 21549 - DNA, 342 bp, Setaria italica
  Peptide Sequence Number=SeqID_87523
tgtatcctgatgtaaataagtatgtgaacatttcagtaattgaagcaggtggtcatatccttacaatgttcgacaaaagaatcacccaatttgcagaagagaagttcaagagggatggtatagatttgaagacaaattttaaggtcgtgaaggtagaccataaggatattaccatgaccaatcctgcaactggagaggttgctgttccttatgggatggctgtttggacaactggaattggaacccgtcccatcattatggatttcatgaagcaagttggtcaggagaaccggcgtgcgctagctactgatgagtggctcagggttcaagggtgtgaggagt

SEQ ID NO: 21550 - DNA, 2084 bp, Setaria italica
  Peptide Sequence Number=SeqID_87524
taaaaatccctgtcgacgatccatccaccggacttgtcccttccccatggctgcaccctgcacgcatccatgcgaggctgactgtgcatgtggcctggatcgaccgacgacgatatggcgagccggccgctaggtttattctgctggcggcggctagctgacctgctcgccgatgaggtcgaggccgacggcgaggaaggtgacgccctggaagagcaggaagtagaagtgcaggccctgcgcggacagcaggctccgcgtggcggcggtaagcaggaggaacgcgagcgccagctccttcttgaagatccggttcggcttcttggccttgctgctcttcttgggcgtcgccggcgcggcggccagcgcggcggcggcgtcctccttgttggtccactcggcggcctcatgctccctgagcttgccccactcctcgagcccaccctcggagacgccgcgcacgagcttggcggccggccgcgtgggaacgtgggtctcctcggcgagcgcgaggatgtcggacgccgacgaggtgcggccggccttcttggtgacgatccactcgtaggagctccccagctggaacagaccggacaccatggcgttgaacttggtgacggacatggtgttctcgaagaggaggtaggggatcacgaaggggaacgacttgggcgccggcaggatgttgaggatggacatgagcaccgggatgtagcagatgacccagatgggcagctccgcctcgggaacgaacatggtgagcggcaggatcacgcagaagagcgtgaaggagtagaagggcagcaccagcttccgcagcaggaagaagagcatcaccaggttcgccttcttccagaacgggatcttggacttgaagaccgccgggaggcagaggcggaagagctgcatgggaccggagtgccaccggtgctgctgcttccggtaagcctcgtaagactccggcagctcgcagaggaccttgacgtcgttgaggaagatgaacttccaaccgttgaggtgggcacgcacggcgatgtccatgtcctcgacggtggtgcgctccatccagccacccgagtcctcgagggccttgatgcgccacacaccagcagtgccattgaagccaaagaagttgaggtacacgccgttgacctgctgctcgacctcgaagtggaagcacaggttgatgttctgcagccgggtgagcaggttctcgtccttgttcacgaagctccagcgtgcctggaccagacccagctccgggttccccttgaagtgtggcacggtgagcttgaggaagtccgggttgggctggaagtcggcgtcgaagatggcgacgaactcgtagtccttgacgtagtcgcagctcatggcggacttgaggttgccggccttgtacccggtgcgcgagaggcggtggcggtagatgatgttgacgcctcgctggctccacttggtgacctccgccttgatcagcatctggcacacctcgtcgtccgagtcgtccagcacctggatcagcagccggtcccgcggccagtccatctggcacacgtgcgagatggatgtctcgtacacctctttctcgttacacattggcatctggatgagcaccatggggaagtagccgccggcggcggcgtcatcggcgtcaccgttctcgacatccgcgctcttcttcttgccacggcgcttgccggaggcggcagcggtcgcgatacggggcttgatgccgcggatcttgatccagaagcacgcgaggcactggacgatgcggtccacggactgcaccatgaagagcaggatgcagaaggtggagagcttctggatggcccaggcgatgtagtcgacccggaactcgagccacgccacgtacgcccggtgcagccacccctcggatctcccgccgctccggcacgcggaggtgctccggcagctgccgcaggttctccggcaggtggcggaggtgctctggcaagtgctgcaggtgttccggcaggtgctgcagctgctcctccagctcctgcaggttcccggggaggtgctgcgggaactgccaccccttgaggtgggcgacggtctcc

SEQ ID NO: 21551 - DNA, 564 bp, Setaria italica
  Peptide Sequence Number=SeqID_87525
tctgtgcgatcggagatggtcacgaagaatagcagcgcagcacaggttatgaagtggccattcatcaagattgagttccaccccgacgcccctcacaggttcccggggctagacatgcccaccgtgcagacgtacatggatgtgatatacgagtcatctagcaaagatggttgaccaacaattcatgttggttggattttctcctccgaacctccaacgcccatggcggtcggtctggtcagaggaaattgtaagcaaagagatgtcgtgggaaggaacatggtgtcctccctcgatctttaccttggcgaattaggaggctggtgccataaataagagtctgactagttcgtccatgttccagagcatgtcatagattctgtcttgtcttttttactctggttcaggcaattgtctgttgttgtgtccgggcgttaatttccgtccttctgcatttgccaatttgccatttgaaatctgtacatacgcgtctcagattggtggatgtcaccacttattccaataggaggtggttgcacgcgttattgtgagattaaaaaaaaa

SEQ ID NO: 21552 - DNA, 1316 bp, Setaria italica
  Peptide Sequence Number=SeqID_87526
ctccccacaaatcgccccttccctcacgccttgctgtgcctcttcatcggcggccttatcgccggcgacggtgggagccagcaatcccggtccccttggccctccctcgtcgcggtgcggagatccacccgtcaggtgttggattggtttcatcgtttgctggagtgaaatggatgaggttgtccctgctttggctactggtgaagcttcagttgatgctgtgacagagcaacctttgaaggtgtacatatgggacatggatgagacacttattttgctcaagtcgcttctggatgggtcgtatgctggggcctttgacggcgtcaaggaccgtgagaaaagtgttgaaattgggaagcgctgggagaaccttattctcgaactctgtgatgagcacttcttttatgaggagattgagaactacaatgaaccttatcttaatgctttgagtgaatatgatgacgggagagacttgacctcatatgattttgaggctgactgttttagttcaccctatgatgatgtcaacaaaaagaagcttgcttacaggcatcgtgctattggagagaaatatgcaaagggtctggaaaaaattctggacaaacacatggtcaaagtctggaacgatctgtacaatttgactgataaatatactgatggctggctgtcttcagctcataagctattggaagaagcattgggcaaatcagcagcggcacctactaccaactcttcaagcatcaattgcatagttacatcagggtcgttgattccaagccttgccaaatgtttgctgtatcgccttaatgatgtggtctcatctgagaatgtttacagctcatgggaagtggggaagctgcagtgcttcaaatggatcaaggagcgctttgacggtccaaatgtccgcttctgtgcgatcggagatggtcacgaagaatgcagcgcagcacaggttatgaagtggccattcatcaagattgagttccaccccgacgcccctcacaggttcccggggctagacatgcccaccgtgcagacgtacatggatgtgatatacgagtcatctagcaaagatggttgaccaacaattcatgttggttggattttctcctccgaacctccaacgcccatggcggtcggtctggtcagaggaaattgtaagcaaagagatgtcgtgggaaggaacatggtgtcctccctcgatctttaccttggcgaattaggaggctggtgccataaataaatgtcggactaggtagaccaataaaataaagaagtactagaacttaagttacgttacctaattagttacctaa

SEQ ID NO: 21553 - DNA, 792 bp, Setaria italica
  Peptide Sequence Number=SeqID_87527
ccgctgccgccggcgcgcgagggggggcacctggatcgggagcctgacgctgggcgacaccaagtacatcaacttcagggagatcgacctgctcacccgttacgtcacctcactgtacttcgccatcgtcaccatggcgacagtcggttacggcgacatccatgcggtgaacccgagggagatggccttcaccgtgatgtacatctccttcagcatcctcctcagcgcgtacctgatcggcaacatgacggcgcttattgtgaaaggatcgaagaccgagaggttccgggacaagatggccgacctcatcaggtacatgaacaggaacaagctgggcgccgacatcaggtcccaggtgaaggatcacttgctgctgcagtacgagagcagctacaccaaggacagagtcgtcgacgacatcccggttgcggttcgatccaagatgtcccaggcactgtacctcgacatggtttcaaaagtgcacctgttcaaaggatgttcagaggacttcctgagccagattgtggtaaaattgcacgaagaattcttcctccctggggaggttatcttggagcaaggcactgtggtggatcaaatttatatcgtcgtacacggatgcctggaagaggtagccaccggagaaggtggatcagaggagatcatctcagagctcttgccttacgacatcgtcggagatgtcgctgtagtctgcaacgttccacagccatactcagtcagggtctgtgagctttgcagcgtcctgagaatcgacaggcacgtccctgaccagca

SEQ ID NO: 21554 - DNA, 1043 bp, Setaria italica
  Peptide Sequence Number=SeqID_87528
agcccccatcgctgaattaaccgcaagccgattcttttgcgtccatttttcggccaagccgcgacgtttgaagcaaggcaactttctactaccatctgtagcgaagcgccgtcttctactatcatccgtagaaacacaacgccttggctagcttcggcagcttgttgcatcgtcctctgtatttcggcagacagagagcaggcgtcagggttcaggagtagaactggaatgtcgacgcgtcctggatgatgctccgtagcccgccgatggtggacgtgagcatcagcagcactccgacgacgatgcagccccagttggcaaaccacgacgcgctgaacctcggcggcttcttgatctttagccacagaatgcaggggaggaagtaggatgtcggggtaaacccaaaccctcccaagaaaccgaggaggtcgccgaagaacgggaacgtcaccgcgatgaacagcgtgaatgcaacgtaagctgatcgagccacgagacggagcagcaatccttgaggcaccctgaatctcgtgatcagaatcgtctcaatggattcgaatatcggcatcgcatacacctgatagcttccgacgacatggatgacgaccatcatgttggcggcggcgacgagccatggaggccgctgcagcgcgacgaggacgttgtcgccgacgtcgcggccgaacgcccagtacccggcgatcgcgacggggaagtagcacgccgcggtgaccatgtacgcggcgacggtgcccttccacatggtcgccccggacggcttggtgggcgtggacgggatcgtggcctggatctccagcaccacgccgtgccccgcgtacgcgaacgccacctgccccagcgcgccgaacacccgaaacgccgagtccgccgccggcccgtccctgtacgcgtagctcaccccggtcaccggcccgcgcgccacgcacgccgcccacgagatggtcgagtagctgagcgacatggcggcggcgaggaaggagacggcggtgatggcgtcgagatttgggagctgggagaggagg

SEQ ID NO: 21555 - DNA, 545 bp, Setaria italica
  Peptide Sequence Number=SeqID_87529
ctcccagtatttcctttcaggtcatttgtccaagtgctatcaccaaaaagaatttccgccgcgaaaatgatatttgtaaacagtgtaagaagaaatgcaagcaaggccaatatttgaacatatagcgatattttgtatcttcccatcaataatcttgatgacgaaacacggaaaacagggataacagatgaaggaagaaacatagcctggataactgggcagatgatgagcaactgatataacccctcggaacctgcaaccttcgcatggtagatagtagtaatcatggcaaaaaccttgggtaggatatgatgtgcaaacagaggcaatttaacaccaaagagattctctgaaattatgtcacttccaataatacaggtcattgagatgaggtggccagaaaagcaaggatcactaataacacaattggtgccacaggatttgtaaatatctgattcattaactgtattgcctcttgaaagtgaatggccattgcatttttttgattcatctgccgctgagctcagcagaacatagttcacaag

SEQ ID NO: 21556 - DNA, 215 bp, Setaria italica
  Peptide Sequence Number=SeqID_87530
agttgagcctgacctcgccctgcgcccccgtgagcgggctgatggcgcccatcctcatcatggccttggcgaagtcggccgcgaacatcccggcgttgccgctgtacttcttcaccagcacgtcctgggacccgccgttgaagagctcctggtcggagtggaacagccccctcttgcccatcaggttcgtgtagtaggcgttgtcgaacgcctcg

SEQ ID NO: 21557 - DNA, 1076 bp, Setaria italica
  Peptide Sequence Number=SeqID_87531
acgacaacaagtgccccggagcggaaggcgtcgtgaggaaacatgtcggaagcttcaacgatggcatgaaagcagggcttatccgcctcttctttcacgactgcttcgcccagggctgcgatgcgtccattctgctcgatccgaccgacgccaaccggcagccggagatgctgggcatcccgaacctgagcctgcgcggcttcgaggtcatcgacgcggcgaaggcaaagctcgaggcggactgccctggcgtcgtgtcctgcgccgacatcgtcgccttcgccggccgcgacgccagctacttcctcagcggcagcgccatcagcttcgccatgcccgcgggccgctacgacggcaacgtgtccctcgccagcaagaccctccccaacctgcccccgccgttcgccgacgtcccgcgcctcaaggccatgttcgccgccaaggggctcgacaccgtcgacatggtcgcactctccggcgcgcacagcatcggcagctcccactgctcctccttccccgaccgcctcagcaacacctcggacatggaccgcacgctcgccgccaagctcaaggccaactgcacgtcgccgaccggctccgacaacttggtggcgcaggactacaagacccccgaccagctggacaaccagtattacatgaacgtgatcaaccgcagggtgctcttcgcgtcggacgccgcgctcctcaagtcgaacgagacgatccgactggtgtacgaggccgccttctctccgaagctgtggcagtacaagttcgggcaggccatggtgaagatgggcgccgttgaggtcaagaccgccgccaatggggagatcaggaaggtgtgcggcttcatcaacaacccatactccggctaattgatggtcggaactaccctcagatgaccgagggcgggtgcaccttcgaacctgacgtgtgagatcgagagaatactacgcggctacgctcctgctcactgtgcttattttttttcattttcaattctttacactttaatttcccctaatgttgcttcatttattttgttgcatttatatggtgcaaatttgattgta

SEQ ID NO: 21558 - DNA, 544 bp, Setaria italica
  Peptide Sequence Number=SeqID_87532
aggaggatccccgcccggcgacgaggaatcaaggatggtgaaggcggtggtcggcgacgaggcgcacctcaaggccttcgaagaaggcgctgtcctcctcctctcctccgccgcaagcccaggtcggcctcgtcgtcggcaagctcagcgcttcctccgaccgtgccctcgtctattccctccttcccacgccgcccaccgaggacgccgcccccgcatgctccctccgcgccgcccccaagcccaagacctccaagcccaaagccacttcctcctctgacgcctctcttgaattcgatgtcgattggatcgccgagcacgcgcgacaggtgtcgaggatgctactcggaggaatgagtgtcgtaggtatttacatatgggcttccgaggcatccttcaaggccacatcccccgcagtcttatcgcaggttattagagcagtttcccaagcttggtatggccgtgcattcactgagaggctgctcattcacatctcctacagtcctcggagatgggcctgtcgtgtatgtgagcttgcatcagg

SEQ ID NO: 21559 - DNA, 315 bp, Setaria italica
  Peptide Sequence Number=SeqID_87533
tgaggcagtccgtggtaacaatctccgcagctatgtcggtcagatggtttctgaagctgaggagtacttcacaaagtggggagacagtggcactgttgatttgaagtatgagctggagcagatcatcctactgattactagccgctgcttgcttggaagggaggtgcgagagaatctctttaatgatgttgccaccctcttccgtgatctttgcaatgggatgcagccagtgagtgttatattcccctacctcccaatccctgcacatcggcgccgtgaccgggcacgggcacggttgggagaaatgttctccac

SEQ ID NO: 21560 - DNA, 392 bp, Setaria italica
  Peptide Sequence Number=SeqID_87534
cggaggacaaggcaaacactccttgtgctaccaataaaatatctggatctagtaacttgcccaccactgacaaagctacaaccgtaagcaatgctctgcaggaattgatgctttcagaggacaaggataatgccaattttgagcgtgaaaagctcaggattaaactaggacatatgcaaggagtgtgcaaactcgttcatgatgagtctaccagcgcttctcagcaaatgattgacttaattcaaaaacgtgctcaagaggaagctcggctggtggaggtccactccaggatcaacactgccattgaggcagcacgtaaagagagggagcagcggtacgctgtagaggcgcaagccaggcatgtgaaggaacttgcaaaggaagaggcattg

SEQ ID NO: 21561 - DNA, 460 bp, Setaria italica
  Peptide Sequence Number=SeqID_87535
ttttaaagtaaagtaaaagaataagaataaataaataagatgcaaaattggaaataaagaaggaaaagctctggttgaagcagcaacgtagtgaaagctggaatgtccagtacaacaaagattggcggtattaagtccaatgtcgaaatattgtggggtgccagaagcgtctgtagcatccacaccagagaaaggggcaatccttttctatgatatcaaaagacatctgaaagtcgagggggaggcgtcagcggtggggctaggagcgctgccgctgaagccgccgtggcgagagctgcgacgggttgcaatggattgcggcgcggcgaccaaccgcagtggaggagtggagaggagagaaaccaaggccggcgcaaggctgctggacatcgatgaggaatgcctgccactgcactgcactgcacggcgctgctctgccgccgcccgcccccctgttctt

SEQ ID NO: 21562 - DNA, 628 bp, Setaria italica
  Peptide Sequence Number=SeqID_87536
gattgctctaacaggagtagctgtgatggtttacgtgcaagccatcagaccataatgaacgtgcgtcaattgacttccatgggacgatgccagctctggcaatggctgtgtcacttccttgttgggatctgagtcgtcaatatgcaacctcaaggccttcaatccagatgatttagcattgaacacagcaccggcaagatcagaatctgtggtcagcagcaccttatcaccttcatcatcttcatacaaaagttgaaccgtgctcttttcactaccgatgcctaacctttgcattacagaagatatcaactcatctaaactctcagacccacaagtaaatctgtgcatacgtcccttttgatcttgaagtttaaaggcaaatgaattaccaacagcaggaggataaatactactcctgccatccccagcttctgatggcatcactaaagataattcactgtgactatcaaaatcctcatctggaggctctagagcaagagcggagtcccagaatttctgcattattgtgtttgccgcatcatttgcagtcccaggacctccttcaaccattgaaatggctgcatgggtaagttgttagacttagttgtcgtacttgtagttcggtagt

SEQ ID NO: 21563 - DNA, 683 bp, Setaria italica
  Peptide Sequence Number=SeqID_87537
agaataggactttagcacgattgctctaacaggagtagctgtgatggtttacttgagacactcgaaagcataaatttcaagagggatgtataaagctaatatgcatagttagaaggattgcacgccttggctcattgagaaggctaagagtgaagaaatgaagggtcatcaacagtgcactgagtgcattggtggcccaaaacggatcagctgactgtcaagttctccaattggctcagacttggtgggaaggaagcctataactatggtatcttcccgtttatatttcacgggaattcacactatcgcatatacagtgaaacatgtaccttttacgactatttcttggtcaccacgaattcggtgatgtctcgagtaatctctataaccatgtatatacatctgagtaagaaaaccaatgctgaatctctcctgtgtaggaatcagatcccaaaggtcgagattcattttttttcacaggaattcatagttttcacgaattgcgtgaaacctgtgtttcttactactttcttggtcaccatgaatttggtggtgatatgatgctgcaagtactcttatttgacttgctgtataaccatgtatatgcatctgtgagagtgaaaccaagaatgaatctcctgtgtggtgttccgatcctaatgttgagaacagtttttgtactt

SEQ ID NO: 21564 - DNA, 317 bp, Setaria italica
  Peptide Sequence Number=SeqID_87538
ggcgaagcaggttcagggcagatcagggcggcggagacgcagctgagatgggtggaagtgcgtgggcaggacgtaggtcaaaagagtgcccacgtgtgtgaccgaggaaggagcggtttggctccgagctgaggttgaatcaaagatagtgctagttggattcggattagagtcaggattgatcgctctagaaaaaaaaacagacacctactttatactgtctccattccaaactatagttcaccttagtgttttaagacaaacttctctaattttgaccatgatataaaaaacatctaagacatcaaattagtttt

SEQ ID NO: 21565 - DNA, 796 bp, Setaria italica
  Peptide Sequence Number=SeqID_87539
tcgccgccatccccggcggcgtcgtccctcagcgggaacggcgagtcggtgatcctcagctgcctcacgtgcgccggcgtgcggccgaagctcgcccatagcgcgggggacggcgtcgcgatcagcgcgagcggcgacggctgctcggcacctggcgaaccggtgtcgtcgccgccaacgccgctgaggaggtgctcgttgttgttgaggatctcgaagaccctggcaatgtcggcggcgtcgtagttgtaccatcccggctcggcgccgttggcgccacggtggctgcggcggttgttgccgcggcggcggcgcttgccggtggggatgaggtggagggacgggtaggagggggtgttgctgcagctgaactccacctcgcggacgtcgcgcgggttgtagacggcggaggccaggtcgagggcgcggcacgagaactgctgcgccggcggcaccgccgcctcggccgccttggccttgtcgtggtggccgtgggcggtcatgaggttgcccagggccttgccggcgatcttgccgcgctggaggaggaggtggaggtccatggtcagcttccgcttggacacgcccttgcggagcatgaacagcacggcgcgcaccacgtgccacatgcgccgcgccatgttcggctccaccgccatcgtctcctcaagttgcttgcggctgctcgactcgatttctcgcactcgcactggctttcgaggttgtttggtggtctgtggagagagagtttctttgttgagttgctttgagctgtttgcggaaaacaggggatagg

SEQ ID NO: 21566 - DNA, 679 bp, Setaria italica
  Peptide Sequence Number=SeqID_87540
ttttcttttctgctaattctttccaacatgtaccttaactgcaacaaagtacatgccaccaacaaaatatacacatacagtgtacaacatactatgcatggatctagcttgcaaacatgaccttgtgcaaaatgtctctcccaccaagcccatgcagagtagccagctatctctaaaaacatgcttgatccatgctcaaacctcatgtacgagctatatactatactatatagcacatacacacttcacacttgcacaaaaataaggttgagactaacacgctatggacatatatgtgtgggcgatgggcttcttaggcgatgccggagaccggccgggcgtacccaccgtacgagccgtagccgcagtctggcgtggcggcggcgaggctctgctgcgtgcgcagctgctcgtagaacttcttgatgaactcctcggcctccatgtccacctcgccgccatccccggcggcgtcgtccctcagcgggaacggcgagtcggtgatcctcagctgcctcacgtgcgccggcgtgcggccgaagctcgcccatagcgcgggggacggcgtcgcgatcagcgcgagcggcgacggctgctcggcacctggcgaaccggtgtcgtgttcgtccgtcctaacgtccgtctgctcgttgttgttgaggatctcgaagaccctggg

SEQ ID NO: 21567 - DNA, 407 bp, Setaria italica
  Peptide Sequence Number=SeqID_87541
aggaggaggatgagcgcgatggacgccatgaagctcaccgtgttgcagtagaagaagacctcgaagcggcgcgggtacttgtcaagcaagacggcgccgccggcgtggcgtccgaggcggaggttctcctcgatccagaatccgcccggcggcgtcagaccaacctggtaagtgatggtggcgaccaggatcgctaccaagagcagccgcttgtgcttcttctccggcaccgtgccgtcggagtcggttgcccgaagcgtgaaaaacaggacgtgtaccagaacgtaggcgaggacggcgccggcgagggccacgacatggacggaggtcctgaggtcacggcagctcccggcggcgtaggctccgatgagggcgaacatgtccagcatcatggccaccagcaaggt

SEQ ID NO: 21568 - DNA, 367 bp, Setaria italica
  Peptide Sequence Number=SeqID_87542
ggtctcctccagcccatcccacacggtgttcatcatccaccaccagtggtgcttgagagacacgatcctcggagacctgtggttgccgtactggtccgggtcgccctggcaccccttctccttggccttgtccttgctctggcagtccccaggggtgacgccggggaaggcatctgggaagaggtgcggcgagtagggcgcaaagatctgcttcacctggcagaaatcgatgccctgcacgatcttgtccatctccgggaagtagccgtcgtggctgacgatgagcagcgcctccccgatgccctcgacgcgggagaggctgtcgacgacgaggcgaaggtagcggggtcggttgtgcacgtagagc

SEQ ID NO: 21569 - DNA, 316 bp, Setaria italica
  Peptide Sequence Number=SeqID_87543
acggaaacggttgatattaacaatcagcctgctccgaagcagaccacggggaactggagagcatgcttcactattttaggttctgagttcaccgaatgcatggcctttttcgcaatcggaaagaacctggtcagatttctcacgagtgaacttcatgagaccaatgtggatgccgccaagaatgtgtccacctggatcggcagttgcttcctcactccggttatcggggcgttcttggccgacacatactggggaaagtacaagaccatagtgatcttcctcttggtgtacaccattggaatgctcattttgaccg

SEQ ID NO: 21570 - DNA, 356 bp, Setaria italica
  Peptide Sequence Number=SeqID_87544
cacggcaacgtccctcgcgcacagcgtaagcagcttcgtcttcccttgcttttgccttcggacacataaacacgtcctggaaacgcgtgctgatgaatcttgccggtaccttgatgctcttgcagggctcatcgtcggaggtcggcgtggtgccagaggccttctgcggcggtggcggcgggagcttcgagctcgacttcacccggcccaagccccaagcctacatgccgtacaccgcgactcctcagagtcacagcgtgtcgtcggttgacgtggaggtggtgccggagcgggggacatggcggcggcgaggccggtgccgctgagtgggggagaggccgggaggcgcggctgat

SEQ ID NO: 21571 - DNA, 178 bp, Setaria italica
  Peptide Sequence Number=SeqID_87545
gattcaaaaataccgagggcaaattctagcaaaaacatgctatatagtaatagtaatcccatgtactctctttctgcattgagctagccttaagtacgctagtgatgtataatttgtatactactgctgctgcttactagtactatacaaattatacatcgctagccttaagtacgct

SEQ ID NO: 21572 - DNA, 408 bp, Setaria italica
  Peptide Sequence Number=SeqID_87546
gtgtcgtctttgaacgtgggggcggtgccggagcgcggcgacggcggcgtcatggccggcagggtggccgtcgcgacggcggccggggagagccgggaggcgcggctgatgcggtaccgcgagaagcggaagaacaggcggttcgagaagacgatccgctacgcgtcccgcaaggcctacgccgagtcgcggccgcgcgtcaagggccgcttcgccaagcgcgccgacgacaacgacgccgacgccgccgcagccgacgacttcgtcaccagcagcacggccgccgcgccgccgccgccgcagcagcagcagcccgccgcctaccctagctacgtgctcaacttctcccccgccgccgccggctacggcgtcgtgcccaccttctgatgacggcgtcgcatgccatgt

SEQ ID NO: 21573 - DNA, 752 bp, Setaria italica
  Peptide Sequence Number=SeqID_87547
acatccacgaagccaacccgctggcgcgccgccacgtgcgcgtccccgtcgcgcccatcggatcggaggccgcggccgccgccgtcgaggccatgcttttcgggaccgccgaggcggccgcgtccgaggccgatgagccgcacaacaccacggccgcggcggcggccgggcaccagcacctagcaccaccaccagcaccacgcgctgaacctcaacgtggaggccaaggacatgaagctcgactacctcttctccgacctggacccctacctcagcgtcgagatacccgacgcttccagcacgccgacagcgtcgtccccaacggcgtcggcgccggcgccgggggtggccatcgagctggacttcacgtgcggcatcggcgtcaagccctcctcctacagctcctacacggcaacgtccctcgcgcacagcggctcatcgtcggaggtcggcgtggtgccagaggccttctgcggcggtggcggcgggagcttcgagctcgacttcacccggcccaagccccaagcctacatgccgtacaccgcgactcctcagagtcacagcgtaagaccccaaccaagctccgaccttccggacgcacacgtgtagacacgccatgtagtacacgtactgatcatgtagatgcgaactcggttctctatgcaggtgtcgtcggttgacgtggaggtggtgccggagcggggggacatggcggcggcgaggccggtgccgctgatgggggagagccggga

SEQ ID NO: 21574 - DNA, 757 bp, Setaria italica
  Peptide Sequence Number=SeqID_87548
ccgccgcggccgccgcgggggcccgactgcacagggggagggtgggggcgggacgacgacgggagcaacgaggccgaggccgcctcctggctcctccccgagcccgacaacagccacgaggacagcgccgccgccaccgatgcgttcttcgcggactccgacgggtacctcggcgtcgacctggacttcgcccggtccatggacggcatcaaggccatcggcgtgccggtcgcgccgcccgagctggacatcgccgccgccggcttcttctaccccgaccactccatgaaccacagcgtctcgtcgtcggaggtggcggttgtgccggacgcgctggcggcgggcgggccggcggtgccggtggtgagcagggggaaggagcgggaggcgcgtctgatgcggtaccgtgagaagcgcaagaaccggcggttcgacaagaccatccggtacgcgtcccgcaaggcctacgccgagacgcggccgcgcatcaagggccgcttcgccaagcgctgctccgcggaggccgaggacgaggcgctggagcacgaggagggggcgtgcttctcccccgcggtgtcggcgcccgcggcgtccgacggcgtcgtcccgtccttctgctgagggagagacggacggcgacccggcggcggccgccccgacccctctcttccgctccccggcgacgacctcgctaattttgccgactctgaagggatctgaacgcatgcaatcctcctcaccgtctctgtaatccagc

SEQ ID NO: 21575 - DNA, 971 bp, Setaria italica
  Peptide Sequence Number=SeqID_87549
gcgcgcccggggcacgcgcggctcgcccacgagcgcgtgtggatgtgcgaggtctgcgagctggcgcccgccgccgtcacgtgcaaggccgacgctgccgtgctctgcgccgcctgcgacgccgacatccacgaagccaacccgctggcgcgccgccacgtgcgcgtccccgtcgcgcccatcggatcggaggccgcggccgccgccgtcgaggccatgcttttcgggaccgccgaggcggccgcgtccgaggccgatgagccgcacaacgccacggccgcggcggcggccgggcaccagcaccagcaccaccaccagcaccacgcgctgaacctcaacgtggaggccaaggacatgaagctcgactacctcttctccgacctggacccctacctcagcgtcgagatcccgcgcttccagcacgccgacagcgtcgtccccaacggcgtcggcgccggcgccgggggtggccatcgagctggacttcacgtgcggcatcggcgtcaagccctcctcctacagctcctacacggcaacgtccctcgcgcacagcggctcatcgtcggaggtcggcgtggtgccagaggccttctgcggcggtggcggcgggagcttcgagctcgacttcacccggcccaagccccaagcctacatgccgtacaccgcgactcctcagagtcacagcgtgtcgtcggttgacgtggaggtggtgccggagcggggggacatggcggcggcgaggccggtgccgctgatgggggagaggccgggaggcgcggctgatgcggtacagggagaagcggaagaaccggcggttcgagaagaccatccggtacgcgtcccgcaaggcctacgccgagacgcggccgcggatcaagggccgcttcgccaagcgcgccgaccacgacgccgacgccgacgacgctgaggccgaggccgccgtgccgtcggcgtcggcgtcgtggtcggcg

SEQ ID NO: 21576 - DNA, 1228 bp, Setaria italica
  Peptide Sequence Number=SeqID_87550
acccctaccctcagcgtcgagatcccgcgcttccagcacgccgacagcgtcgtccccaacggcgtcggcgccggcgccgggggtggccatcgagctggacttcacgtgcggcatcggcgtcaagccctcctcctacagctcctacacggcaacgtccctcgcgcacagcggctcatcgtcggaggtcggcgtggtgccagaggccttctgcggcggtggcggcgggagcttcgagctcgacttcacccggcccaagccccaagcctacatgccgtacaccgcgactcctcagagtcacagcgtgtcgtcggttgacgtggaggtggtgccggagcgggggggacatggcggcggcgaggccggtgccgctgatgggggagagccgggtcaagcgcggcgccgccggccggccatccgtggaccgagaccgtcgccatcatcagaagcttggcacgacgccgtagccgaagtcgagcacgtacgacgccgacgacgctgaggccgaggccgccgtgccgtcgtcgtcggcgttcgttggttcggtcgtcgcttggcgaagcggcccttgatccgcggccgcgtctcggcgtaggccttgcgggacgcgtaccggatggtcttctcgaaccgccggttcttccgcttctccctgtaccgccatccagcccgcgcctcccggctctccccccatcagcggcaccggcctcgccgccgccatgtcccccccgctccggcaccacctccacgtcaaccgacgacacgctgtgactctgaggagtcgcggtgtacggcatgtaggcttggggcttgggccgggtgaagtcgagctcgaagctcccgccgccaccgccgcagaaggcctctggcaccacgccgacctccgacgatgagccgctgtgaaaaaaaaaacgcgagggacgttgccgtgtaggagctgtaggaggagggcttgacgccgatgccgcacgtgaagtccagctcgatggcacccccggcgccggcgccgacgccgttggggacgacgctgtcggcgtgctggaagcgcgggatctcgacgctgaggtaggggtccaggtcggagaagaggtagtcgagcttcatgtccttggcctccacgttgaggttcagcgcgtggtgctggtggtggtgctggtgctggtgcccggccgccgatccgatgggcgcgacggggacgcgcacgtggcggcgcgccagcgggttggcttcg

SEQ ID NO: 21577 - DNA, 705 bp, Setaria italica
  Peptide Sequence Number=SeqID_87551
aaccccgtccacaacaaggttcccgtgctcatccacgacgggaagcccgtctgcgagtcgtcggtcatcctgcagtacatcgatgaggtcttcgccggcaccggcccgtcgctcctccccgccgacccctacgaacacgccatcgctcgcttctgggctgcctacatcgatgacaagctgttgagctcgtttatgatgatgagcatgggcaacacggaggaggaacgggcagaggggaggaagcaagcgtttgccgctgcggagatcctcgaggaggcactgaaggagtgctctaaggggagaccattcttcggaggggatagcgtcggctacgttgacatcgtgctcggaggctttgtcccatgggtgcacctaatcgatcgctctactggctcgaagcaattcgatgcaggcaagaccccgctcctggcagcgtggctggagcacttcggctcgttggacgcggccaaagctgtcgtgccagacttggagaggctggttgcgatcagcaagatgaggaaggcctaatgaacagccaaggaaactgaagtagctgagggcgtgggcgtttgctgcttacagtttatgattgttgttcgagtaaaaaagtccctctatttacaagtcacaaatccatgaccacaataatctcagtgtgaagaaaacattgtcattccaaattactgccatgccggactttcaatt

SEQ ID NO: 21578 - DNA, 1049 bp, Setaria italica
  misc_feature (1037)..(1049): n is a, c, g, or t
  Peptide Sequence Number=SeqID_87552
tccacttcttccctcctcggcaccatgaactaaaccaacgaagacacaagctataatcttagcggagacctcgaggcaccagaaaatggccggaggcgacgacctgaagctgctcggcatgtgggcgagcccgttcgtgctgcgggtgaaactcgcgctcagcctcaagggcctgagctacgagtacgtcgaggaggatctcaggaacaagagcgagctcctcctcaagtccaaccccgtccacaacaaggttcccgtgctcatccacgacgggaagcccgtctgcgagtcgtcggtcatcctgcagtacatcgatgaagccttcgccggcaccggcccgccactcctccccgccgacccctacgaacgcgccatcgctcgcttctgggctgcctacatcgatgacaagatgctggccgcttggacccaggcgtcgaggggcaaaacagaggaggatagggctgagggaatgaagcagtctctcgccacggtggagaccctggagggagccctgagggattgcggcaaggggaagccattcttcggcggcgacaacgtcgggtacgtggacgtcgtgctcggcggcatgctcggatgggtgcgagcaaatgaagagctgcagggcgccaagcccttcgaccccgaacggactccgctcctggcggcgtgggcggaccgcttctggtcgctggaagccgtcgagccagtcatgcccgacgtgagcaggttgatcgagttcggcaaggcccgtcaagcggctgcggccgccggtgcaggcaactaaaggggcgtcttgggcgctgcactctgtttcagcttctgttccaatatagtacgagaataaggcagtgttgccgtgttggtcagtttctatgaggtcgttgtgcaatgagtgttaccctggatgtctcgtgagttttgtcaaaaagttaattttgtgtaagtgtaaaatttgtttaggatgctttacaatattcgattagagtatataaagtggtttcgtgagtgtgcgttttcttatacaaaaaaaaaaaaannnnnnnnnnnnn

SEQ ID NO: 21579 - DNA, 396 bp, Setaria italica
  misc_feature (364)..(396): n is a, c, g, or t
  Peptide Sequence Number=SeqID_87553
tagtctaatttcgtattgtctaggtctaagtaccccgtcttccttggtctagtcgttggtcttggtagtctactttcggtcttcgtgtggctggagcacttcggctcgttggacgcggccaaagctgtcgtgccagacttggagaggctggttgcgatcagcaagatgaggaaggcctaatgaacagccaaggaaactgaagtagctgagggcgtgggcgtttgctgcttacagtttatgattgttgttcgagtaaaaaagtccctctatttacaagtcacaaatccatgaccacaataatctcagtgtgaagaaaacattgtcattccaaattactgccatgccggactttcaattaaaaaannnnnnnnnnnnnnnnnnnnnnnnnnnnnnnnn

SEQ ID NO: 21580 - DNA, 473 bp, Setaria italica
  Peptide Sequence Number=SeqID_87554
cattcccgtcgaacatggttaatctcaaaagagaggaagttctctttcagccttctcacttcattgcagagctccatcatgttctggtgctttgtttgccaaacgccgttcacctgattgcagacaagttgagagtcaccatgtactttgattctcttgaatccatgcctaattgcatatttcagtcctaagatcaggccccggtactccgcaacattattagtaacaacaccaagaccctcacgaagtcgagatatcttcaaggttatgtaggacataaggtgatacatagagcaacggtgaacaataaaaatctgtgagtgcaattagtattgattataccactctaccatcttcggtcataagcactgctccagcacctgcttttcctgggtttccttttgaagcaccatcaaaatgaagaatacccaccatatattgtttggtagacaggttgtgcatcaacagctcca

SEQ ID NO: 21581 - DNA, 485 bp, Setaria italica
  Peptide Sequence Number=SeqID_87555
taataggttaacgaagggggaataatatgctagagaactatagtcttccttttctcatgtccactgtctttaggtggcatccgaggaatgagtgacacattacacagacctgttaaaaaggattcctctagtgttcaactgaagcttgatcagatcatgtgacatgcttaataacacaggatgatgtggatttcattgctgatattttgagtgctcgcaatacttacatggttcagatcaacagactgtgacccagtctgatatgctataccattacggatgccaaaatgatttggagctggttgatttgatctagcaccaactatctcctggaaactacaggaacaaggggccaaatatatccttcccgaagttcagttgcattgattacataagaagcattactaagccccgtgaagagatatattcctccttttctctgctccaagcgtgacccttgtaggcacttgcagctggaccagata

SEQ ID NO: 21582 - DNA, 1253 bp, Setaria italica
  misc_feature (45)..(45): n is a, c, g, or t
  Peptide Sequence Number=SeqID_87556
ttggttcgtccgtttggtctagttctcttttttagtttttttttnttttttttgttttttttttcctaaagcacacacatacgaggttgcatcagattgagagcccatcaagtcgaagcttcttacattgatactataatgcggccaggggtcatggacgggagactcacaccacagggagtagttaccaggttcatcaaaatggggcccactaaacccaggactcagcatcaaggtgtagaccctaaaacatccatcatcttccactggacacagaaatcagaattccatccagcttgacgatggcatacaccgacactactactggtgtgattagtaggactgctattaaagcagtcaccacgcccctgccgtagagcaggctagcagcttgacgaaggcctccaaggttccaagctagtaataattagttaactggacatacattggtaactggacgaggcttgtatcagaagtcaccgcgctcctccgaaacagcgccattggcaagcgtgatgccgatgttcgcctgccgatccgcctcagcattccattcccgtcgaacatggttaatctcaaaagagaggaagttctctttcagccttctcacttcattgcagagctccatcatgttctggtgctttgtttgccaaacgccgttcacctgattgcagacaagttgagagtcaccatgtactttgattctcttgaatccatgcctaattgcatatttcagtcctaagatcaggccccggtactccgcaacattattagtaacaacaccaagaccctcacgaagtcgagatatcactctaccatcttcggtcataagcactgctccagcacctgcttttcctgggtttccttttgaagcaccatcaaaatgaagaatacccaccatatattgtttggagacaggttgtgcatcaacagctccactgtggttgaagtttactggtgagatatgcctggaggaactagatctggcttcatggttcagatcaacagactgtgacccagtctgatatgctataccattacggatgccaaaatgatttggagctggttgatttgatctagcaccaactatctcctggaaactacagggaacaagggggccaaatatatcttcccgaagttcagttgcattgattacataagaagcattactaagccccgtgaagagatatattcctccttttctctgctccaagcgtgacccttgtaggcacttgcagctggaccaggatacc

SEQ ID NO: 21583 - DNA, 579 bp, Setaria italica
  Peptide Sequence Number=SeqID_87557
taagacaaaatttcaaatgtacactccatgtcttcttaaatttcttgtgtacatatatgtatgggcatatagttgtgcgcagacatggattcacatgtatagtcctgattacaagcttacattgaaatttcatgcattatttcatatataaatatggattccacattaagcatatgcagacttgctaggaaacacattccctgaaaaatgaaatatatgcttagttatgatactagacatgtgaaatatggttacgagggggaatatatgctagagaactatagtcttccttttctcatgtccactgtctttaggtggcatccgaggaatgagtgacacattacacagacatggttcagatcaacagactgtgacccagtctgatatgctataccattacggatgccaaaatgatttggagctggttgatttgatctagcaccaactatctcctggaaactacagggaacaagggggccaaatatatcttcccgaagttcagttgcattgattacataagaagcattactaagcccccgtgaagagatatattcctccttttctctgctccaagcgtcg

SEQ ID NO: 21584 - DNA, 302 bp, Setaria italica
  Peptide Sequence Number=SeqID_87558
aacttcaaaatgagcatagcccacccttgtccaggcaagaaagcaatggcttagagatgtaccttgcagaaagccgcatctttccccttctcttcaagttcgatttattcatttggtatatataaaatgggatctctggcgggacacaaccacagagctctctcaggtgtttcttcattccagaagagagcattagtttatttccacggaaaaaccattcataattccctgtaaattgccacgattcactccctggttctccactgccagagtcattttgtattattgtagttagttaagtt

SEQ ID NO: 21585 - DNA, 765 bp, Setaria italica
  Peptide Sequence Number=SeqID_87559
gtctatagaggaggaagtagtaaccgagtaagacatggaacacgcttactcccggttgctggttgtattttcggttctttcactgtgcctcggtaaccagggtgtgagatgtcagctcacctctgatttctacgacgaaacatgtcctcatttgtacactatcgtgcagcagcatgtgttcactgccatgagagctgagatgaggatgggcgcctccctcctcaggctccatttccatgactgctttgtcaatggatgtgatggttcaatacttttggaccgcagcgatggcgagaagtttgcacaacccaacctgaactcagttagagggtacgaggtcattgacgccataaaggctgatctcgagagcctctgccctgaggtggtgtcttgcgctgacatcgtagcccttgcagcaggctatggagtgctctttagtggagggccatattgggatgttcttctgggaagaaaagacggtctggtggccaatcagtctggagctgacaacggcttgcctgcgccatttgaaccgatagactccattattcagaagttcaacgccgtcggcctgaacacgaccgatgtcgtggtcttatcgggagcccacacgatcggccgatcccggtgcgtgctgttcagcaatcgcctgtcaaacttctcggcgacgaattcagtagatccgacgctggatgccagcctcgccgacagccttcagagcctctgtgcaggcggcgacggcaaccagaccaccgctctcgacgt

SEQ ID NO: 21586 - DNA, 700 bp, Setaria italica
  misc_feature (1)..(36): n is a, c, g, or t
  Peptide Sequence Number=SeqID_87560
nnnnnnnnnnnnnnnnnnnnnnnnnnnnnnnnnnnnaagattattaattatacatcaagtttcacgtgatctgttaagattctacggaactcacatgctctcaaccttggttttatcgggagcccacacgatcggccgatcccggtgcgtgctgttcagcaatcgcctgtcaaacttctcggcgacgaattcagtagatccgacgctggatgccagcctcgccgacagccttcagagcctctgtgcaggcggcgacggcaaccagaccaccgctctcgacgtcagctccggcgacgtgttcgacaactactactaccagaacctcctggccaataagggcctgctgtcctccgaccagggcctcttttcaagcccgcaaggcactgccaacacaaaggatctcgtgcggacctacagccacgacgaggatcaattcttctgcgatttcggctggtccatgatcaagatggggaacatccctctcacgggctcggaaggggagatccgcaagaactgcagggttgtcaactcatgaggagtgagtgatgcatgcgtctgtgggatctatttcttgcacttgttcgtgagaaggcaccaaagtgtacgattatgcgtgtaacgttaagcggttgcgtagaaagatggaagaataattaataacacttacagattaaacccgaaacaaaaaaaaaaaaaaaaa

SEQ ID NO: 21587 - DNA, 320 bp, Setaria italica
  Peptide Sequence Number=SeqID_87561
atcttcgtgaagaccctcactggcaagaccatcacccttgaggtggaatctgccgagcgccgctttgcgcaccaccggtccaccgccgctcgacgctcgcgctccattgccgcggccgcctctcccgtcagcaacgccgcccgcagccgggctcgttcctccacgcatacgatggacatccctcctcacctgctcccttgcgcccttgcacgcttccgtgccgccgtgcgccctccttgcccccgccgccgaacacgccgtggaagcctggctggcataccccgcactatcagcccccgcggcgtctgcctcctttcagg

SEQ ID NO: 21588 - DNA, 1326 bp, Setaria italica
  Peptide Sequence Number=SeqID_87562
gcggcgcacggtgctctctgcggccatgtcgagttcgccgccggggtcgtcgcgcgcggcggcggcaatgcgccgtcggtgcggaacccggaacgaacgaaacgtacaacgggtagcggctggtgagccggccccgtcgccggagtcgtcgctggtggggtgcgggtgcggtccagcgccggcgccgtggcagttcctgaactacaagctggcggcgctgtggccggtgatccaggcgttcaagaagacgatcacgtgcgacccgctgggcgtgacggcgacgtgggagggccccgacctctgcagcagcttcttcaacggcaccaagtacaggggcttctactgcgagtaccctcccaacgccaatgccacgctcaccgtggcgtccatcgacttcaacggcttcggcctgtgcgcgccgtcgctggtcgggttcgtggaccagttccccgacctggccctgttccacgccaactccaacaacttctccggcgacgtcccggacctcacccacctgcccttcttctacgagctggacctctccaacaacaacttctccgggtcgttcccggacgccgtggtgcccctcggcgggctcctcttcctcgacctccgcttcaaccggtacgccggcgcggtgccgccgcccgtgttcgccctcacggtggaggcgctgttactcaacaacaacggcttcgacgggcgcatcccggacaacttcgggagcacgggcgccaagtacctggtggtggccaacaaccagttcacgggcccgatccctcgctccatctacaacacctcggcgacgctgtcggaggtgctgttcctcaacaaccgcctctccgggtgcctcccctacgagatcgggctggtggaggggctcgccgtgttcgacgccggcggcaacgagatcgcggggcccatcccgctgtcgttcgggtgcctgcgcgacgtggaggagatcaacctcgccgggaaccagctgtacgggcaggtccccgacgtggtgtgcctgctggccaagacggggaagctgcagaacctgtcgctgtcggacaacttcttccactcggtggggcaccactgcatggagctggtgcgcagccgggtcctggacgtgcgccgcaactgcatcctcgggttccccgaccagcgcccggcgctcgagtgcgcggccttctacgccgacccgaccaagcactgcccattcatcccgcacatcccctgcgacctgcccggctaccaccactacccgcctgccaaggccgcgcatggccatgtccaaggccaaagagggtggcaactgatgggggccgtacagaacag

SEQ ID NO: 21589 - DNA, 375 bp, Setaria italica
  Peptide Sequence Number=SeqID_87563
tcctaaagattaggactccacttttaggacacttttaagatatatatatccaaacatgagtcctaaaagtggagtactaaagttgaggagtgtcattttcattaggagggccaaggggtactaatgggttatttttctcctgaaagtggtcttcaaacccccctttacccctgttgccctccccttctcatttaatgatgtgaacagtgcaggggcatttagaggagtaattgggggtaaaaaagtcattttccctctaacatcctaaagattaggattccaaccaaacaaccctctcctaaattttaggactaccaatttctggatcctaaactttaggacaattttaaactttagaaatttgtatccaaacag

SEQ ID NO: 21590 - DNA, 683 bp, Setaria italica
  Peptide Sequence Number=SeqID_87564
tgatcactggtttgcagcacatggcctcccagagatggcactatcgttgttcggtgagatgaggcaactgggcattgaacctaatggtgtcacctttgtgggcgtcttgaatgcctgtagccatggcgggcttgtggacgaaggcttcaagtacttcagcctaatgaggagcatgggcatcaagccaactatccagcactatggctgcttggttgatctccttggccgtgctgggttcttggaggaggccttcgatcttgccagcaatctacctgaagatcctggttttgtaatctggagctcgctactagcagcctgccgtagccatggcaatgtcgagatggcagagttggctgcttcgaggttggcagacgcaaaaccaagccatggcagctcatatgtgctgctatcgaacacatatgcacgagcgaaacaatgggaggacttgaagaagacgaggaggaggatggaggagcatcgagtaacgaagaaacctgggcttagctggatcgaggtagatggaagtgtgcattcctttgccactgcagacaagttgcatacggaaagcgagagtatttatcagatgttggaagatttgaaacataatttgacgtcatctgcatatgaatctgaaccgttccctctttctgaagaactgtaattatctattccatctcgtgacc

SEQ ID NO: 21591 - DNA, 451 bp, Setaria italica
  Peptide Sequence Number=SeqID_87565
cagatattgctggcatccaaaacttctattccaagtcgtttttccctttgctctttagctgaaggttagttccacgacatgtctgattcagaagggtgaaaattgactttgggatgattgtgccgcaatgcttatctctccacaattgccttcatctggcactagtatctctcgaggccgagaagcccagagggagcttaaggcacgaaggcggttgtggtactcgccaatggccaagaaacatcgagctgcctgtcgaactgtcagaatcctgtgcatctgatgaagagtctgttgcctcaagttatcagcctgtatcacaaagccttcaaggttggacagcttgccaagggcaagggccatttgacccatgaagttcatgttggcgtcatcaatcaaagatccaccggccatcgtgtcagctagtgactgatgcagctgctccaggccc

SEQ ID NO: 21592 - DNA, 523 bp, Setaria italica
  Peptide Sequence Number=SeqID_87566
gaagaaagataaaatgaatgctcttcaccggaaaaccttggaagagtggtccaagcatcgagttgctcagaaaaagggaaattagttgcatgaccagaaataaagatgtcctggatgtatcgctgtgacattttttattccaataagtcctaccaagtggttaattgctcgtctacaaagttgagtgtactatatacaacactgacctgacgatcaagattgaagtatagatgaggtatagatgaaaatattctcagcctgtatcacaaagccttcaaggttggacagcttgccaagggcaagggccatttgacccatgaagttcatgttggcgtcatcaatcaaagatccaccggccatcgtgtcagctagtgactgatgcagctgctccaggccctgggagagagcttcctctgcctgctgtgatgactgctgaaggttgcagatgcctaccacttgctgttcagtcaggggatctagctggggcagcagtgtcttgagcagatcggagggccgtgaatcc

SEQ ID NO: 21593 - DNA, 469 bp, Setaria italica
  Peptide Sequence Number=SeqID_87567
tcgaggtccaggtcaggctcatggccgtcgcggtcttcgacagagggggctggcgcacgcgacggagggtcatgagggtcatgtgcgacggcgtacaggtggttttccgcgggaagaattccaccgaggcagccttcaatgggccgccaaggcggtgtgatgtcgtgttgtgaaaaggatcaccatccatgtttgttgactacctgggatgctgatcagagggagatcattccataggtatgagaagctaactggcactacaagaagttgatcaacattgatttgatggggtaatagctgggcaaatatagctggctgtagtagaataccaagcgagagaagtccagaatgattatgcttagtgggaatatgacctttgtatctatgatggtttcagtatgagtggttgtgcaaatttatggcaagaatgtttgtgcatggtggttattctacacggtgtgggggttca

SEQ ID NO: 21594 - DNA, 833 bp, Setaria italica
  Peptide Sequence Number=SeqID_87568
aaaacctacagttgtattaatttctttttcaatttttagattctgtaacacatgcatgatgtagtgaatgccaaagaccattccagtgccagatgtttggattggcttatgtttgtgttctgccttggtatagttggccctaacctaccctattttgtctatatggcctacagtgttttaaaaagcaccaatcactaaatcgtagacaggttggtgcctaggtcaattaggtgtgataagtggccattacctatcaagcaatgggtggatggaggcgcctatcccgaagtgggcaattcttgtagcaattcatatgaactggcagtcgttatggctgaatcactgaggcgcctagtgctattgaggacagatgaacatagagctttgcctggtacggtaagattttagtcatggtccgtacctatggtttgtctttcacatggttgatcgcaatacaagatgtactaattttaagatgatgaattctgtagcaatttgaagctaatgtttgcgaacagcacaaattattaggatgcttttgattgtcatttcccatatatgattggccatagtgtagaactgctgagctgggtgatgtggatctttattttaaagcatgaaagttccttgacaggaagttgtggactatcaacactatatcttgcaatgtaaagtaggatgttgatattcgctttgagccttattgcttcgtgcccaaaacctgtcatattagtgttaatcttcaccgatttatgtttagaatgcttcatagtaacgaactgtatataatgcgtccaatgagtcttcaagggtcaaaggatgtgtcctctgtt

SEQ ID NO: 21595 - DNA, 835 bp, Setaria italica
  Peptide Sequence Number=SeqID_87569
cggcgtacaggtggttttccgcgggaagaattccaccgaggcagccttcaatgggccgccaaggcggtgtgatgtcgtgttgtgaaaagtgttttaaaaagcaccaatcactaaatcgtagacaggttggtgcctaggtcaattaggtgtgataagtggccattacctatcaagcaatgggtggatggaggcgcctatcccgaagtgggcaattcttgtagcaattcatatgaactggcagtcgttatggctgaatcactgaggcgcctagtgctattgaggacagatgaacatagagctttgcctggatcaccatccatgtttgttgactacctgggatgctgatcagagggagatcattccataggtatgagaagctaactggcactacaagaagttgatcaacattgatttgatggggtaatagctgggcaaatatagctggctgtagtagaataccaagcgagagaagtccagaatgattatgcttagtgggaatatgacctttgtatctatgatggtttcagtatgagtggttgtgcaaatttatggcaagaatgttgtgcatggtggttattctacacggtgtggggggttcagggaactttgtacattgagttagtgcttgaaaacaagctctctggttacatggagatggatgccggattgtcactcatagtgcccatttgctgtcctgttcatgtgcgtcaccttccttgcaccaggaagactacattgtccctgaatacagcaactgtggtttgaagagttggtttcttgcatttgcatagagctacaacttcacatgttaacaccattgatactaaaaaaaaaa

SEQ ID NO: 21596 - DNA, 637 bp, Setaria italica
  Peptide Sequence Number=SeqID_87570
cggcaacaccaccacgctcgccttccgcctcgtcgtcgacgacgcctacgtggggcccgacgacgcagcgccgctcaagagcgggggtggaggagggggcacggtcgaggtccaggtcaggctcatggccgtcgcggtcttcgacagagggggcgtggcgcacgcgacggagggtcatgagggtcatgtgcgacggcgtacaggtggttttccgcgggaagaattccaccgaggcagccttcaatgggccgccaaggcggtgtgatgtcgtgttgtgaaaaggtcagttagtagtcgttgtgatttttactcttctgtcatttacctctaatttcaatgccttaattggacgttcggaacggaggcggtgaaggttttgtgtggatccaaggactagcattagtgttggggatagtgtgattccaatgtggcgtgcaaaatcaaagccttgatttgtccctttgttcatgtgcactacttcatttgtgtgaaagcagatagggaatggtagtgtagaattatcaatggcagagtcgtgttggggtcaaatgtcaacggcagtgagactatggtgctataaatagagaaaaaaaatgtattaagaagcccaacagatgtttgaactataaccctagaa

SEQ ID NO: 21597 - DNA, 1208 bp, Setaria italica
  Peptide Sequence Number=SeqID_87571
cagctaggaccattgttcaactgcttactacaaagtacaagaactttattcatgcatgtgacacggaggtatcaaatatcaatgtcaaagaagagacaccagttggtcatggacacgtaacatgctttagtatctattcagcaaattctaatgcacaagtggctgattttggaaatggcaaaacttgcatttgggttgatgttctggatggtgggagagatgtcctgatggagtttgctccttttttttgaagatccatccatcaagaaggtttggcataattatagctttgatagccatgttattgagaaccatggaattaaagtagctgggtttcatgctgatacaatgcatcttgcacgcctttgggattcatcgaggaaaactgatggcggatattcacttgaaggacttacaaaatgatcgtagagtcatggatgctgttctagaagatttacctaatgctggaaagacatcaatgaaaaccatatttggcaggaaaaaagttagaaaggatggatctgaagggaaagtcatatctgttgacccagttgaaaagttacaaagggaagacaaagagttgtggatttgttattcttcactagattcaatgagcaccttgaggctttacgagagcttaaaaagaaagcttgaaacaaaggaatggatctttgatggttgccccaggggcacaatgtatgatttctatgaagagtattggcgtcccttcggtgccattcttgtgaagatggaaacagagggaatgcttgttgatcgtggttacctttcagagatagaaaaggctgctattgctgaacgagaagtagctgcaaataagtttcgaaaatgggcatctaaatactgtcccgatgccaagtacatgaatgtgaatagcgatactcaaattcgccaacttctctttggtggcattgagaatagacataaatctggtgaaacttggccactcagtaaaacttttaaagtgccaaatgaagaaactgtagatacagagggaaagaagacttcaaagtatcgtacaatcaaactttgcagtattgtcgaagatctgaaaattgatatgttcaccccgagtggctggccatcagtcagcggggatgcattgagaagtttggctggtaaaatacccacggaacatatttacacaatggatgattgtgatgaagattccagtggttcagaagatccgg

SEQ ID NO: 21598 - DNA, 459 bp, Setaria italica
  Peptide Sequence Number=SeqID_87572
tccagatgacaagcatggtgtacctagagcagacgagttgtccaatgcacagttcaagacctggaggaaggaccaatttggcaatatcagaagcaacaggtacattgcctcacccatcagcaataggaacacactaggtagcaagcttaaagaggacgagtgcagccatagaagatccttctccagtgtcattatccgatactcgtcatcaaacaagccatcctctgtttcatcatcatcatgctcttcatcaaattcgtcctcgttctccattccaagctcaactgactctggtgttggacccgtgctgaggaggagcagcagtgcaagttcagagatggacaatccaattcagggagcaatagcatactgcaagaagtcacagcagcttgcctcagtgaggaagagtgcaagtgatgcaggtttccggttcatgtcatcatcagcatcaaaaatgca

SEQ ID NO: 21599 - DNA, 375 bp, Setaria italica
  Peptide Sequence Number=SeqID_87573
tccgaacacaggaactatcatgcatggctcctcggtgcggcccacaggtcacagtaaaatccaccgattttgccgtgcttcgctctgctccgcgcaccccgccggccgccgttgctgcagccgcggtcgccgcgcgccccctatccatcggcacccaccgctccgcacgattgcgcttgcaactcagtgtcgccgcacgcacgtgagccggcggccgccgccccgatgccgctttcgggctggaatccgctggcgcccgtcctccagaccgtcgccgccttctcccggcacctcctcatcgccccggacaccggccccgacgaccaccgcctccgcccgctcctatccctttccctctccccgccgccgaccccg

SEQ ID NO: 21600 - DNA, 844 bp, Setaria italica
  Peptide Sequence Number=SeqID_87574
tccagtgaaaaggaagactagcttgcacataggagtatgcatcaccaacaaattacaacatgctacagatgaatgggcaccaacgtagagcatattccttgctgatgcttcttgcttcaattgctgcctgtcttgcatagttgcatcatcagctcatcagacctcagtgctctgatcgctctcggtatccaccatctccactttggcattggcctcgccattgctcctcccttccttgacgtactccatcgtgtcgatgttgtagagtatcgggaccatggccatggagcagatgcacggcaggacgggcccgaagatccagagcaggagcggcgcgccggcgaagaagagccggttgccggcgaggttgaggaggaatcccctctccatgacgttggcgacgtagtccttggtgagggggaggtggagcgccggggacggggagagcgcgttgacgaggaaggaggcctggttgagcgtgcagatggcgaggctgtggcagaggaaggcgaggaggaagacggtgaggaggacgacgtacttgagcgccatcatgtactcgccgtgcgcgccgaagacggcgtcgctgagcggcttcttcacggcgtaggtgctgctgagcaccgcggcgacgccggtgcagaagaggatggacgtcgtcgccaccagcgtggaccccatcagcacgttccgcaccgactgcaccaccaggatcgcctgcttctcgttgttcttcatcatggagaagacccagaggcggcgagcggcggcgctgatgccgacggtggagctgagagggctgcggcggacggcgcgccagagccagaggtggtacacggcgggg

SEQ ID NO: 21601 - DNA, 398 bp, Setaria italica
  Peptide Sequence Number=SeqID_87575
ccctcccgcttcggcctctcgatcccccacgtctggaagaggctcttctgaacgggcgaggaatgcccagccccgcccccctcccggcgcggcctctcgatcccccacgcctggaagaggctgctctgcacgagagaggcgccctccttctccttcgccttaaccccgggtggccctcgggcggccgccgcggcggggggtcccgcagcgaggaccagtcggtgccgctgcgatagaaatcctcggcgaagccgctggtgcttcctgcggtggccgggggtgagggtagagaggggaatccgttgtcgtccaggtcggcggggaagggctggggcgggtcggcgtcgccgccggcggtggccatcggaggtgggtttgaaatggcggcgggaacggag

SEQ ID NO: 21602 - DNA, 731 bp, Setaria italica
  Peptide Sequence Number=SeqID_87576
gcagccatggagctcagcagagcgtcaacgcagggaaagccaaggtggatatgcaaatcgaccttacccacatgttgtgcgaggcgctgctgctgccgcccctcaggagctccggcgtcgcattatcacaagtcgttgggaggatctctctcaaacacccaagcctctttgggagaagcgagaagttggatgttatattggataagggaatcaatgattccaactttgttgttgcctttaggcgcccaaggcctgagtggttatcacagcaatcatttgttattcagcactcaatgacaccagaagttgctgtccatggattcccggctgataacttcacacgatcagggagcagagggataaaccttagccgactgtcgtttggtttggagcttaatgaaccagcaacatcaaactggacttctggaactagttttaagtttgagcatatccggcctgttaataatcagggccgctccattgccagagaccacgatggctttcctctgacctgcagtggtaacctccatgacaacatgatcatcttgaagcaagaatctggttatgcagatgttaatgataatagcttcttaaaagtaagttttatgcctacttcatgatacaatttcgaccgtaatgcgtaccttacacagcaattcttattggtaggttaatttccaaatggaacaagggttgccacttgtaccaaatcactgaccttcaatagagtt

SEQ ID NO: 21603 - DNA, 255 bp, Setaria italica
  Peptide Sequence Number=SeqID_87577
caccacgcaccactacaactagctagcgccgccgcgtgctcggccctctgctaccgcgcgccgcgcttcgactcgagacacgctccgtcgccgcgcacgcgtctcccgctttctgaattccctccgctgctccttcccttcctttaatttccctgctctcgccacccacccaccgatcgatctcccttcccatccccttctccctcttctccctgcaaacaacagcaagcggcgcagctagcggtgcggcggaat

SEQ ID NO: 21604 - DNA, 1088 bp, Setaria italica
  Peptide Sequence Number=SeqID_87578
cagctgcatgagtcgtcccattgttgttgctggcaattttgtaggggtccttggggtgctcgctctccaatacctgaaaacaatgccattgcaatcaataacaggttaataactgaaagtttttcatatttttacaccattccaggaagcatgacagtcctaatgtttattgattcagtatatcttttttactgttatcatgaattcaataaacaggatggatccattttcgcagcagcgggtgatgcatgtgcttactgctgggatgtggagactggtaaatgtaaaataaacattcaaggggcatgctgactatttgcacagtgttgcgattcgtgaggcaaaccgccaggtggtaacaggatcagaggatgggacagcccgtatctgggattgcagaagtgggaagtgtactcaggttgtacgtccagtaaagaacaaggcatttcaaagctcatgggtcagttgtgttgccattgatgcaagtgaaagttggctggcttgtggcacgtctagtggtatatcagtttggagtcttctctcaaacgagtgcatctttaatttagactgtcatgctcctgttcaagacttgctgtttgacaagaaccaaattttagcagttggtgctgagcctgtgctctcccgtttcacaataaacgggacagttctttcgcaaataaaatgtgctcctcagtcggcattctctgtctccatccattcatctgggatggcatctgttgctggatatggaggcctggtggatgtgatctcagaacttgggagtcatctgtgcacattcggtagccgaggcctggacaagtaaattgtccatgagcagcgaccctctcctcaatattgcgtggatgcaacttccaagatctgtgcaatgtgatccctgtattttttgacgctactattgtggttttttcgttcaatgttgtatctgacaatgctctactgaccaagatggttcttagacggtaaatagatgctagtgtagggttgaggagatgtggaaaatatccattcagattctctctaaaaacgggtccacattttattaaaacactgcttattttcaaaaaaaa

SEQ ID NO: 21605 - DNA, 1016 bp, Setaria italica
  Peptide Sequence Number=SeqID_87579
acatcttgattgcgacctgcatgtcttgattcttatcgtatgcagatttaccttgcgagatatatgctgtcaattgttgtaaattattttgagtcattatatatataattggccagatccaggtttttattgtaaattatttcttgtcctcaaacatacgtacgcaaattccggttgtttgacggaatttcttgcatatataaaataagaaaatctttgtttctttctcatgcatataattagatgccaggtccaggtaataacagtactactcataactcacctattataccacgtcagtatcttattgttactgctacatttatttttcagtaaaaactcatctagttaatatttatactacggagcaatgttttaaatagcgggctaaggggagcgggatatagcggctaaattgtatatgagggtaaatagcggttccatgccttaaataaccatagcgggctactgagtccagcgtggagagcgggagactccatgcaatttggtgtcaaattatccaaggaactatgtacgccatgcataagacagcgataatggctaaaaaattcctttgatgcgtgtgtctggattatatacatatagtaaaattaattgtacgcataattcttactagaagacactgaaacgccaaacacacactgtcacaatgcaaattcttgagcacaagacattaattgtcatataatgaggttgatgggtgcctaaaaactcaatgcatggctgcggatgaaagaagttatgcaattcaaccgttgacgaaggcgagaggaagatgaatcaaagcaaaataaagaaaagaaggaagccagagagataggcggcgatagcgtgcacgagcgtgagatgagagatggcagacacgaccagacgagacacacaacatgaagagccagccaaccctctgctgctacttcttctagctgcagctgctgcctgtgtgtctagtgtacgacgatccatgatccatccatccatccatggattcttattct

SEQ ID NO: 21606 - DNA, 339 bp, Setaria italica
  Peptide Sequence Number=SeqID_87580
ccgcgagcgccaacccgcccagcactcccgccgccgcacccaccgccagacctgtccccatccccatcttgttgctcttctgcggagcagcgcccgccgccgcggggggcaccgaccaccggcgcagccgcgtacgccggagcggaaggaggagcgccgtacgccggctgcggcccgcctccgtaaccgtaggcgccggccgggtaccccaccggcggcgcggcgtacggcggctggcccgtagggcggcggcggggcggcgtagtaggggtcacgcgagccgccgctgccggcgggatggccggtacggcgccgggtacgggctcggatcgtggtggt

SEQ ID NO: 21607 - DNA, 735 bp, Setaria italica
  Peptide Sequence Number=SeqID_87581
gtttccagacctgtcccatcccctatcttgttgctcttctgcggagcagcgcccgccgccgcggggcaccgaccaccggcgcagccgcgtacgccggagcggaaggaggagcgccgtacgccggctgcggcccggcggcgtagtaggggtcacgcgagccgccgctgccggcgggatggccgtacggcgccgggtacgggctcggatcgtggtggtaccgcgggggcggggcctcgcggatggcgacgcgggcgtcgagcttcccctgcggccggcccgagggccgcttgaggcggagagtgcgggagaccttgcccccgaccccggcgtcgtcgaggacgtcgcggagcgggaggcgcgcggacccgaccagcggcttgacgccctcggcggcgttggcgtggacgatgtcgatgtggaggacggcgtcctcgagccgggcggcggagggcgggagctggacgacgagcttctcgtcccagacggggttctcgccgtcgtcgaggtcgacgtgggtggagctcttgggcccgtcgtccacccagagcacggcgtagggcttgagctcgccgttgcgccagttgacgttcttgaggtcgcgcgccgagcccacggtcacctccacctcgtagcgggaacccatggatgctttggtggcggcttggtccttctggaaccaacccttgccgaatgacatgctctcctgtcctcactgcgatactttctttcgcttgc

SEQ ID NO: 21608 - DNA, 703 bp, Setaria italica
  Peptide Sequence Number=SeqID_87582
taaatggcactggcattcaccccctgccttgacgccttcttcgtcaagtcaacgcgcgcgtccaacaaagacccagcaggcagctcccttcctccctctccctcctcagtcatcaccacccgaatcccagaaggacatcgccggcgatggggaagctcgacgactgctgggccgagtgctgctacaagtgggacgagtggaagtactgcctggcctgcctcggcatcgtggccggtgtcgtcctcttcgccgtgctcctcgccgcgttcggcttcgtccgccgcgtctccgtctccgtcgacgaggcctcgctgacgcgcttcgagctgtcgacgacggcctcgccggcgacgtcgctggcctacaacctcaccctgaccctggtgatccgcaacccgaactgggcgatgaacctcaagaacaccaagccgctggaggcgttctacaagttcgacgaccaggttttcgaccggttcgagctcgccgggaagggcgagaagcaccccgccgggaagacccgggtgtaccacctcgccgcgggggcgacgaggttcgtcgcgaccctcgggaacgccggcgaggccgagttccggaaggagaacgcgacgggggtcttccaggtggaggtggcggtcgccggggaggtccggtacaccgcgcgctacaccaagtgcaaaggtacgaaggacgtacgtagaaccaa

SEQ ID NO: 21609 - DNA, 1110 bp, Setaria italica
  Peptide Sequence Number=SeqID_87583
gataaagacgtggccgttttcgcagacgccgagagggtgagtcgtcgcgaggagatggcggacgggaagcagggagagggttcggccgtggcgttgaaggcctcgccgtcggccgcggcgatggcgtggggattgcgcggcgggagcaaccctctggaggagtggagcgcgcgcgtgaaggcgattgaggccgggttccgcgcgtggatggcgaagcagcctatccacatcgaggctgcggtgaccactgccgtgggggcggtgcagggtggggctctgggcgggctcatgggctcgctctcggccgacggagggtcgccgttccccatgccgcagccgccgcccaacgccaacccggacgccatggcgtcgttcaagcaggcccaggctttagctggtggacccttggtgcaagctcgaaattttgcagtcatgactggcgcgaatgcaggtatatcttgtgtcatgagaaggatacgagggcaagaggacatccagggcagcatggcagctgcttttggttctggcgtccttttctccatagtgagcggaatgggtactcctaatccagcagtaaatgcaattacaactggtgctgcttttgcagtatttcaaggtggctttttcatgattgggcagaaattctcaaagcaacagggtggagaagatacatactactctcagacaagaagcatgctgaacaaactgggtcttgaaaagtatgagaagaatttcaagaagggtctcctcactgatcaaacattaccgctccttactgacagtgctctaagagatgtgaagatcccccctggacccagactactcatactcgatcaaattaaaagggatgctgagcttgtacgggcaaactgaagtcacaattatcaactgctcgttctttctgaattgcatagggtttgaaagcgacgccatctctgttttcataataagccttcatagtaagcaagaatttagctatgtttttgtagttaattgttttttgtcaatcggtttgcgtcaatcctattgaattttggatagcagatatttgaatgcactgtattgaaacttaaactggaattgcgtacagtgatcaattctctgggaacc

SEQ ID NO: 21610 - DNA, 305 bp, Setaria italica
  Peptide Sequence Number=SeqID_87584
ctgcacatacgcaccatcccgagtcggaccgcggccgccagatacccccagccaagcagagcagaaagcaaacaggcttgtgaaaagatgccgccgccgctgccggtcaacccgcagcgtctgtcgccggcggagtcccgggagcggacgctgcgcttcttccaaggcctgggcgtggacgtgcccctcccggcctcggccgagcgccccgatgcctacgccgacctcgtccgcgccgtcctctcctccgccgccgtctcctcctcgcgcgtctcttgcaccctcaccatgtcccccgccctcgc

SEQ ID NO: 21611 - DNA, 643 bp, Setaria italica
  Peptide Sequence Number=SeqID_87585
tattgcatctgaaggctggaattcagtgctagcagaagtacctttactcagcgatccaagcattaactccatctccacttcttcatcacccgctggtttaagtaaacagtctgaagtgtccaattctgggagtgcgctgagcatggcagaaacagtaatgcagtcaccattaaagatttccaccgcacctcagctatcaattgatgctcagaaaattgaagaacggactatgaggcagtgcattctaagacctcttacaccatcgtcgaacaaaatttctgcatcaaattccttggataaattaaaatctaaaggtgcaagagttggagattctaatggtcctatcaaggttgctccgcaactgtcactgcagccatctagcagctctattcgcactccagtcaaaactgagcttgtaaagccgtctcaatcaggcagccttcaagtccttacccgtgaacagaatggtactgtaaatactgctgccaaagacagcaccagcaatcctgtgagccctgttctaggtcgatcttcttcaatggaacctatgagaaagtctgttgtcaacccaaagcttaattttggcattaatggtcgttctttgcatctgctgcaaggttcaattggtgatagaaaagcaagt

SEQ ID NO: 21612 - DNA, 915 bp, Setaria italica
  Peptide Sequence Number=SeqID_87586
agatagataagcaatcaaacagagtgttccacccaactgagcgataaatttttccctgaagcagctcatagactttggcagcaccaacttcagtggaagccaaaatactgagaagtccaaggaaggccacaagagtttgtgtgttggtatggtcttctcctgcatatataacaaaagtccacagttcctcgtttccatgcactagctcaggctctttctgatagatttctctaattagctccagcaaggatacaaaaggctcgttagtagcctgaccaacttgttccccatttctagcaggatcttcccgatgatctcgaggtggcccgtatggactgagggcagtcattgctttttccttaatttcctttatcttatctctagaagttgggtgggaaataaagcacatcattaacttgtgtgtgtagccagtgtacatgtagacaatgtcctcatcatcattctggtatgcagctgttttcaaaactcgctcccgcaaaaactcaaaagaattttgacaacagataatttccagacatgaccaaatatctgacgtttctcttgaattacttcgatcttgagttagcatcaaatgaaccgaccatgcaagtcgcacaacaccaacaaatccttcaacagtcgtattgtttcctgtcctcatcacgagttcatgaaattcatgtctaaatgaggaatcagatgatgacaatgatcctttctcatgagaagtacttagggcatcagaaataaaagttgctacaagagaaaacagaactccataggtgatctgaagctccacacttgtgttttgatttgcatcagctgcacagtctttcaatattgaaaatacatccttaacttccttggggctcattagtttaataagtgcagaaagagcaaggcagtggctcaaac

SEQ ID NO: 21613 - DNA, 478 bp, Setaria italica
  Peptide Sequence Number=SeqID_87587
cggggagcatcacggtgaaggagaggatggccaccactgcgccgagctggatgtctctctcgccctctgctgtgccaccctgttcgttccccacggtgcttgtctcatcctggccttgtgcgccgggtgttcctgatgcaggcctctcagtctccgtcgcggttctctccgtctcggaagatgaactcgaagcttggcttggatccttatcagtgggcacggcatcgatctggatcttgacctcatctgccatggtcgtggttggagcttcccccctgcagcaactaataatgcgatccctgcagctctgctgttgcggagcaaggcctgtcgatggctaatacaaccaaggcaaatcaacgcatcctatcgtatggtgtcctacttatgatggtcgatcataagccacagtagaagtaactaatttttacaatacaaaagaaaaaaaagaaacaaaatacctttaagaccaatgaaa

SEQ ID NO: 21614 - DNA, 654 bp, Setaria italica
  Peptide Sequence Number=SeqID_87588
tgaactggcagagcaggattccagaacaccgcatggcataaaaaatagcaaaacctgaacagtggcattgcttgattgctactactattacacatttttttgttatgtatatgattccttccaccacctaattaaacagatacagattgtgatcccaaacctctcagcaaaagctcagatgttatcagccattgctttgatccacacaagaacaccaaaaaaaaaaacatgggactttctttctttcagaagcgaggcatcatcaagaaggctcccctgatccctgctgacctccgagcgcgatgagccgcctcaggttcctgaggtgcctctgcagggtccggcacgcccgcaccctgacgctccggacggcgagcctgagcttcttcagccgcacgccgatcctcgccttcacccgcgccagcgccggcggccgggaccgcgggctcttctcctccagcaccttctggatcaggtactgcgccctgaggtgccgcgcctcctccgcatccaccttctccaccttcgcgtacgcgaacggcgtcggcgccctcagcagaagcatcttcgtgatcgacgccgcgttgtagcgaggcagcaacaatggcgacggtgcgacgaggaggatggggaggagattctaggtagtagggt

SEQ ID NO: 21615 - DNA, 243 bp, Setaria italica
  Peptide Sequence Number=SeqID_87589
gaacacaagagcttgagcttctaacaggaaacagctgaacgaagcgaccatgaagagcagcacgctcctggtgctcctgtgcctccaggccgctctggtcatggggatcttcgcagccgtagcaaaagaaaatgccgtgggagagagcaaggccatcgacatcaacccgggtcagctcaagtgctgcaccaactgcaacttctccttctcggggctctacacctgcgacgacgtaaagaagga

SEQ ID NO: 21616 - DNA, 695 bp, Setaria italica
  Peptide Sequence Number=SeqID_87590
gcttgagcttctaacaggaaacagctgaacgaagcgaccatgaagagcagcacgctcctggtgctcctgtgcctccaggccgctctggtcatggggatcttcgcagccgtagcaaaagaaaatggtatatgttcttcgttcctttattgattgatctgaatttgagctatgttgttggcgatgacacatgatcgactgaataatgtaatgcagccgtgggagagagcaaggccatcgacatcaacccgggtcagctcaagtgctgcaccaactgcaacttctccttctcggggctctacacctgcgacgacgtaaagaaggactgcgaccccgtctgcaagaagtgcgtcgccgtgaagacctactccggcaagaagttcaagtgcaccgacaccttcctcggcatgtgcggaccaaagtgctagatgagcattattcaagcatgcgctggaatttcccttgggacactcgatctctagcgaaatggccgaggtcatgtggcgcctacacgaacgtatgattatcattgtgtgatgtgtgttcagtgttgtgagtttgtgtggtatgttcttgtacgtgtgcttgttcttgacgatgcccgcgaacaataagctgttgtttgcaataaataaaagtgatgcaacgggcactgcgagttatgtttagaaaattaaattttctctatttccttgtga

SEQ ID NO: 21617 - DNA, 374 bp, Setaria italica
  Peptide Sequence Number=SeqID_87591
ctggggttgttgggcgggctcagcttctccggctgcgggttcgccggcgtcgggtccaggagcacggaggcgtcgcatccctcgacgaagcagtcgtggaagagcatgcggatgagtcctgcgccgacgccggggttcttgcggacggcggcgccgacgacgtgcttgacgatggcctcggcgtgcgggcacttttcgtggtagtacccgaccttgagcccgcaggtggcagggctgggaggagtgtagtagccagtcgctgccacgaccagcagcgcacacgagagcacagcggccaccttgctcgccatcgtgctctaatctcacaacaagcttttcttttgtgtctcaaagtgagatcgaagctgatgatg

SEQ ID NO: 21618 - DNA, 1307 bp, Setaria italica
  Peptide Sequence Number=SeqID_87592
tttttttttttttcacgtcaaagagagtttgctgcatttcttcagaaaaaaaggcagtagaggcctcataaacagcatcaagcaaccaaatcaacaaatacaacgccgccgcggcgaaagcaaaaggtaattgagaaaccaagatatgcccaccagtacgttacatgtgggggcgagctgaaccaacacatttgaaaacagtttcttcaaaagcggtagcaaaaggcacgaatctctctggtttgctgatcaagcgagagcagcttcactcccagcttagttgacgagcctgcagttcctcctgatctcgccgtcgcggccggtcttcacgccgatggcggccatcttcaccatcgccttggcgaacttcttctcccacgaacccgggaacctggcgttggcgcgcaccatcctcgcggtgttgggcgccgacagcagcgcggcgtccgacgtgaacagcaccttgcgcgccagcacgttcttgtagtattggttgtccagcgcgtccggggagaccacgtcctgggtcaccgtcggatcgttggcagcggtcgggctggccgggcactgcttcctcagctgcgtcgccagcggagcggcgatgtcggacggcgagctcaggcgtgcctggacgaaggacgagcagtgggaccggccaatggagtgcgcgccggagagcaccaccacgtcctcgacgctgagccccttggcggcgaaggcggagacgaggctggagaggttggaggaggggccgggcaggaacgtgagggtctcgctggcgagggacttgcgcccgtccagccgccccgccggcatgtggaagctgaccttagcgtggctgaggagataggacgcgtcgcgcccggcgaaggcgacgatgtcggcgcaggagaccgtgccggggcaggccttctcgacggcggccttggccgcgtcgatcacctcgtagccacgcaggctggggttgttgggcgcccccagcttctccggctgcgggttcgccgccgtcgggtcgaggagcacggacgcgtcgcagccctcgacgaagcagtcgtggaagagcatgcggatgaggccagcgccgacgccggtgttggcgcgaacggccttcttcacctcggccctcacgagggcctcggccctggggcacgtcttcctgtagtagcccacctgcaggccatcgcacgccgtggccagaaccagagcgcacgagactagtaagcagagcttaatgctggcagccatgacgactgtcgtcttagcagctggatgatgcttgagatcgagctgaagaggtcgatcaggag

SEQ ID NO: 21619 - DNA, 265 bp, Setaria italica
  Peptide Sequence Number=SeqID_87593
tcattgattaagatgacacgtgtcagcttctgatcgcgccacgcgggagcacgcgaaggtgccgcatgtcgaaaattcaacggtgacttgatcaacggtgaccggtcaacgaccaactgggccccacctgtcagctcgtgggccccattgtctgtttgtggccccacgagtaggaccggccttggacacgtcagcgccatgtagctccacgtggccggatccttcgtggtgcacatgtggcggtccagggtttagccggaatccg

SEQ ID NO: 21620 - DNA, 405 bp, Setaria italica
  Peptide Sequence Number=SeqID_87594
gtgtgagtagtgaaccccttggattgcatttgttgtcacacaacaaaataaaatgtcatctgagaaatgcagggactgcactgttagtcaatagaagtagacccggaaaaagggaagcgatgcatactgttcttttcatcttcatccatgatgataaaccgtatctggggttggggatcgtccttgtctggatgaacattagaagcaaacgatgagtatcttgttatttctgcaatcaaggagcatgtgatgatatagccctgcatgctttcacagtggcttaatttcctgcaggctgcagcggaactattgtttctctttctcagtggacggtgtcctaatgttctgcttgacctttttctttgtgatggctgcaggaggaaagccctgctgcagatggtgccg

SEQ ID NO: 21621 - DNA, 1276 bp, Setaria italica
  misc_feature (1231)..(1276): n is a, c, g, or t
  Peptide Sequence Number=SeqID_87595
ccactgcaaaggcggagcagttccactgccgctcaccacgcacgaccgatcgccatggccggcggcaacctcaagaacttggtcgtcgccttcctcgtcccgctcccctccatcctcttctacctctccttcgtccgtcccggcggcaatgccgacgccggcccgctctcctcgtggtgcgccgagcacccgctcctgctcgccaacgtcctcttcttcctcaacgtcaacgtcctcttctggctcgtcggcctcctcctctccaaccactggctcatcgacctgtactggaccgtcatcccggtgatgctgctgcactactaccggggccacccgtcgtccgtgacggatgcagtgaggtcagcagtggtcgtagcgctcacctgggtgtggagcgccaggctcacgcacaactacctgcgccgcgagggttgggagtttggcaagagggaggactggaggttcaatgagatgcggggacagtacggcaagacctggtggtggatgtcattctttgccgtctacctctcccagcaggtgttcctgatcagcatctgcctgcccatgtacgcaatccactccagcaaccagccatggggcatttgggacgtcgtggccacagccgcctgcattgccggaattgtcatcgctcacttcgccgatacccaccttcacaagttcgtgaccaggaacgagaagctgaagcagctgggcgagccaactgtccccaccctcgaggatggcctgtggcggtactcgcgccaccccaactacttcggcgagcagctctggtggtggggcctgtatctctttgcctggaacctgggccagcaatggatgttcgtggggcccctcgtcaacaccctttgccttggctacgtcaccttgctcgtggagaggcgcatgctgaagcaggagcaccgagctgaggcctacaagctgtaccagaagaggacctctgtgtggatcccctggttcaggaagtctgtcccagaactgaagcagaaggagacctaatctcatgttgtagtttactatttgggtctttgccccttgtccaggttgttcaccatgctgttgttccatcctgtaatgtcgagtacttgtcgtttcatccctttgtgcaattaactgtgcatgaactgtactagcttgtatcatgatcacctgtttaaggtgtaaattaataataatgtatctacaatgatctagacctaccaaaaaaaaaaannnnnnnnnnnnnnnnnnnnnnnnnnnnnnnnnnnnnnnnnnnnnn

SEQ ID NO: 21622 - DNA, 467 bp, Setaria italica
  Peptide Sequence Number=SeqID_87596
tgcatgcagcttgccttcgcagtctctaccagctacgacgaatcgacgactgatcacagcgggtgatgaagaatgcagccgtcggcgccgcagtgcaccggcgggcggtgctcgaaggcgatgcactcctcgtgcgtgcgctggtgtggccactcggggatgcagttcatccggtcgtcgcgcaggggcacgtggaggcaggacaccggctcgccgcagaagtagttgccggtgacggtgaggttcctgagcttgggcagcaggcagatgctctccggcaccacgccggacagctggttgtaccccacgttgagcacctcgaggctctccatgtcgccgacgctctccggcagctccccggcgagcttgttgtggctgaggtccagcaccttgagcttcttcagcttgccgatctccggcgggatgcaggagctgatgctggtgttgaggagcaccagctccaccag

SEQ ID NO: 21623 - DNA, 540 bp, Setaria italica
  Peptide Sequence Number=SeqID_87597
aatttagcatggcagaagcaaatccggggggaaatcacagtcatgtccaaagtcaactattgtttgctatcattgcggtggtgaggactatctcattagtgaagatgatagttgtttcagtgttattcgtgatgatgcaaactgcatccctatcttcaattaacggtcaattgacattgcgggttagaagtccccagatgattatgggatccttttgcaataacttcgagcttttctccgataaatttctcactgttttattcaggtcaccaattgcaaagatcacaccagcgctcaccgtcgcaggtgaagaggcactggctccaaaagtggcagcattctcctcgagaggtccatcgatcgactaccctcaagttataaagcctgacatagctgcaccaggagcaaccatcttagcagctcaacaagatgcatatgtattcaaatcagggacatctatggcaacaccacacgtagcaggcgtcatcgcgctactgagagctctgtacccagattggtcccctgctgcactgaaaattc

SEQ ID NO: 21624 - DNA, 690 bp, Setaria italica
  Peptide Sequence Number=SeqID_87598
tatgttgggataaccacgcagcgggagctgataattttagcaagcacaggatgtcaacataaattggtatcaggtcataattactactggaggtgaagaactcacattggccatggaagatagcgccatgtcaagtggagtcatggaggaagatcggatagttctaaattggaaggcagtagaagacagcggtgaacaacgcctcgatggtaaagcgacttgcaaagctagagtaccgagatggcagcagtgttattgaacacttgaatgtcttctcaggccacacaaatcagctatcagttatgaagataaatcttgatgataaagtgcaagtattattattgttgaactcattgccggacagctggaacacgcttgttgtgtcacttagcaattcagctccatggtaagctgactcttgagatggttaagaacatcctgctgaatgaggaagctagaagaaaagaaaagggcaacaatttgccatcatcttctgatgcatatgtggctcaaaataaagaagaaagccgtagtcgaagtcaagttaaaatttagcatggcagaagcaaatccggggggaaatcacagtcatgtccaaagtcaactattgtttgctatcattgcggtaaggaaggctacaaaaaaaatgcagattttataaaagagagcttgcagcaaaacaagacaaag

SEQ ID NO: 21625 - DNA, 1836 bp, Setaria italica
  Peptide Sequence Number=SeqID_87599
ggggagcccggggcgggcaataaaaatccggagtgggggagattcctccgtcctccgtggcggggatggggcaggaggggatggggtacaacagcaacaaggggggcggcggtggagggctcccgatgacggcgccccgaccgcggggcgcgtcgccgctccaccacagccgctcgcgcaagatccaccgcaccttcaacaacctcaagatcaccgtgctctgcggcctcgtcaccatcctcgtcctccggggcaccatcggcctcaacctctccctcccctcgcagcccaacgacgccgaggcgctcgcgggcgccaaggccgtcgaggacatcgaccgcatcctccgcgagatccgctccgactccggccccgacccggacgacgagggcggggagttcagcgccaacgccgggttcaacgcctccgcgctcagcgccgccgaggccgccgcggcgtacgcggccgccgcgggcaagtacgcgctcgggcccaagatctccgactgggacgcgcagcgacggcggtggctcgccgagaatccggggttcccggccactgttgccggggggaagcccaggatcatgctcgtcactggctcgcagccggggccatgcgacaacccgctcggcgaccactacctgctcaaatccaccaagaacaagatggattactgccgcctccacggcatagagatcgtccacaacctcgcgcacctcgacaccgagctcgcgggatactgggccaagctgccgctgctccgacgcctcatgctctcccacccggaggtcgagtggatctggtggatggacagcgacgcgctcttcaccgacatggcgttcgagctgcccctgtcgcgctacgacggtcacaacctcatcatccacgggtaccaggacttgctcttcgagaagcactcctggatcgcgctcaacaccggcagcttcctcttccggaattgccagtggtcgcttgaccttctggacgcgtgggcacccatgggtcccaaggggttcatccgtgaccaggctggcaaggtactcacggcgaacctcaagggccggccagcatttgaggctgacgaccagtcggcattgatttacctcctgctctcgcaaaaggaaaagtggatggacaaggtgttcatagagaattcctactacttgcatggcttttgggctgggctggtggacaagtatgaggagatgatggagaatcaccacccggggctcggcgatgagcggtggccttttgtgactcactttgttgggtgcaagccgtgcggtagctatggggattacccggtggagcgctgcctcaagagcatggagcgagcgtttaattttgccgataaccaggtgcttcggctgtatggtttctcacacaaggggctggaaagccccaagattaagaggatcagggatcagacaagcaagccaattaacgatgtggagaacttagatatgaaggccaaaatattgacagcttcgtgaaggttcagatgagttggtggtatggtatttgcatactttctttggctatcaacaaagtcagagtattttgtgatatggggatactgttgttctagtttccactccctttctctctcttcttcttttgttcagcaatcgttattgttatgtaacagctagagattgcaacctttgtttgttatggggttaaacatgataggagatcaaatctgaaggaaatagcctcacttttgtactgtattgcatcacatttttggtgctaggttctagctgaacaaatatctatgtggagtttgtgcattgtagtagttattgttctcattagtcttcaaccaaaaaaaaa

SEQ ID NO: 21626 - DNA, 429 bp, Setaria italica
  Peptide Sequence Number=SeqID_87600
cgaatcacatggccgaatcctttgcaacgatgacactgaatatcccgtgtacggcctgtgggaggggcggcgcctgtggaaggggcagcgcttgcaggttttgccgttcgctcgcgcggtgtagtggtgggcgtgggtggcgcagggagagcgggtgcggagttggatggcgagcttcttcctgcaaaagagttagaatatgtcttcgagcggcgtccctgcacttcacgttcagctttgcaagcatattcaaataatgttgtcatatctgtgtagtccttataatcaagtatatcctgaatttcgcggttcaaaccaccacgaaaacggccatagcagcgtcggtttcctccaataacccacaacgaatcattcctatttgtaattcctggaaatattcctcaacagatttggaaccttgctgaaaac

SEQ ID NO: 21627 - DNA, 277 bp, Setaria italica
  Peptide Sequence Number=SeqID_87601
caattctaggcccatattggcccatacattgtacatcaagactaatggagacattgatcttcccaggactcaggtcaaggtaatatggtaacatagaagttagctgcatatgcctgaaataccttgcctgcaattgtgggaagagcagggttttatttcgacaggacaggagtgctaataactttctctgaataacatgtgtatttatttatctaaaaacatgtgcacttcaacatggtcaaactacactacgtaatcaagtaccagagaatgctag

SEQ ID NO: 21628 - DNA, 580 bp, Setaria italica
  Peptide Sequence Number=SeqID_87602
cacatgcggcagcgcctaagtatgagatgctaccattatttcccataacgggacgcttattctgcaagaatttctgaaccaatgcgcggaattcttggggtatcgcttcaatccatcattgtagtccacgaagtttatcccaaatcggaccgtgaaggcatccctccactcgaagttatcgagcaacgaccatgcaaagtaccctttcacatttgctccatctcttatagcacttaacagcgcaagaaggtgcttgtggtagtactctatcctgatgtcatccttcagggcttcatgtagtggcaggctgttgttggtggtttcatcaacgccattttcagtgatgtagatggtaggatttccataggtttccttcacatagagcagtagctcacggaagccttgagggtagatgtagagcgaaggtgaagcagcctgacgaccaataaggaaaccattccgaacaccagtagtattagcttgagagtctgtgttatagctcttgttcagggatggaggaacgtccttagtgtagtatcccgtgtagtagttgagcccgatgaaatcgaatgcacccttg

SEQ ID NO: 21629 - DNA, 777 bp, Setaria italica
  Peptide Sequence Number=SeqID_87603
cctatcccctgtgtgccttgcctatcccctttgcgtgtctcaggtagatgtagagcgaaggtgaagcagcctgacgaccaataaggaaaccattccgaacaccagtagtattagcttgagagtctgtgttatagctcttgttcagggatggaggaacgtccttagtgtagtatcccgtgtagtagttgagcccgatgaaatcgaatgcacccttgaccaactcagattgttcttttgtgaatcgcggaaggcgatctcccaccaaccttctcatgtttagtgggtagtctcctctaatgagggggtccatggaccatccaagcatgaaatctacttgacgtctcgctgctgcaacatcggatttggaacgggagaagggagtaaaccaatgtgagactaaagttattccaatcttacccttctgtacaccctggtatttttctttatacaaacgagctgcttctgcatgtgcaaggagctgataatgacatgcagtgtaaggttcccttcctgaatccccaacgctgcacttgccctcctcccatgatgagcaccgggctggtggaaatgtgccggatgcatagcccacagagcagaaggtccacggctcattgaaagtgatccaatgcttcactcggtccccaaactctctgaagcagacttcagcatagtccttatagtcattgatgatattgggactaagaaatcctccatatttatcttctaatgcctgaggcgagtcccagtagaaaagggtcacaaatggttgtacccctt

SEQ ID NO: 21630 - DNA, 430 bp, Setaria italica
  Peptide Sequence Number=SeqID_87604
cctatcccctgtgtgccttgcctatctcctgttgcgtgtctcagcaggcccatggtgtcggtgtgtggcagtgcgcccagcaccttctccgggtgacggcacggagggtagtagtgcatggccgtgctctgcggcttcggctgcctcccggtgtcgtcgtctgcgtcgccgccgccgaagaaagccccttggagcgcctcttgactgactccaagatcagttgccatgaatcccagcaggcgccttgcaaggttgctgatctcgacggagtagctgtcgagggcatgcctaggatcgagggagcaggtcgacgagaatcgatcaatgccatgaattaaatctaatcagaacaaccggaaaagaaattgacacacctgaatgtggcctgcgaacccacccacattcaggtgtgtctaatttttcttttccg

SEQ ID NO: 21631 - DNA, 1578 bp, Setaria italica
  Peptide Sequence Number=SeqID_87605
ttttttcagtcaagcaatgcaaactcacatagtacaacaaatatccaccgttttgaacatatatcaacatcaaagtttagaaggtagtatgaaggtaaatggaatctaaaaatgagggttcatgcatatattgcattgcacaaattataaggattctttatttcggtacacataggggcacgggaggtacgtacgttcatctcgatcaggattcaggacagcaatcgaagttgctgcgcggttctttacattctgagggtgtccacgaaccgtctcccttgcgccagtgctctgctactgccctttctgtactccagtattccgatggatctatagcgtggccgtgcctcgcctccggtgaggagctccgggagcggcgtcacgaacccttgaaccgaggcttcgtggaacatcaccacgctggtccggcctctctcggcgtccgggaccaccctgtgctcgacgctgacgtaggtgccgttggtgaggacgtcgaggatgtcgccgacgatgacgacaacggcgcccagcagcggccgcagggggatccaccggccgcccctcttgatctgcaggcccggcgtgtcgtcgacctgcatcagcacggtcaggcccatggtgtcggtgtgtggcagtgcgcccagcaccttctccgggtgacggcacggagggtagtagtgcatggccgtgctctgcggcttcggctgcctcccggtgtcgtcgtctgcgtcgccgccgccgaagaaagccccttggagcgcctcttgactgactccaagatcagttgccatgaatcccagcaggcgccttgcaaggttgctgatctcgacggagtagctgtcgagggcatgcctgaatgtgggtgggttcgcaggccacaagtccatgtccctgtcttggactggctccgtgaagaggaacatgttctccgcccagtctatcttatcgcctgaagacgcgttcacatggtggccaaatccttggaaaccaccatctcgtactgcaaccgagttcttgctctccagtggcaggccgaagaactgcgcggcgctgtccttcatctgctgcatcgcggcttcgtctaccccatggtgtgttagctgaaagaaaccccagtctctgcacgcggagccaagctttgccgtctctgacgccgacagctccggatcaagaagctttgccatgtctaccaccggtagctcgaacacctcgtcctcgctgacgacggcaccggcttcctggacctccgtggtcctgatgaacttctcggggatctcgacggagcccgcgaacacggccgcggtggcgcccgtgatcttctccctgatgacgagcttggcggcagcggcctccattgttctgcgtcgtctctacctcccaattggccaacacgcacggctctggctctgcacgacttacattcaggtcctgctatcatatttataaggactgatgagtgctatcggataaactcatctcctatttgatgaaactctcccttttagagccttatcgtcctggtgccgctccttggcaaatgtaaattaactctagctttccgccttccttttgtatgct

SEQ ID NO: 21632 - DNA, 459 bp, Setaria italica
  Peptide Sequence Number=SeqID_87606
aggccgccgccgtcggggctggggagccacagcggctcctccatctgcgccactttcatgagctcctccatcgcggcgagcccgagctccaggaggacggtgcggtcgacgccgtgggccgcgccgtgcatgccgccgtcgaggccgccaatgcccgcgggcaggcgcatgcccgccgagcccacggggccgccgctcatcaggtcggggaggggatgcagcgccgacgtcgcgcccagcgggccgaggccaaagccgttggtgccgacgccgagctcgaggccggagcaaccctgcagggacggaatcgggccgccggaggagattgggcggcccaggaacttgccggcgagcgcgcagacgcggtcgagctcgtccttgaggcgcgcgttctcgatgcgcaggtgctgctcctccagggacacctccccgagcagggccgcgccgccgcagttggcg

SEQ ID NO: 21633 - DNA, 949 bp, Setaria italica
  Peptide Sequence Number=SeqID_87607
gacttttacgagttagtgttttgtaagttcttatcggatacatcttattctgtggccgtacgtgctgccgccgctaggctgctcctgagctgccattctgcctcgacgcctcagtatcctcatgcttttgaagactctatcatagagaatattaaaaatgggtaacagaagattttgaagcgtctagtgaatgtgaatggaagtatctaggaataaataaacccacagatgctgagatgctgagaacatacgccattgggttgctcgctatggcgttgtgtagtggtgggcagttggtagaggatgtcttgactatgggggtatcagcgaagctcatgcgctttttgcgcataagagtccttggagaggcctcatcttctcagaaagattctaaccatccacaagacaccaggcatcctcggggcagagatgataacaggggcaaatcacgtctggctcatgatgtttctcgacttgatggaacaagggttgggtatggaacattaactggcctgactgcagagaaggacaatgaacctggtgttggaatgaggcaagcacttggagaaaggttgatggatgacactgttgcttcatcggataaccgtgacatccctgaggctgatgggaccaatgatcaatcttatggcacaagcatttgtgacgcaaagtcaaaatttggggaaaggcattctgcggcgaggcttgctaaagatgaagatatcagcgaaaatggtgaactgttgaagagaaagctaaatcgaggcactgctcgacttaaagtgaagggaaaggctggtgaaagctgtcctgaatcagaaatgacacctttatcgccaacctctggattgagaataggaggtcgggctaccagagagaggaatgcagtgagggttgatgacccaaagaaagcaactgatgtgaacaatagatctgcaggacttgagtc

SEQ ID NO: 21634 - DNA, 974 bp, Setaria italica
  Peptide Sequence Number=SeqID_87608
gatccccgtgccgccgaaccggtggccttgttgtagcagtgcacgccggagatggagttggctggccgggtcaccatgatccccgtcgccgcggagaagatgacgacgtcggtgacggagttgtcgttgccgtcgagccggatgcccgtgcccgtgaaccgccgctccccggggtcggtcccggccgtcatgtgctggcccaggaagctgttccggatcatcgtctcgtggccgccgctcaccgcgacgccgtcggagttgaagtggacgacgtagaggttgtcgatgccgacgcggagcgagttcaccaacgacacgccaccaccgcggtagttgcagtccagcatcaggtcgcgcagcgtggcgtactcgtagtcgtagctccgggagctgcccttggcggagagctcgatcaggtagcggtccgtcgggaagtcgtcggaggcccgcagcgacccgccgtggatccggaagttgccgccaccggaggccggcagcgtgaatgggcgccttgacgaggtacgtgccgccgtcgaggtgcacctccgcgccgccgaggtccgggatgccgccggtcatggtggcgttggacggcgcccggaacgcgtcggcgatggccttgttgatcgcgtccgtcgcgtcggcggcgcccgtggggtccgccccgtagtccgtcacgtggtacacccgcgcgcccgccgaggccgttgccaaatctctcctcgtcgccccgaaggaagatctgacgctctccatcctccgctgcgcgagatccctgtaccgccgctccccgccggccccggaggcaaagccagcggcgccatggccgacggcgccgtcgtgaggccacgcgctcacaccggcggccaatgcaagaagcagagcgccgaggagcggcagcatggctcctcttccctcccccgcctcgcaggctccatggttgcttcctcggcctctcctggtttcttgtggct

SEQ ID NO: 21635 - DNA, 623 bp, Setaria italica
  Peptide Sequence Number=SeqID_87609
caaggggaaaggactttggaccgtagcagcaacttcttctttctttttctgtttttttttaaaaaaaatcggacggtaggagcgatgaacacatgaactgcgctactcttgaagtgatgagaatgaaagataatcatgctggtacggctttgagcgcgtgcttaccgttgccaaatctctcctcgtcgccccgaaggaagatctgacgctctccatcctccgctgcgcgagatccctgtaccgccgctccccgccggccccggaggcaaagccagcggcgccatggccgacggcgccgtcgtgaggccacgcgctcacaccggcggccaatgcaagaagcagagcgccgaggagcggcagcatggctcctcttcctccccgcctcgcaggctccatggttgcttcctcggcctctcctggtttcttgtggctatacaggagactgacttgacctgacctctctgctacgacatcaatggcgtccaggcctcctcacctatctctcttttccccctccctctttatctgtggcactggcaccacgcctctgcccccttgctgctggaatgccaatgctttgcctttgagaggtgtgcgtgtggggtcattacaggcacctgggc

SEQ ID NO: 21636 - DNA, 422 bp, Setaria italica
  Peptide Sequence Number=SeqID_87610
cattggctttgcatcaaaatcactgcttgtcaataatggggaagcaaaatcgttgaatctgtatgcgacttccaaaggcttcagtttttcaaggtatagtctttttaagccatcaattacagaggtaacagcagtcagaggcatctgcgccttctgtgctgattttgaaccaaaccagtgataaatggatgaagcttggacctgaggggtgccattgtcttctgggtgaactctcttcacaacagccttggatctagccactagttcatccacaccttccatcacaggtggatccaaggtgctcaggtcttcccggttgagactgtcctgggtgatctcgttccccgcttgggccagagacacgagctgcattgcaatgacgaactcggcgaatccgaggtacccctgccgcttggaatccg

SEQ ID NO: 21637 - DNA, 563 bp, Setaria italica
  Peptide Sequence Number=SeqID_87611
tccttcgagtccgtgaaggagctccgggagtttgtagagtatctgcttctctcccgtggaggcgcgcctctagacacgttcgagctcaggttcggcaacttcggtgacttcaatttcttggggttcagtgatgaagatttgcccagcttgaagatctggttttggtatgttgtgacgcgcaaagcttgggtgctcaggctccgtttgcacaatgactttgaggggttccacgccttgcctgagctaggtggcttgcctatggcctccaagcatctgacgaggctagagcttcatggtgttgcggtttacagaagtttccctgatttctcaagctgcccggctttgcaacatctggagttcaacaaatgtgaattctccttggtcaagaagatttcgtctgattcccttaaatatctgagcatcactgagtccatttgtgggttttatgattctttccgcacacacatttgtgctcccaatctggtttcactgcgtttagataaagtttatgggtgtactccggttcttgagagcatgccatcattagtggaggcatttgtcag

SEQ ID NO: 21638 - DNA, 236 bp, Setaria italica
  Peptide Sequence Number=SeqID_87612
accaggagagtagcctgcttctgcttgtggtatgagcagcttggagcctctgatgcccacaaatgttatccctgcagaaacctttgcaattaacaagggcaaaggagggcggatgccgaggatgatagagaggggatggaatctatcgggaagtgttcagggaacagggtctagtctagtgagagaagagagcaggcatggggactactagtcgactagactgagagagaagacag

SEQ ID NO: 21639 - DNA, 1249 bp, Setaria italica
  Peptide Sequence Number=SeqID_87613
tgcgcattgaactgcctacctgaacctgacccatctacagtgacagggagatgcaaatgcacatgctcctcttccaactcctaagtacacttgaaaactagcctggaaataatttccagatcctgctataactcaactgtaacaagaaggattccaaacatgaacatttcgtctcatcatcatcatcgtagcagcttccacataacagctttctgtttctcgctaccatatcactgatgcagaagctagcatttgcagcaaggacaacgatgattaatgaacaagaagtcaagaactgcaggaaaggaaaaaaaaaggctaatcctagtagcaagcaacacctcactagtcgcaatggggggatgccaattgccaagaccaaaaaggctcataggcaatctagccaggtcggacgcgcttgtggccggcgccggcgcggccgtcgggggagcggagggtgccggaggagtcgccgtcggaggaggcggcggtgtcggcgttgcgggcgaaggaggcggagatgtcggcgtagaggccgacgacgcggcggatgttgttgttgagctcccggatgaggccgacgttgcgggtgaggttgcggggcgcccgggactcgtggttctggttgatctcgctgatgagcagccggttctgctccagcaggctctgcacctgcacgaagctcttgtggaacgtctggatgatctcgctgatgagcagccggttctgctccagcaggctgttcgccatgccggagaagctgtcgccgtccatctccctctcaccccccagcctcctcttcttgctcttgctgtctcacctctcacgctgactgactgacacaacagcaacagcaagcaaggaagctatacctgtctcagtcctcaatccctcctctgaagaagcacacaaccatcaggattcaggaccaggagagtagcctgcttctgcttgtggtatgagcagcttggagcctctgatgcccacaaatgttatcccttggaagaagaacttataaataggaggctggagggaagcaacctgcagaaacctttgcaattaacaagggcaaaggagggcggatgccgaggatgatagagaggggatggaatctatcgggaagtgttcagggaacagggtctagtctagtgagagaagagagcaggcatggggactactagtcgactagactgagagagaagacagaagaggggcctgagcctgacccagtgaccctgacctgtgtgtg

SEQ ID NO: 21640 - DNA, 728 bp, Setaria italica
  Peptide Sequence Number=SeqID_87614
ggacctgatccgcttgtggccggcgccggcctgccgaacggtgccgacggatccgccctcggaggccgcgcggccgccgtcggaggcggcgaaaagcgaggagaggtcggcgtagaggtcgacgacgcggcggatgttgttgttgagctcccggatgaggccgacgttgcgggagaggtcgccgggcaccttggactcgtggttctggttgatctcgttgatgaggacgcggttctggtccagcaggctctgcacctgcacgaagctcgtctggaacgcgtgcagcaccttggtgtccacgccggcgccggcggcgccggcgccgccgccgaaccccgacagcgtcgtctcgccgccctccatggaataggatgcgctccctcctctgcttctttatcagtagctctgctccgcttcgtcgtcttgctgttggcttgctgcgcgcctgtgcctgaattcttggcgtctacttaaattttgggaggacttgtcagctctgcatggtctcggtactactccgtagcatcgccggtgaggaggttccgtccgtcgggtactccgtcagatcatgagagacggaggggcgtcggagggaggagagtggggaggactgaggagcgaggctgcgaggggggaaggagagtggggaggtggatgacgatggacaggaggagatcaggagatcctcagacacacgaaacaggcaggccaggccgaccttccttccg

SEQ ID NO: 21641 - DNA, 320 bp, Setaria italica
  Peptide Sequence Number=SeqID_87615
acaatatcactgaacaggctcaaggaacaacacatgatgcgccatccaagctgcagatacagtctgacaagaaagagcctcaaccgtcaaaagatggtggcaagcaaatgaaagagacaacaaattcttctagcttatcaacatccaaagaagtattgccttcactccctgagaagagaaagcaagagcagcaactgaaaggagacaggtctggtatatcactgcaagaaaatgtaaagcagggttatgaaaccacaccactggggtctggaacagtgcagcaaaagaaggatatctccacagatgcagataagaactat

SEQ ID NO: 21642 - DNA, 132 bp, Setaria italica
  Peptide Sequence Number=SeqID_87616
ttatacactacagtagcaaaaccacctacggtattcacttgatgaggttggtgatggccgtgcagacggtggcgatcttcacagagtaggagctgtgctgcgccatcggcgaggggacggcgccggccttgg

SEQ ID NO: 21643 - DNA, 479 bp, Setaria italica
  misc_feature (13)..(13): n is a, c, g, or t
  Peptide Sequence Number=SeqID_87617
gtaagtctcagcncttttgcaggccagctgaatagaacataactgattcactaaccaaagcaggcattcttgccgtgctgttttgttacagaagtcggacaatgcaactgtgtcatcattttagagaagatgctacaacaaatcgggaagaatgtttgacctccagctttctctaaacaacttctactataattgacccaacaccaagtctgaaatgagcaacaagtttgagctaatcacacaacacacagtcaaactgaggaaggagaaggaaatctcctacagatctaatgcagcatggcatggcattcatacccgagctaagggccgaggcccttgatggcatcagtgagcaagccgcagacttccttggccagatcatgctgccgcatctgcgattgcatctcttcatcaagctgctgcctccacttggtttcaagcaatctgccctcttttttccccaatagtgacaggccctt

SEQ ID NO: 21644 - DNA, 295 bp, Setaria italica
  Peptide Sequence Number=SeqID_87618
agtaagtagacaaaaccaatagaatgctgggtatagaaatccttgcttcttcaggtttcagaagggcacgatgcacaactgttttcattctaccattgctcaggacttccatgtggtctccaatgtggacgtgcaatgcatgtggaagtttctgaaccgttttccagatgttgctgctgcggtcgacaacttcaaggcccggacaacttgtgagcaagatggtaaggaatccataatcagaatgtggtgctagccctatagttgtggcaccttgtgatgctttagggtagcagtt

SEQ ID NO: 21645 - DNA, 540 bp, Setaria italica
  Peptide Sequence Number=SeqID_87619
gggccaacaaatggagagctacagtatcagatagtgtacttatgctgaaatatggagcatacattctttagcaagtagcttgtcatatacatcaaagatttgaaaatggaggagtacaataatatcctcttaattaggttctcaaataaagaaccacagggtgcaacaaaaaaacagttagaaacaagatctaccatttcaaacttagataaaagtatatgcaagacataaaagtagaccatatggaacggaaaagaaaattttggtggcttagcatggaagatcataccttggtaggttcggatttttaaacatatgtgtcgttacacaacaaacattttatccagattaacataaccatatgcatcattacacaatgatttttagatccagattgcaacagcataaagagaatatgaacgtgtgaggatatccttatctgtttctcaatagtcaaaaagaaaattaaaactggtacccaggttcaattatgttagaaagtaaaatttaaaaaaaacagaaacccaaatatgcgcacat

SEQ ID NO: 21646 - DNA, 319 bp, Setaria italica
  Peptide Sequence Number=SeqID_87620
cggggacgttgttgttgagcacctcggcttcgatggagacgcggccgtcgcggcggcccgaggggacctggtactcgatgccgccggcgaggtaggcgccgtcgcgcgcagcgaaggcgacgacgtcggcgcaggagacggtgcgcgggcagtgcgcctcgaggacggccttggcgtcgtcgatgacgtcgaagccccgcatgctggggttgttggcgacggagtccttctcagcccggttgcccggcgtcgagttgatgaggatggaggagtcgcagccgcggacgaagcagtcgtggaagtgcatgcggatgaggcc

SEQ ID NO: 21647 - DNA, 280 bp, Setaria italica
  Peptide Sequence Number=SeqID_87621
ctcgccgccgccgtcgccgccgtcgccggcgtcgtgggccatggccgaagctagctcccgggggaggtgctcgccggccgctgccgccgcgtcgaaacggtggggagaggtaggccaagggttcgatctcttcgccaatcaagggcgctgcgtgcgagcgtaactgcgcattaatggccggggcaggcggagcagttgcggtagcggcagcgccgctcacctagcgagtccctctggctggaaccgggtggatggtggtggaggtggactcgcgccggcg

SEQ ID NO: 21648 - DNA, 426 bp, Setaria italica
  Peptide Sequence Number=SeqID_87622
gttcctgagatatgaggagatactgcaggaccccgccagcaatgtcgtcaagctgtcgcggttgttgggacggccgttctcgccggccgaggaggaggcgggggtcgccatggacgtgatgaggatttgcagcttcgagaagctgaaagatctggaggtgaacaaggcaggctcaggctcaggatcgccatccctgcgaggcgttcgtgaaggtgccttcgtgaacagctcctacgtcaggagaggcgaggcgggagactgggcgaaccacatgacgccggagatggcccggcgtctggacgctgtcatggaagagaggctctgcggatcaggcttctccttctcctgatcgatcggtcatcggcgtaccctgtttgtgtcgtcacatgatgaaccaataaagagttctgcaagaccaaaaaaaaa

SEQ ID NO: 21649 - DNA, 193 bp, Setaria italica
  Peptide Sequence Number=SeqID_87623
ctcgaactccgtttcaatttccggaagatctcatcgagcgactccgtagcggacgcattcgtcccgaggctcgaggacgggctcaaacgaaggaacttcctggagcccaggcttgctctgaagttctgaaagcccgtcctgattgaggcccatcttgaggccgttccagcaggtgaatctggtgctatactcg

SEQ ID NO: 21650 - DNA, 212 bp, Setaria italica
  Peptide Sequence Number=SeqID_87624
tagcagcgctattgactgggtgtcatacaggtcactcagtgaagttaactctccaagagcaattccagcctgaatgcacaacagttgggggaaaaaaaaagaagaattgtattagcgccaaaaaaaaaaaacagcaatgcaggcaacaggcagacaggcatcgtatctgaaaggtaaaaactttccctcacagtcacgtaagcagcgtggga

SEQ ID NO: 21651 - DNA, 1427 bp, Setaria italica
  misc_feature (1)..(138): n is a, c, g, or t
  Peptide Sequence Number=SeqID_87625
nnnnnnnnnnnnnnnnnnnnnnnnnnnnnnnnnnnnnnnnnnnnnnnnnnnnnnnnnnnnnnnnnnnnnnnnnnnnnnnnnnnnnnnnnnnnnnnnnnnnnnnnnnnnnnnnnnnnnnnnnnnnnnnnnnnnnnnnnnaacttttactaacagctttttaagacatcatctgtgacctaccgaatatggattgaatgaatctggtcagtgtgtatatatacaaggattgaactacaatgattttcccatctgaacagcactgctcgtttacatcagagcagctcgtctaatgggcaccctgctttccaggttcattcatccatgatgtgatgagtggccaccagataatgtttctgatgatggcaacacaggttcctctgtaggtgggcgatggccgggcttcgggctgaggtcccgccaagctgcgcagccatgcgaaccatctgtcatccggccacaagggcctgtcgatccgaactaatgaagccactacattctggatgctgatatatacaggtgaggtggacgccgcgtgatgctttggcgatcatgaagcgcctaccaccatttccgatggtttttcttgcgcctcgtcctttcccaacagtgctggagtgactgaaacaacaccgatcaggaatagcagcgctattgactgggtgtcatacaggtcactcagtgaagttaactctccaagagcaattccagccctcacagtcacgtaagcagctgggatgagaccaatgagagttgccagtaagaatgtatggtaggggacatctactattggtgaagctaagttgatgaaggtatttggcaatgttggggtgaccctgaggaaaagcatgtaattcaacagcttctctcgccttttagcaacctgcttctggaagaagctgagcttatctggccacagcgagaacaccagtggcttcccaatcatcttcgagaggaaatagcatgaagaagcaccagcagtggcagcaaagaccaccagagccacgccccgtagttgcccaaatagagctccggcaagcagtgacatgaatattgtccccgggatcatgaaggtctgcatgaagatgtacacagcgcaataacctaccaacacctgtagggtgtagtcactagtatagttctcaagatggccagtgaggatttggagttcctcgaggttgcgcggcaacttgaggaagctgtagtcggagtccggcatggaaaggtagactccgacgagcccggcggcgaaggcggcggcgaccccggcgccgagcgcggcctcccacaccgggaacctctcctccctccccatcccctcctcctcctgctcttcccccttcaaaaatccggggaccaggcgaggagaagagagagagagaacgagagagagatgaaatccgagaggaggaagaagagagctttctttg

SEQ ID NO: 21652 - DNA, 629 bp, Setaria italica
  Peptide Sequence Number=SeqID_87626
aatcaatctttcgtcttgatgctttcaagtttcaactaacgcttggtaggctgggtgctgataaagtgataaggaagtgaggaaaggggaaattgttgagggctggaagcaaaattagttatttgcccccatttctgataattgctcatagtgctgaagttttttatactctgtaccatttcttgttgttaatattgcttagaattgagcagacactcaccattgttcaacataatgtaatattcacattgctgtgactatttggtatttggattgcatctatattgtttcttcattataataagactaaattctagagatcacatgttttatggtaaatataagatgcacatgtttgttgcctagttacattcatgggcggatccaggaccttggctgggtgagctgcagccagggtccagcccctatagccccccttgcacaaccatgcagaggccataaattcacctaaactctgtgatccttactcaagcaaaaagtcccagcaggctgatatatcaggctaattcacgaaacgttatgtctgctggctcgttacctcgtgatttgatcttcctgcatgaacaccgacagctcacactagtccaggctgggccatggttgatttc

SEQ ID NO: 21653 - DNA, 338 bp, Setaria italica
  Peptide Sequence Number=SeqID_87627
agtactagcgctcggcgcatctcattgcagacatctaatgtgctattccgcaaagaacacaagaaaagattgcgatctgttttcatgttcagcagtagtgctcctgctgtattgaaaagcaaaattattgcaaagagctttgaactagtacgaattttggatttggaagatggcgaagtgctaaaacttccaaaagagataggaggactacttcacttgagatatcttgggctaagaggaacaaaagtgaaggagctaccaagaacactgcaaaaactctgtcacttgcaaactcttgatatcaggaagactcaaataaaaatagttgcatttcacat

SEQ ID NO: 21654 - DNA, 710 bp, Setaria italica
  Peptide Sequence Number=SeqID_87628
ccggtgtgaatgagtagtcttcttttgcgaactgcaaacccttcactctttcgaggcttcacctgtcttttgcggtggcttggcgtggcagctgtcggtgaaaagagcacttccagcagcaggtcggttggcttgttaggtgggcgcgcatgggttggagggagctgcacttcttcgtcacttcctctcgtctccaagatctagggaatcagccaacaccggccgtgaattcatccatggctttttatctctttgttccgaagcagtggcgcccatttctccccaacacgataatctgtttgatcaaatggagatactagaacaagtggcagtaactgaatcgatcagtggagcatactgtaacttgaagcattcggcattctgtaagccatttcttgtaaatgtgtgtctgatcaaagacatgtcagtacttaaggaatatgaataagtctccttaaacctccacattcactgtcacagttaccactacattctaataattgaatttcccccaaaaattcctaggctcctctcacagtatgaatcaagaagcatgcaggaaggcaggtttgaccacgaatttgttcctatattccaagacaacgggagccgtaattaatctatgaaaatgtatggtttttactagttactagtaattcctcatttgggcgatcttggtgccgccgccatggaccgccgcgtgggccccg

SEQ ID NO: 21655 - DNA, 1016 bp, Setaria italica
  misc_feature (1)..(49): n is a, c, g, or t
  Peptide Sequence Number=SeqID_87629
nnnnnnnnnnnnnnnnnnnnnnnnnnnnnnnnnnnnnnnnnnnnnnnnngttttagttggaaaatcacatggaacgttaacaccgccatgaccaagctatgcttacacgacccggttcaggggggccaaaatgcgatcacggtatattcagtagaggtctcaactctgaatccggacctagcagcaacagtctatttcatctgaactatccctgcgctaacgagcttctggatctttttgcatcactccggggttcttgaggtgcgcctgggcagcccttgggttctcctgcaaatcggtcaacacctgtcgcatgattggatcagtcaggatgttctggatttcagggtcttgcatagctttgttctgtctctctttcagttcctcctcactgagttctcctctgcttgccttgttgatctgttcaacacacctccttacaccatcaagcaattcctggttcttcggatcatgctttaggccggcttggtaagtttccagtgctttgtcatattccttcatgaagaattggatcgcacctttccttgtgtatcccttggagaatgtaggatctagctctatgcacttctcagcatcttttagaccttcaggtagggctccgagcttggtgtaacaagcagccctgttgctgtatacccttgggtcctttgggtttcttctgagtgcttcagtgtaatgcttcactgcttctggatatttctgctgcttgaagaactcattacctttctctcgctcctcatcagcaatttttggatcatagtactcctgttgctccagctctttctttgctcgttcagcctcgttcagtttcttcagggtatctgggtttcggtgctcagttaacgccttctgaaaagtctcaatggcaacatcatagtctttggatgacttggcaagtttggcaagagcagtcccttttcgggtcagtgccctcgagatcatcttgaaatcagcatgtagttcccttcccctctcaacagccttaccacaatcct

SEQ ID NO: 21656 - DNA, 315 bp, Setaria italica
  Peptide Sequence Number=SeqID_87630
catagcagctgtacaggatctgcaaataatttctggatccctttctacctctacagcttcaactgactggattccgatttctgtccattattatgctgatcacatttatcttcagtaggatcatccggacaaaaaatttctcacatacggagtcgatagactggaagtacaactttcttactgcctcgttgaatataagtagccaccatatagctgagaatccaagtccaaaaccaagtcctgaaactacatacaacaatacatcatggacatgtgtgtcttcgtcattgtatattgggtttagcttgtgttcat

SEQ ID NO: 21657 - DNA, 705 bp, Setaria italica
  misc_feature (46)..(46): n is a, c, g, or t
  Peptide Sequence Number=SeqID_87631
aatttccaccactagcaaaactcaccaacaagctccaaacgacacngttttccctttgtttggagatagacaaacaatcttcaaactacctccgtttcgctcgctgcaaagtacaggtgaacaagcctacgtctcaatgagacaacacatacaggttcctagcttaccaaggatatttttacatcagctacaaacatgctggggctatgctttatgatacgagtaatcactacagccaaagtcccaaagtgatggcaactaccacccattcctaaagttgacagcctatctcaatgcgcatcttgatcaaaccgagccagctgctccaagtctcagggaaacaaacagttcagcatcgcatccatgcatcgctcattttcccactgaagaattgccgatcgtctcaacatctgtcttgcagttctccctcagttccttcaacttcacaaaagctgaatgaagctgtgttgactcacgaacaagggcattctctgtatacagaaagagtgatctccgttgttgagatagttcaaactccatctctacagctcgttttgagttatatccggctacattggcagcatattcatcacctttgctttttgcctccaacaacctagcaaactttatgcttttcttcaatacagaaagacggcttctcgcatcctgacaatggagatccgtccacattaagcagccttaagg

SEQ ID NO: 21658 - DNA, 119 bp, Setaria italica
  Peptide Sequence Number=SeqID_87632
ggctagcacattggaaagagtcgctcgatgatcccgatacaaagatcatgaggcctcaaccaaacacctgtgtatacctgttggggcctcatgatctttgtatcgggatcatcgagcga

SEQ ID NO: 21659 - DNA, 1070 bp, Setaria italica
  Peptide Sequence Number=SeqID_87633
cctgtaccgtggatcgtactgcagtcaggatgttgccattaaagtagtgatgcctgagcgaatcagtgcggatatgtaccaagattttgcacaggaagtgtacattatgagaaaggttcgtcacaggaacgttgtgcagtttatcggtgcctgtacaagacaaccaaacttatatattgtaacaggtatactattctgtagtagccatgccaataaatttcttatttgatccccttacaccttttttcgcatatccttgtcttaggtttcatgtcaggagggagtgtctatgattacctccataaaaagaacagtgctttcaagcttccagaaattctaagagtggcaactgacatctctaaaggaatgaactatctgcatcagaataacataattcaccgtgacctcaagactgtaaatcttctcatggatgaaaacaaggttgtaaaggttgcagattttggtgttgctcgtgtgaaagatcaatctggagtgatgactgcagagactggaacttaccgttggatggcacctgaggtcatagaacataagccctatggtcacaaagcagatgtttttagctttgcaattgtcctgtgggagctgctaaccggcaagatcccttatgagtacctaacaccactgcaagcagcaattggtgttgttcagaagggcattaggccaacaatcccaaaagacacccaccccaagctcgtcgagttgcttcagaaatgctggcatagagatccagctgaaaggcctgacttctttgagatactggaaattcttcagagactctccaaagaggtgggaactgacactgagggtcgccacaaagcgaagacaggttttctttcagccctgaagagaggtcgctgaggggcacatgatagttactccaatgttggtgcttgatgcatagtgtaattgcagcatcctgctgggggagcgtgccttgtagtgtacagtcaatcagtcataacttcatgtaactgcagctgttttggtcttcttctttcttttctttttttgctataatctactttgttttcttccttcttttttctttt

SEQ ID NO: 21660 - DNA, 602 bp, Setaria italica
  Peptide Sequence Number=SeqID_87634
cctcggccctctcaacatggtctcgccgccggtggaaagcagcttgtacgagttgcagcaagaccgccggtgcctcgactggctggacacgaaggcgcctggctccgttatctacgtgagcttcgggagccttgctgccatggacccgcacgaatttgcggagctggcttggggcctggctgacagtaagcgcccgttcatttgggtggtcaggccgagcctcatccgcggattcgagtccggtgatctgcccgaagggtttcgggaagagattagcgatcgaggcaggatcgtcgactgggctccgcaggatgaggtgcttgctcaccctgcagtgtgcgctttcttgactcacaatggttggaactcaacgatggaggctatatcagaaggcgtgccgatgatatcacgacctttctttggtgaccaatatggaagtgctatgttcgtgtgcgacgtttggagggttggagtggaggttcaagtggaaaaccagctcgagagagggaaggtcagagatgctattgagaaactgatgggcagcaaagaagggaaagagattagagagaggatgacgaacctgaaagagatagcggagaaag

SEQ ID NO: 21661 - DNA, 507 bp, Setaria italica
  Peptide Sequence Number=SeqID_87635
aggagggtgctgttggccgacgtgttgagcgtggcgccggcggcggagaggaagtcgatgttgagcccggagaggagctggcagtcctgcagcgcggcgagggcgccgggggagagacggccgctgccgcgggagaggtagcggttgacgaggccgaggaacctgttggcgttggcgagggacttggccacggagaagcggccgtaggtgtagaggttgctggtgccgttcgacgggagcaccgtccggcagaagttggggtccgtcgtctcgttgcatgccgtggacggcgtcaccggcgtcgccgccgtgttgtcggagcgggccgcgacgacgagcagggagagcacaaggagcgcggggagcgcggtggcagtagtgcgaaagtctgctgccatgtttggtaagtgtgaagcactgaagctcaacttgttagtgattgtgttgatgtactcgatagagcacgctgagacagggactgagacacgcaaaaggggataggcaagg

SEQ ID NO: 21662 - DNA, 333 bp, Setaria italica
  Peptide Sequence Number=SeqID_87636
cccgcattataagaggaggcgaccaaggcgggaggttgaagacgaggaggcggcgaccgaccggccgaatcgagaagcagcagcagccagctagctagccatggcgacgcaggccgccttcctcgcgaggttcccgcagctcgccgcgcagccgggccgcgaccgcgctgggatggggtgcccggcgcgggtcagcgtggcggcgattggcagcgccgccaaggtgggtgtgggcatgagggcggtggcgcgccgcggggtgcggtgcagggccagcctgatcgagcccgacggcgggcggctggtggacctggtggcgcccgaggagggcgg

SEQ ID NO: 21663 - DNA, 274 bp, Setaria italica
  Peptide Sequence Number=SeqID_87637
ctctcatacaacagcggcggcgcacgagatccaggcggtggcgatgcgggaacccgacgacgggatccatggaggcaggctccggcgaggtagccatcgccgtccaagacggaggccctctccggtcttccccaccgtcgaggaggcggcccgtgagctccatcgacttcatggatgctgccatggaggtgactaggtcgaggtatgccctctcttcacgtcttctctcccctccagatccatggcggcgagatccagccatggaggagttcgg

SEQ ID NO: 21664 - DNA, 236 bp, Setaria italica
  Peptide Sequence Number=SeqID_87638
cgagggtgctcaggtacgacctcgccacgcgcgccatgtccgtggtgcacctgccgccggcgtcccacaaccagcgcatcgtgctcaccacggcggagggcggcggcctggggttcgcgaggatggacggctactggctcggcctctggtccatggacgtcggcggcggtggcggtgccgtggagtggacgcaggacagggtgattgacctccggacgctgctccccgtcatcgat

SEQ ID NO: 21665 - DNA, 845 bp, Setaria italica
  Peptide Sequence Number=SeqID_87639
gagaacaagctagaaagcaaaccaaagatgtctccaccggtaaagctcatcggcgcattcggcagcccatttgtgcaccgcgctgaggcggcccttcggctcaagggcgtgccttacgagctcatccaagaggacatgaaaaacaagagcgagctgctgctgcagcacaaccccatccacaagaaggtgcccgtgctcctgcacggtgatcgcgccgtctgcgagtccctcctcatcgtggagtacgtcgacgaggccttcgacgggccgcccctcctgcccagcgaccccatcggccgcgccaccgcacgtttctgggctcatttcatggatcagaagttgcggaggccgttggttctgtcgttctgcacggagggcgagatgcaggaggggttcatcaaggagacgaaggagaacctggcgctcctggaggcgcaaattgatggcaagaggttcttcggaggcgactcgatcggctacttggacatagccctcagtggaatatctcactggatgggtgtgttcgaggaggtggccggcgtgagcttcatgggagacgagtaccctgctctccaccgctgggccaaggagtacacttccgacgaagctgtgaagcagtgcttgccgaacagggagcacctcagagaccacttcgctgcaaagagagacaagatcaaaatggtggccatggcgatgccgcagcagtaatctcggtgtcgtgtttaggtggggtagcggtcatgctggtgtaatggtgttgcttgaataaaatggtagtggactgatgatttgctggctagggatatgttgtcatgcatgtgttgcggacttgtggcccttatcag

SEQ ID NO: 21666 - DNA, 1342 bp, Setaria italica
  Peptide Sequence Number=SeqID_87640
tgccagtctattgctcaaagagattatggaagggttcagcagttcttgactgttatcgctgaggcttcaatcaaaaccaatgaggtggagtgggccaacatactacagcaaaatgagcatcaattcagcgttgatgctcttcgggaccttataaattacctcagtaccagtggtactatcgatgcagatcctgcacttagtttagtaagagcactgcagtcccaatgtgaggcaacttcaataaaggacacatatttgctggtggatggtacgggtactcaacagtatgaacgttcattgctagagaatgagggtgaaaattcaagcagcaatcttacagaacaggatcagctcactgacactcgcaagtactggtgtaccaacaaacttcttgatgcccctgattctgatagagatatccctcaattaggtgttgctgctgtcatgagcagggacatttcattaagccgcccacgattggaaaacaaacatgggcaatgtgaccttgggcaatcgggtacacaggtatcagcaattgatgaagtacttgattccatgagttattatggtgacagtttgtacagagaggtgccatcagcatcagaaattctcgaattatgggagcaggagaggataaatgacatgtttgatcctaaagcagaaagcagaaccactcgtactagaggatcatgaaatgctgccagatattatttgatatggactgcaattcttgcatctccccaagtttgttgatgcaactctagctggactcagtattgcctgaatcgtcatcaggagtcttctatttaaacacactatatctcattaagtcatcatggatagtccatactgtcagaaaggatgagaaatatgaagacgtacacctgaatccagtgccaacgactgttgtcagaaacactgtaacttatgctcaggaacaaaatactaaaacagggtggtttggacgataccactggccttagtttggagcagttctcctccagccgtatttcttgcaaaattgcatttcaggaacaggtggacaccgtccttacccaatctgtgataggcatccatagtcagcacagattgggacagacgggggaaagattgttatagaaacatgtagatttcattcaggcacttcaatttccccttaccagctgactttgtacggtcgggccatgaacagtagcgctgggttcttaccatgtttaacttctttatggcgctgggttgctttactcagaacagcagaagactccgggttgcctgaagaagtaatcaagttcaaacttggtagtctgatgcataacttagaaccgtgctggcatttttaaaa

SEQ ID NO: 21667 - DNA, 337 bp, Setaria italica
  misc_feature (217)..(337): n is a, c, g, or t
  Peptide Sequence Number=SeqID_87641
gccgcgcaggtgtgagcagagcatctgctgtgcttgtgtctacggctcggttagtttgccaggtttctgaaactgtcatcttgtactggtagctagtcaggaccaggtcgttaattgaacacaaattcgtgtttctacttgtgaccaaattgaacttcttgtccctgaacttgcttcggatgtattgatgaaatctagttgcctgtttgattgtagnnnnnnnnnnnnnnnnnnnnnnnnnnnnnnnnnnnnnnnnnnnnnnnnnnnnnnnnnnnnnnnnnnnnnnnnnnnnnnnnnnnnnnnnnnnnnnnnnnnnnnnnnnnnnnnnnnnnnnnnn

SEQ ID NO: 21668 - DNA, 525 bp, Setaria italica
  Peptide Sequence Number=SeqID_87642
gtcgtcggcgtcgtcgggtatctcgacgggcgcggcggccgacgaggaggacgcgccggagtcgtcggcggacggggacggcggcgcggcctcggcagccggggaatcattaagatcccacatggctaggtgtgctggtcaccgtgtggtccactgccctccttgtcgactcgatctcctccgtgcctcgcactccaacgaactcgagtgatgaaacgaacaaagagagggagacggggacgagacgcggagagaggagagctggagaggagaggaggccggccaaaaaggagggaggggggagggggcgagaaaaggaggcaaaaagcaggcgctgttgccttgttggggtatgcaagtactttctcttttgctatccccttggcgaagactctcccaacctaggagagcagaggaggcaaaaggcaccagccccggctggagttctctctctctctttctcaagaggaggaagaggattatggttgccgcggctgcaagttgcggccagttccgctcgcggca

SEQ ID NO: 21669 - DNA, 229 bp, Setaria italica
  misc_feature (178)..(178): n is a, c, g, or t
  Peptide Sequence Number=SeqID_87643
ccttgttggattcacactgacattaggttaggacttgactgaagcatcagaaatcgagagtacacacccaggttgagatgaccagattactcagtaatgttccttgtcagttgtcagcatgagatgctcagctcacattccctgtctgcagttgttagcactccgtctgttgccttangcagacaagacgaagcgacggacgcgatggcgaccagtagtaaacattgaa

SEQ ID NO: 21670 - DNA, 166 bp, Setaria italica
  Peptide Sequence Number=SeqID_87644
aaattaaataataaaaaccatatatcaaaatggaaataactgcaggcaatacatcagaaagaagtatagccaagtcattgcgtactgcgtagtgactacttgaagcctatgagtataaatgaaagctaatgcatgattcagagtttgacaagaactggtcacaatg

SEQ ID NO: 21671 - DNA, 312 bp, Setaria italica
  Peptide Sequence Number=SeqID_87645
aatgcttgacttgtcaaagaattctttgtctggtccgattccatcacagctgagcaacatgatggcactttcttttgtgaatgtgtcgttcaatgagctctctggtcagcttcctgctggttgggttaagctcgcggaacgatcacctgaagggtttctggggaatccccaattgtgcatacagtctaacaacgcaccttgctcccggaaccaatctgcgaaacgtataaggaagaatacacggataattgtagcactgctagtgtcagctctcgctatcatggctgctgggctgtttcttgttcactatat

SEQ ID NO: 21672 - DNA, 692 bp, Setaria italica
  Peptide Sequence Number=SeqID_87646
cctgtcattgtgttgcgattgctggtcacctggtctttgatggacaggctgagctctaccagcactcctgagctctggagggaagcgtcaggcttggccatatgcaggtagagggaggcgaattccccgctgtcgtcgatgccggaagggtacatggtcaggtaccatttgaggccaccgatctcaaactccggtgagtagcaccgtcccttcagggccaagaagtcatcgatgacccaggtgtaggcttcccgggcgctgaatccgtttgtcttctgaattacttgcaccttgtctgaactgtggttggccttagcggtgctgagcttgatgagctccacgccgaagacgcagctgtctccgatgacgaagccggatgagggttccttcagtgtttcgacggggatcatgcatgagaccctggattttctgctttcttcagtctggaaatggtggttaacttcatgttctttgtgctttccgtatgcttgatcgtatatcaagagcttgaacgatgcttcaacgatgatgtcaggtttcagatcagaagtttttgacagcacaaggacaagggaaacgtagtcttttgtatcaccactcttccggtccttcaggttcaattgcaggtaccatttaagccccttgatctcaaaataaccggagttggtccatcctttttgcttgtcaagaag

SEQ ID NO: 21673 - DNA, 2132 bp, Setaria italica
  misc_feature (1)..(60): n is a, c, g, or t
  Peptide Sequence Number=SeqID_87647
nnnnnnnnnnnnnnnnnnnnnnnnnnnnnnnnnnnnnnnnnnnnnnnnnnnnnnnnnnnngtttgacaaaaccaaatcacttcttattacgcttcaagttaattaaactcatgtccgcaaaaaaactgcacatactatacgttgcgagcgtctcacattagtatagctcagcaatagttacacacaaacacaactaaactcaattactcaaaacactcaaacgacacaggcactaacccctgcctgctgtggcaaggcagctagaaattgacgatcatctgtctggtatcagagaagttgaaaattgtaatcattttttattagattgctaccgtgctacagctcataccactgaattgacaaccaccgaaatatctgcccatctgcttaccttcctttgaaaattacaccggcacaaattagcagcaaattccatactagcttgtatcctgtgagtgacaacatgtgaaggatcatgacggcgtggaagcccatcaaaggtaccaaaatgattgacctgattgatggcttggttagctccagcatcatgcaactcagtaggatgatcagctgtgagtaatacatatatacatatatcgtcagttagtccttatgccccgaggcgcaagggctggttcataagtctactgttcagagatgcatatttcttaggtgtatgcctgatcagcctactgaaataaggagatggctggtcattgtccagatggacagcttcaatcttgtcaaccaacgatgatgatgaccaagaggcagaagctggaacagattcaggctgtaacactccactcttcttcattgcttcactaggtgaactcgtgcctgcataggtccgcttgttgttgaacagggagctgatcctggagtacctttgcctcagaggtgtcggagtctctccatggctccagctcttaacagagtccactgacgaggcatcatcatccagatccttttggcctccacctggtttcttccccttgcggcgaggccatttgagaaggaccttaatatgtttcgctgcatcttggaaagaattcagcctcttcagtttgggtcctgggatttcagcatcaaccctaccaacactagaggaaaatgatgttgtcctttcactgatgcctgacacatcaattccagcgtgaaggaaaatctcagcatctgatatcttgaaagatgtccctgggcttcctacaatgcagtgcatcttcagctgagatgcgatagctgacctggtctcatggtcccttgaatttgtgattccacctgctaaaatcagttgtttgatcagtatttctgatgatgccgttcgaggctgtttcctgagtaaatccagaggagtcatgccatcattgtcatggatgttgaggtcaatagaaggcatgctcatcaagagttcaacaaggttcgaatgcagattgccaaccacagccaagtgaagaactgtctttccatcgtcattttgcacatttataatgctgctgacatccacgaatgctccaccaactaattgccttacaagctccatctgacgatcaagccttcggaatccaggagtcccaaagccagtcagtgccatgtgaaggaacgtgtcaccagcttcattcgttgctgatataagagatggcgatgcagtaatgagagcctcgaccactggcagatggcctctaaaggctgctatatgcaatgatgtattcccttggtcatctacagagttggctatatcaaaagatgcaatgagatcgttgacaacctcaacttgtccccttgcagcggcggcgtgcaagattgtcgatccctgcgcgtctcggtatgccgcggcgtcggagcacccgcgcaggagctccctgagcacctccaggttgcctcccctcgccgcagcgtgcacggcgcggttcatcatctcgcgcctgaattcctcaccagggcacgacgccggtgacaggaccgcgtcgagcaggagccggaacacctcggggcgcccgctcctcgccgcggcgtagaggatgtcggtgacgccgtactccccctcgccgaacacgagcagcggctgcgccgcgagcagctcccggacgaacccggcgtccccggccgcggcggccgtgtagaggagccag

SEQ ID NO: 21674 - DNA, 599 bp, Setaria italica
  Peptide Sequence Number=SeqID_87648
gcgcatggcggcgccaaccttgccgtactggccgtaggggtgacggaagccgaaccggccgtgcgccggctcccaccgcgcaaggttcgcctgcgcgtcctcggaggccttggagttgagcacgcaccggtacccgtcggacctggcctgcggctgcgcggcggggccctcggcgaagtagtcctcgacgcagccctccagggcggcggcgagcttgtccatgttgcgcgtggtgaggaggtgcagctcctggccggcccacacggggcagacgaagatggcgacggcgaggcacatgaagatgccgatggcgatggtggagacccgctgctgcgccagcaccgccagctcgtcgacccggtacccggacacagccaccaggctgtacgtcaggatgaagatggtgacgccgtagtcgaaccgggccttcaccgtcgggatgaaccgcgagaaggtggccgccgcagccagcaagaagagggagccggtgaggatgtacggctcgaactcgccggttttgcccgccacccagtgcacgccgagcgcgaggacgccggcgctcgccgtcgccacgactctgttgaaactcttgtacacgc

SEQ ID NO: 21675 - DNA, 272 bp, Setaria italica
  Peptide Sequence Number=SeqID_87649
gtagatgaaagctgcttgccgaaaacatgcttgacatgcgtcgcgtgatatcttttactacttgcttgcttgtttcctgacctgtgttttctactaccgatcgagcgcatggagatttattcattcagattcagagattcagaccatttctgtagcagcattgattcatcaatgtgataattatcatttgtgcctagattctgatgatgtttttcgagcatcgagagactgaattttcatctgatgatgagggaatgtgtcgactttaaaaa

SEQ ID NO: 21676 - DNA, 673 bp, Setaria italica
  Peptide Sequence Number=SeqID_87650
attgcctcaaattcagctgggatattagggtcaccaaattcttcatagtccaaaacagtgagaggtaaagtaggatccaacattgtgttgcagatatctagaaaagggaccttgagaactgcagcagaaaataagtctggaagcgtgttaatgactgcacccaccagcagaccgccagcactacagcctatagcgcaaagacgatttttgtgaaccaagccttccttgatgagatgcttaccgcatgcagaaaaatcttgaattgaatttatcttgttagctttggttcctgccagatgccatgataaatcccctccacccctaacatctgcaaatgcaagaacccaacctcgagagaggagacttaacctctccgaacaccagcttttgtccaaatcttctccataagctccatagccgtataagatcccaggtgattctccatgacgatgtgcttcccgtgaatacagaatgactaaaggtatcaaaacaccatcatgtgatacaacttcaatccttttacatgagaatagcttggaaagatcactccaactttgtgaattttcaacaagctgcagattttgttggatgcttgaaacattggattgcaagcccacagtgcctagatttgcagacaggctagttatttcctcttgatgaagaatggtgagta

SEQ ID NO: 21677 - DNA, 910 bp, Setaria italica
  Peptide Sequence Number=SeqID_87651
aagacttacttagcgggtgtcgaagaggtcgaagggcgcgcggcggggcacgaagaggatggccttgaactccagctggccctccacggagaagtgcttcacggcgaggtggtcctcccagtcgttggtcagcgacttgtagaaggaggcgtactcctcgcgcgtgatctcctcgggcttgcgaagccagatgggcttctgcttgttgatctggacccactcgtggctcacctcctttaccttcttcttcttcttctctttgttcttgtcgccgtcgtcgtcgagctcctcgacgtcgccctccttcttgtcatcctcatcttcatcgtcgctgatctccttctcggttgtcttctcagtccacaggtagatggggtagctgatgaactccgagtgcttcttgacgaggtccttgaggcggcgctcctcgaggtactcgagctggtcgtccttgaggaagagcgtgatcttggtgccccggccgaggcgctcgccggcggtgtcgagcgtgacggtgaacgacccgcccgcctgggactcccagacgtactgctcgtcgtcgttgtgcttggtggtgacgacgaccttgtcggcgacgaggtaggcggagtagaaccccacgccgaactggccgatcatggagacgtcggtggccccggccgccagcgcctccatgaactccttggtccccgagcgcgcgatggtgccgaggttgttgacgaggtcggacttggtcatgcccacgccagagtcgatgatggacaacgtcttggaggccttgtcggggaccaggcggatgaagagctccggctgcgcgtccagcttgctcttgtctgtcaggctctcgaaccggatcttgtcaagcgcatccgatgcgttggagatgagctcccgcaggaagatctccttg

SEQ ID NO: 21678 - DNA, 398 bp, Setaria italica
  Peptide Sequence Number=SeqID_87652
cctctcacctccttcctcgatcgagtgcccatctcgattccttggagaaatgcttcaaggcacaaccatggccgtgcatcaagcgcgcttcggcggcggcctcgcggggtgccttccgcttccgccctgcgccggcggcggcatcctggtcgatgagcacacgtgggcgctcaaggactacggggcgctcctgtcggccgcggccaacgacggtgggtaccggtacgaccgcgccgcccagagcgacctgacgtgcaacggcggcggcggcggcggcggtgcggtcgccgtgccgtcgcggaagcgtggcattgaggacgagctcgagcggtactacgcggcggcctcgtcggcggcgctcctgccgatcccggggatgcacgagccgatcgccgtcg

SEQ ID NO: 21679 - DNA, 657 bp, Setaria italica
  Peptide Sequence Number=SeqID_87653
gtagtatggtcatggaggccggggggacagggtgattacggagaagaaaatggaactccgatcgatctgaggtcttgatgcatgagagaggagagagcatctggtacagagtaagtacagctaccactcggtgtcggcataaatctgcaaccaccggatcgatatcgccgcaggcgatccatcggattaacttaaaaccagcggcggcagcggggttatggctgatcacgacaggcaattaagcggcgacagttccgcgagagatgcagatcgatgctagttgctctgtccttgattatcacgcggatctgccgccgcctgtccggcctactagctcatcaactggtcgatgatcactggtggtgtagtagtatgaaattgtaaagcacatcacatgtagggtttcaggattactcatcactacccaaaacaaagcttaaaatttcaattttatgcgcctccaaacatgaattcagtacatgacatatgctactacatatatggagagcataacttaacaggcttgctagtttattggtcagagttagattagggctaatggagaacatggacatgctgtgattactgattaggttatgcataagataatcatgcatgccggaacaactgaccggtttgaattaaggtaaggggaaa

SEQ ID NO: 21680 - DNA, 642 bp, Setaria italica
  Peptide Sequence Number=SeqID_87654
agcttgttcatactttttgcacacctatcgatccgcatgatgctttaattttcttcctcatgttctacagttctaactagtaacctgactgctgtattcgcgtaactggcaaataaattgagtgcatgaaaaattggccactaaaagttaggtcattagtaactgtggacatgtattaacaccggagcctgggagattaggagatgaactcaggaatccaacacgtacacctagcatgttttagctagatagcgagaggcatgaactaggtaagttagatatagagagcaagtagatagatggtggagcgtgcacccagtgcaaagtggttccggcgcatccatcttggagttttcccctacctaatcaaaccggcagtgtccggcatgcatgattatcttatgcataacctaatcagtaatcacagcatgtccatgttctccattagccctaatctaactctgaccaataaactagcaagcctgttaagttatgctctccatatatgtagtagcatatgtcatttacaaaattcatgtttggaggcaaataaaattgaaattttaagctttgttttgggtagtgatgagtaatcctgaaaccctacatgtgatgtgctttacaatttcatactactacacc

SEQ ID NO: 21681 - DNA, 826 bp, Setaria italica
  Peptide Sequence Number=SeqID_87655
tgtccgtgcaggtcaccgagctcgccgacggcgtattcatcggcatgacgctgaaccactccgccggcgacggcaccgcattctggcacttcctcaacacctggtcggagatccaccgacgagccggaggcggcgttggcgtcagcgacgacgacctgcgcgatctctcgacgccgcctccggtgctccagcgatggttcgtcgagacctgccccgtgcccatccccatgccattcagcaagcttgagcacatcgtgaagaagttcgagcgaacggccgtgcaagaatgcttcttcaccttctccgcggcgagcgtcaagaagctcaaggctcaggcgaacgccgagatcgccggcacggacactgccgccgccaccatctcctcgctccaggccgtcctcgcccacctctggcgcgccgtgtgccgagcccgtcgcctccctcgagaacaggtcacgttctactccgtcgtcgtcggatgccggggccgcgtcaacggcatcccgccgggctacgtcggcaacgccatggtgttcggcaaggcggtggccaccgccggcgagatcgatgacaagggtctgggctggacggcgtggttgctgaaccgcgccgtggcctcgttcgacgaggcaagcatgagggagtcgctggagtcgtgggtccgggacccggacttcacgtacatgggcaacctgtcctccgccggcacggcgctggtcaccggaagctcgccgaggttcgacgtgttcggcaatgacttcgggtggggaagccggtggcgatccggagcggtgccgggaacaaggccgacggcaaggcgacggtg

SEQ ID NO: 21682 - DNA, 315 bp, Setaria italica
  misc_feature (306)..(306): n is a, c, g, or t
  Peptide Sequence Number=SeqID_87656
attctcgtcggacttcgccgcgtccatggtcaggctcgggaacgtcagcccgctcacgggctccgcgggggagatcaggatcgactgcaggaaagtgaattcatgatctgcatacgcgatgctagcttgttgctaattcattgctgcaatggatgatgaagcatgctatggaaatggagtacaaacgagccaattcattagcagacagatagtaactacctgtacgtcaaatttgtagagagttcttatttgttcagagctaatctacgcatacatttttttttgggaaaaaaaaaaaaaaaaaanaaaaaaaaa

SEQ ID NO: 21683 - DNA, 650 bp, Setaria italica
  misc_feature (540)..(540): n is a, c, g, or t
  misc_feature (565)..(565): n is a, c, g, or t
  Peptide Sequence Number=SeqID_87657
gttgccgcgctcaaggagttcgtcctcgcccggtggccgcagggcttcctactgaaggctatcttgcatcatggagagtacagacaaggatgagaaaaatcttactgtaaccaaagagtgtactaaacctgaagaaaattgtggagatgcaggagatttgtcaaggaaaacagaaaagttaaatgtagaagaagcaacaaattcttcgaatgtggatttaagtgaggagtcagaagcacagatccgagaggaaggtaattcagcaaagtacttaaatgggcagatgaatgaaagtacaagtacagacgccatggaacctgtagattcaaaccagatcacaaaagagattcttgctgaagacaaatctgaagagccagtgtttgatggaactgaggttcctgaaatggaagaaatgaggcgctcatccaatcagtctgtggaacttgactcagaggctcaggggtctgtactcaatgagcgagctgttgcaatcaagaattttgttaaagaaaagagtgccattgcagtttcaacatttangcggcgcctttctggcaaaaaaggntgaaaatgagttcaaggttgaagctgacaagagtgatggttcagaatgcatcaacagcgagaagactgggtctgatgctgaacct

SEQ ID NO: 21684 - DNA, 298 bp, Setaria italica
  Peptide Sequence Number=SeqID_87658
ggcgggggcggcggcgcggcggccgggggcgcgtagtgggggaggtcgacgggctgggccggcgggtacgcggggtacgacggcgccggggcgaagtcggtggggtacggcgagtacgggggcgcggaggccggggccgacaccgacgggtaggtggcgggaggcggcgctgcgggggaggggtaaggggggtagtagggggcgtaatcccccgcgccggagggatgcatcgccggcgagaggaggctacggatcggggagtggaggcgtcggaggcgaggtcagcgaggtggtctcg

SEQ ID NO: 21685 - DNA, 1186 bp, Setaria italica
  Peptide Sequence Number=SeqID_87659
tttttttttacgtaggcatagaccaactattaactatatattgattacacacagcgaaaaagagagtaaaaactgtaaaacaaacatcaacaccttagcaacaaagcaagcaagcaagcaacaagcaggtgaacaaacttctgctgttctgcatgcacccggccggatcgagtctacgtagtacaaatctgaaagaaaagatgcttcaacgacaagttgacagtgaacggcgacgatcagacttagaccgtcgcccggccgccatgactggtgccggcaagatctcagcatgtatgcaacaagatcatgtcacgatcggcctgcgacgaggaacctggcggggctcaccatctggtacccggtgacctggtgcaggtggtgccctctgctgcttccggcggcgaagccgcccgcatcccggcgacgcggtggggtctccctgctccatctcccacatgacctgcatgaagtcgtcgacggcgcatggcagctcgaggggcccgtcgcagccggcgaagccgtactcggtctcagcctcgtccagcagcgcccggaacagcgggtggttggcgcagcgggcgcgcaccccgaaccgctccttctccgggcccaccagcaccgtgaagtagccggccgcggggacggcggcgccgccccacgacgcggacctgtcgggagcctgcgccggcggcgggcgcctacggtgggccgccgccagcgaggtccggcaccgctgcagcgtcttggccaggatgttcttcttctcgccgccttccttcattgttgctagctagcaactacgagcacaaaatacaaactacgtacgaaaggcactaataggctaacgatcgagacgagctggtttattatgttcaacaggaagaaagagccacaagcagcgacctagagatgcagatgaaactagccgcggtcgtaggcctggtgcaggcgagacatgtccatggtggcctttggcgcgaggaggctgtgcttcttgctgttgctagcgttgctcatggctcttggagaacggccggaggcatcggcggtccgggaggacgaagctaacaaggacacgaaaagatcaaagtaggcaagtggttgcaggaggaaccgatcgaggatgaggaaggattcaactagaggttaggtgatgccgtgatggaagtgccggagagagagctcg

SEQ ID NO: 21686 - DNA, 1219 bp, Setaria italica
  Peptide Sequence Number=SeqID_87660
ccagtccgagggtgatgcccaccatgaccctgtcctcctctggctcaccggcggtgaccgctgctccgtcttgagcggcctcgcctttgagatcggaccagtgaaattcgtcatcgagccttacaatcgcagcttgccacggctgcagtacaatccctacacctggaccaaggctgcaagcatcatatttgtcgattccccggtcggagctgggttctctttctcccggaacctcaagggctatgacgttggggacatatctgcttctcttcagctcaagaaatttctggccgaatggttcagtgagcatccggatttcctcacaaaccctttttacattgggggagactcctatgctggaaagatcattccgtttcttgctcagaagatttcagaagatctcgaatccggagtcagcaggcctgctcttaatcttaagggctatctagtaggaaatcctggtactggtgaaggaatcgacgttgaatccagagtgccatatgctcacggacacggaattatttctgatcagttgtatgagacaataatggagcactgtcacggggaggattacagtaaacccaagaatgtgatctgcgctcaagctttgaacagattttcaaagctgctagatgaatgtatgatggcacatattttgtacaaaacttgcgtatatgtttctcccagacccaaagatgggactgaaaagagaaagagcttgaaggaggaaactgaagcactaagccggaaaccgccacgtcccccaatggattgtgtaacctacaaaaattacctgtcatatttttgggcaaacaacaacatcacacgtgatgcgctcgggatcagaaaggggagcaaggctgagtggctgaggtgccatgacggggatttaccatattcccaagacatcaagagcagcataaagtaccatcgcaatgttacattaaaaggatatcgcgtcttggtgtacagtggtgaccaggatgctgtcataccatttattggaacacaagcatgggttagatcactcaacttccccactgtggatgactggagggcttggcatctggatggtcaatctgctggattcaccataacgtactcaaacaacttgacctttgctacaatatagggtgggggccacactgcgcctgagtatgaaccagagagaagctttgccatgttcaggaggtggatttccaatgagacactttgactt

SEQ ID NO: 21687 - DNA, 457 bp, Setaria italica
  Peptide Sequence Number=SeqID_87661
ttccttgtttcattgacttgttatcttctgcaggctcagatatttttgagtcatactcgttgtgtgcaagtcttgggccaggtattaaggagtctggtgaacgaagaccctgcaccacaatctcaatcaaccctcttcaaaacagttgataagatggaacatgcagaatggttcaacattgaaccagataattgaatctgcatcaccataacggggcataactccaattcttgcatagctttccttctcaaactgaatcaacggaccacctttaatcagtctaatgatgtcgatagtaagtggtacatccatgattatgttgtactttagagtaactcctatatcatgacaaagtgtacatctgtccagcttgaggtccaccctatgctttagtctggttccatcagctgagacaactccaattactaggaatggcttctttgcatctgttccaaag

SEQ ID NO: 21688 - DNA, 1119 bp, Setaria italica
  misc_feature (847)..(847): n is a, c, g, or t
  misc_feature (855)..(855): n is a, c, g, or t
  Peptide Sequence Number=SeqID_87662
gtttttaggtaactgaattttaaactgcgagtttttttgtttttgttttctttactgtccaaagagttccatgacatgaatggtttggttatctatggatgaaagttccatgaaatccataaggtactcttcgtggcaatgttatttttgcaacaggagcatcttcaaatctttgagcatcaataatatgcacctgtgatgtattggttttctcattgtgtacaaatgaaattatccacccatcatcttcatgtgacccaccaactcttggtacaaatgctgctccagagcagaactgatctttaccaagccaatggtagtgcatctttatgagacttgaccccgctatctctgtgttgtttctcttcttaaggaagaattttgcaaaacctctatactttgggttaactttctcacagttgccagaagaactcgttaaagaatccactacttgtgcataggcataactatgttgcaagcctgtgtacatgttattgatcattgggagctccagtgaatcctctgttccagttaaatattcccctgagacactctttgttttcaagtttaatctccactgatataaccgaaaggaaaattcattgctagttccttgtttcattgacttgttatcttctgcaggctcagatatttttgagtcatactcgttgtgtgcaagtcttgggccaggtattaaggagtctggtgaacgaagaccctgcaccacaatctagtagcaaagaaagatatgatctgtaatgggttatttgtaaaataaacaaatgtttgatcaatacaattacagctatatgggacaggcgaaccactctaagcattgttatacctnatcacctnttcaaaacagtttgataaagatggaacatgcagaatggtcaacattgaaccagataatgaatctgcatcaccataacggggcataactccaattcttgcatagctttccttctcaaactgaatcaactttagagtaactcctatatcatgacaaagtgtacatctgtccagcttgaggtccaccctatgctttagtctggttccatcagctgagacaactccaattactaggaatggctttctttgcatctgttccaaagatga

SEQ ID NO: 21689 - DNA, 805 bp, Setaria italica
  Peptide Sequence Number=SeqID_87663
gccgccgtggccgtggtggtggtggccgatggccgtgcggcccgtgcccatggccattcatcatcatcatctgctgctgctgctgctgctgctgctgctgctgctgttgctgctgctgctgttgctgcatcaacatgtactgctgctgagccatggggttcccggccgccgcggcggcctgcagcatctctgctcccgacggcatgccaccgccaccacctgcgttggcgcctccctggtagaaccccggcgctggcatgccctgtacggcaccaccgccaccgccaccctgctgcatgatacccatgtgcgggtggtggcccatcggcatgctcatggtcatgggtccgccgcccatctgccccgcgccggggaagccggcaccacccatcatgttaggcctcatcatggcctgttgaggcagcatgccgcccatcggcccaccgacaccgacggcgccgccgcccttcttccccgggcccggctggttcccgccgcccggggcgccacccttcgcattgtgcggctgaccaccgcccccgttcttaccgccgccgtggttggcctggccgttccccttgatgtgcacggggatctcgttcccaccgccacccttctttccgccgccgccaccgttaccacccttcttgtcgcccccgccggcgccaggcggcatggccatgggcttcatcatcatcttggggtcgtcgtagaagtcgtcgtctaggccgtcgtcgtcgtaatcgtcctcgtcgtcgtagtcgtcgaattcgtcgtcgaactcgctgccctcgccatccccgag

SEQ ID NO: 21690 - DNA, 1592 bp, Setaria italica
  Peptide Sequence Number=SeqID_87664
actcgatcgatggagctaccaacattggccgcgttcctcgccatcgtccttggccttgctcttttcctcggaaccttacttttgcaccgccgccgccgcgcctacaacctcccgcccggccccaagccatggccaatcatcgggaacatgaacctcatgggcgagctgccccacagctccatccacgagctctccaaacgctatggccccctcatgcagctccggttcgggtcgttgcctgtcgtcatcgctgcgtccgccgagatggcgaagcacatcctcaagatcaacgacgcggcgttctccgaccggccgaggttcgctgtcggcaagtacatcgcgtacgactgctccgacatcctgtggtccccctacggtccgtacctgcgacagacacgcaggatctgcgccgccgagctcttcagcaccaagcggctccagtccttcgaccacatccgcgacgaggaggtgcgcgtcatgttgcgcgacctgcgcagagcatccgggcgcaccgtgggcggctcagggacaccctgcagatgctgacgctcggtgtgatctcgcgcgtagtcctgggcaggaagtacgtcgaagaagaggcggccggcgagggggcctcaccgccggtgataacgcccgccggatacagggagatggtggatgagttcttcgtgctccacggcgcgtttaacattggcgatttcatcccctggttagattggctggacctgcagggctacgttaggaggatgaagaagttgagcgccatgtttgatcgattcctggagcatgtcctggacgtgcacaacgagcgccggcgacttgagggagagaggttcgcggccaaagacatggtggacgtgctgcaggatctggccgacgaccctaaccttgaggtccagctcagcagggacaatgttaaggctatcacccaggatctaatcatcggagccacagacacctctgcaaacaccatggagtgggctctatctgagctcctcaagaaccccaagatcttagccaaggccaccgatgagctgaacaacgtcatcgggcccgaccgcttggccaccgagaaggaccttcctcacctcccctacatcgatgccatcctcaaggagaccatgcgggtgcacccggccgcgccgatgctggcaccccacctggcccgtgaggacacacgcgtggatggctacgacatcctcgcgggcacggccgtgttcatcaacgtgtggagcatcggccgtgaccctgcgctgtgggacgcgccggaggagttccggcccgaaaggttcctcgagagaaagatcgacatgaggggtcaggactttgagctgctgccgttcgggtccggccggcgaatgtgccccggatacagcctcgcgatgaaagtgatggcgctgggccttgccaacctgcttcatggcttcgtgtggaggcttccggaaggtatgacagtggaggacctaagcatggaggagaccttcttccttgcgatgccgcgcaagttcccactcgaggccactgtcgaacctaggttgccggcccacctctatttgggtggttgatgtcgttgatgtccgtacgtgtgt

SEQ ID NO: 21691 - DNA, 1059 bp, Setaria italica
  misc_feature (25)..(25): n is a, c, g, or t
  Peptide Sequence Number=SeqID_87665
aaattctgggcgtattggcaagacnggttttgttgagcagaggtcattctggaatgtgtaccgcagctttgatcgggtttgggtgatgctcattctgttctttcaagcagcgatgattgttgcatgggatggtcgcaagccttgggatagccttcgctaccgtgacatccaggtccgggtgctgtctgtgttcatcacctgggctgcactgcgcattgtgcaggcagtgctcgatgcaggcacacaatacagtcttgtgaggagggagactacattgctcgctgtccggatggtgctcaaggtgcttgttgctgttggatggactatcacattcactgtgctctatgttcgaatgtgggatcagaggtggcgtgatcgcaggtggtcttttgctgccgaaaccagggtgttgaattaccttgaggcagctgctgtgtttatcattccgcaggtgcttgctcttgtgctcttcatcgtcccatggattcgcaatctcctggagaaaccaattggcgaattctatatgttctcacctggtggttccagacccgaacatttgttggacgtggtgtgagggagggcctcgttgataacatcaaatatagcacattctgggtgtgccttctcactgctaagtttgtcttcagttactttctccagattaagccgatggtggcgcccacaaagacaattctcagcctccatgacatccggcgtaactggtttgagtttatgcctcacacggagcggattgctgtaatcttgctgtggattccagttgtccttatttatctcatggatattcagatatggtatgcagtcttctcatcacttacgggggcacttattgggctattctcacatctgggggagattcgcagtgttgagcaactgcgcttgaggttccagttctttgccagtgcaatgcagttcaatttgatgccagaagagcacctggatgctgtgcgtggtggcctccgaagcaagctgtatgatgctatcaatcgtctgaagctgagatatggctttggtcggccatataggaagattgaaggttaa

SEQ ID NO: 21692 - DNA, 1135 bp, Setaria italica
  misc_feature (1116)..(1135): n is a, c, g, or t
  Peptide Sequence Number=SeqID_87666
atgtgtagggatagggcagatgcggaaatctgtgaatgcctaagggctactgtatctgatttgagcaagttctttatgggtaaaattgctgcgcccgagctaaaggcccttttgtttgggcctttgaaccagattaagccagtcactgaccccagccagaaaactgtaaagaggaagtgtgttaatccaaacaagacaagcacagctaagaagaagaagaagccccttgagcaggataaggcagtcatttctcccagccagaaagatgacaggagagaaaagccccttgagcaggataagtcagccatttgtcctggccagaaagatgataagaagaagagcggcaacatggggcgtgactcgggaagcagtcatgtgctacaaaagaaagtgaaggctactgtatacacttctagttcacggcctcccagtgtttctgtccctcctcaaagaatgcatcaggcagtactcaccaggccaatcattaatcagtttgcgcatttacctcagcatatgatcgcccctcccgcttttggttatgggttgccacccccgcatttgcactcagcttatcatcaccctcatcagggattgctaggtcgaccacagggtgatttccttcatgtgtatcctgggattcagctgcagcatcaaagccaggctatgtttggtcctccagcagcccaccatccggtgctcaatgggcttcacccgtatggtaccaatggtgctcagcaggtgcagcgtatcgacaataggctggtgcagaggccaccgtatggaatgggtccgggtttctggaggtgactcttgcagtttgggaaagtagatagctagctggtgggcttccgattgaggcaaaagattaaagattgttgttttgtaactagcaggtgcgattgtgtttgtaactgttgtgaaaaagaaaagttgtaaggtgagaatggaaagctgtaagatgattaggtcttagtttaaggtgttgattctgtcaaagcgtcttgtcattatctgggatgtgagattctgtgttgcaaagcgtaaccatcccaaactgcaatgagccaatgccataagtgatgaatacatgcagagctgaggcctttggaataaacnnnnnnnnnnnnnnnnnnnn

SEQ ID NO: 21693 - DNA, 264 bp, Setaria italica
  Peptide Sequence Number=SeqID_87667
gggggcagctggacgtaggtggagtggaggccgtcggagaggttgaggaggaagccgttggaggggacgaggagggagtcggaggtggaggcggtgagggccgggacgacggcggtgacctggagcaccggggagcggtgctcacccgcgacgcgctcgtcggtgtgcatggactgcaggagcttgagcagcacacccggcgcgagcgtcgccatggctgctctgctcctggaaccggagctggagcgggggaggtgggaggag

SEQ ID NO: 21694 - DNA, 456 bp, Setaria italica
  Peptide Sequence Number=SeqID_87668
gaaccagctgtcttttttgacagtcttacactcttatgactccatccgtcccaaaatacaagccgggttttgaccagcaattattaataaaattatataatacagaattataactataaattggtacttttgaatgcgaaaatagtaacactattatcgtgtcacaaaaatgttgcttactcgtgattgttgattaaaacccttatcctaacaaaacaaactagtgcgccttatatctaggcgcagagggagtactaaatgcagcattcatgttagatgaactaaaaaagataaatcttaaaaaatttcaaaaaattggaatattctagcattgattttgtagacttaaacaattgtcggacaatagccattggatctaattttctctaaattatctaattgtgctattatgaaaaataacatgaaattaccctaaattgacatctatattaccca

SEQ ID NO: 21695 - DNA, 468 bp, Setaria italica
  Peptide Sequence Number=SeqID_87669
tgtctttggtcattgtgcccaagtaaggcctgccaaacgtgtaatccccttgtaacctccacaggggtgataacttcacccgaaatgtgataactttgtttgtagcattgaacacaagaacagatggctcaacatccatcttgattccagcagggctttcagttactgcatggtaaactgcatcgacctcacctacgtttgtgaccgttcttgatacagtaatggggtgcttcagatctggaatggcgatggatggtaagttcagatggtacccaggtaacattgttgcattgcactgtatgaatttcttaaaggtgcacccaaagaacttggtgtaatcatttggatcaatgtcgtaaatcaggccagggtcagctgccctgttggggtttatgtggcccaatggcgaaaagacagtgcgcgttccaattgccatccggatgacaatccatgtttcacctacttatg

SEQ ID NO: 21696 - DNA, 1435 bp, Setaria italica
  Peptide Sequence Number=SeqID_87670
aaaaggtaaagccacagtggagcttagcatatctcattttcatgtattgttgccaacagcccaacactctgttattttcttcagaaaggaaaagaaccctatgataatgcctgcatgtttcaccctacctatgcaacatctgcatagaaatcataaatcgtcatctggactgctattggaatccgaactgtcttttggtcattgtgccaagtaaggctgccaaacgtgtaatccccttgtaacctccacaggggtgataacttcacctgaaatgtgataactttgtttgtagcattgaacacaagaacagatggctcaacatccatcttgattccagctgggctttcaatagaagcgtggtaaactacatcgacctcacctacatttgtgaccgttctcgagatggtaaccgggtaccttaggtctgggaccgagatggatggcaggttcaggagatacccaggtagcaccgttgcattgcagactgtggatgtcttgatgatgcacccaaagaacttggtgtaatcatttggatcaatgtcgtaaatcaggccagggtcagctgccctgttggggtttatgttgccacctccatagtcaaatgggtcagcaatcttccgaggcaatccttgtgcgagtattggcatgccgcgtgcatcagttattgatgcagtggtcatgatggctgatttcagtgcagctggagaccaatctgggtacagagctttcagcagtgcaacagcacctgctacatgtggcgttgccatagacgtccctgaaaggagcgcataggagtctcccttggctgctaagatgctggctcctggtgctgctatgtcaggcttgataacttcagggtagtcaatcgatggacctcttgaggagaatgctgcgatttttggggccaccacctcttcacctgtgacggagcgcgctggctcgatcttcgccaccggagagcttgcagcacccatgtaattgccaatctggttcgccatgttgaagtccacaagaacgcatggaatgcctttgcaatcagcttccgcatcgagggcatccatgctgtattgagcaaaaataagacctgaggccccggcatcgaggacgttcttcaacgcgagtgggaagagcgcaagtggtggtacttggaaagctacacacagcacaatctggcccctcacatccgtgccgttcagagcatcatcagtgcataggcctccattggcaagaagcctgaaggtacgccctgacgaattcctcccttcatagtacagagattgtcccacgatctgtttcttgtttcccagcgtgatcacggttggaaaagatcgatcaatcttgctcgctgcgacggtgatgacccaaggagctgtgttccggaccacctgcggcatgggcccggagttcccggcagcgtacaccaggtgatcccctt

SEQ ID NO: 21697 - DNA, 795 bp, Setaria italica
  Peptide Sequence Number=SeqID_87671
tacaggattgtgctgaggagtaccatgggtccgatagatgtgtacctagttagtcaatttgaggagatgagtggcatggagactcctccaaggccctacaccaacaataagcatggattctctagagaatcctaggacgcctttggctgcagaatgcagcaaatctgcaggaatagaacctaacattcaagaagggttttacactacctcctgatgctcctagtagttcgcaggacaacggagggatgatgaagattgtcccttcagaacttgatactgatgcagactactggctcttatcagacacaggagttagcatcacggacatgtggaagacagcaccagatgtggagtgggacgggattgagaaattcaacgcggaggatttcctggaagtcagcacgccccggcagcaggataaaccggccgacgtcgtggaccctcgtgtataaactgaaaaccgctgaatcggtgcagggaacaccatccatattttagcggccgatccgatcaacctggagcgatagatggctgagtgatgtacaggtgctagcccagaaataacttaactgatcttctggacatgccggtcatataaccgagcgtggaatgttgatggctcaggctggccttcacaggttgaaaccatgtgccgtgcctggaagttgcatgctgttgtgcatctcacagcattaggattgtacaattattaggaatacatatattgtgtgtgccggtgatgctcgccgagatccatttgtaaaatagcagttaccattatttattatttgtgtg

SEQ ID NO: 21698 - DNA, 1027 bp, Setaria italica
  Peptide Sequence Number=SeqID_87672
cctaaggctaccaagggccagaaaccttgccctcagacccctttgaattttggttctccaggcaatccttctactcctgttggtggctgccgctatgatagctccctagggctcttgacaaagaagttcctgaacttgctaaaaggtgcacctggtggcatagttgatctaaataacgctgcggaaactctagaggtacagaaaaggcgtatatatgacattactaatgttcttgaagggatagggctgatagaaaagaagcttaagaacaatatccgttggaaaggaatagatgactcacggccaggagaagttagtgatgatatgtccattttacaggcagatattgaagctcttacactgcaagagcagaatttggatgaacgaataaatgaaatgcgagacaggttaagggagctcactgaagatgaaaataatcaaaagtggctttatgttacagatgatgatatcaaatctttgccatgctttcagaatcaaactctaattgctataaaagcaccgcatggtacaactttggaagtcccagatcctgatgaggttaatgattatcctcaaagaaggtacaggattgtgctgaggagtaccatgggtccgatagatgtgtacctagttagtcaatttgaggagatgagtggcatggagactcctccaaggcctacaccaacaataagcatggattctctagagaatcctaggacgcctttggctgcagaatgcagcaaatctgcaggaatagaacctaacattcaagaagggtttacactacctcctgatgctcctagtagttcgcaggacaacggagggatgatgaagattgtcccttcagaacttgatactgatgcagactactggctcttatcagacacaggagttagcatcacggacatgtggaagacagcaccagatgtggagtgggacggggtcataagattctcatgtagtatatcatatgtatttgtagtaaatttctaacgttcggttaggttatttttcctttggttaagtt

SEQ ID NO: 21699 - DNA, 501 bp, Setaria italica
  Peptide Sequence Number=SeqID_87673
cattgtgtcacggtaatccttctccttttttttttcacgtgttagctagtgtacgtctttacaaaacgcaactccaaacacttcaacatctacccgtggcgtatcatcagacatgagacatcagtggccgtcgtcctcatggccgaggcggcggacgaggaggcgcagcacgaactccggctcgatgatgaaccggaacgcgggggcgtgcctgtagtccggcgacagcgccaccgcgaaccgcgacaggacgagcgccacgagcgccttgacctcgacgagcgcgaggttatgtccgaggcaggtgcgcgcgccaagcccgaacggcatgaacgcctgcgggtgcttgcacgccgccgcgacgccgtcccggaaccgtcccgggtcgaagcggcgcgccgtggggccccagatggcggcgtcgtggtgcatggtggagacgggcacgaagaggtaggtgcccctgggggcgcgcagcttccccagctgcatgtcgcggaa

SEQ ID NO: 21700 - DNA, 314 bp, Setaria italica
  Peptide Sequence Number=SeqID_87674
aattggtaattggaattcagctgttccatgctgagcaagctctgattctcctcggcattgcggtcagcttcagcccaagggtgctgctggtatctcctcagcctctccagcctctctgctacctccttcatcgttggtcgttcttccccgttcatgcttaggcatcgcatcagaaggtgtgcaatttcagcgagcatttcgtcatccatctcgttccttacctgggtgtccagaagctctcgatgacgaccagccttcactgatgtggtgaagcgtgacactaggctcctgtcttcctctggcccgtccaggta

SEQ ID NO: 21701 - DNA, 557 bp, Setaria italica
  Peptide Sequence Number=SeqID_87675
cgattttagttatttgttagatgtgtacagttacggtgttgtgcttttggaattgcttactggcagagtaccagttgatatgaagaggcctcctggagaaggtgttttagtgaattgggcattgcctatgctcactgaccgagaaaaagttgtgcggatcttggatccagcattggaaggtcaatactccttgaaagatgctgtccaagtggctgccattgctgccatgtgtgttcaaccagaggctgattacaggccactaatggctgatgtagtccagtcactggttcctcttgtcaagaaccgctctgcccagaaagcttgcaaccccaacgtgcaagcatcgaagccactcgactaggaaagcaagtctttaatctgcagtttggtgctcgtctctctggaattcctctcgtctataactaactaacgctgctgagacaatgagattagcacgattcctgacatggtcctcttgctctgctggtgatctcccgattttgtaaggtgcgtcatgagcaggtaggtttcgaatttaaaagggagtttggttgcac

SEQ ID NO: 21702 - DNA, 406 bp, Setaria italica
  Peptide Sequence Number=SeqID_87676
ggcgccgggctgacgaacgcggtgttcctgccgcccggcggcgtggtgatccaggtggtgccgtatgggaagctggagcgcatggcgcgggcggacttcggggagcccgtggcggacatggggctcaggtacctggagtacagcgtggccgtggaggagagctcgctgctggagatgcttggggctggagcacccggtgatcaaggaccccgaggccgtgcaccggagcgggtgggacaaggtcgccgagtactacctcggcaagcaggacgtgcgcatcgacgtcggccggttcgcgcccacgctcgcgcaggcgctcgaccacctccggcagcagcggtaaaaggccgctgcccgggggaccgtacgttcgtgtccggcgacggcgtgtcgccgttggagaaag

SEQ ID NO: 21703 - DNA, 423 bp, Setaria italica
  Peptide Sequence Number=SeqID_87677
cagttgaactgtcctctgccattgatcagcagagactgcggctcgccgatccacctgaagggcttggaggagagggcgaccatctgggtgtggatgctctcgtggtaccagtcgctgagcagcaggttcagctcgccgtcgacgacatcgacctctactccggcgacagctattccgtcctcctgacggcggaccaggacccgtcgtccaactactgggtcagcgtcggcgtgcgcgggcggctgccaaagacggcgccggctctggccgtgctcaactaccgccccaacgccgcgtccaagctgccggcgctcgcgccgccggccaccccggcgtggaacgactacgggcacagcaaggcgttcacgtaccgcatccgcgcgcgcgccgggacgccgccgccgccggcgacggcggaccgcc

SEQ ID NO: 21704 - DNA, 1053 bp, Setaria italica
  Peptide Sequence Number=SeqID_87678
aggacggaatagctgtcgccggagtagaggtcgatgtcgtcgacggcgaacgggtccacgtagttgccgtcggcctccaccaccgtcagcttgtgattaccaactgccaaattgagagaagccagcgaggtggtgctggccaccctgagcctgtaggtcttgttgggctgcacggggaggatcaccggcgcgcactgccggttgacggcagcgcactgcgtggcgcccggcgtgtgcgccgcggccattgagcagttgaactgtcctctgccattgatcagcagagactgcggctcgccgatccacctgaagggcttggaggagagggcgaccatctgggtgtggatgctctcgtggtaccagtcgctgagcagcaggttcagctcgccgtcgtacttgaacggctcctcctccccttccgccacgtcgacgatcagcgacccgtacagccccgccgccctctgcatcccgtagtgcccgtggtagaagtacgtccccggcttgtcgacgacgaagcggtaggtgaaggtttcttcagggttgatggcgcactgggagatcgccgccgtgccgtccatccacggcgtcccgatctgtcggatgccgtgccagtggatgaccacaccctcagtgtggagcgcgttcttgagctcgacgtggatggtgtcgccggcgcgggcgcgtatcgtcgggccggggaactgcccgttgatgccgatcaccaccttctcctcgcagtccggggaccagaacatgttgctgatctcccacttgaagtgccgggcctttgccgcctcggcgcattgcggccgggcggcgcacgccaggagggcgcagcacgccgccgccagcagaggaagcctcatggctggcttagctctgcaggctgcagcgtaccctacccccaacaatcgattcactcgctacgccgggagagattttcagtttcagaggtagcagcaatggaggaggcaatgggatgcaggggcaggttggagatggcgagagctaggagatgaccggagcaccgctttggggttttgtgaaagttgg

SEQ ID NO: 21705 - DNA, 429 bp, Setaria italica
  Peptide Sequence Number=SeqID_87679
caattagtacaccaaacggactcgctgcggatatgatgaacaagcctgggatacagaaagctgtttgcagaaattgtaatggtagcggtgctgtgatatgtcgagggaagctggtatgcccagtctgtcttggaactggcctgccgaacaacaaaggcctactccggcgaccagaagcaaagcaactgcttgataagatgtacaacggcaagatattgccaaggtcatagtgtcgtaggtcacacagccaaaggattttgcttcagtcatcgagtaggaataacatttgagacaatgtagctcgagtgtaaattttcgttcgatgttcaacaaaaattacggcttggaattagctttcagatgaaagatatgtactgcaacgattcaggctcctttggctgttatagtcatccagattattacaaaaat

SEQ ID NO: 21706 - DNA, 648 bp, Setaria italica
  Peptide Sequence Number=SeqID_87680
ccgtgaggcccttacatatcacagcaccgctaccattacaattctgcaaacagctttgtgtgttccttgttgatgctgaatgacttatcagttctagactccataagattcacgttcttgaaaatcgctacagtcctatcaaatagagaatcctccttcaataggaaatagaactatagatacaatagttttgttgattgaaatagctaacagtacacagtatgccattcagatgcaaatacagccaagtcatgctttgcacttctcttctcgtttcacttggttaaattctagtaaaaaaacaacagaccaggtctagtttcaatgcttatttgcacgactgatttaattaaaattgacatactccactgcctagcaagtttttcttccttctctttttttggaacttgtatggagtatgtttctggtaaaactacatactggtagttcctttttcttggagtggattcattttcagctggattcaggtgatatgtgtggtggcacaggaaaatggaaagccctcaaccgaaagagggcaaaagatgtttacgaattcacagagtgcccgaattgctacggtcgagggaagctggtatgcccagtctgtcttggaactggcctgccgaacaacaaaggcctactccg

SEQ ID NO: 21707 - DNA, 970 bp, Setaria italica
  Peptide Sequence Number=SeqID_87681
ttagcccagctcatatatgaaaagaacaagggcattcagaatcccacgattaatttaaaaggatttatggtggggaatgcggttactgatgactaccatgactacctcggcacgtttgagtattggtggactcatggtctgatctctgacaaaacttatcacaacttgaaggcaacatgcttgcttgaatcctcacagcacccttctcccgactgtgtcaagaacctgaatctagccagtgctgaagaaggcaatatcgatccttatagtttgaatacaaagccatgcaattacacagcctctctcaaagttagcttgggtggacgctacccttggttgtctagagcctatgatccttgcaccgaaagatacgcaagcatttactacaatcggccagaagtgcagatggcattacatgcaaatacaaccggaattcattacccatggcaaacatgcagcgatatagttggaacctattgggcagattccccaagatccatgcttccaatctaccaagaactgatagcagctggtatgaagatatgggttttcagtggggatacagatgctgtagttcctgtaactgcaacaaggtactcgatcgatgctctcaagcttccaacactagtaaattggtacccttggtatgaccatgggaaggttggaggttggagtcaagtttacaaaggattaactctcgtaactatagcaggtgcaggacatgaagtcccgctgcaccggcctcgacaagctttgataatgttcagacactttttgaagaataaaccaatgccaacacaatagccacttgaagcaaaattacaatgtaaactatcacagtcagattttatgtttttcaaattctttttcatttgatttgattgttacaacatattattcaattatctcgattgaatgtatgtatgtgttttagcaaatagggatacctgagatttgtactgaaaaaaaa

SEQ ID NO: 21708 - DNA, 742 bp, Setaria italica
  Peptide Sequence Number=SeqID_87682
ttagtaaaacgttaaattaacggtacggaaggaacaaagaacgaacggggcagaagaacaagatcaccatcaccaacgacaaggggcggctgagcaaggaggagatcgagaagatggtgcaggaggcggaaaagtacaaggcggaggacgaggagcacaagaagaaggtggacgccaagaacgccctggagaactacgcctacaacatgcgcaacaccatcaaggacgacaagatcgcctccaagctgggcgccgacgacaagaagcgcatcgaggaggccatcgacggcgccatcagctggctggacagcaaccagctcgcggaggcggacgagttcgaggacaagatgaaggagctggagggcatctgcaaccccatcatcgccaagatgtaccagggcgccggcgcggacatgggcggcgcagcgggcatggacgaggacattccggccggcggcagcagcggcgctggacccaagatcgaggaggtggactaagctgtctgcttggtgattggtggatgcctggatgggttccgagctacgtgatgcttccacctgtgtgtttcgccgctcgctcgtgttgtcttggtagtttctgtcgtggtcgtgtcaatggtggcgtcgtggtaggagtttagttgtggaagcaggagacattttgctgttcaagtttaaaaactcggtgctgagctctgctcagcctttggtatgaagtgaagggatgcttaccttaaaaaaaa

SEQ ID NO: 21709 - DNA, 227 bp, Setaria italica
  misc_feature (193)..(193): n is a, c, g, or t
  Peptide Sequence Number=SeqID_87683
ataaagagccatgtggggtggcgcggccaatgaatggcagcaactggttgtcaaccttgtgccagtcgactgagttggtgtcaaatgcatatgtgccccacagttgattgaatgataccagtatgtaggtgtcgaccaacacataggacttgacgactacaactggcagcatcatgtaatctaatggggtaancttccgaagggaagcaaggtggatggtggtagct

SEQ ID NO: 21710 - DNA, 655 bp, Setaria italica
  Peptide Sequence Number=SeqID_87684
ggtaagaccaataagatgagacgccattttggtcttcccagcccttgctgcacaatgcaagggcgtgtcgccctttttattttgcgtagacagtaataggcctgctttatcttccatagacagtaatactttgttcttggtgtggatgaggtctgcacatttgagaaagtcctctccatctccattggcagccaccagatgtagtgcggtgttcccctccaccgtaacaccattcagaagcgacacttcattagtgccttgttccatatcagcacaggaatatgcagcaacctggttgccaaatatggagactggaataggatgctcctgtgggccttctctgttgagaagaacattcagctcctccctattgcctctgcatgctgctgctgctaccagcggatgcatggttgctggcgcgacctcgtgaggatcctgtttgctcgatgacatgaccaccagcatcgtcgtagcatctttctggcacaccagatccttcaacttttggcagtcttcacggcttgtggccaccaccattttggcgtctgcctctgaggaaaccattgatgctctgggcgagcgaggctcctctcgggtgtttgtcgccatcaccaacactaggctgcagcttgcaaatactactcacactgagtcg

SEQ ID NO: 21711 - DNA, 483 bp, Setaria italica
  Peptide Sequence Number=SeqID_87685
agctgaacgtgcgattgtgaatggtgacaaccatacacaacctggttcatccgagggggtccagcgaagaagcgccgaggccgtcctcctaaaaagagtaaagagataagcgtggattctatggtaaattagtttgggaataaggtgtttccttctattatgtgcactccttgtgccatttcattattggtgctaaccattatttttggtatgacaggactccttattagtatcgacagatgtaactcagaagggtgcttttcattctcttcgactgcctcaaaccttggcagtcatgtcaggacacatggagttgttgatctcatggaagaagtcaatccaagtgagctatcatttgatagccgttatggggtgcaatctggtcacccacacaactttggtaaccagctgcatgcaggaaacactttgcagtttggccaacctacatcagcagcagagcactctagggtgcaatgggtgtat

SEQ ID NO: 21712 - DNA, 581 bp, Setaria italica
  Peptide Sequence Number=SeqID_87686
ttttgttcgtagtttaattattgttagctatttgactcagaagatctcgtggaagagtgtttgaaactgggttgaaattttagcattttacgtgaccctgtagaacagcctttggttattctgcggggtgatcattagggtgacacaatcaggtagaagaaagaagaacatgaaaatccgcttaactgctccatcggcatgtagtatttggtagtataagagaagctttgtgtgtttagctgggaaatatccatgccagtaaatgtaatgctgacattcagtatgagttatatttccaaatcccgtgcccgttttctgagattgtttaatgctgcatgaaatgtgcaggaaactggatgaggaatcctttgtttggactttggggcgccgctgccgccgaggactcggggcgtacgcgttgaagcaggccggccaaatggagttgcacttgggttgttgggatctcatctaacagagcgcctttgggaatacatgctgacactgactgctcgtggggcttaggaacgttgtagcatcgatgttaccccaattgacatgtgtatacacatcatcatcatctt

SEQ ID NO: 21713 - DNA, 2012 bp, Setaria italica
  Peptide Sequence Number=SeqID_87687
tgggccgattcaagatccagggcagcatatcaatattttgatgatgctattttgatcgatacaacatgcttaaggaacaagtatcatgtcccccttgtttcgtttctgggtgtcaataaccatggtcagcttgtattgttagggtgtggattgctgtcagatgagagcacggaaagcttcttatggctgttcaagtcgtggttaacttgtatgaaaggacgatctccaaatgccgtggttactgatgaatgtgtggcaataaaagccgcagtccgagaagtgtttccgaaaacacgccatagaataagtgattggcatgtactgagaagtgtttcagaaaaattaggagaattgccagaatatgaagcaatgagaaccgaactggagactgtaatatatgattctttgagtgatgatgagtttgaggcaaggtggaagaactggattgatcgatttggccttcaggacaatgaatggatcacatttctgtatgagaatcggcacttgtgggcccctgccttccttaaggacgccttctgggctgggctttgcacttttagccagcgtgaaagtccaagtgcattttttgtaggattcaatcaactcagagaccacattggtgtcattccttgatagctacatgatacttttggagaacaaatacaaaatggagcaacaagatgattttgactcatcaaatagcagcagggtcgtgatatcaaagtacccaatggaagagcagctatccagattgtacaccttgaatatgtttataaggttccaggatgagctgaaggcaacaatgcattgtcaagttcagctggatggatcagcatcttcttttatagttattgatttgactgaaccagccagtgaaatgctgaataaaaagtatgaggttgttcactgtatggcggcaaacaagatggagtgtaactgtggtctatttcagttttgcggcatcatttgtaggcatgcattatctgtgcttaaatggcagcaagtatatgacatccttccttgttatgtacttagcagatggcgtagtgacttcaagctgttgcactactcagataatccatcaaaggatttggcaacaagtaatcatgttgaacgttacgattatatttctttgcagttccttcgccttgtcgagattggaatgtcatcagacgagaagtataggcatgcagtaaggcttataaaagacataaaagagacacttcttgatgataatctgtgccgtgatttggagcagaaacttacgccagctgaacgtgcgattgtgaatggtgacaaccatacacaacctggttcatccgaggggggtccagcgaagaagcgccgaggccgtcctcctaaaaagagtaaagagataagcgtggattctatggactccttattagtatcgacagatgtaactcagaagggtgcttttcattcttcttcgactgcctcaaaccttggcagtcatgtcaggacacatggagttgttgatctcatggaagaagtcaatccaagtgagctatcatttgatagccgttatggggtgcaatctggtcacccacacaactttggtaaccagctgcatgcagggtacactttgcagtttggccaacctacatcagcagcagagcactctagggtgcaatgggtgtatcctaatagcatgtatcaggacgaccaagtgccttatggcagacgaacatcatagcaattggactcagggaaactggatgaggaatcctttgtttggactttggggcgccgctgccgccgaggactcggggcgtacgcgttgaagcaggccggccaaatggagttgcaattgggttgttgggatctcatctaacagagcgcctttgggaatacatgctgacactgactgctcgtggggcttaggaacgttgtagcatcgatgttaccccaattgacatgtgtatacacatcatcatcatcttcttgaaagaacccataattttcgtctttgttaacataccaaaaaaaaaaaa

SEQ ID NO: 21714 - DNA, 371 bp, Setaria italica
  Peptide Sequence Number=SeqID_87688
ggacgtggctgccgatgaagtggccgttgatgtggaggttgacgtcggagagcaggcagaagtcccggtcccggcggccgtggaagtagaatgtgttgccgtcgccgccgatgaagcgcgggtcctcgcacaccgcgccgggcaggttgcaatcgcagacgggcttgcaggtgtcgcagtccatgtggcacgactgcgggcacttcttcgggcaggtcgccggcgccgtgcaggtggggtaccccgtggtgttcttgcagtagaccacgttgctggtcggtggagatggcacgggcacgggtggtgacgaaggcagtggtggtggtggagacgagacgacgaccggcggaggcggtgactgaggcaacggt

SEQ ID NO: 21715 - DNA, 744 bp, Setaria italica
  Peptide Sequence Number=SeqID_87689
cactgaggatggtaaccggccggtgcatatcgtcagactgttccagattttcatgatcagtgacgccgcaggtgctactactgagccgaggatagctgatcatcccgtcttctccaccaagttcattctcgactcgggagctactactcatgccaccggaaacagggacctgtttccctggctgttcccagtacaagagggtggtgagattgttgccgccaatgggcacgggctagcagttcgcggctttgggcccgtggtcatggagaacttcagggtgaatggtgtcctctacgtccccggcctctcctgcaacgtcatctccctgtcgaagctcatcgagcttgactacggcgtggcgttctcccgcgctgggtgcctgatcaaggacctcaggaccggcgagatagttgggaacgccagcctcgttcgggggttataccatttcgatcggttagagattccactggacagggccccagcaatggcgccataggagcctctgacaggcagatatgagcatagttagttcataactggatgttgatcgagtgctgtgatttctgcctgtcgtttatctgtgtgtgcatgtgctgtatctgtgatgctattggttgcatcctcgtcaatggtaaccgaacccgggacatacttatgggcgtcgcaagtgtgtcatatctgaaataaaagtaacggatggttaacagaaatggcatcaatttctcttaccgaccaaaaaaaaaa

SEQ ID NO: 21716 - DNA, 1622 bp, Setaria italica
  Peptide Sequence Number=SeqID_87690
gcctttgtcttgctccttgagttctgtactagcacctagctacccagctgatcgccaagcttgcatagcttgttgttaccctagagacaccgtcgccatgggctgctgcggcgatttcttcgagaaggccaagccttacatcgccatgatctccctgcagttcggctacgccggcatgaacgtcatcaccaaggtctccctcaaccacggcatgagccactacgtgctcgtcgtctaccgccacgccttcgccaccgtctccattgctccattcgctctcatcctcgagaggaaggtgaggcccaagatgacgtggtcagtcttcctccagatcttcgtactggcactgctcgggccagtgatcgaccagaacttctactacgcgggcttgaaattcactggcccaaccttcgcttgcgccatgagcaacatccttcctgccatgaccttcgtcatggccgtgatcttcaggatggagaaggtggacctgaagaaggtgaggtgccaggcgaaggtggccgggacgctcgtgacggtggccggcgcgatgatgatgacgctgtacaagggcccgctgatgaagatggctgggagcagccacgtgcagccgcacggccacggcggcgccgaggcgcccatcgccgccatcgaccccagcggcagggagtggttcctgggctccctcttcgtcatcatcgccaccctcgcctgggcctcgctcttcatcctgcaggcgcacaccctgaagcagtacgcggcgccgctctccctcaccaccctcatctgcttcgtcggcaccctgcaggccatcgtcgtcaccttcgccatggagcaccgcccctccgtctggaccatcggcttcgacatgaacctcctcgccgccgcatacgccggcattgtgacgtcgagcatagcgtactacgtgcaaggcctggtgatccagaagaccgggccggtgttcgcgtcggcgttcagccccctgatgatgatcatcgtggccgtcatgggctccttcatcctctccgagaagatcttcctcggcggcgtcctcggcgccgtcctgatcgtaatggggctttactcggtgctctggggcaagcacaaggagacccaggagaaggaggaggaagaggccatggagctgcccgtggcgtccaaggcgaacggagtctacgacgacgccacgttcatcaaggagatcgccgccgccgccgttgttggagatgactcggagtgcaagaaggtcaatggggtgaagtcatcctccgacggacacggagctggtgcagtctgatttgatgcaacctgagattccaagctagtgctgagagcgcagctagctggatggaagaggcgttgcccaagtgctaactgtcttgtcaggtgcctatgcgtgtgtccctgaaatgatgtgtttactgacgctgcatgcattagggtcggatgattgagggaggctgcacctgcactgcagagtggaaggcctggaataatttgttctgtgccccctttttgctatcctttttgggagatctatttagtatatttaacatgtattttattaagctttactttctgtggaaaaagagtgttatgttctgaagaaattaaaaaaaaaaaaa

SEQ ID NO: 21717 - DNA, 538 bp, Setaria italica
  Peptide Sequence Number=SeqID_87691
gtgcctggcggggttcgaggccggggcggtggtgaaccggctcccctgcgggcacgtcttccaccgcgggtgcctcgagacctggctccgctacgagcgcgccacctgcccgctctgccgcgcccgcgtccccatccccgccgacgaggcgccggggctccgctacccggagtgcgagtgattcggtctggccctctgcttccggcggccttccagaggaatccccctccctcgtcgtctcatctcgcgcccggctgtgtgctgcaggctccgtgtggccttccgtgtgcgcgtagcaaagattaggagtagtagagttgctgttgctttcccttttcctctcccttttttttaatttttgttgtttccggtgcggtcgctgtagcgtgtaaatactcgcagttcgcagcagagagtagagtgctcccgcggctgtggtgtagcgctttttacgagcccagctcgtgtacatgcttcttcccaaagagcaaaaatatcgaggaaaaattcaccatcgaaattaactaaagaagaacta

SEQ ID NO: 21718 - DNA, 331 bp, Setaria italica
  Peptide Sequence Number=SeqID_87692
gctgggtggggcgagggcgaagctgcagcagcagcagcaagcaaagcgaagaagaggaggaaggagaccgaggcgagaggaaagcggcgcaggcagggggggatcttctcagggacgcagaggaggcagcaacttgtcagaggaaaccaacggctcagattgcctgcccatcaatccaatcccataattccactgggtttagttggttcagactctgtttgcatatcagatcatccatatcagatgatcacagagataatgagcatgagtgatgaacaggtcggatgagcatctgcttgagggagggaaaaaaagaaggctaaagcctagg

SEQ ID NO: 21719 - DNA, 303 bp, Setaria italica
  Peptide Sequence Number=SeqID_87693
taaaggcaacacaaccgagcagatttgtgacaacagtggtgaagacccagactgctgcaggtcggtctccatgttcagcttgagcattcaggaccatttcacctacctgggagtcgatatgcaagcagatgactggagcacctgtagaatcattgcagctcaaagcgttaagcaattccgaaaggagcttaccagcaatattatcacgacaaagcacaatgccgacatctccattgttgaacctagcgtacagacagattggaggcagttcttagatagccaccagcattccgttagaatatg

SEQ ID NO: 21720 - DNA, 307 bp, Setaria italica
  Peptide Sequence Number=SeqID_87694
caggcccaagaggagcgagcagaaaaaaaaagaagcagagacgccggcagggccagtgagcacatatactacctccgttcgttttcttgtctgaaacgacatatataggtagtatatacataaacacgcgacgccgcgccaccagtggccgatccaccaccagctcgatccggggggtggcaggttggggaggaggcgaaaggcgtcgccgagcgggaacccagccgtcgtccacaccgatccaaccagattccccgatcgagagagggagggaagggtcgcagctcacaaagttttacaagagcgg

SEQ ID NO: 21721 - DNA, 1905 bp, Setaria italica
  Peptide Sequence Number=SeqID_87695
cgaagagaaagccagatcaacaaagatgcagaccatggagaggcggagcttccctgcgttggtggccgccaccgtcatcttattcctctctgcgacggctcaaccagcagccggggccatcgtcgagcacacattcattgtgggccagatgaatatgacacatttgtgcaaggagatgctggtcaccgttgtgaacgggcagctcccagggccggtgatagaggttactgaaggagacactgtcgttgttcatgtcgtcaacaagtcaccctacaacataacgatccattggcatggagtgaagcagcagctgaactgttgggccgatggggttccaatgattacccaatgcccgatcgggccaaacaacaactttacctacacgttcaacgtcactggacaagaaggcaccctgtggtggcatgctcatgttgcgtacctccgaggaaccttgcatggcgccatcatcatccggccaagacatggggtcagctcgtatccatttccagagcctcatagggaaattcccatcgttctaggggagtggtggcaaatggatcttcaaaaggcatcgatggacatcaagtacagtacggctgatgatgaccccagtgcagccacaatcaatggcaagcttggggatctctacaactgctctggtgtcaaggaagatggcttcgtgctggacgtggaggcaggcaagacctacctgctgcggataatcaacgctgcactcttctacgagtactacatcaggattgcaggccacaagttcacggtggtcgctgccgacgcaaactatgtcagccccctcaccacagacctcctcgcagtcgcgcctggccagacgttggatgccttggtggtcgccaacgccgccccaggcaggtactacatggtcgcttcgcccaaccagcctcctaagcccgatttccagcacccaacgttcaccacgagaggcatagttcagtataccaacgagaaccatagcaatggaggtagctcaggtccaggagccgaaggacctctatcccggaatctttcagtagtggcacctgagatgccggatgagcacgacacgatgacatcgtactacttccacggcaaactaaccgccctgcatccctcacggtccctgccggtgccggcacgggtcgatgagcacctgctcatcgcgcttggcctgggctccgtgtgcaagcgaggccagtcttgcaacaggggggagagcgaggagacattcaccctggcaaccatgaacaacatctccttcgagcttcctgcggctacggcggcgggaccgctcctagaagcgcactattacaacaccggaagcttggacatgctgcgagagcttcccgaccgaccaccgaggatgtacaacttcaccgacccctcgttgataccatcaggaccccgggaggcaagcctagaggcgacgtcaaaggcgacgatcgtgcgtcggttccggcatggcaccgtggtggaggtggtgttccaaagcacggcgatgtggcagagtgactccaacccgatgcacttgcacgggcacgacatgttcgtgctcgcgcaagggctcggcaactacaatgcagcaacggacgtggcgaagtacaacctcgtggatccaccggtgaggaacaccgtcctcgtcccaaggctcgggtgggttgctgtcagattcgtcgccaacaatccaggggcatggttcgtgcattgccacttttcattccacctgtcgatgggaatggccgcggtgtttgtagtagaggatgggccaacagtcaacacgtcactccctccaccaccagcggattttttgacatgttaccgtaaaaacaatcctgtggcggatgaatttgacatccgatctacaaaaagcgaaatcccggctgagacacgcaa

SEQ ID NO: 21722 - DNA, 435 bp, Setaria italica
  Peptide Sequence Number=SeqID_87696
cttggggaacctcaatatccacgggcttattagctaaatggcaattggcacatacaattcgtccagttgcttcccgtgggttttcataaccctgctgcgcaaaaatgggatatgcatttgaaatagatgtgcgagttattacgtatatcatgatcgatacggaaatcgatcgaatcatctgttcctttaaccaagaaaaagtatttctattttccatgtccaatcgcggatcccggaatttctacaataaattagataggtagctaagctaatctagttccctatacacgagtctgttgtcattctactgcaacagttgtactggaatgatgaataccttgagcaggtagaaatagaaagaattttgctaaaaaggaaaaggctttctttctaaaggaagaaatatgctaatttgattaatattaggaaaaatta

SEQ ID NO: 21723 - DNA, 491 bp, Setaria italica
  Peptide Sequence Number=SeqID_87697
tgggggtataacattggggtggatgctgcacgccgacgaggagatcgagggggaatccgattcatcgtcgtagttgtcatagtcgtcgtcgtcgtcttcctcgaaatcgtcgagatcgtcgaattcccacagctcgtcttgctcctccttctcgggcatctgccattgatcctgagaaatctcaccggactctaataactccagaacctgtgtcatggtggggcgccacgccgcggcggccctgacgcagagcgacgcgacgaacatgagccgcctcagctgcccggcgtcgtagccgtcgccgagccgcgggtccacgagcccttgcacgacgccgtcgctcaggtaaggcttggcccacgcgatgaggctcttgtgggagccgtccaccggcttgcgcccggagatgagctcgaggaggaagacgccgaaggcgaacacgtccgtcttctcgtccacgatgccgtgcgtgaagtactccggcgccaggc

SEQ ID NO: 21724 - DNA, 339 bp, Setaria italica
  misc_feature (68)..(68): n is a, c, g, or t
  Peptide Sequence Number=SeqID_87698
ccttccgccccgtccgggaggaggaggtggcgaacctcctccgctccgtctccggcgagtgcggcggnggcccgtcaatctcagagaagggatctgccacgcgatcaacgacatcgccgtgcgcacggccatcggcaaccggtgcaagtaccaggacgagtacctgcacgagctcgatgaggccgtgcggctcaccggcgggttcaaccttgccgacctgtacccgtcgtcgcggctggtgcgccggctcagcgctgccgcgagggacatggagaggtgccagaagaacatgtaccgtatcattgagtgcatcatccaggagcgcaagggctcgccgac

SEQ ID NO: 21725 - DNA, 872 bp, Setaria italica
  Peptide Sequence Number=SeqID_87699
cctccacaagctcatcaggagctacatcgcgccgccctcacgcagcacaaagccaccggcgctccgcctccccccggggccatggcagctgccgctcatcggcagcctgcaccacctcctcctctcgcgcttccgcgacctccctcaccgggccctgctcgagatgtccggcacgttcggcccgctcatgctgctccgcttcggtgccgtgcccacgctggtggtctcctccgccgaggccgccagggaggtgatgaagaccccacgacctcgccttctgcagccgccccagaagaacatgtaccgtatcattgagtgcatcatccaggagcgcaagggctcgccgacgccggagcgagaggatgaccttcttggtgtcctcttgaggctgcagagggaaggtggcctgcagttcgatctcaccaacgagatagtcagcaccgtcattttcgacatattttctgccgggagtgagacgtcatcaaccgtgctggtatgggcaatggccgagcttgttaagaacccgcgagtcatgcacaaggcccaggcagagttgagggagaccttcaaaggacaggacaagttaactgaaggtgacatggtcaagttaaggtacctgcatctggtgatcaaggagaccttaaggctccatgctccggtgccactcttgctgccccgagagtgccgccagacatgtcaggtcatgggctacgatatcccaaaaggaaccaaggtgtttgtgaacgtctgggcgatagcaagggacagcaagctctggcaggacggagatgaattcaggccggaaagatttgatggtagcagcatcgacttcaagggcacccactttgagtacaccccgtttggggcaggca

SEQ ID NO: 21726 - DNA, 554 bp, Setaria italica
  Peptide Sequence Number=SeqID_87700
ttggctggcgtgtgagagggcacttgatgttcttctgttggtttcttttccacctttgctgtttcccttctctcagacgcattgtagctggtcatgaaccaccgttgacagaatcacaatatcttttcatccactgcatgaactccagattgtcaagaggtctccctttggtgagcttgttcacctcaatgtgcttggtgatctttagcttattgaacacgtcctgcaggaccttgtagttctggatcatctcgtactccgtcttggcgtcaaagttcactttgtgcatcggcaccgcccccgggtgcgccgcgtccatcagctggcacgcaaccgcgcccgacgccgcctcctccaccttggagaggccgagctgcagcgtggtgttgatccacgcgaggatctcgttgcgcccgacgaagtaggcgccgtccatcatcccgatgttgctcgccgccatcgccggccgccgctggcgaggatcgggggatgggggattggtggagcggggtcgggctgggcggagaaacacgagcaaggaataggaatttaga

SEQ ID NO: 21727 - DNA, 814 bp, Setaria italica
  Peptide Sequence Number=SeqID_87701
cgaaatgctcttccgcttgttcgccgtctcttgcttcggcctctcctcggacatctccaggatggggctcagcgccggaggctgttgctggttctgctgctgggacaccatcgcctgagcttcagccactactgcagggtcgtcgtctgatgtgtagagtatgttctggatagcatggaccggcacatgctcaacctcagggttctggcacaagatctcgatgtcccgcagcttggagaagtagaaatctctctccttctccaggctatcaacaaggagcttcagctcagtgatctgttcatcataagctggtccacctgagttgacaggtgatggcttagcaccacgttgtggtgcattcggagcttgtccacttgcacttgcacgcttagcagcaccatgagatgaagcttgagccttgtgaccggcagatgcggacttggctggcgtgtgagagggcactgatgttcttctgttggtttcttttccacctttgctgttttcccttctctcagacgcattgtagctggtcatgaacccaccgttgacagaatcacaatatcttttcatccactgcatgaactccagattgtcaagaggtctccctttggtgagcttgttcacctcaatgtgcttggtgatctttagcttattgaacacgtcctgcaggaccttgtagttctggatcatctcgtactccgtcttggcgtcaaagttcactttagtagacaatacggacaaccgacccccgggtagacgaccgacgtaccaatacaagactaggacaacgacaaaccgacgacccgaacgacca

SEQ ID NO: 21728 - DNA, 787 bp, Setaria italica
  Peptide Sequence Number=SeqID_87702
cttccaaccctcctgccttcaaggagacgatgatggagtaccgcaaggagctgaagaagctggcggagaagatgctgggggtgatggaggagctgctggggctggaggaggggcacatcaagaaggccttctccaacgacggcgacttcgagcccttctacggcaccaaggtcagccactacccgccgtgccaacggccagacctcgtcgacggcctgcgcgcgcacaccgacgccggcggcctcatcctgctgttccaggacgaccgcttcagcggcctgcaggtgaagctcgccgacggccgctgggtcgacgtccagcccctcgagaacgccatcgtcatcaacaccggcgaccagatcgaggtcctgagcaacgggcgctataagagcgcgtggcaccgcatcctggcgacccgcgacggcaaccgccgctccatcgcctccttctacaacccggcgcgcctggcgaacatcgctccggcgaccccagacgccgtcgagggcgccgccgactacccgagcttcgtgttcggcgactacatggaggtgtacatcaagcagaagttcgggcccaaggagccaaggttcgcggccatggcgactgcgacaaagtgaccagctgctgctgggagcttccagccagctgcgcagcgtcagtgatatgatctggacctgcgagcttaattactctggattataagttattaattgtgggattatggtacgggcttgtacgataagtaggtcgttaagtgtgtgtgtgtgtgtgtgtgtgtgtgtagaag

SEQ ID NO: 21729 - DNA, 420 bp, Setaria italica
  Peptide Sequence Number=SeqID_87703
tacaaccggccgggcacttccatggaccctagtgcctgccaactgcaaaccgccgcacgcgcgtcgccattggggacaccagatcgtcctgtccctggaccatggctgctccattgaggagaaaagaaaaggcaaatcaagcaacagcggaatcagaagcccagatccgacgccgacatcggaatcaacggtctgatttcttcttggcgatgagattaaccttcgattgactcgcgaacaaacccccacagcgacagggcaccggatcaggatcaggatcaggatcaggcatggccgtcgtgcggggtgaaacgaattgacggggcccggcacgacgacggaaaagatcattctttctttctctcccctttcctcctttcttgctgtattcgttgtgtctttgctttcggcattttcctc

SEQ ID NO: 21730 - DNA, 395 bp, Setaria italica
  Peptide Sequence Number=SeqID_87704
aggttctaccacctggcgctgctgtgccggtggcgggccggcgacatgctccagctccggcaggcgtactgcaaggacggcacctgcaagcccggcgagcggaggcacatggtggtggtggtcatgctgctgcacctcaactgcttcgcgcagtacgcgctttgcggcctcaacctcgggtaccggaggccccagcgccccgtcgtcggagtcgccatcaccgtctcggtcgccatctgcgcgccggccgtggccgggctgtacaacaacctgagccctctcgggaacgactacgaggcccagccggaggcggatgacgaggagtcctgcggcggcagtgacccgcagctgcagcggaagaccgccctccacgaagagtcgtcaggaggaggagg

SEQ ID NO: 21731 - DNA, 740 bp, Setaria italica
  Peptide Sequence Number=SeqID_87705
ggacgtcctcattggctcctggggtgatggaggtgcatagcttggcctgtcataaggcatgtaataggaagaattcctcactggttcctgggtcgatggaggtgggtagcttggcctgttataaggtggtgggtagtatgaagatgatctcatcggtgaagactgcgacgggaagaacctatccgtgccactgtagttgtccatggggtaatgtgattcgacacggactgtttccaccggtcgtgggtgctcctcaactgacactgatggattaggtcctgacctcaagtactttgagacatgaatggttctcttctcatatgaaccataaggaaggccgagcatctctggcttctgttgcttgacaggagagatgaatgtatcgaagatgagctcatggtgatcatctacagcaacaaaccgctggagagccattgaaacgcgcttcagggactcaatgtaggcaatgtgtgatgatgcaaaacgattgcgctgctccagtgcctgcttgatgaagtcccttctgtcccggcacatcttgacagcctcctcatcttctaacctggaagcagcacatcccatctctccaaagccttgtaatgttcaagaaccagtcatgcttgcattatagtttcagagctaaaactgtagaaaggtcgcttgttgatagcaagaacacagcttctgaagccaacgaatggggagatgatctgaatcaaccctgagagagaaagaataga

SEQ ID NO: 21732 - DNA, 316 bp, Setaria italica
  Peptide Sequence Number=SeqID_87706
aggttctaaacgaaagagaacaaaccagaagtgaagcaatagattagctttagttctgaagtgttgatgtcgcatctgcatttgctacacagatttgatccgagaatgaaaccttgaagaatcctacctgtgcagaagatctaatttcacaagcttattaattttactgctgtactacttttctttttggcagccagcatggcttgttaatatctgggtggcataatttcagtttcctacttttctgtatgcccatatcatctaggtagttctgagccccaacaattctgtaactggctcgtcgtttctatttatt

SEQ ID NO: 21733 - DNA, 335 bp, Setaria italica
  Peptide Sequence Number=SeqID_87707
tacaaagtaaaggacttagaacaatgctagctgcaatcttcattcattgcctgaggaatcaatagaaacacttcgtccagttttctccagtgctctgaaaaaactggaggagtctctggaatcagaagcaggaaagaaatctaattcaggagataaaattccaagtggttctaaacgaacgagaacaaaccagaagtgaagcaatagattagctttagttctgaagtattgatgtcgcatctgcatttgctacatagatttggtaagatctactctcggagatgccatgcagtttttctacataccattatatttgtttttcttattgttcagta

SEQ ID NO: 21734 - DNA, 544 bp, Setaria italica
  Peptide Sequence Number=SeqID_87708
acctttacatctagtggctattgccacgtcttgaaaactttagaaatcaggaataatgagagttcgtgaaagtttgtgtagaaaatatcttccacctgtatgagcaaaatttttacattcagcataattgatcagaattcagaactaaataatatcccacatcttttatcatacttacccactaagtctccactgacttttttggttattcagatccgagaatgaaaccttgaagaatcctacctgtgcagaagatctaatttcacaagcttattaattttactgctgtactacttttctttttggcagccagcatggcttgttaatatctgggtggcataatttcagtttcctacttttctgtatgcccatatcatctaggtagttctgagccccaacaattctgtaactggctcgtcgttcattatggatacccaaagtaagactgatgatttcatatgtttgctgtgcaatgtgctgtcctatctctgcgcagctttcgccatactgcaacaggtcgatccattttgatgaatggcacagt

SEQ ID NO: 21735 - DNA, 255 bp, Setaria italica
  Peptide Sequence Number=SeqID_87709
tagcggtggcatgtcgagctcagaaaggccctcaagaacctgcaccacctccgccatggtcggtcgggcaagctcattttcttgaatgcaccaacatgcaactttgcaaactctttcgacctcctcaaggttcacatcaccgtgcaaatctgcatccaccagacttgcaatctctccattgagaagcttgcgtgcagcttgcataggaaaaaaaggttgaataatcaccatccttgaagtactctggacttgaat

SEQ ID NO: 21736 - DNA, 474 bp, Setaria italica
  Peptide Sequence Number=SeqID_87710
ggtctcgtcctgatccgtcttcctcctcttggcctccttctcgaggccgtcgtcgcctcctgcggccttcctcttggctgtaccagaacgagatggagccctctcctggccaatcctcctcttagcccacctcttttcggtgccggcgccagcactccccttcctcttcgtccctgtagcagcaggcagcggccgccaccggtaaaaagagcggaaactggcgcaaaggaagtggatatgcctcctccacccgcggccgcctaacgccaaggccttggggcaccgtggctttcctcgagccatagatcgggcgcgctgggagggggaattgctcggagtcgagtggaggcgtgcgggtggcggcgtggcgctgcggccggcgagaagcaaggaaattgcggagtcggaaacccgctccgtcttgtttttttttccttttccccctttcgttagggttctttttgttttttcgta

SEQ ID NO: 21737 - DNA, 495 bp, Setaria italica
  Peptide Sequence Number=SeqID_87711
acaatccttttggtgcaataaacctactagttgtagttcttcctgagagctttcttcattatccaactgctgagcttcagtaatagcaagagttgcacctcttaaaatgtgcaacttttccttcacttccctgccaattttctgtgcagcttgtagttcaatttgaagtttgaagatcatcttttccttctcaatgctaactttcatagccttctccacatgttcacttacagaactactactgtgaggaaatgagctaatcatattatcaatgttctgatatgcatcatctagtgatctacatccatctgttaagaagctcattagatcaaaaattgcagcctcccattcttcagacaaagaagcaatttctacatcttttgcaacaataatctctgaaagcctgttactttcttcagccataatgactaacttttctgtgagctctcgatttgttcttttaaggtcgtcttcctaacttctttctattgttgt

SEQ ID NO: 21738 - DNA, 395 bp, Setaria italica
  Peptide Sequence Number=SeqID_87712
ttcttgagccgcctcaaaatttgagaataaggtcagaaccttatttgatttgtcttcaacaagatgtagcatgctatcaagctttgactggtaatctggattagcttgacctgttggttcattttcatcaggctgttcctcaatcatgtcaactgaattatcaggcaatattaggtcattacaagaatgttcttctgctgtttctgcaaagcgacattttcctgctttcaaatggttctttagttcttgtattatacaatccttttggtgcaataaacctactagttgtagttcttcctgagagctttcttcattatccaactgctgagcttcagtaataagacaaagaagttagacaacctacttaaaaatagtagacaaacttttaccttaca

SEQ ID NO: 21739 - DNA, 374 bp, Setaria italica
  Peptide Sequence Number=SeqID_87713
cacggggactggatggagttcgcccgctaccaggagtacaggtaccttctcggcgcatccgtggtggcctgcctctactccgccgtgcaggcgctccgcaacttccgccgccggacctcgggaggcctcctcgatttcgccggcgatcagctcgtggcgtacctactgatcacggcgtcgtcggctgcgctccccatcaccatccgcatgagatcggccgtcatcaacatcttcaccgacgccatggtagccgccatcagcctggccttcgccgcctttgcagcactcgccttgtccgccaccatctccggcttcaggatctcatcaatctcatactagcaagctgctatcactctaccatcatcctctacctg

SEQ ID NO: 21740 - DNA, 275 bp, Setaria italica
  Peptide Sequence Number=SeqID_87714
gttattcgggtcggcatgggcgagaacaaggaggggcagggggcgccggcggaggccggggaaatagcggcggggccggcggcgtcgtggcggctcaacgtcagcgacttccacatgccggagcggcccaaggagccgcccttcgtcaccagggtcttcctccgcagccacgggaagcagaggaagatcgcaaagtactacaagaaacaggagaatctactgaaggatttcaacgagatggagaccatgaatgaagttgggggcttggaccagaa

SEQ ID NO: 21741 - DNA, 580 bp, Setaria italica
  Peptide Sequence Number=SeqID_87715
aggtttcatactctggtttacggcacatgctaatgaaaagccgaacaagtacagctatccgattgggaagaggcgcatgcagccagtggtaaggaccttgttcgtcaaactgaattacttcggtttctttaaaaatttaagatgatctctgttttgcatcacaaaagtaccttcgcggttctgaaaaaatgtgatctcgttgacgactaaaatagactggatctggacagatcggtcactaaaccggtcataccgatataacaaaagtgctccaaatgcaaattggacttaaccattgtgtatctctcgtcgagtagatcaaaatgcatatgtagaatgttcgatttggagtttagatgagagagttatgatcttgggaagatctgcatccaggaaaaccagtatggctagggcggtcagactagttcggtctgtatagtccgagttaggagttgtattttgacatgaaattttattagggtttcgactcctaatgggacaacgaccccctcctataaatataaagagccacgacgccgattggaggggatccgatcgatccaaaatattatcaatatac

SEQ ID NO: 21742 - DNA, 1470 bp, Setaria italica
  Peptide Sequence Number=SeqID_87716
tggccgagacgagttgcacgcgcccacgcactagctagcagagcagctaagccatcagcgggttgattccaacagcgggcggagagggccatggggagcccgagccaaggacgcggctgcgacgggagcggggaggaggccgggtcgtggcggctgcgcatgggcagcgagttccacgtcccggacaggttccatcgccagccgcccttatacgccaggatcttcggtggctcgcacgggaagcagaggaagatcgcaaagtactacaagaaacaggagaatctactgaaggatttcaacgagatggagaccatgaatgaagttgggggcttggaccagaatgctcctaccgaggaagaattaaggcaattggcaaagagcgaaagatttgctattaacctgtcgaatataatcaatctgatcctctttgttacaaaagtcgttgcttcggctgaaagtgtatccatggcagtaatagcgtcgacactggactctctgctggaccttctgtcaggtttcatactctggtttacggcacatgctatgaaaaagccgaacaagtacagctatccgattgggaagaggcgcatgcagccagtgggcataatagtctttgcatcaataatgggcacactaggcttccaagtgctgatcgaatcagggcgccagctcatcacacaggagcacgcgaatttcaagctcaagcaagagctctggatggtgggcagcatgtcctctgtcgcggtcgtcaagttcttcctcatgctctactgccggacgttcaagaacgagatcgtgagggcctacgcccaggaccacttcttcgacgtgatcaccaactcggtcggcctggtcgcggcgctgctcgccgtccggtacaaatggtggatggaccctgttggtgccatactgatcgcgctgtacacgatcacgacatgggcgcggacggtgctggagaacgtggggacgctgatcggcaagtcggcgccggcggagtacctgacgaagctgacgtacctgatctggaaccaccacgaggagatccagcacatcgacacggtgagggcctacaccttcggcacgcactacttcgtggaggtggacatcgtgctcccgggggacatgccgctcagccaggcgcacgacatcggcgagtcgctgcaggagaagctcgagcagctgccagaggtcgagcgcgccttcgtccacgtcgacttcgagttcacgcaccgccccgagcacaaggctgaggtctgatgctctgattgcctgcaggctactactttcagagctcgatcagagcctcaggccagatagcagatgcagagctgctgtagatctgatgacatgtattcataagatgagatgcaacatcatttcatgagccctcatcaactcttaaaagggcatctaaatgttttgtcgtgtcatgaaaatttgaaattgccgtttttttgttcttattaaaaa

SEQ ID NO: 21743 - DNA, 278 bp, Setaria italica
  Peptide Sequence Number=SeqID_87717
cagcaccaccgcgtcctccagcgctgagcacccgccctgcgccatgtcgggcgtcatcgggtggaacgcatcgccggccaccgtcacggccccgcgcgcggcggcgccggtgaggatggacagagggttccggtacaggagcggcgcccacgagaggttgccgtggtcggagcggcgcaccacgtcgaggtactccgccggcatgtggccggcgaggctgccggtgacctcgcgcagggtcctgaccgggtccccggcggcgtctttctccgctggga

SEQ ID NO: 21744 - DNA, 556 bp, Setaria italica
  Peptide Sequence Number=SeqID_87718
ggcgacgaggccggcggaccccttctgcatggtggtggtgccgggcacggactcagtcgacggcgtcgtcttggaccccgtggcggcgcccggcgtctgccccgcgggcgtcccgggcgaggtcgtgggagctccggcggcggcgccaccgcccttgcagttgctgacgtcgggcgtcttgaccttgcaggcgtcggggaggcccagcgcgcgggtgcggttgacgctgagccccagcgacgccgggtccgcgctcagcgccacgcacaggcactgagggtccgactgcaccaccttgcccagctgcgcgcagcacgaagccggcgccgtcgactcgttcccggagatgtagttcaggcacggcgacaggctcaccagcaccgacgtgcactggctcgacggggactgcgccgacgcgccgccggccaggaggagcgcaaccatcatcatccccgccgccgcgagggtggccgccgccattatatttcttcctcttgcttgatttcctctggccttggtaacgcctgatgaacactggctctgtggtttctgcttg

SEQ ID NO: 21745 - DNA, 370 bp, Setaria italica
  Peptide Sequence Number=SeqID_87719
cacgctctctctccctcgctcccgctctagaaagtcgaggccgcggccgatcggtttatttttcttcttctacttctggcgcaccgccaatgcctcccgccaccaccgtcaggctgctactagccttctccgcgctactactgtgctgcggtttcactacggcggccgcggcgtcgtccgtcgatgtcgatggcggtgttgccaggcgggtgctgcaccagccattgttccccatcgagtggaccccgccgccgtcgccaccgcctccgcctgctccggacttcacttccgacccggcgacgcctgacgggcctcccggcgacttcttccctccggcgccaccgacggcgcctgctgccggcggtggtgg

SEQ ID NO: 21746 - DNA, 341 bp, Setaria italica
  Peptide Sequence Number=SeqID_87720
agaaaagaagagaaaaagaattcaacctcattttcgatcccaacattttgcacatggatcgatttgattatttatgtacctaactgagcccgccatgccgtccatcatcatgatgcgacccaccgtgatggccctcatcgccgcccggcccggcccaggcccgctcggccaggccccggacggaccaccgccaccggccggcgcaccacgaacgcgccctccgcgacgcccatggcgctcttgcacccgtacatgtcgaggagcccggccaccccgccggcggacgcgatggaccaccgccggctgacgggcccgcacgacgccgacgcctgcgttgccgc

SEQ ID NO: 21747 - DNA, 494 bp, Setaria italica
  Peptide Sequence Number=SeqID_87721
ggtgggtatgtccgttgccgtcgtgggggaggaggaggagatgacggcggcggggacggggtgcgccgccggggccttcttgcgcttcttcttctcgtagctgacgccgcgcgcgcgggactggtggtcgcgcacctcgcggaggtagagcctgacggcgcgcgcgccgaaggggttgttctcggggcggcccccgttctcctcgtaggcggcgcgcagcctgccgatgagcgcgtcgaggctgccccaggcctggcggagcgggcacgggcagggcgccggcggcgccggctggccgaagtaggcgcaccccgcggtgtgcaccttggtcttgccgaactggtccaggtagcggaggaactcgatcacgtgcgcgccgctgcaccgcgccagcgtcagcggcgggcggtggttccgcaggtactgcacgaacgtgttccagtcccgccgcttctgcgactcgtaccggctcggcgacgccagcgccgcgcccg

SEQ ID NO: 21748 - DNA, 270 bp, Setaria italica
  Peptide Sequence Number=SeqID_87722
gcgtgtactgaaacggaggcagctgcgaaacgtatgggaaggagctgtagatgctagtgtgaggcgccagcatgcggcagccatcgtcgacggcgtccgtccacctcatgaaatcgaatccgctggcggatcgatcgatgaggacattgtccatctcaatgatcttgatgaggatagcggctagataccctggcttcttggaggagaggggagaaagagagaagcgaagaggaaggctgaggtgccaagccgcttgcttctcgctcccgg

SEQ ID NO: 21749 - DNA, 337 bp, Setaria italica
  Peptide Sequence Number=SeqID_87723
cctacaattggaggaggtgcattatacacttcaggaggagttattggactgggagcattttgcggctcagtgggagcagcagggctaacagctgccttctcgggggaagggacttgctgatggagtagatggtgctgttggaatagttactggaccaagagcaaatgcaggttcaggaggactagaagcttgtccttggtctggaggagaatcagtgacagcaggagaaggggccagagtagtacctctggatccaagagccgaagcaagaagaagcgccacgagagcaagagtccgcatctcgctcccctcacgcgcgcgccgccgcagtgggaaa

SEQ ID NO: 21750 - DNA, 247 bp, Setaria italica
  Peptide Sequence Number=SeqID_87724
tcgagttcttctatgaccagtcgcccggcggcatgaagagcctgggcacctccctggcgcacatcgcgatcgcggccgggagctacctgaactcggccgtgctgggcgccgtcgcgtgggcgacggcgcgcggcggggcggccgggtggatccccgacgacctgaacgaggggcatctggactatttcttctggttgatggcggccctcagcgtggtgaacctgctgcacttcgtgcactgctcccg

SEQ ID NO: 21751 - DNA, 1188 bp, Setaria italica
  Peptide Sequence Number=SeqID_87725
gattccccaacgtgaatctctgcatgggctacggttcaactgaggccggtggtatctcacggatgatcgaccgggaagagtgtacccgcatcggctccgtcggccgtgtttcggagaacgtagaggtgaagattgtggatcacataactggcaagcccctgtctgtcgggcagagaggggagctatttgtgagagggcctgccgtcatgactggatatgttggcgacgacgaagcgaacgctagcactttcgattctgaaggctggcttaagactggggacctttgctacatcgatcaggacgggttcctgttcgtggtggataggctgaaagagctcatcaagtacaagggctaccaggttccacctgccgagctggagcttgtcctgcaaacattgccagaagttgtcgaagctgcagtcatgccgtatcctcatgaggaggcagggcagataccgatagcgcttgttgtgaggaaacctggaagcaaggtcaccgaggctcaagtcatggaccatgtcgcgaagcgggtagcttcgtataagaagatccgcaaggtgctgtttgtcgactccatacccaaatcgccagctgggaagatactgagaaggcagttgacgaactatctgcagttcggtgctgtctctaggttgtgaaactttttacttgtgtgtgtgtatgtgtgcataaaagacagagatgcggtacactttgtgtaaagataaaatagtgcgattaaaatacgtcgcatggcgaaaaattctatctacagacaaggtaggacaggatcaagggcatgtccagcggtacatgccagatgtgatacataaattttacggtaatgcttcgcagcgggacaatcgactgggactgccgatctagagcactatcatgtcatcaccgtctcgatcgagctcgatggccttcatttccaccaccgcaagccgtgatgagtacatcagttttgtttgctcctcttctgattgttagtgcaactaccgtaaccatcccaactggacttttttgagttgtagctcgtgaggtgttgcaatgctttgttttttatgttgcaataagtgtgaattgggaaattgttgaacatggtcttgttactcaggtcatggttggtgttgagcctttgtcaaatgaaaggtaagacgaagtcacaactacaaaaaaaaaaaaaaa

SEQ ID NO: 21752 - DNA, 693 bp, Setaria italica
  Peptide Sequence Number=SeqID_87726
gggccacctttcccctggtccaccacatcatctacgcagcatcgcaacaggcgccgcaaacgcccgaaacaacgacgcaaggttccgccgtcctcggtcctccacaccgagccccagcagccacggcgcgtggaggctgcccgtgacacggcgccggtatcaagagcgcagaggaggagcggggcggtgtcctttgccggtggttgtggtgttcgtggggcgcggcggcggcgagatgtcggtgcggataaaggcggtggtggacaagttcgtgaaggagctgcaggaggcgctggacgcggacatccaggaccgcatcatgaaggagcgcgagatgcagagctacatcgaggagcgcgagcgcgaggtcgccgagcgggaggccgcgtggaaggccgagctctcccgccgcgaggcagagattgcacggcaagaggccaggctgaagatggaaaaggagaacctggagaaggaaaagagcgtcctcatgggaactgcctccagccaggacaaccaagatggagcccttgaaatcaccgtcagtggcgagaagtacaggtgccttcgtttctccaaggcaaagaagtgagaggagatgaactggcactgaggagctgtagcttgtgtgctgtactcaatagtcagtactggactatacactggtcccgtagccttgcttagcccttatttgat

SEQ ID NO: 21753 - DNA, 318 bp, Setaria italica
  Peptide Sequence Number=SeqID_87727
ggttgtaccgccgcgttctggaggatccccacgctgcggcacgtcgtggcgccgttggcgctgccgagcagggccctgggcgacctgcacagcctccagacgctccacggcgtgcggccctgccgctggtacggcggcgacaacccgctggcgaaggccgccaacctccgctccctggagctcatcgagctgacagccgagcacaccggcgcgctcgaggccgcgctcgagagcctcgacctcctggcgcacctagtgctgcgcggcgactcgctgccggcgagcgtgttcgccgtcccgagcctccgccggctgcag

SEQ ID NO: 21754 - DNA, 469 bp, Setaria italica
  Peptide Sequence Number=SeqID_87728
ccctcctaaatccatgcataacaacactgtatgtgatatcacttggagtccaccattcctcttcgctcttgtttaacaattcccatgcttctgaagtcttcccgactttgcaaagcccatttaaaagagcagtatgtgtgactgtatttggcttgcaaccattcttatacatatgcttcatcatctttcttgcttgatcgagttccccaatacggcagaatccatcaacaactgcactatatgttacaacatcagggcggcatccttttgaaatcatctcacttacaatttcctttgcctctggcatcctaccattcaagcaaaatgagtgtacaatcgcactataaccgacctcatcaacacggattcctttccccgacactccccagtggaaccccaatgcctcatctgcatgaccatgctttgcaagaacatgaatgagcatgttatacgtgacctgatctggaaa

SEQ ID NO: 21755 - DNA, 253 bp, Setaria italica
  Peptide Sequence Number=SeqID_87729
cggcccacgcgacgaggaacatgttgaaggagtaggcgtcgcagacgcggtggtcgaaggtgcagccgacgacgatgccgccgcacccgaacttggtcacctgcacggccatgacgccggccttcttcttgggcacgagctgctcgacgctctcgtcgggcaggccaagccgcaggtcccgcatgtcggtgccgtcgccggcgctggcctccgcgacgtccaccccgcggccgctgcacagcagctccggctc

SEQ ID NO: 21756 - DNA, 476 bp, Setaria italica
  Peptide Sequence Number=SeqID_87730
ccacaggtgcgccgtgaacgcctccagcttcgtgcgccccggccccgccgcggcctgcagcgccgccacgtctgcggcggacacgcggtagatgcggttggcggcggcggtgtccggcagggccggcgcgaggctgactgggacgaagaggcggtcggcgagggtgcccgtgcacggtggcgctgggtgacgaggcgccaggaatgagcggcggaaggacggggccggcggtgcggggccgccccgggcggccgcggcccacgcgacgaggaacatgttgaaggagtaggcgtcgcagacgcggtggtcgaaggtgcagccgacgacgatgccgccgcacccgaacttggtcacctgcgcgtgcatgcatgtgctagctaggaatgatgacgtcatgattataggcttatagtagctagtagtacgtttttgtagcacttgcaacagtccataagaaattagtcggatactacatt

SEQ ID NO: 21757 - DNA, 615 bp, Setaria italica
  Peptide Sequence Number=SeqID_87731
aaacaatagccgtacgtgcatgttactagattattgtagtatcctatcgatcgataatgattcgcttggtgtattttagtttttttttgggtagagaatggaagatatatgaatcgatcgaacctgcacggccatgacgccggccttcttcttgggcacgagctgctcgacgctctcgtcgggcaggccaagccgcaggtcccgcatgtcggtgccgtcgccggcgctggcctccgcgacgtccaccccgcggccgctgcacagcagctccggctcgcccgccgcgttggccaccacctccccggccagcgggtagtacgccaccagcgtcttggccagcgccgccttgagcacggtggcggcgccgctgctgccgccggggtccgcgtagcagaagaagacgccgacgtcgatgggcggcaggatgaggtccaggttcgacagcgccaggcggtgctcctgcaccggcagcgccggcgctaccgtcgtcacggccgtgatcgtcacctcgccgccgtgcccgcgccgggcaccgctgccgtcggtggtcccttccttgaccatgctgcgagtatgcgcgggcgcgcacgcgcgagaggtgtgcgtgtgtggggg

SEQ ID NO: 21758 - DNA, 140 bp, Setaria italica
  Peptide Sequence Number=SeqID_87732
ctggtgtggcagccggtagcagcaccagggttgaagttcatctgaggcaggttctgaagtccttcccacattgcaggtatctggttcattgtgggaaggacttcagaacctgcctcagatgaacttcattcggcaagcga

SEQ ID NO: 21759 - DNA, 472 bp, Setaria italica
  Peptide Sequence Number=SeqID_87733
tgccacaccagggttgaagttcatctgaggcaggttctgaagtccttcccacattgcaggtatctggttcattgtcgagacgtcgtgaattgttccctgcaaaacatcgacaggattggaaatgttgcacataatttctggctgcatgattccttggttaaactgagcagcaaggctgcttgatcctggatccgctccatagatagcaaaatgtctgtcttgtgaaagcatcatctacaaaacaagaatttccattgaacaaaggatatctaaaacagcatctagagagatgtacaatgaacagcagatctggtgagtggatttactgttggatagaatctgctcaatgtcaaagccaagctcagggttgacagttgcaagtttcattgacaagaactcgacttgtcgttgcaatgactgcacatagttgataatctcatcaagcatgactgccttgccagtgatctgttag

SEQ ID NO: 21760 - DNA, 1000 bp, Setaria italica
  Peptide Sequence Number=SeqID_87734
aatgagttcccttccattgcatgattgaaccatttgcatataccagtgcacgtttcatggaatttctgacaaggcaattggcttcgaactctgcatttttgtacctacgattccattccactagtactcatttagtacgtttaggcccatcagcattcagtacttgggtcccaacaaagcttctgtccttggagttcatggatgatactgggtttccatcccaatttccacaggccaaagcacaacagaaatttacagtggaatcagtttttttttcccagctccagctgtacatgatcctcagatgccataccataaacgatgcgtcatacagtatggggagcaacagaaggaaaccggcaatgaatggttaggcctccagctatacaaaaaacttcattcggcaagcgctttacgataattcagtgattgacaagcagtaccggcagctcactgttcgatcttcatggaaccagagttgttggtgctgctaccggctgccacaccagggttgaagttcatctgaggcaggttctgaagtccttcccacattgcaggtatctggttcattgtcgagacgtcgtgaattgttccctgcaaaacatcgacaggattggaaatgttgcacataatttctggctgcatgattccttggttaaactgagcagcaaggctgcttgatcctggatccgctccatagatagcaaaatgtctgtcttgtgaaagcatcatttgttgggatagaatctgctcaatgtcaaagccaagctcagggttgacagttgcaagtttcattgacaagaactcgacttgtcgttgcaatgactgcacatagttgataatctcatcaagcatgactgccttgccagtgatcttactgcatccaggaacaagatcttgaagaagtttcattctctcacttatcttttttctcctcagtctttctgcaaggctgtggctgttagtggcttggcctcgctttgcccgaatatgaacataa

SEQ ID NO: 21761 - DNA, 1179 bp, Setaria italica
  Peptide Sequence Number=SeqID_87735
ggcacttaagagaacagatgacgaaaaagaaaatagaaagaaaagcaaaaaatctcgtataacgcgagtcgtcaggataccaaacggtttaacaggcagattttcgacagtataattgaagacgaaatgaatgctgatacagagaatgctgataaatcaagtaagaagaagaaggatagaagacttaaagtgaataaggatctattggaagatgaacggttcaaagaaatgtttgagaataaggatttccaaattgatgaagaatcaagggaataccttgcacttcatcctcaagtggccaccaaggagccccgcctaattgaagagcattttgagagtgttagcgaagatgagcaacaatcagatgctagtgcatctgatgcatcaggaatgtctgacagtgacaatgacatgcataattcaaagcgtataaggttatacgaagtcaaggatgaacggcatgctgaagcatttctgaatagcgcgtccctatctaatgaggactctgtgcccatagaggataggatagctgctctggaaaagcaacagaactccaaagcacttgaaaaggtcaagtatggacctggtggttcaagagagatctcgttcatctctagaagcggaagaaggcacaaggaagaatcgcctagcgatgatgaaggaccaaatgatttcaagaggagaggtgtacaagccctggggttgaagcagggcaaagctgagttctatatgtttggtggaaatcgtggcagaggaagaggcggagccagagggaggggtggtcgtggaagaggcggcaggggtggtaggggcaggggcagaggatgagctgtgatttggtttccgaggtgtagggccatcactgtgccatcctgccttctccacggttttggtaaacttaaaaatgggaatatttccctgggagttgactcacacaagagtggttcacatttagctggtgaaaagtgccggggtgttgtaatacactgtaagagtacaaattgactgcatccggtaaaacgtggtactcaaaagcctattcctttacaataggcatagcagtgagttcggtacttcaaaattttgtagttagagtagttagataatttaatttctcttcttgtcaatcttgtattggatttgccccgtaaaaagagatacggtgtgctgtgttttcta

SEQ ID NO: 21762 - DNA, 313 bp, Setaria italica
  Peptide Sequence Number=SeqID_87736
aggcgccactggttctccattgatgaatcgatggcttctgcaataagctgattgtgctcgtctgccaaagttcttatcccataagcattgtacctgagatctttggccgttccactgccaagagatgcatagctggcagcattgtccatgtgcagctgaggcgacgaccccaacggcgagaagaacgtgctggagatgttgctggtcccgccgcctccaccggtgctgccggcgatggccgggtaaagagagtggttctggaagccgctgccgttggtggtgacggcaaggggcgccgcggcggagacggccg

SEQ ID NO: 21763 - DNA, 706 bp, Setaria italica
  Peptide Sequence Number=SeqID_87737
cgtagctactgcgtggtggggagcagacaaaagtgtccttaagagtctagagaaaatcagaacgcaacgaatccaatacttggctcagggacatccaccagtccagtccacgggcaccattagtcatcgttcggcgactgagagcttgccacggagaagtccgaggacgccatgggtatggagatcgacagctgggtcgccgggaacgaggcgaggttagtgttgtcgtcggagaggcccggccaggagtccctcgccttgggccactcatcgaagaagggccgcagcgtctggttctcctgcttcccggagtcgaccgccccgaagtcgttgcctaggaaggagagtggctgcctgtccatcttcgagagcgagctgaccgtgttctgacccaggtcgctcagcgccccgagctgggggtagctcgagagagggaaggaggagttttgggacggcgggaggcgccactggttctccattgatgaatcgatggcttctgcaataagctgattgtgctcgtctgccaaagttcttatcccataagcattgtacctgagatctttggccgttccactgccaagagatgcatagctggcagcattgtccatgtgcagctgaggcgacgaccccaacggcgaggagaacgtgcttggagattgtttgtcttggttccccgtccgtccttcctaccggttgtcttgtccgt

SEQ ID NO: 21764 - DNA, 683 bp, Setaria italica
  Peptide Sequence Number=SeqID_87738
gcagcctaaccaatggcatggacaaccaaagtaatatgcacccacttgacccggcattttgccagcagatgaactctcaacatcgttttctcaatggagttagcgacgccgcctcgcaggttgggactttctggcaagatgatctccaaagtgtagttcacatggatatcgggcaaaatcaggaaattgcggccacctcctcaaacagctacaatggttcgttgcaaacagtccacatgaaaatggagctttgacatagctgaaattcagtccaaagctcggatcccgtgtatataaagacgagacgagagatcagcttgcagcggaagcactcttgagattcaacctaacagcgttgggccctagcagtgttttagcttctaatttcccccctggtgtaatcattctttgaacaaaatgtgaagagcaccacgcatggcgtttggttacgccatcgcctgtttatctgcaagatcgcacgcaacgaaatgtggtgcctgccgtatatgctcaatcagacccttatcctctcaagcgagagggaagacctgtaatatcatttgtattgccattatatttgtagctgatatatgtatatttaagatccctattcctgtcattcccgatcttcttgagctgaaatatagacttctttacttttttaaaaaaactgagacacgcaa

SEQ ID NO: 21765 - DNA, 1772 bp, Setaria italica
  Peptide Sequence Number=SeqID_87739
gcctcagcctgctgcaagcttttgctttggtttaggtgcttcttttccactcctttactgttcccccacttttgcttgctttgtcacgcacacgaaaagctcctgcctttaccttctcggaccttatctccgccccatagtgggatttggtgggagctgcgctgattgcccctcgcgtttctttgctcaattggggtcgcagctcgcgggtgcgcgtgctcgtgctcggaattcgggttctttgagtggggattgcgcggtcccctaggcgattgcggacgctcgctgcagatcttcgcgcaattccggctcgccggagatgaactgtgggccgcccgaccagctgccgcccgcatcggcgccgtcgtgcttcctcaacctcaactggaaccagtccatggccgccgccgccgcggccggcgaccacctcgacccggcgctcagctcgatggtctcctccccgacgtccaactcgatggccgccgcggcgactgatggcctcgctctgcacgggatctcgccccagccgcagtacggcggcacgcgtctcagctctcccccgaagctcaacctctctatgatgggccagttccaccactacccgccgccgcaggtgggcggcgccggacccagcggcttgccaatccttgagaacttgatgccgatgggccacctggaccagttcctcgccgacccaggcttcgccgagcgcgcggcgaggctctccggctttgacggccgcaccggtggaagcgggtacggcgccgtcccgggacagttcggcctcccggaagccggccccgtcggtgcattgaaggagctggagctcgggaacggccgggacgagtcatcagtgtccgatccggcgtcggccagcgcggagatggcgttgaaagccccttccgacggcaatgcaaagaagcggaagtccagcgggaaggggaaaggaaaggacggccctgggtccgccgccgcaaaggatctcgccaaggaggaatccagcgggaagcggtgcaaatccgcggacgagggcaatggcgcggaggacaactccgccaaggggaaggccgcgcagagcaacagcgagaatggcggcaagaagcaggggaaagacacatcgaagccccccgagccgcccaaggactacatccatgtccgggcgaggcgcggtgaggcgacagacagccacagcctcgctgagagggtgagaagagaaaagatcagccagaggatgaagctgctgcaggatcttgtgccgggttgcaacaaggtggttggcaaggcagtcatgctggatgaaatcataaactatgtgcagtccttgcaacggcaagtcgagttcctgtccatgaaattggccactgtgaatccccagctggacttcaacaatttgcctaacctccttcctaaagatatacagcagtcctgcggcccgttgcagaactcgcatttcccactggagacctcaggtgcaccgctgccataccttaaccagacacaccaggggagccctctaggttgcagcctaaccaatggcatggacaaccaaagtaatatgcacccacttgacccggcattttgccagcagatgaactctcaacatcgttttctcaatggagttagcgacgccgcctcgcaggttgggactttctggcaagatgatctccaaagtgtagttcacatggatatcgggtactgtctagtccttaacctaattggtcctaattaggcttctccttaaagttgttaaaataatgtttctttacctttta

SEQ ID NO: 21766 - DNA, 219 bp, Setaria italica
  Peptide Sequence Number=SeqID_87740
taaatggatcgatgatgcaaaaatcagggtgctcttccacaaacctgcttaacacagggatatagtgagacagaataatgaaatccaacaaagaaaactatgaagttttcaaaacagcaaatattattgcacaaatcttcacttttctaggctcatgtgcagaactaacatcacacaagtatacagcaagttattgccttacattttttatatgtttgg

SEQ ID NO: 21767 - DNA, 847 bp, Setaria italica
  Peptide Sequence Number=SeqID_87741
ttcctctttcagccatgaaagaacaacaattggatgggctacaaccctgcacaggtgccatggatgttaaattgcataaaaatggggatgggagttttccatccacatgtaataactgaaaacgtggtgcttgccttcattcaagggactgaaatcagtttagaatactgctacattatatatgtaccctatacaagaacatactaagatccactttcattaatcattggtaaggttaactatatgtgggatcagtgatccatgccgattgctgaataattgtcacaaaaatatcatcaaatggttcttttctagtaaacagtggcgaaaagggaacttttcatgttgacaagtaaactgcacatggcagcttcagagttattgtagtcctattgcagcaataatgaaagatagttagctaacaatattttgtactgaggcctatgaaatcagtgcaggtataatacaagaacaggtgcactaactttttcgcatctaatacctagaccaatattttgagagatggatgtgttgcagaaccaaagaaataacaggtggcccagaacaagtgcaaaactaaaacgctcaccatagatagaaatacaatattaccatatctaaatcctataattgattatattcttacttaactgttcaatggaggcttataggtagttttaaagtattatgtccatgtataaaaaataaagatgtgaatccagccaaataatattgactgcatagtatctaatgatgaaacaattgtgccagaattaatgtaaagactgaaagcaacacttacagtttcacatggtagtacgttacaggtgccatgactagaaagggg

SEQ ID NO: 21768 - DNA, 1495 bp, Setaria italica
  misc_feature (1045)..(1045): n is a, c, g, or t
  Peptide Sequence Number=SeqID_87742
ctagctttaggattacgagtagatcgtcaaatgcttaattactctgtgcacacatcaactgcagcagagactttgagcaactcacagaaacaggtttttccaagctagaaagaacaaattgttggctttggcatggactccataccaaatgaaatcctgctacctttggcctttgcacaatatgtcgcagcagctcatttatatttgtcacagagggcacaccttgtttcttcctgagcagatgaatatggagcttgccacagcaaggcccctgagacatctgagcctccgagccgacatgaatttgtgataactctccccaaaatctattgccccaaatcacctctgcgataaggatttaatctgctccttgcccttagtagctgcaaaagtagccaagaaccaaggatgcagctttacagtaaaattctcgctaaaaaggacaggaatactgaggtcttcatgtgatcacatatttgatcttcaaaggcaacggtagcaatctgacagctctggctaccttcgcatgacacgaattttttcacgcctgcggaatcgctcaagcatgatatcatcactagcagcctctctccgtcctgcaccggcaccagctgtatttttagtatctgttgctttacctcctgcactttcattaggccgagaatctttatctttgtacagcccaggattctctctccgcaatttctcatcatattctttgccacgatggaaataatcagcactgtaacttgatggaatatttgaatctgattttggtttagccgcaagtcttttctcttgcagcatctttttagctgcctcagtttcttcaatgtttcttaatttgtactcaataggcagctgaacttcagcaatgcccgtagtccactgtgtcgagctctcctccgagttcttcttcttcaccttgaggtggtctggcacggtgtagagctcgtccacatggtccatctcttccttgtgtcccacatcaactgtcttacccctcttcttcgccagctcggtctccaccataccctcaggcatnttgggggtcctcgatggtgacggcagtctcctgcgcgaaggtgtccctggaggacgaggtcctccttctcggcctcgccgatagccgctccccctccacccaccagtccgcgggcggctgacccgttggtggaggcggcggcggggtcggcggggatgcccagcttcctctcccggagcttctgcatgtacttgatctcctccaggacgacgcggcgggtgtcctcgtcgtcggagcggtcgtcggcgtccggctcgaagctccgcttgcggaagttctttcgctgcatggttgggcggtgttgggctcgggaggggtttgaggcggaaagaagggaagagggggagatcgccggaggtgtcgccggcggcgagttctgagggttgggagggcagatttggggattggacggtttgaaacgagattctcaggttcaggcaaaggtctgcg

SEQ ID NO: 21769 - DNA, 437 bp, Setaria italica
  Peptide Sequence Number=SeqID_87743
gagggtttccctccccttcttccccaaatcgaatcgccgcattgccggccgagcaagcaatccctccccacccacccgacccggcttcaagacggcgctggcgatccagcagagggcgagggcggcggaggcggccggataatcaatgtgtccgctgtgctccgtgcagcgctggtcgcggcgcgtcgccaccatgctcccgtggctcgtcatcccgctcatcgccatctgggccaccacccagctgctcctcccggccgcctaccgcttcgaggtcacctccccgcgcctcgcctgcgtctccgtcctcctcctcaccctcttctggtattagatcctcctcccgcgcctctccctctggcgcgcccgccgctccgcgcgcctccgcgaggagcgccgcgcccacgccctcgagctccacaagctccgcaagaccg

SEQ ID NO: 21770 - DNA, 431 bp, Setaria italica
  Peptide Sequence Number=SeqID_87744
tttttttgttttttgtagcaaacaaagcttatatatttattcaaccggggaaaaacttgtatcctaattgcaaggagtcatagccataatctgaatataatgtacaagagcaatgagccattgaaggcatcggcttatgatcactgcgaaaaatgattccaattgagtttgtaacaagggaaaaatgctctattacaacatcacaacaaatctctaaagtactatgagaacatgctttttgtgccaagaactgagggtatatatgtcgacgagttgctcagcttgatcaggacatcagccaaccctattgattcttcgatttattattgatggctatatattcccaagaaagaatttatgctaaactgtccattacaactccattttgttccgcttgtaaggccttggactttcttgctcatgagttacta

SEQ ID NO: 21771 - DNA, 412 bp, Setaria italica
  misc_feature (364)..(364): n is a, c, g, or t
  misc_feature (383)..(383): n is a, c, g, or t
  misc_feature (405)..(405): n is a, c, g, or t
  Peptide Sequence Number=SeqID_87745
gggccgggctcaggaacaccgcgtcgtacccgtccatctcccccgacctcatgtcgatgtccacgtagggcccactggcggcgaagtcgaagcacgcgaaggcgccgtgctggtggaggatgcgtgcgatggcgcgggtgtcggtgagcacgccggtgacgttgctgcacgccgagaaggcgcccagcatggggcggtcggcgtgctcgggcgccgccagcgctcgccggagcgcttcgaggtcgacgagcccgtcgccagccgcggggacctcgacgacgtcggcgaggctccggcgccacgacaggaggttggagtggtgctcgtagggccccagaagacgatccaccgctcctccggggcncagcagctggcgagcccgnagcgccgccgccgggcacggcnccacccg

SEQ ID NO: 21772 - DNA, 199 bp, Setaria italica
  Peptide Sequence Number=SeqID_87746
gctatgctcttgacgctttgtcatgttgatgtagtcaattaaatgtttagcaatacagtgtaagtagaacatgaacttgtgacatggttatccaaagtccaaggatgttaggttcatgcacttttctgcctgtggtcctctaaattcattgaagaaagtaattaatcccgtagttttcggagtcggtggagtacataat

SEQ ID NO: 21773 - DNA, 382 bp, Setaria italica
  Peptide Sequence Number=SeqID_87747
tagcatcaagcataagctacgtctattattcatacatgatacgccgacgcatctgacacacacgagaagacatcatgattggaaaatgcattgtttcctggtgcaatattgagggctgttttaccgtgcgacgttaaccgtcatcctcaaggcttctcttttggtatgcggtggctaccacgcccgccggtgccctcgttgccgcctttgtcgttgccaccttggcgatacccatggatgtgcgtggcactgtagctactgcccccttcgccaccaccaccattgtcgttattatcacctccgctgccgccgtcaccacctccaccgccgccgcctccactttctcccccacctccaccatttgtgccacctcctccaccgt

SEQ ID NO: 21774 - DNA, 272 bp, Setaria italica
  Peptide Sequence Number=SeqID_87748
cttctcctccttcccgtacaatctcctccacggatccgaccaagaagccctccccgccgcctaagcaaaatcctccctccctcctctcggctcccgatctcatcgtcctccgtcgccgccagcgaatccagcgagcgatcggggggacgacgccgtctcgcgaccaaagctctccgagatcccaggctcctctcctcccccttttcgagtctctttgattggattgtctgctgcgtgtgccggtctagtagaagaaaaaaatctgattgttt

SEQ ID NO: 21775 - DNA, 379 bp, Setaria italica
  Peptide Sequence Number=SeqID_87749
aggtcgtcgaggtcgagggagcagtgccaggcgagggagcggaggtcggtggcgacgacgcggaggggcccctgcgagtgggcgtgggcgtggaagagcacggggcggcgcgggagagcatcggcgtcgttctccggcttggcctcgccgaagacggcggccggcatcgtgatgccagggggcgccgccatctcggctgggaaggcgtcgttatacgtgagtcacctttgaaagcgtaaagacgaaggggcgccttcgtcttcctctccctcttccagttccagtcttccgccttcagggcaggctccatccgccaccggaggggaaaaaggagaaatttggtcatcggcgggatggcctccacatacgttctacttgt

SEQ ID NO: 21776 - DNA, 377 bp, Setaria italica
  Peptide Sequence Number=SeqID_87750
ttgccgcgtccacatcaacccctccccggacccaaaggaattatacaccacacttgcacagaaacatcccaaaacttcccaaccagatattcattcgatacccaacagttcgttcgttccgcgtcacacaagtttggctcgtccgttactacatgcctcatgacgtttgacgtgccttctgaccggctgaaaaatctgacgtgtgcaggcgagcacagctacgtggacgtggtggtgcagacgcggagcggcaaggcggtgcgcgtggtggtggagctcagcttccgcgccgagttcgaggtggcgcgcgccggcgccgagtaccgggcgctggtggccgcgctgccggaggtgttcgtcggccgggccgaccggct

SEQ ID NO: 21777 - DNA, 860 bp, Setaria italica
  misc_feature (839)..(860): n is a, c, g, or t
  Peptide Sequence Number=SeqID_87751
cgccgccgcggcgggcacggcgtgctcctgcacggggcggcccgcggccggcggggactgccggcgctgcatgctccggcgcgtcgccgagcggctgcgcgacgccgggtacaacagcgcgctctgcacgtccaagtggacgcgctcgccggacatcccttcaggcgagcacagctacgtggacgtggtggtgcagacgcggagcggcaaggcggtgcgcgtggtggtggagctcagcttccgcgccgagttcgaggtggcgcgcgccggcgccgagtaccgggcgctggtggccgcgctgccggaggtgttcgtcggccgggccgaccggctgcgcgccgtggtcaaggccatgtgcgccgccgccaagcagtgcatgaaggagaacaacatgcacatggggccctggaggaagcacaagtacatgcaggccaagtggctcggcacgcccgagcgcaccgcggccgtggcggcggcggcggcggcgccgccggtggctcccccggtggtggtcggctcgcccgagaagcagaccaagttcagggcctccatgctgaccttcgactttggccggacggcggtggaggtcgtgtgatgacagcatggcgtgcgtccaacgaggattactgctgagctgcatatttgtaagtagagtgtaccccggattttaggtttttgtcaggattcagaactttagatttcagaaaaccggtgttgatagagtagtatcattcgataccatcacgtactgtagggaaaccgcaagttctgaatttgttgctgaggaattaatcttattgcaagggaataaaatcgagcttcacttgcactagaaaatnnnnnnnnnnnnnnnnnnnnnn

SEQ ID NO: 21778 - DNA, 1394 bp, Setaria italica
  Peptide Sequence Number=SeqID_87752
cacttgccaagcagagcaatatacctgagagctgtgactagctagctacatacataacgatttatagacagatagtagtgactagctaggagagctgctgctggctagcacagacgctcagatcgagtcagagatcgtcctccaacaagcttttgaagctcagaaagagactactagacgatggctctggcgtcggtgtccaaggtggttctggggtcggtcgccttcggcgtgttctgggtgctggcggtgttcccgtcggtgcccttcatgcccatcggccgcacggcgggggccctgctcagcgccgtgctcatgatcatcttccacgtcatcagccccgacgacgcgtacgcctccgtggacctgcccatcctgggcctgctcttcgccaccatggtggtgggcacctacctcaagaacgccggcatgttcaagcacctgggcacgctgctcgcctggaagagccagggaggccgcgacctgctctgccgcgtctgcatcgtcaccgcgctcgccagcgccctcttcaccaacgacacctgctgtgtcgtcctcaccgagttcgtgctcgagctcgccgccgagcgcaacctgccagccaagcccttcctgctcgcgctcgcctccagcgccaacatcggctccagcgccacgcctattgggaatcctcagaatcttgtgattgccttcaacagcaagatctccttccccaagttcctcctgggcatcctgcccgccatgctcgctggcatggccgtcaacatggtcatgctcctctgcatgtactggaaggacctcgaggggaccagccccgacctcgtctccgacggcaagcagatggagaccgtcgaggagggcatggcgtcaaagaccccttcccccagccaagctgaccaacggcggaggatacagctcgccgctcatgacggaggacatctccaccaagcacccctggttcatgcagtgcacggagcagcgcaggaagctcttcctcaagagcttcgcctacatcgtcaccgtcggcatggtcatcgcctacatggtcggcctcaacatgtcgtggaccgccatcaccaccgccatcgccctggtcgtcgtggacttccgcgacgccgagccgtgccttgacaaggtgtcctactcgctgctcgtcttcttctcgggcatgttcatcaccgtgagcgggttcaacaagacggggctgccaggggccatctggaacttcatggcgccctactccaaggtcaacagcgtcggcggcatctccgtgctctccatcatcatcctcctcctctccaacctcgcctccaacgtcccaacagtgctgctgatgggcggcgaggtggcctccgcggcggcgctgatctcgccggcggcagtgatcaggtcgt

SEQ ID NO: 21779 - DNA, 222 bp, Setaria italica
  Peptide Sequence Number=SeqID_87753
atctatggccccccacattatggtcatcctaacatcacattgccactctttgaaccacaggaatccactcgattgaggggacatcatgatagaagtcgctcagctgattcaacaagtatgaactcggatgatccacaagacgtcgaccttgagctcaagctatgatcctaaaatgttcctccttccccctccccttcgacgcgatgtgatagctttattagt

SEQ ID NO: 21780 - DNA, 454 bp, Setaria italica
  Peptide Sequence Number=SeqID_87754
gttcgatcgatcatcagatcagtatcgtgacaacaacatgaaacacgcacgcgtacgtgcttattaatcgaccactgaaagttcaagtccggactgttaagacacaggtgctcacaatcaccgcagagagatcgtcgaaaagtctgccatcgacgtagcaaaaacaagagtccacgcgacaaataaaatcaagctagaacgaaacgtgcgcgtcgaaaggacgcgcgcgcgcgcaaatcgtgagtctcgaatcgacgacgacgacggccggagaggcatcgaacagttagctcgtggcgacgccgccatcctcgtcggcggccggcgcgctcgagcccagctcgatggtcgacgacgacgggttgacgacgctgcagttgaggcggacctccccgcacgtccccgtctgcacctggatgcggcccatcttcaccatcgccgccgcgaacttctc

SEQ ID NO: 21781 - DNA, 216 bp, Setaria italica
  Peptide Sequence Number=SeqID_87755
aacgggttgctcaggggcgtggagcaccgcgccagcaccaactcggccaagccgcggctgtcggtggcggcgttcatcgtgccggcggacgactgcgtcgtcggccccgcggaggagttcgtaaacgaggacaaccctccgcgctaccgcaccctcaccgtcggcgagttcaagcgcaagcacaacgtcgtcaacctggggtcctccatcaaccag

SEQ ID NO: 21782 - DNA, 378 bp, Setaria italica
  Peptide Sequence Number=SeqID_87756
atgctattagctcgtccggcaactccacaaacctcgccttttctccttggtgcgtggcagcgtgggccaccgctgcggcgtcttcgccggcgccggcggcgggagcatgaacccggcgccccactcgggcgtcttggcgaaccgcgggctccgcagtatccctggcgggcgctccggtgtcaccctggcgctggcgtgcgcgtcgccgcccatggcggcgccgcagagctccatgatcttggcggcggcctctgcggggtctttgctctcgcccatgagcttctccacctgcgccctggggagccgcatcttgagccgcacgggcgtggtcccgccgccggcccccgcggcggggagcggggatgtggcgccgctggg

SEQ ID NO: 21783 - DNA, 920 bp, Setaria italica
  misc_feature (899)..(920): n is a, c, g, or t
  Peptide Sequence Number=SeqID_87757
cagtacgcgtaaagaatagaggagagagataggaaaccgcagtgaagtcgccggcgccgccgcgacaggacacaggagcagcagaggcagcggggcccggcgatctcggcggcggagcagtaagggaggcacaggaagcgaaggggcgcggcaggatgcactcgttcgggcaccgcgcgaacgcggtggcgaccttcgcggtcaccatactggccgcgatgtgcttcgccgcctccttctccgacaacttcaacaccccgaccccgaccgcctccgtcaagatcttgaacataaactggttccagaaggaggccaacggcaacgacgaggttagcatgacgctgaacatctcagcggacctttcgtctctgttcacatggaacacaaaacaggtgtttgtttttgtggcggctgagtatgagacttcacaaaatgctttgaatcaagtttccctttgggatggaattatacctgcaaaggagcatgccaagtttttgatccataccacaaacaagtacagatttattgaccagggaagcaatctaaagggcaaggaattcaacttgacaatgcactggcacattatgccaaagacgggcaagatgtttgcagacaagattgttatgacaggttatcggctcccggagcagtacagatagtctgatagatgctgaatagcaaagacgtgggagcagagacctgcaagaagttttagtggcagtggcatagctgatactgagcctttttaattctaatctaagctgaacatgttatcttatgagcttttacttcagctgaaaccaggcgaaacaaagttgtactttggggagatatgtattttccaactttgcttcgtctatcaaagttgattctgaaacccaaaaaaaaaaaaaaaaaannnnnnnnnnnnnnnnnnnnnn

SEQ ID NO: 21784 - DNA, 312 bp, Setaria italica
  Peptide Sequence Number=SeqID_87758
ttttttgacagaactttctctttgttctacatttaagcagccgacaagtaatcacaaaataacaaactacagtataaatatgagacaccagacaggtcattaggccaacatgtccactgcagcacggcccttgcgtgaactgagcggaaggcctcctaagctgtaaatcacggcacgagatagcaaaaatcctagctacctgggcaaaattcgtttgaatttgcaggagggtctagatagcaagatgttacaaattcaggtatcacgggaaactctaggctcagtatcagagtcgttttgctccaggtcact

SEQ ID NO: 21785 - DNA, 497 bp, Setaria italica
  Peptide Sequence Number=SeqID_87759
gatgacatatcagttaccaacaaatttgcaaaattctgacgggcacatactctgtatttcacaagtatataagaggagatgtttggaggatctcaattgaagagtttgcagaatgggaagagtggggtcacgagggatgtccatttttctttacagtctttcgttttctatccttcacattagctccatttgcaggaccatcttgacagattcaccacggaagagcctattgacattgaccacgagtgagcaaacagcggaataagaccaacaattgcaacagcgcccttggcaaagctgaactgtaggtcatcaatagaacccgttatcttttctaagcttgtttcctgattcttcctataaagctcaatttcctcgttaacctttcctttgagaagttcaacatcactttccaggtcgccaatcttcaaatcttgctggtttagtttctgttgaacgtcagactcaaacttcaacctagtttcgttgctctcctt

SEQ ID NO: 21786 - DNA, 755 bp, Setaria italica
  Peptide Sequence Number=SeqID_87760
ctgctccagcgaccggtcgtacatgtggtggtacgcccgcgccaccgccgccaggtgcgcccagctccgctcgctgaacacccggatgaaggcgcgctcgtcggtgcccagccgccgctccccggccttgaagagctcccgggcgtccagcgccgccagcgacgggtccaccgccgccgccccctccgcgcgcgggatcgccaggtacgccagcagcagccgctggtggtcgccggaggtccgctcggtgacgtcgtgctcgacgtagcagccgaaccgggcgcggtaggtgtgccggatgatctggagctgcgagggggttcgggagcagaccacctccgtggcggcgcggaggtcggtgacgtcaccggtgagggcctgcttcaggatggtggcgtcgcgggaggccgggtccaggagccacagcagcatggcgcgcttgtggtggccgctgagctcggaggcgatgcggcgggcgaggtcctggttgaacacggcgcggtactcctgctggatcagcgcgcgctgcgccgcgtcgcggtgggcgaggatgttgatcaccgtcgtgctgtcgcagccgaaacctttgaacgccctgtggaggtcgatggcgtcctgccggggccacgtaggcaccggcggcaccgtcaggctcgccatcccgccccgctcctgtgtgtcgctcgcggcgctgctcgtgctctgctctctctcccacgggtgcgcgggcggtcgtattctagtcggtcgtccgt

SEQ ID NO: 21787 - DNA, 1166 bp, Setaria italica
  misc_feature (15)..(15): n is a, c, g, or t
  misc_feature (41)..(41): n is a, c, g, or t
  misc_feature (1094)..(1094): n is a, c, g, or t
  Peptide Sequence Number=SeqID_87761
gcaatccacctttcnttaaaaataggccaaaacttgtcgcntaaatagtacaaattctctgcttccagtaaagataacagaaaatgaggggaaataaatagtcagtgcagattcttgaactcctcgctgccaatgctagaattcagttctcagaagcagaaagaaagacctctcccaagttataggatatctttgaaagggggagctcagccagacacagtactgtaactaaaaagtaaagtgcgcgagttcatcgcatggtacagtcctttaccaacgtctgtcctcctgtggaacactctagatgaatattcagaaaacgtgggttctccttgctctgggacaccgttacagagccttctacagtttgatcctgcttcacctctataggatcagggaagtacagaatagtctgttgccaatgggtaggctcgtcctctggggctgtggacagaagaacggtatcttcagatgatcgtctccttttcttatgaataatttcaagtggattcaaattggaaggaatattatgagaggactcttggggcccattgaactccacctcaaaccagaaaccaaagccatgaataggagctaacatcattgacgaaactttgtagtttgcggtgatagatttgaactcctcagctgtaaaattatagcaatcgatgtgtttgaccacagatggccaacttataacattctctccaccaattgtttcaatggagggttcttcagatgtaaattttttggcaagtggcacaagagcagacatatttatgccatagacatcacaccagaaatcaacactgccttcatatctttcaggatttgttatgggagccatgaagagcgtagcatgagaaggaagaataagacccccaggtttaagccatttatctcttgcaaataggacgcttggcagcatactctcatacagaagcatatagcccatccattctgatattattacatcaaccttttcctcaaggtcaacatcctcaacacgtccatggatgactacaacctgatcagttaggttgtttgcttttacaatttcacgagcctggtcctccttttcactagcttcaacngcatacacccgttttgcacctgcacgagcacagaacactgagagtattccagtcccacaccccacactccag

SEQ ID NO: 21788 - DNA, 409 bp, Setaria italica
  Peptide Sequence Number=SeqID_87762
gcgccccggaacggcgtggcgatccccaacgccaacgggcaggtgccgacggtgaacggcaacaacggcatcccgctggacaccggcctgtccggcgcagggttcctgcagcccgggagcggcgccgcggccgcggcggccccggcgcaggtgcagctcggccccgacgggctcagcctcgggttcggcacgatcaccgtcatcgacgacgtgctgacgagcgggccggacctcggcgcgcagccgctggggcgcgcgcagggcgtgtacgtggcgagctccgcagacgggtcgtcgcagatgatggcgttcacggccatgatggagggcggcgagtacggggacaccatcaacttcttcggggtgtacaaggtgggcacgccgctgtgccggctgtccatcaccggcg

SEQ ID NO: 21789 - DNA, 985 bp, Setaria italica
  Peptide Sequence Number=SeqID_87763
tttttttttttcttatcaaacaacactcctttaacacactttcatagcagtttcagttataagcgccaggtaaacgcatgatctgaagcgcaaggggaaaaaaaggaaggctacaaaacatgaacaccaacattacaaatttacagatgagcaagactccacgttctgcacagggcaaatgcgtttgcggtacatttacagtggtctagagctggagaggctaggggatgagcaagcattcattgtttggcctgacatatttacactggtcttgagtaggggagactggtgaagcaggagcataatttagctgaaaataaaatatctgcaccacccatgttctccttagccacggggacgcttgggtacatgtacaaaccggtcacggactgtgtccttcaaccacctcgacgagcgggtctgcctgactcggtccgtgaagaggcggtgcctctcgtactccagcttctgaatgactataccgtttagtagaagctccgtgctgaaaatgatggcacctttctcgagcagtggtgcgcaagtttggtagtcttcttcacatgagataaccagtaggtcatcaggtacatcgttttccttcattatagatcgccctaccctctctagtggctgtcctgatgatgctttaaccaagctagtcaccactacttgacttggtttcacattcgatgttacaaagactctttttcccagcagaagaggatgcttgacagctgaggccagtgacataggcatgctgaaacctaactccttttcttttttggcatccctcagaatgtacttcctctcatcaataaaacagcctgcttgtccacaattttcgagccacattgatgtaactactggcttgccaagagttattgcttctaacatattccttgtgcggaaaaaactatctgccacaaagtgtgttgcatcagccatggaaaatgcttcacaaactcccaagcgtgccaagatcttt

SEQ ID NO: 21790 - DNA, 836 bp, Setaria italica
  Peptide Sequence Number=SeqID_87764
aagaacgaaacggacgtagttacaagacccgttactagggaacaacgggcaatctgtcccccgccgccgtggcctccatcaaggccgcgcacccgaacgtcgccgtcatggtgggtatcggcggcgacagcgtgcaggacatcaccaaggccgtcttcaccccgacgtccatcaactcgtgggtggccaacgccgcgacgtcgctcacgaacatcatcaacacgtacgagctcgacggcgtcgacgtcgactacgagcacttcgccgccggcgccgacgtgaacaccttcgtcgagtgcatgggccgcctcctgacgcagctgaaggcgaacatgccgtggatcacgacctccatagcgccgtttgaggacccgacgatccagaggtactaccagccgctgtggcgcaagtacaacggcgtgatcgactacgtcaacttccagttctacggctacggcgacaacaccgacgtccccttgtacgtccagttctacgaccagcagtcggcgaactacccggggggcaaggtcctcgccagcttcatgaccgggaacacgaccgggctgatctcgccggacctcggcatcaacgcggccaaggagctgcagcggcagaacaagctgccggggctcttcatctggtcagcggacagctccaagaagagcagctacggcttcaagtacgagatccaggggcagcagatcattgccaaccattgatctgtgatcggatggcgcctctactctgctgcctatggatggacacactcacactttaaagtattaaataaggatcagcttcttcttttttcctgaaagaataataaggaataaaga

SEQ ID NO: 21791 - DNA, 961 bp, Setaria italica
  Peptide Sequence Number=SeqID_87765
aagaaacaaacaaagagcactgcatgctgcttcgagacagagacgataatcagaggtcatcttctttgtcagccatgacgaacggctacctgttccgggagtacatcggcgcgcagttcaccggcgtgcagttctccgacgtgcccatcaacgccttcgtcagcttccacttcatcctctccttcgccatcgactacacaccggtgaaccagcagccgacgccggtgccgacgaacggcgtgttcagcccgttctgggacacgggcagcctgtccccggccgccgtggccgccatcaaggccgcgcacccgaacgtcgccgtcatggcgggtctcggcggcgacagcgtgcaggacgtcgtcaaggccgtcttcaccccgacctccgtcgactcgtgggtggccaacgcggtgtcgtcgctcacgggcatcatcaacacctacaggctagacggcgtcgacgtcgactacgagcacttcgccgccggcgccgacgtgaacaccttcgtcgagtgcatcggccgcctcctgacgcagctgaaggcgaacatgccgtggatcacgacctccatagcgccgttcgcggacacgaagatccagaggtactaccagccgctgtggcgcaagtacaacggcgtgatcgactacgtcaacttccagttctacggctacggcgacaacaccgacgtccccttgtacgtccagttctacgaccagcagtcggcgaactaccccggcggcaaggtcctcgccagcttcatgaccgggaacacgaccgggctgatctcgccggacctcggcatcaacgcggccaaggagctgcagcggcagaacaagctgccggggctcttcatctggtcagcggacagctccaagaagagcagctacggcttcaaatacttaactaacaaagaccgactagtaggaagacaaagtaactaccggacgtagaatacgaacta

SEQ ID NO: 21792 - DNA, 693 bp, Setaria italica
  Peptide Sequence Number=SeqID_87766
tctggggggcactttttgatcttttatgtattaaggcccttctgcaaagagtctgaatgcatcggggctttctaaaggttgcaactgaagatggcgttctgaagatgcaagagatgcaacgtcatctctccgcgttgtgatgatgatacggcttgctttgataatctggaaaatgtctgccatttgatggtacacttccttttccaaacatcatccaacacaactaaacatttgctgttgctgtggagattcttaatttttctctcaactgatgggcatccatgttttccaagctatctgatgcctcatctgtgtacccaatatttctgagtagttccctcagcaagccttctattgtgtaggtttgtgacactgtgatccatgcatgaacaggaaatttggtcttctcacgctcataaacattcatgaccagagtggtttttcccaatccacccatacctgacactgttatcacaatgctatttggctcgttgcagtgtagccaaccaacctactttgcctgattcaatgtaatccccacaagatcttcgtcttgaataagctcgggcaagcagacttggtatcctcgttgaacaattacagaacttgatggaacaacctggacagccgggaaatagtcctttcgtagtttcttacttgctcaatctcacccattatctgaactacctcatc

SEQ ID NO: 21793 - DNA, 479 bp, Setaria italica
  Peptide Sequence Number=SeqID_87767
cactgttggccaatcccgaactcgcaagctcggcaatatcggtcgctgcagggggaagtgcaactgtttatgtaggcgttttcgcagttgccacagctgcaggtcacgcagtcgctggcgcagccgttagggcagcaggagaagctgctcgtgccgttgttactgctgcagaagctctggcagcacgcctggaggacctgggacttgcattggtcgcaggaggactggtagctgcactcgttgcggcatttttcggcaatttcggcagtgcagttggcattgcacagcgatggacagtcgctgcatagtggcttcttactcggatgcccctgcgaggacatgaccagcacggcgaaaacggcgatggctgccgctgccttgagacctgctgcacctgaaaccatttctatgtggatggatgaagcaagctttgctacagagagagcaagagaatgaatatcacaaagcgtaggatgtga

SEQ ID NO: 21794 - DNA, 1048 bp, Setaria italica
  Peptide Sequence Number=SeqID_87768
ctcttctcctctcccctaaaccctagcaaaatccgcttggtccagagcgatcgccgccgcgatctgacgctccgtcggtccatcggcgccggagccgccgcgctgcaccatggttgtaccgcgcgcccccgaggaccaggatgaggagatgctggttccgcatcaagatgttatcgagggcgcgcagcaggccgtcgtcgaaggtccgcagcaggatgtcgtcgagggtccgcagcaggatgttgtggagggtccgcagccgatggaagaatctgcatcaactgttgagaaccaaactgtgccagatccctgtacatccagatttacatggaccattgaaaatttcttcaaacgcaatgttagaaagcattactctgatgattttgtcgtcggaggatacaaatggcgagtgctggttttccccaaaggaaataacgtagataacctttcaatgtacctggatgttgctgatgcaaattttctgcctcctggatggagtaggtatgcacaattcagccttgctgtggtaaaccaaatagacagcaaaatgtcgttaagaaaagaagcaacacatcaattcaatgcccgagaaagtgattggggcttcacatcttttatgcctttgatggatctatatgattcaagtaaaggatatgttgtgaatgataaatgcattattgaagctgaggttgctgtgcgtaaaattgttgatttctggaactatgactccaaaaagatgaccggttatgtcggcctgaagaatcaaggagctacatgttacatgaactctctccttcagactttgtatcacattccctactttcggaaggctgtatatcatatgcctacttcagagaatgatacaccttcagggagcattccgctcgctttgcaaagtcttttctacaaacttcagcataatgacaatagtgttgctacaaaagagctcaccaaatcctttggatgggatagctatgattcattcatgcagcatgatgttcaagaattgaatagggttctctgtgaaaaggctggagaacaagatgaa

SEQ ID NO: 21795 - DNA, 236 bp, Setaria italica
  Peptide Sequence Number=SeqID_87769
aatgcctggtgtcaggctgtcagcaaactcctctcaagttcttgtagtcctcgtaactaagaaatttatccttaattttgagccagtcagctggttttggctggaagattgctatatatccttctctatcagcagcagtattaagaagatctggttgtttgatcagtctatcattaatctccaaaagggagcctttaactcagcgctgtgcaaggtttgtgtaaatgataagtcct

SEQ ID NO: 21796 - DNA, 960 bp, Setaria italica
  Peptide Sequence Number=SeqID_87770
agacttttatacagtgcattgatcttataccagttttgtatggctagagatggagatggctaactttgataaattggtgccaacgcatcagttgatacattgggaagtaaggcatagccacaaatgaccgagtccttgtacatcaactttccaacaaaaggaataaagcaaacattgtcagcgccttttcatcaaatgagcagacatatgagtcactgataagttgaataacatgagtccagtccagtgcagatacttgggaggtcaacagggtcccagtttccatgttttgtaggctgagaagcaccgagtaacagtatgcagtagctaactgatgaaacttataaatataccatcacaccgtggttgaatcacacctaagcactggcttatcttcaaaactccttttgaatgcctggtgtcaggctgtcagcaaactcctctcaagttcttgtagtcctcgtaactaagaaatttatccttaattttgagccagtcagctggttttggctggaagattgctatatatccttctctatcagcagcagtattaagaagatctggttgtttgatcagtctatcattaatctccaaaagggagcctttaacacagcatctcacgacaaaggacttatcatttacacaaaccttgcacagcgctgagttttcttgcaaatgttgtgcattccttttgcgtttgcccgtgactttcatctcactgcgatctgacttgccaacattgaagtcaacagcggttatacctccttcctctttaaatgcaacgtgggctggagctaaaccaaccacacacaatccgtttggatgacggtacacatactgatcatgccctggattcggaaaatcagcgatgaagtagcgcgcgaagttagcctcgacggcggaggggggagacgccgggaggtcagcagcgtcggggacgacgagggcccgtgtctcgtc

SEQ ID NO: 21797 - DNA, 183 bp, Setaria italica
  Peptide Sequence Number=SeqID_87771
tcagctccaagtgtcatttctcatcaggatcttaggaactctgaaagagtgattagtagtagtaactatttgtagtgctagtagtgaggtcagggagaagatggaggtgttcatccacgaggactatgtgaacaagcgcagggagcagaggcggcggcagctgcagatgctgcaggtggaggg

SEQ ID NO: 21798 - DNA, 738 bp, Setaria italica
  Peptide Sequence Number=SeqID_87772
ccgaggcgcgggtccacgaggtcgtccagcgtcccgggctcggcggcgcccagccggaggtgcgccgacacggcgcgccgccccgtcaggacctggagcaccaccacgccgaacgcgtatacgtcgcccttgtcggtggaccgccccgtcgtcgtgtactccggggccaggtaacccatggccgcgctgtctttgagcgtcgagaataccacgtcgtcggccaggagcttgtggatgccggcgccggagaggtgggggacgaacaggtggtcgatcaggaccttgtctgcggagatgctctggtgcacgagagggggcttgtttggcttgctgctgtggaggtagtcgatgcctttggcaatgcccttgatgatggagacccgcgtaggccaatcgaggacggtcgcacccgcttcgccatccttgacatcgagataccgcgaaaggctcccattcgccatgaattcgtagatgaggaagcattcccctcttgcacgggatcggcagaagcccctcaggccgacaaggttctcatgccgcagcgacgtgagcaggcggaggcctttcaagaagtcggcctcctccgacttgcagctgctcttgttgatgctcttgacggcgacgaccgagccatctcgcatgatccccttgtacgttgctgcgaaattgctcttaccaagtaaattcacatccgagaagtactgcgttgcgcactccacctcttcgagattcgaacct

SEQ ID NO: 21799 - DNA, 553 bp, Setaria italica
  Peptide Sequence Number=SeqID_87773
ataccgaaacgtcctctcagtaatcgcgagagagaaagaaagtgtgcacagcgagctaaaaaactacaggatatctttgacatgatgctcgctcacatctaatacctcgacagctccttgttgcaaaccgatccactatgcttctgcttccagtgattctcgaataagcttctctgtgagctctcttggaagacctcgaacgctatccgccgtaccgaccaattctttgatgaatggcagcactgacggatgtgtcagcttaagccctccggcgacgcaggtcatgtcgccttgattaaccactttgtcgatgaaatcgtccggtatgtgctgaaacttgatctccggtatgtcccatcctcctctcgtagccccagtgctcaggttgctcacaagaacaaagttcaccgcaaatgctcgatcacccgaatagcccttaataaattccctagcttcttctgcactccgtggcctttcccgtatcatccctttgctcaccatgacctggtcagaggttatcagaagggcagtctggtctctgcctggagcacag

SEQ ID NO: 21800 - DNA, 471 bp, Setaria italica
  Peptide Sequence Number=SeqID_87774
atatccttacaagcagaactcaagaacatcgtttcgctgctccacagagacctaatatactgctgttcaaatggaaacataatttcaccgtgcatctacttaggcactacaagtttctatcacagtacttgtaaaagagccttggactttttaagaaaggttataccattaacataaacaactccaatcagtgattgtcttcctttggcttctccttggggatcgtcgagtcaagtttctttggagctccttcttttgcagacttggacgcggcggaggcggtgtcctcctcgagccactggcggagctggcgcgcgttgcggcggaagagggcgccggacctgcggatgtcggtggtgaagaggagcacccccgcgcccaccaccgccaccgtcacgatgaagttggtcagcgccatcgcgctctcgtcgagatcgggggcgtttctgccggcggcggcgtttacaccgg

SEQ ID NO: 21801 - DNA, 695 bp, Setaria italica
  Peptide Sequence Number=SeqID_87775
tttttttttctaaaacaccaaaattaccagcacgcatgtagtattagctaagagagctttatatccttacaagcagaactcaagaacatcgtttcgctgctccacagagacctaatatactgctgttcaaatggaaacataatttcaccgtgcatctacttaggcactacaagtttctatcacagtacttgtaaaagagccttggactttttaagaaaggttataccattaacataaacaactccaatcagtgattgtctccctttggcttctccttggggatcgtcgagtcaagtttctttggagctccttcttttgcagacctgcagcgttgttcgatttatgcaaggaaacaaagcacaagcagaaagcatcctggtactcactaaaaactgaaaaaaaagtactatgcacatcgactattatgtcagttcaagtagtatggatcttcttggtaaccaggttaaaagcaaaaaacttaggaaaattcactccatgctatgctactgcaaaggcattgattctttcaaacaccaaagctacatcatacaacagtttcacaatgattaggcaatactcactaagatgcacattttcagactggtttaagcaactctagctataagttacacaggtaactggaattcactctctggtggggctagtaaaatctgcaagtagtattacattacacc

SEQ ID NO: 21802 - DNA, 348 bp, Setaria italica
  Peptide Sequence Number=SeqID_87776
tcaacaacaacgtcacgttccactggtatgtctcatcgatcgatccatctgctgcgtgtgcatgtgcacgcgctggcttagattagcttaattaacttcgccgctcagtacaacgccacggcggggattcgccttgcttgacgcaaccggctggtcggctggataatacgcaggcatggcgtccggcaggtgcgcagcgggtgggcggacgggccgtccttcatcacgcagtgcccgatccggccggggcagagctacgcctacaacttccggatcattgggcagcgcggcacgctgtggtggcacgcgcacttctcctggctccgcgccacgctctacggcccgctc

SEQ ID NO: 21803 - DNA, 337 bp, Setaria italica
  Peptide Sequence Number=SeqID_87777
gccgcgttgacgagccgcagcatgtaggtgcgcccgggacgcacccgcagcctgaacgtgtcgccggccgagcaggcgttgtaggtcggtcccggcaggccgttgaaggtgtaggcgtcggagacgttggggcccccgccggtctgcagcgcctgcctgatcaccgcctccgggtcggcgttgaaccactcgccgagcatgaggggcacctcccggtcgggctttgggaacgggtaggggacgccgagcggcgggaggatgacgagcgggccgtccttcatcacgcagtgcccgatccggccggggcagagctacgcctacaacttccggatcattg

SEQ ID NO: 21804 - DNA, 523 bp, Setaria italica
  misc_feature (341)..(341): n is a, c, g, or t
  Peptide Sequence Number=SeqID_87778
cttgcttcgaagcgcaaacacacaaaagggcgcagcggaggttgtcaccaggatgggcgctcgtcatggtctccggcgagggcatgccgccgccgcctccacatgccccttcctcgccttcgccgtcctcctcgccttgccggccctcgcagccggcgacacccactactacacgttcaacgtgcaaatgacgaacgtgacacggctgtgcgtgaccaagagcatcccgacggtgaacgggaagttcccggggccgaagctggtcgtgcgggaaggcgaccgcctcgtggtcaaggtccacaaccacatcaactacaacgtcacgttccactggtgcgcancgggtgggcggacgggccgtccttcatcacgcagtgcccgatccggccggggcagagctacgcctacaacttccggatcattgggcagcgcggcacgctgtggtggcacgcgcacttctcctggctccgcgccacgctctacggcccgctcgtcatcctcccgccgctcggcgtcccctacc

SEQ ID NO: 21805 - DNA, 553 bp, Setaria italica
  misc_feature (534)..(553): n is a, c, g, or t
  Peptide Sequence Number=SeqID_87779
ccatccggttcttcgccgacaacccgggggtgtggctcatgcattgccacttcgacgttcacttgagctggggcctgtccatggcgtggctcgtcaacgacggcccgctgccgaatcagaagatgctacccccgccgtccgatctcccgaaatgctgatgactgatcgaatcgactgccgtcgtctgatcctttatcgtcggaggggcgtaggtgggcatttccggaaggttttggtgcatgtctgcgtatttttcttaccacgtttgaaacaattcggtttggactatttaattgctgtgtgccgattttgtggcaagtgtttggggtttcgctctccgcctaaaccctcttttgaaacagaataagatgtaacaatgttgcttctgctgttaatcttttgtttttaaccaatttctgaacattcagcgttgctctgtgcacacgctcgaaagcaatgatgtcagtatgtaaacctgtaatgacttatttttatactaccttaatctggtgccaaatttttttaacccccctnnnnnnnnnnnnnnnnnnnn

SEQ ID NO: 21806 - DNA, 644 bp, Setaria italica
  Peptide Sequence Number=SeqID_87780
aattagttgaccaaaggaagtagctagtcatcagccgtcgtcaagtgtctctccggctgatcgagagcttgaggaaaggcagcaatggctacctcctacatgcttctcccttactgcgtcctcgtcgctgtgctcgtcctgctcttctccgttgacgtggcggagggcgccattagggagtatcagttcgatgtgcaaatgacgagcgtgacgcggctgtgcagcagcaagagcatcgtgacggtgaacggcctgttcccggggccgacggtgttcgccagggaaggcgaccgcgtcgtcgtccgcgtcgtcaaccacgtacagtacaacgtctcgctccactggcacggcatccggcagctgcggacggggtgggcggacgggccggcgtacatcacgcagtgcccgatccagacggggcagagctacgtgtacaagttcaccgtcaccgggcagcgcggcacgctgtggtggcacgcgcacatctcctggctccgcgccaccgtctacgggcccatcgtcatcctacccaagccccggcgtccccctacccgttcccggcgccctacaacggaggtccccgtcactcttcggcgagtggtggaaggcggacacggaggcggtgatcagccaggcgctccaga

SEQ ID NO: 21807 - DNA, 600 bp, Setaria italica
  Peptide Sequence Number=SeqID_87781
taaccgtaaccgtacctaaccccgtacccttacgtacccgtaccttaacgtaccatcgccgtcgcgccatacaccaacaccgtcggcacgttcgacaacaccaccgccgtcgccgcgctcgagtacgcgccgcaggccgcgctccggggcctcccgctgccggcgctcccgctctacaacgacacgggcgccgtggccaacttctcggccaacttccggagcctcgcgagcgcgcagtaccccgcgcgcgtgccgcggacggtggaccgcaagttcttcttcgccgtcgggctcggcgccgacccgtgcccgagccgggtcaacggcacgtgccagggccccaacggcaccaagttcgcggcgtccatcaacaacaactccttcttccggccccggagcgcgctcctagaggcgcactaccagcggcgctacgccggcgtactgctggccaacttccccacgacgccgccgcaccccttcaactacacgggcacgccgcccaacaacacgttcgtgcagcacggcacccgggtggtgccgctcaggttcaacacctccgtggagcttgtgctgcaggggaccagcatccagggcgccgag

SEQ ID NO: 21808 - DNA, 461 bp, Setaria italica
  Peptide Sequence Number=SeqID_87782
ccaacgatccggccaagttcaacctcgtcgatcccgtcgagcgcaacaccgtcggcgtgcccgccggcggctgggtcgccatccgcttccgtgccgacaacccaggcgtgtggttcatgcattgtcacctggaggtgcacatgagctggggactgaaaatggcgtggctggtgcaggacgggagcctgccgaaccagaagcttccgcctccaccgtcggacctgccgcaatgctaggcacgaaatgaacgcgaccaagaccaatggatatgattgcaccatttcccaccaaaatcactgcttcgtttgctcgattagttgccattttgctattatacgatcgatcgtcttcgtcgtcgtatctcatcattatttccttattggtgtgtttttttaactaattgactattcctcaggcgactgaccatgtcagataagtgtttcctttttgttttcagcggc

SEQ ID NO: 21809 - DNA, 855 bp, Setaria italica
  Peptide Sequence Number=SeqID_87783
ccccttcctccctcccctccttccttccctccctccctccctcctccgccaccaccgccgccgccgccaacctccccatcttcgcgccgaccctgccgcagatcaacgacaccaacttcgtagccaactacaccgcgaggctccggagcctcgcgaccgccgcgtacccggccgccgtgccccagagcatcgaccgccgcttcttcttcaccgtggggctcggcacccacccgtgcgccgtcaacgggacctgccagggccccaacggatcccggttcgcggcggccgtcaacaacgtctcgttcgtgctccccacaacggcgctgctgcaggcgcacttcgccggcaggtccaacggtgtgtacaccaccgacttccccgccgtcccgctgatgccgttcaactacaccggcccgcctccgaacaacaccaacgtgatgaacgggaccagggtggtggcgctgccgttcggaaccaccgtcgagctggtgctgcaggacacgagcatcctcggcgccgagagccacccgctgcacctgcacggcttcaacttctacgtcgtcggccaggggttcggcaactttgaccccgtcaacgatccggccaagttcaacctcgtcgatcccgtcgagcgcaacaccgtcggcgtgccggccggtggctgggtagccatcaggttcttcgccgataatcccggtgagtaccacgcaagccagattgtggtcttgccattgcagtttctcgaatgttcgatgacaaagatactgaactcgtgttatggaaaaattacatcgcaggtgtctggttcatgcactgccatctggaggtagacaacaaacgaaaagaaaactaaaa

SEQ ID NO: 21810 - DNA, 1212 bp, Setaria italica
  Peptide Sequence Number=SeqID_87784
cacgcacctcatgctggcgcgcccctacggcacgggccagccgggcaccttcgacaacaccaccgtcgccgccgtgctcgagtacgcgccgccgggccacatcaagagcctcccgctcttccggccatcgctcccggcgctcaacgacacggcgttcgcggccaactacagcgccaggctccggagcctcgccaccccggactacccggccaacgtgccccggggcgtggaccggtccttcttcttcgccgtggggctcggcacgaacccgtgcccggcgaaccagacgtgccaggggcccaacgggagcatgttcacggcgtccatgaacaacgtgtccttcgacatgcccaccaccgcgctcctgcaggcgcactacaacaacatcgccggcgtgtacaccaccgacttccccgttgcgccgctggagccgttcaactacacgggcacgccgcctaacaacaccaacgtctccaacgggaccaaggtggtggtgctgcagtacaacacgagcgtggaagtggtgctgcaggacaccagcatcctcggcgccgagagccacccgctgcacctgcacggcttcgacttcttcgtggtcggccagggcttcggcaactatgactcgtccaaggacccggccaagttcaacctggtcgacccggtgcaaaggaacaccgtcggcgtgccggccggtggctgggtagccatcaggttcttcgccgataatcccggtgtctggttcatgcactgccatctggaggtgcacacgagctgggggttgaagatggcgtgggtggtcaacgacggcccgttgcctgagcagaagctgatgcctccgccggctgatcttcccatgtgttgaagatcagtcagtcgttgacattgacaaaattgtgattcatttttatacgtatgatttgcagatacttatcagtggagataaattgttgtcgtacatagctacaaaaaggttaagaaagcttgtgatttcctttttcaaaagaaagcttgtgacttttctatacattcttttctccattcttctaaaggtttaaaaggtttgttttgtgactgaaagaaatagtttaacttttgcatcatttctacatttagagtagtttgaaagcttttgctgtaattcgaactcaataaatagtttgagactcatgataaaggtgacccgttaatatatgtgttcgagattattattgt

SEQ ID NO: 21811 - DNA, 2149 bp, Setaria italica
  Peptide Sequence Number=SeqID_87785
cgatctccccgccgtccattgattcaaggatcgatcgaacacaagctaggaagcttgctaattcaacagcaatggccggcggtcgccgtctccggtgcctctcccctgcgtgcctctttctcgccgtggccgtggccctcctcgccatgccggggctcgccgccgcccgcacccgccgctacacgttcaatgtgacgatggcaacggtgacgcggctgtgcgcgacgaggagcatccccacggtgaacgggcggttcccggggcccaagatcgtcgtgcgcgagggcgaccgcctcatcgtccaggtccacaaccacatcaacaacaacgtctcgttccactggcacggcgtccggcagctgcgcaacgggtgggcggacgggccgtcgtacatcacgcagtgcccgatccagccggggcagagctacgcgtacgacttcaccatcacgggacagcggggcacgctgtggtggcacgcgcacttctcctggctgcgcgtccacctctatggcccgctcgtcatcctgcccaagcgcgccgagggatacccgttcccgcgaccatacaaggaggtgcccatcctcttcggtgaatggttcaacggcgacacggaggcgatcatcaaccaggccctgcagactggcggcgggccaaatgtctccgacgcctacaccttcaatgggcttccaggcccaacatataactgctcagcccaagacacgtacaagctgaaggtgcagcccgggaggacgtacatgctccggctcatcaactcggcgctcaacgacgagctcttcttcgcaatcgccaaccacaccctcaccgtcgtggaggcggacgccaactacgtgaagccgttcaccgtccagacgctcgtcatctcgccgggtcagaccatgaacgttctcctaacgacggccgccgccaacccagcctccccggcgtacgccatggccatctcgccctacaccaacaccgtcggcacgttcgacaacaccaccgccgtcgccgcgctcgagtacgcgccgcaggccgcgctccggggcctcccgctgccggcgctcccgctctacaacgacacgggcgccgtggccaacttctcggccaacttccggagcctcgcgagcgcgcagtaccccgcgcgcgtgccgcggacggtggaccgcaagttcttcttcgccgtcgggctcggcgccgacccgtgcccgagccgggtcaacgggacgtgccaggggcccaatggcaccaggttcgccgcgtccatgaacaacgtgtccttcaccatgcccaagacttccctcctccaggcgcactaccagcgccggtacagcggcgtgctcacggccaacttcccggcgatgccgccgatgacgttcaactacacgggcacgccgccgaacaacacgttcgtgacacacggcacccgggtggtgccgctcaggtacaacaccaccgtggaggtggtgctgcaggacaccagcatcctgggcgccgagagccacccgctgcacctgcacggctacgacttctacgtcgtcggcacggggttcggcaactacgacgccaacaacgacaccgccaagtacaacctcgtcgacccggtgcagcggaacaccatcagcgtgcccaccgccggatgggtcgccatccgcttcgtcgccgacaaccccggtgtctggatcatgcattgccacttggacgtccacttgagctggggtctggcaatggcgtggctcgtcaacgacgggccgctgccgaaccagaagctaccgcctccgccgtcggatatccccaagtgctgatacactctctgcaactgcaacaatgatctgcggcggttttgatccgtgcgtgcaacgcacgcgcgcgtatatgcaatttcgtttcgtggcgcggttggtcgaggagctcgctcaatcaatttggccgcggttttgtgatgatgcctgattttgttgctgcactgtcctcggagacaaaacaagaccgatgtgagaagtccattggatggctgttgtgtgattcttgttgctattctttgattccaccttttgttttcatgctgggcatttgctgttagtgtgtacagtgtatacggtataatatatcaatcaaccagctaatgattccttttatacaaaaaaaaaaa

SEQ ID NO: 21812 - DNA, 823 bp, Setaria italica
  Peptide Sequence Number=SeqID_87786
ccacaggctgggattatcatagaaagtactacaccaatttttgtcccccgcaagactcaatttttgagccatttggtagcaataaggggcagatattgccaaggactccgaggactcctgttgcagctgagtttgatggtgattcaagacttgaatcgcttccacttgatttgctgatcaagatcatgcgttgcttgcaccatgaccaattgaaggctgttttccatgtttccaaaaggattcgaaaagcagttgaactggccaggcagtaccatttcaactatactacaccagatcgaagcagacaggagttactcctgaacaagactcctcttccaacagagcattggcctttcttgagaatcgatggcaaagatgtgcgtgtttccaccccaaggacaccacgggccccaaaacatgctgctcgcctatcacgcctcaagctggttgatgtgaagccgatcacaactgttcttttccaggagtcttctacttttccttcaaagcgtctccgacgttcagtgccaccaggactgccaaggcctgtatccaaaactgcaccctcacctagagttttacgatacgaggaggagctttgcgaagcagtggcacagaataagcttctttgaagatccaacaagtgtattgctttcaatcaatagtgtatagtttatccgtgtcaagccccttggtacgaattttgtgtgccagctcctatctggcatcttagattattgtggtcaggtttaggttttagagtagtgttagactgccatataccgttttatgtcattagtacccagtttgctttattcgattggtt

SEQ ID NO: 21813 - DNA, 261 bp, Setaria italica
  Peptide Sequence Number=SeqID_87787
tctttttactacgtctacaagtatagttgctaacccagctccaggctagaagcaaacgtgaggcaggggtcggtctacgtaccatggcaggggtgcatgaacaagccgatgcgccgcacgtgatcgtgctcgccagccccggtgcggggcacgtcgtcccggtggcccagctcgcggcgcgcctcgccgcgcgccacgggttcaccgccacggtcgtcaccttcaccaacctgtcctcgcgggagcactccacggcgctcg

SEQ ID NO: 21814 - DNA, 1034 bp, Setaria italica
  Peptide Sequence Number=SeqID_87788
agtttaggtggcgtctatataagaaagcttcacaggttctttatctgcactttgcattgaagaggcgtgaatttcttgaggaattccaagaaaaagcaggagcaggtcaaagaatggctccaaaatttgggaattggggagcatatgccagtagtacatgatgaggatgaagctgatgatgtgaatgttcctccacaatctgatgataactccattagaaatagaaatgttccttcaagtgctgttttacctgtcattcgaccagctattggacgtcaaaattctatttctgatcgagcaaaagttgcaatgcaagaatatctgaaccatttcttggggaacttggatattgtcaattcacaggaggtttgcaaatttttggaggtgtcatgtttgtcatttttacctgagtatgggcctaagctaaaagaagactatgtttcagttggacatctaccaaagattcagaaggaccgtaaaaagcaatgttgttcatgcggattgtttaactgttgcaagagcaattggcaaaaggtttgggttgtcctgaagccaggattcttggctttgcttgaagatccttttgatccaaagcttttagatgtcattatttttgatgcgttgccgcatatggatataaatggagaaggccaaatttctttagcaaaagagatcaaagaacgtaacccactgcattttggattccaggtgtcttctggtggccggacaataaagctgcgcacaagaagctcttctaaggtcaaggattgggttactgcaataaatgctgctcgacaacctccagagggctggtgttatcctcatcgttttggctcatttgcaccaccaaggggtttgttggaagatgggagtatggtacaatggtttatagatggccaagctgcattcgaagccattgcgtcctccattgaggaagctaaatcagagatattcattactggctggtggctctgcccagagttgtatcttcgacgcccgttccaaaatcatggatcatccaggcttgacgctct

SEQ ID NO: 21815 - DNA, 1302 bp, Setaria italica
  misc_feature (1232)..(1302): n is a, c, g, or t
  Peptide Sequence Number=SeqID_87789
gggacccggccgttgcggctcaccaggaacgcgaccggcggcgcggcggcgaagatccgggcctcggcggacgcggcgcaggcggccaccttcagcggcgcggacgaggccgcggcgtgggccaagaaggacaaccggcgcttcctccacgtcgtctaccgcgtcggcgacctcgacaagacaatcaagttctacactgaatgcctgggtatgaagctgctgaggaagagggacatacccgaggagaagtacaccaacgcgttcctcgggtacgggcccgaggactcgcatttcgtcgtcgagctcacctacaattacggggtcgacaagtatgacatcggcgcaggtttcggccacttcggcattggagtcgacgatgtggccaagacagttgagctcgtcagagcaaagggaggcaaggtgaccagggagcccgggcccgtcaagggcggcacgaccgtgatcgccttcgtcgaggaccctaacggctacaagtttgagatccttgagaggccgggcactccagagcccttgtgccaggtgatgctccgcgtcggcgatctcgaccgcgccataagcttctacgagaaggcctgtggaatggagctgttacggaagagagataaccctgagtacaagtacacggtggccatgatgggttacggccctgaagagaagaacgcagtgctggagctgacctacaactatggcgtcaccgagtacgagaaggggaacggcatatgcgcagatcgcccttggcaccgacgatgtctacaagaccgcggaggtggtgaagctgttcggagggaaggtggtgcgggagccggggcccttgccggggatcaacaccaagatcacgtccatcctggaccctgatggctggaaatcggtgtttgttgataacattgactttgccaaggagctggagtagccatgaagagcgaaatgtttttgttcctctttgttcatcggctcataagtcatatataagcacacggtctcccctcgcggggcgctcttaagccttgcaaatagatcgtttctgaacaataagaaacagaggatactgagacagcggtggccccaattgagaagataccgaagaatgcaaagctaaggctatttagttcctacaggtctcgacactctaatttgttgtaacatatatagcgcatatgtcaaagcgtgaatgattaaattggggcagttttgttttgatttcaattaaaagnnnnnnnnnnnnnnnnnnnnnnnnnnnnnnnnnnnnnnnnnnnnnnnnnnnnnnnnnnnnnnnnnnnnnnn

SEQ ID NO: 21816 - DNA, 416 bp, Setaria italica
  Peptide Sequence Number=SeqID_87790
cttctcgatttgtgtgggccaatttggaccaagcgaatgtggatcagattgaacagcaactgcaaaatcttgcaaggttgtagaataacccagatttggttgttgcaagccattcattctaccagtaaacttctcattgactttaccaattcttctactgctggctctcactcttgacaaatccatgcacggcttaatcaaccttctcaagaactcatctaatccacgattcaaagcatcaacaccctgcaccgtcactccaatgccatcactgtgcaaccttctcttcaacccctcgcacaaagtagccgtgtccagcaaatggccagaatcatagcacgacggcgccggatcatccatcctcctccgcatcctcagaccactgcctccctgccacagagatccccaatggcgcc

SEQ ID NO: 21817 - DNA, 1180 bp, Setaria italica
  Peptide Sequence Number=SeqID_87791
ctcgtatgatgctttgattgctgaagattacatgagaaggaatcagtgtctggtcgagactataatatggttgttgccgtctgataagagctctggttgttcttgcagatttctcttgaaactgttgaaagttgctatattagttggagcgcagggagcatgtgaaggaagagcttatgagaaggatcagtttccagttgcacaaagctactgttaaggacctcttattacctgctgcttcgcctaatgatggtacatatgatgttcagttggttcataatcttgtccagagatttgttgcaagaactgcactatctcataatggtggtttcgttgagaagtctgatgaaaagatgattgagctcaactttgaacaagagtcaactttgtcggtaggagagcttgttgatggctatctatctgaagtagcttcagatccagacctttcattgtctacatttgttgaggtagcaacagctgtgccagaagcagctagacctattcatgatggcctgtattatgcggtcgatgcatatctcaaggaacacccagacataagtaaaactgacaagaagaagatttgcagtctggtggatgtcaagaagctctccacagatgcatcgatgcacgccacgcaaaacgaccgcctgccgctccggttggtggtacaggtcctcttctttcagcagctgagggctggtgcaagcaaagaactcgccctgaccgatgatggaggacacgcttgcacacggcctatgccagatcaatgtgacccttgtgaaaggcggataccaaagcatccgaactcactgaataagcaggtgacaagcctgagcgcaagggaaagcgatcaccaccgtatcagcgagcacaggggcagtaggaacagcttcaaggaccagctgggaggcctcctgctgcagtcgcggtccaggaggatcttcgacaagctgtggagcagcaaggggcagggtgagcatggcggtggcaaaggctcagagacgtctggcagctcgcagagcccgccattgtccgcaaagcccgccgaagtgaagccctcccctcttcccccctcttaggaaccaggaggtactctgtttcataggttttttttggctctcctaggttagctctgggttaggttgttgtacagaagaaggaagctaatcagctgctgctc

SEQ ID NO: 21818 - DNA, 266 bp, Setaria italica
  Peptide Sequence Number=SeqID_87792
aagacgggacaagcatggaataggtttggggtcgtcggcgtgctgcgcctccgccggaggaagacgacgaggtcgagaggtccagatccgccaaggccaagaacgaccccctctccgtctacgaggccacactgctgaagctgcgacatggctcggtacaagcttttacagcggcccagccggatgatggcacgaatggaggcggtgatgatggagctgctggtgctcaaagcaaggaagcaaaactaaaggaagggaaggcacct

SEQ ID NO: 21819 - DNA, 305 bp, Setaria italica
  Peptide Sequence Number=SeqID_87793
gcgacgccagctccagctcgtccatctccgcgcccgccgggaaccccagcgccggcttctcagcccccatcatctgcgagccgcggcccgaatcaaaggaccgcgccggcggatccgcgcaatgcagaggcggccgggctccctccctctcccaagtggcgaaggagcgccgagcactggggcacggcggatcgatcaggctcgcgagaccagatgctgggagaagaaggaggaggaacaagagcgcgattgggttgggattcggacgcgcgcgcccgaatcggtgatcgaatcttccgctcacg

SEQ ID NO: 21820 - DNA, 306 bp, Setaria italica
  Peptide Sequence Number=SeqID_87794
tatattctgaaatgtttacccaactgtttcatctcttttctttttatttagaactttaattgtttacttccagtatactctagaacttccttctgctctatatatacattaccatgtttttctagtttatgtatgtggctttagcttaaatgaataagaacatatcaataggttttattttgtgtccttgtagtttaattatttggaaccatttctctattgtgttctatctgtagagcaatggaacttttagtaccaaataaccatgcatcgaaccactaggaaacaaatgaacatcgtcatgca

SEQ ID NO: 21821 - DNA, 893 bp, Setaria italica
  Peptide Sequence Number=SeqID_87795
acgtgccgcgcggcgtggtgatgggcggtcatcgggcccagcggcagcggcaagtccacgctgctccgcgcgctcaaccgcctctgggagccggcccccggcgccgtccttctcgacggcgccgacatccgcggcatcgacgtcctagcgctccggcgcagggtcggcatgctcttccagctccccgccatgttcgacggaaccgtggcggacaacgtgcgctacgggccgcagctgcgcggcaagaagctcacggaagccgaagtgaagaatctgctgagcatggccgatctggaccctgctctgtcctccaagccggcctccgagctgtccgtcggccaggcgcagcgcgtcgccttggcccggaccctcgccaacgaccccgaggtgctgctgctggacgagccgacgagcgcgctggaccccatctccacgcagaacatcgaggaggcgatcgtgcggctgaagaaggcgagggggctcaccacggtgctcgtctcccacagcgtgaagcagatccagcgcatcgccgacctggtgtgcctcgtcgtctccggcgagatcgtcgaggtgctcgcgccgtccgagctgtccggcgccaagcaccccatggccaggcgcttcttggagctcagcaactgatggcccggccgtcgagtccatttgctccgagtaagaggaaggagtacatgtgaactcggatttgtaactgtaatcctgatctgcaatgttttcaagtgtacactctctgaaagtaaacatgtgtacaagaagtacctttcttcgatagctaagatagctaagagtaagagacaaaagttaagtgaattgaccggtcatcctaatagaaagagtcaacagttactcgtcttgcgacatgtacaaaaaaaaaa

SEQ ID NO: 21822 - DNA, 1185 bp, Setaria italica
  Peptide Sequence Number=SeqID_87796
ctctccccaaggctatcgaaccagatgaacctggaggcagcagtggaagccgctgcggcgttcttgaacaaagctgtcaagccagtgcttgttggtggaccaaagatgagggtttccaaagcatgcaaagcctttgtagagctggcagatgcctgcggttatccggttgcggtgatgccttctgcaaaggggcttgtgccggagcaccactctaggtttatcggcacatactggggtgcagtgagcactccgttctgtgctgagattgtcgagtctgctgatgcctatctatttgctggtcccatattcaacgactacagctcagttggatactcgctgctcctgaagaaggaaaaggctatcatggtccaaccagagcgggtagttattggacatggccctgcttttgggtgtgttctgatgaaggatttcctgcatgcacttgcaacccgtctgaagaagaataccgctgcatatgagaactatcgtcgaatttatgtgcctccaggcgagccactttcatctgaacctggagaaccattgagagtgaacatactcttcaagcatattcaggcaatgttgtctggcaactcggctatcattgcagagacaggggactcatggtttaactgccagaagctgaagctacctgaaggatgtggatacgaatttcagatgcaatatggatcaattggctggtcagtgggtgcaactttgggatatgcccaggctgctaaggataagcgtgtcattgcatgtattggagatggcagttttcaggtgacggtacaagaggtgtcaacgatgcttcgatgggggcaaaacagcatcatctttctgataaacaatggaggatacaccatcgaggtggagatccatgatggtccttacaatgttatcaagaactggaactacactggtttggtggaagctttccacaatggcgagggaaagtgctacacagcaaaggttcgaactgaggaggagctgaaggaggcactgaaggcagctctgggacctaaaaaggactgcttgtgtttcatagaggtcatcgtgcacaaggatgacaccagcaaagagctcctcgagtggggatctagggtttctgcagcaaatagccgtccaccgaatcctcagtgagcacatcagctcctgaattgcacgggaaatggtcctcattgtgtt

SEQ ID NO: 21823 - DNA, 259 bp, Setaria italica
  Peptide Sequence Number=SeqID_87797
tatctcaaatttggactcatctgagtggaggcttgacctgataagagtcgtcgtgtggaggcttgacctggcaagagttccagtgctgcacagacatcctctatcagaagctcatggttcagaaataatcttctaccagaagccaagaaagcaacagggctggctgcagtccacaggctaatcgcgcaggctggcggcggccgccgccggcgtggatcctcgcagctacagaccacctgctacaacaagcagcagccta

SEQ ID NO: 21824 - DNA, 482 bp, Setaria italica
  misc_feature (439)..(439): n is a, c, g, or t
  Peptide Sequence Number=SeqID_87798
cagccattgcaataccatggaatggccagaaaccaagcaacccagtttctttggcctctcaaattttgccaccacaaggtgataatttctggtgcatgagtaaggctgtcaagtgcaattcaagccgcagtgaagattctgccattaacaattttgtgtcaagatttgctcctggcattttcaatttgaatcaggagttctccactgagtccacttgcaggagttcagctacctggccagaggagattctgccttctcactcaattcgtgcaattttggatgagtcacagtacaagttcctaaggaactgtttccagagcacatcaaaactcttggggtcaagtgatagttactgcaggatgggatggcaagattaggtcattccagaattatggcttaccagctcatcagtgatcagcttgagcatttggtgaaagtntacggcagttttggcacctcacatggcctgaagagaagtgccc

SEQ ID NO: 21825 - DNA, 599 bp, Setaria italica
  misc_feature (483)..(483): n is a, c, g, or t
  Peptide Sequence Number=SeqID_87799
tacctaacttagtaagttaccaacttagacaaggaagttacaagactaacctggccagaggagattctgccttctcactcaattcgtgcaattttggatgagtcacagtacaagttcctaaggaactgtttccagagcacatcaaactcttggggtcaagtgatagttactgcaggatgggatggcaagattaggtcattccagaattatggcttaccagctcatcagtgatcagcttgagcatttggtgaaagtatacggcagttttggcacctcacatggcctgaagagaagtgcccgctccccagctatgctggtccagcgtgtggtttctggtacaagacatcacatgctcagtgctcctgctgaattgacatggacaaatgttgtacataatcaacccggtggtccttcgagatctctgcatcagcggttgttcatggcaggaaccgtagattgtaccttttgtagaaaaattttagngtagatcagatttgttcttcccccttatcaattgctcattgatataccacaaaaaatgttagtttcagctggtattgcgggagctcgactgggaactgtcagatacatgtccaaat

SEQ ID NO: 21826 - DNA, 180 bp, Setaria italica
  Peptide Sequence Number=SeqID_87800
tggagtgactggtaccaatgaacggtgcacgctcatagttagtaatttgaatattgaatgtctagctggcagcaaccatcatatatgtttcttccatgcaaagaaccaaatgcttcgacagcttcttggcgcgagtgatactggataagagcttgaaaaccagctgacttttgaaatgtg

SEQ ID NO: 21827 - DNA, 375 bp, Setaria italica
  Peptide Sequence Number=SeqID_87801
gggatgagaattgcatgtatacattcttccccttacactaggttgaacagaactgtaatattgcagagctgtcacggaggcatgtatgtcttccatctgcagaagagcttggttcttggcacgcagcatgacgatcttggataccagcccaaacggctgcagcagctggagtaaatcagactcggcaatctcgtgcccgacgttgcggatgtggattaccttggacggctcagccatcctcccgcactggtgggtgatcgtcgccggcgaagggcccggtacagtcgagggaagggcgccgccgctcgcccagtcgtcgccgccaggaaaggaaggccacgagggagggggagagggagaaggcacaacgacgga

SEQ ID NO: 21828 - DNA, 907 bp, Setaria italica
  Peptide Sequence Number=SeqID_87802
ggggtactttgagtagttaacttcgagtttcttcccaaaaagaattgcacccttcagatagtgcacagctagctcagcctgcaaaccatcagccatctcaactagggcatgatctggtttattacgcaatattttgattcgtactatgtttccatacaaagaaaacagattgaaaagcttatcctcatcaattttctgcacagagtagggaatgattaaagatagtagtttgaaggtctaaacttcgcggtagtacttaaaacttctgcctatttcataaaataagctttaaagtacatgaactcaccgaccaccaatataagctatttgaaagagtacttaaactaacacaaagtaacaaaaaggacttgcactagcttatatttgatgatagcagataggagaaaactcgaaaaaaatcaaaacagctcaagacttacatcagtgttcaaattactaactatgagcgtgcaccgttcattggtaccagtcactccatgaggtaaagttccaccaaatgcagctgcaatcattgcagcccttcccatctgtgcgtatgaagctccaggttgttggaaggcatagagaccagctggatcaggataaccttgctgagaggtcctaggacgttgttctgtaggcaatgatggatttgtaaaatccctagaccggtcattgttgtagtggacttgcagttcgctgaggtttgaatattgaatgtctagctggcagcaaccatcatatatgtttcttccctgggatattgtgtttgttaagaacagagtaatatcaaatatagatgcacaattcaaggacattagtatcatataacattacatgcaaagaaccaaatgcttcgacagcttcttggcgcgagtgatactggataagagcttgaaaacctgca

SEQ ID NO: 21829 - DNA, 2118 bp, Setaria italica
  Peptide Sequence Number=SeqID_87803
ttaaaccggaaaataaacgtaaagttaacccctaaccaaagtagtaagaactaaggacgtagttgacgaacaacggttattccggtattcgttgtttttcctagttgttgtcttggtcgttgtttcgactacgagggcctttgttaaaaccaacacagaacatctatttcgtggggcctcaaggcgataagagatgatccgcacacaataaacaggcctttcaactcagaatagcacgacatgaagggggtaaaatcctttgataacctaaacgacagaacaggaaagaaacagaagagaaaccccttggtgcaaaggccagtgtcactagaaatgttggtacaactcagacagcatcagtctgggagaacagcacataggattcacatttagtttcaaatgcttcctaaataaaagctcgcaagggccaagagagcggcttaagacctttccctggaagagcggcttatatactctgcatctgggagaacgagatccggatcgtgttcccctccagtgtgctggcgtgtttcgacacgagggcctcggtcgcctcctcttccgtctcaaacatgacaagagcctgcctcttgccgttcacctcgaacagctttgtgttgatgacagaaccatgctcagacacgtggttcaggattgcttcctcagtgatctcttgtgggagggcagaaatgtggatcatctttgttggagcacagcaatgtcggtagttctttaccacattgctgttgaaccggttaaggcttgaatttaagtagtcatgagcgtcaggggcaggagtgatgttggggtactttgagtagttaacttcgagtttcttcccaaaaagaattgcacccttcagatagtgcacagctagctcagcctgcaaaccatcagccatctcaactagggcatgatctggtttattacgcaatattttgattcgtactatgtttccatacaaagaaaacagattgaaaagcttatcctcatcaattttatcagtgttcaaattactaactatgagcgtgcaccgttcattggtaccagtcactccatgaggtaaagttccaccaaatgcagctgcaatcattgcagcccttcccatctgtgcgtatgaagctccaggttgttggaaggcatagagaccagctggatcaggataaccttgctgagaggtcctaggacgttgttctgtaggcaatgatggatttgtaaaatccctagaccggtcattgttgtagtggacttgcagttcgctgaggtttgaatattgaatgtctagctggcagcaaccatcatatatgtttcttccatgcaaagaaccaaatgcttcgacagcttcttggcgcgagtgatactggataagagcttgaaaaccagctgacttttgaaatgtgactatcttctccacaaatccataagctttgaatacttgatgtagaacctccaccgttataggatagatcatgtggtggatagtaactaagaggattcggttgggttcagactcctgatcagaattccttccatgagaactctggtctgtggtaagttcttggtgggatgagaattgcatgtatacattccttccccttacactaggttgaacagaactgtaatattgcagagctgtcacggaggcatgtatgtcttccatctgcagaagagcttggttcttggcacgcagcatgacgatcttggataccagcccaaacggctgcagcagctggagtaaatcagactcggcaatctcgtgcccgacgttgcggatgtggattaccttggacggctcagccatcctcccgcactgtaacacatgcagcagttgctcttggaagtctttggttgggtattgtagaagttcttagtttaaaatcaacaccaggggggcacccagtatagaacatgggtgtacacatgcagacccgataatttttgccaaaaaaatcgaagttagaaggtataatacatgtatataatcgtaacagcgtcagatccaaatacacatagcttacattaggtttgggtgctccgctgcgcacagcaagaaggaagggggaggggggggcggacgatacctggtgggtgatcgtcgccggcgaagggcccggtaca

SEQ ID NO: 21830 - DNA, 792 bp, Setaria italica
  Peptide Sequence Number=SeqID_87804
tgcgccgcgacggcgaggaggactgggaggaggtcgtcgcagcgggggcgaggcctggtattgccggcttccgcggggaggccacggaggagcagggggttgtgttcggggccccgcctaccgacgacgaggtctgcgccgccgttgccagcatcaagcaggtgtttgagaaaccttctgatgtggattctgatgcgcctgagctaacgcttgcgctgcccatgtcagggcacccttcatgtggattaattgttaatcattttgctctagattctggtgcatctgaggtcggatcagatgagtggactgaacctgctatgctcgttcgtaactcaagtgctcttttgacaaaggaacacgggagtgtactggatgcactccgcctattgcatgaagacccttcggttcagaaaatggttatggccttgtcaaaagataaggctgtatggcatgctgtgatggagaacgaggtggtacaagaattcaagagatccttccaggatgccaaggaaactgatctcaatggacggtctactgctcctcctggattcatgatgtgggtcctggaaaacacccaagcgaaaatcaaggaattccttgagaaaatacttgggctcgtgaacatgctcttccaatccggggacaaggactacgatatgtctgatgatatagtgaggatgtccttcatgctctctgtgtttgtcttcatcgtggtcactattgctcgtatacactgagcacagcaattcgtcgacttcgcgtactggtggtttcttacttttgtacaggatt

SEQ ID NO: 21831 - DNA, 1960 bp, Setaria italica
  Peptide Sequence Number=SeqID_87805
agttctcttttagtttttttttttttttttttttgttcctgggataatgatattagaaggtatgcagatgaacattgccttacacggctttgcttattcttgatcaaatgtcgcagcgcaatggctccatgctcattggacattgccttacacagccatagccatttcacaatcaatcaatatcgccgatggctcgatgcatgctacgactctacgaggcagcagctgttggtgtctccggcacgccgttggcggcctcctccgcggagcggatggcctccaggagctcgcgctgggccgtcttgggctcgccgttggcggcggcctcctccgcggagcggatggcctcccggaggtcgcgctgggtggcggcgcgcgacggcgaggcgatcatgtcctcccagatggagcgtgagccgcaggtggtggtgccgtcggggtagaggtcgtggacggaggtggcgtcctcgttcagcctgctcaccttctccaggcagtcgatctcccccggctccaccagcaggctgctgttgatgccgtccttccacgcgataagctgcgcggatcccatggagttggtgctgtagagcctggcgccgtcgacgaggcggctgtacctccggaacgcggcggcgaagcgcttgtgcgactgcagctgggacctgaccctgacggcccgcctggtgatgatggccctccggatccccctggccacggcgaggtacgcgtcgcagaccacgccgacgacctcgatccggtagggcttcctgcttgcccccggcggcggcgcgccgctgccggcgtcatcgtccacctcccagtagctctcggtgacggtgccgtcgtccccgaccttgtagccgacgcccatgcggtagcgctggcggtgcacggcgcgcgccatggcgatggtctgctcgacgaagggctcccacgacagcgtgccgtccaggatcacgtcccgcccctcgttcagcgccgtcaccagcagcgacgacgccgcgtccgtcgacgactggtgcacgagctctgcggtctggagcatgtcgttatggtgccccatggagctgatggcgcggtagatgacgtccgtctccttgaacgcgtccgcctccaccaccacggcgttcccctgatccgcgttgctccagagcgcctcccgcttgatctccatgagcaccgtgctcttgccggcgcccatcccgccgcccatcagcagcagcaccgggctccggtccgagtgcgccacgggggccatcacgtccgtgcactgcgccgcctcctcgccgttcgtcgtcgccgcgatgccgatcgccttcatctcctccaccagtgtcgcgaacacccgcgtcaccttcaggtcacgcgtcacgcgcgcgaaccgctgcttccttgttgcttccatgaacacgttcctcaacttctttgtgctaccgctgtccacggtcagggccgagctgatgagataggtagcatggtcccagtggaacgcaaaatatccgaggatgcatttgtccagctcctctatgaagttgacataaagggactcggcatccttgacattcgcgaagaacccgtaaatgtcctccatgcaattcttgctgctcctgaggtagttgttcgccaatttgcagagctgtgggcactcattgatatcctcgaaccccatctgcctagcgacgtagtgcgagaacttctcgaggtcctccaagcgcccggactgggccacctggagcctgggcatttcggccatgaccgcgggcacctcctccttctttcccaccccgagccggcgccgcaccagggcggcggcggcggtcgcgacggcgccggctgtggacagcgcggcgacgtggagcaacagcgccctggcgagcccaccaccatctctggccatggcggacggtgctccactcagctcccgggacgggggaggatcggaatcggttggggggaacgg

SEQ ID NO: 21832 - DNA, 216 bp, Setaria italica
  Peptide Sequence Number=SeqID_87806
ttgagaacacactctagagcttgcacatagttttttaaaataccaaaaattgggtcgatacacattaaattttgcttatgtggacaattcaccctttaagatgctttaatcatgggaaacatcttggtataaactagtgtcataaattatatgagcttgctgcctgaaattgtgaaataggaacatggtttgagataattcacccaaggcaattac

SEQ ID NO: 21833 - DNA, 265 bp, Setaria italica
  Peptide Sequence Number=SeqID_87807
cgcgacctcagatcacgcgaagccagggggggaagaataatggcgcagctggtggagacgtacgcgtgctcgccggcgacggagcgcggccgtgggatcctcctggcaggggaccccaagacggactcgatcgcctactgcaccggccgcagcgtcatcatccgccgcctcgacgcgcccctcgactgctgggcctaccaggaccacgcctaccccaccaccgtcgcccgcttctcccccaacggcgagtgggtcgcctccgccg

SEQ ID NO: 21834 - DNA, 808 bp, Setaria italica
  Peptide Sequence Number=SeqID_87808
ctgaaaactgaatgtgttctcggcagctgcccatcttgtgtttctgtctgactttcaacaacatcataaatgtcaccttctgcaggatgctcattggagtgtggttcatctggatcaatgttcaagaagctaacaatatttgtgactgcctggtttccaaatgactgaacttgggagacaccatcaccaatcaattgtacagctgattttagtgggttttccttaggttgtccccttgccttctcccatttggataaattataattaactttttcatcactctcctcaaactcagtgatctcaggtgtcgaacccagggaatttctaatattatcagtgagcacaaattcgtcacttctccccctgattggtgatctcatagtatcagatgagtgctggaacatcaaatctctcatgttcttctgtgtatctgctatagaaaattcaaaggactctgctgactctgtgcttccaatcttatcttgctttgttggtgatccagtctcattatcttcatgtagggtatcagtatcgctatacagcttagtattcctcctccgcctcaggccctcattgtgtgatgtatcatttattggcgtgaaagagttcattctgttaagctgactttgtaaattgtacatctcagacttcatcctctccacttgcatgttccgctgacgtttatgctcctcagacctgcgaagatgctgcagctgctcggttttctttaaagctttttttcctgctcgcggaccatagcaccaatttgctctgcttcaaggtatcttgacacataatcaaactcacc

SEQ ID NO: 21835 - DNA, 222 bp, Setaria italica
  Peptide Sequence Number=SeqID_87809
ccgacgagaccatagacaacacgctctagccgcaggagcgcatcaaccaccgcccgtcgtactggtccagcggcggcgaggttgaccccgacgtgccggagagcctcacctacaggctaaactctgatatctgcatcattgatgaggtcaggatacggccgttcaaagctttctttcagattggcgatcctatctactcttcaaaggcggtgcgaattcggc

SEQ ID NO: 21836 - DNA, 1444 bp, Setaria italica
  misc_feature (1423)..(1444): n is a, c, g, or t
  Peptide Sequence Number=SeqID_87810
cggacttggattgatttcttcttccctcggtggaagatacttgggttagtcagagcatagaacaagggtggatttcgattgattttccataggatggaatccttgtggaagctggcctacttgcttgagcctgcatcacttgctctcattgccacagccatttctgtggcgtatgcatcggcgtcgcgtgctctggactatggcaaggagatggagaggaacttggatttttcagaggcttccattacattggatcggtcgcaggctctaatgattccccttgcaagctcatgcagtctgctgctgatgttctacctgttctcatctgtctcgcatctcatgaccgcttttaccactgtggcctcagcgatggcactgttcttttgcctgtctccgtacatcacctacctcaagacgcaattcaatctgatggatccgttcgtgtccaggtgttgttcaaagtcgtttacccggttgcaaggtttgctgatgctcttttgcataaccacagtgttagcctggctggtttcagggcattggttgttaaataatgtcctggggatttccatatgtatagcatttgtcagccatgtgaggcttcccaacataaagatttgtgcgttgctcctggtctgcttgtttgtgtatgatattttttgggtgttcttctcagagaggttttttggagcaaatgttatggtctcagttgccactcagaaggcatctaatcctgttcatacagtagcaaacaagcttagtctgcctgggttgcagttaattacaaagaagctggagcttccagtcaagctagttttcccgaggaatttgttgggtgggattgttccaggaagcagtcctggtgattacatgatgcttggccttggagacatggccattccagggatgcttctagcccttgtactcttcttcgacaaccggaagcacaaagatgtgaacgttccatcagatgtgtcttcttcaaagcggcgaaactatgtgtggtatgccctaacagggtatggtgtaggcctggtagctgcattagctgctgggatcttgtctcagtctccccagcctgccttactctacctggtgccatcgacgctggggcctgtcatgtacttgtcatggttacggaacgagctgtgggagctgtgggaagggtccgggccgattctaaacgagaaagctcgtttgttggaggtatgagatccaagggggccctaaaaaatcggagcccacgatgatgtaatctaatttaacattacttcagctcctcatgctgaaggagagtatttataagcttagaatggtgtagtaatgtaagcttttaccctgctgtcctcgcaagaggaaaccacagatgtatcactttgactgcttgtaatagaaaggttcaatgtgtttcagctttacaaaaaannnnnnnnnnnnnnnnnnnnnn

SEQ ID NO: 21837 - DNA, 577 bp, Setaria italica
  Peptide Sequence Number=SeqID_87811
ccaatttggagattgatgagaagcgtgtctcactcggaccgtccaacattgtgctccgtggttgtgaactcaagaacacgacgtgggcaataggggtcgtggtatatgctgggaaggagaccaaggccatgctaaatagctcaggggcaccgtcaaagcggagtcgcttggaaacacagctaaatcgggagactgtcatattgtccattatgcttattgggatgtgcacaactgcatctgtgcttgctgggatttgggtgctgaatcaccagggggagttggagttcacccaattcttcagggagaaggattacacgactgggaaaaactacaattactatggtgtggggatgcagatattcattacattcctcatggcagtgatagtgtatcaggtcatcatcccaatctcattgtacatatcaatggagttggtaaggcttggacaggcatatttcatgggtgctgataaggacctgtatgacgagtcatcaaggtcaaagttccagtgcagggctttgaatataaatgaggatttggggcagataaggtatgtattctctgacaagaacaagga

SEQ ID NO: 21838 - DNA, 364 bp, Setaria italica
  Peptide Sequence Number=SeqID_87812
gggagcggcagcgggagcgagaacacggacgcggagccgtcgtcatccgctgcggccgccgccgggtcgacggtggccgcgccgacgaggcgtagcatctcggcgagggacgggttccgacccctctccctcgccggcggggcgccggcaccggggcgaggccaggaacgggaggcggtcgtgcacggcttgcgccatcgcatgcaacgcaagcagctagcctcgatcggcctagcttaagtactacgtgctgccgcgctgcactttctctgcccactggcgcaaaagcgaagccgagtttaagtaaggagctacgaggagtgtggctttcaggacaggagaggacgaggaagccggtgagggt

SEQ ID NO: 21839 - DNA, 269 bp, Setaria italica
  Peptide Sequence Number=SeqID_87813
gtaccgccgcgacttgcgcaggaagctgaagatcgggcagaagaacgacttgcctcccatggaggcggcggcggtgcggcagggcaagctctcttcgtgtagagctagctaccttgtcgtgtcctccttgacttcctctagatcttccgcctctcttctagagaaatctctgcgagctaggacaagcacggcaagtttagtgagagaagaagctgaggtgtgctgattagcggctaattaagtgatcttgcttgatggacactgatgtg

SEQ ID NO: 21840 - DNA, 858 bp, Setaria italica
  Peptide Sequence Number=SeqID_87814
ccctcctcttctctgcgcccaagagaagaagaaaaactaatcgcgattagttgacgtgatttgaggaggaggaggaggggattattaaccgatactagtttcttggattatcctgtggatcgataggcgcaggcgcgtggcgatgatgcggcagggggccaggaatttcgcgaggaggttctcccggctcgccgcggcggccgagacggcggcggcgccggccgtgccgagaatgccggcgttcgaccacgtgccgctgccctacgacgggccgagcgccgccgagatcgcccgcaagcgcgccgagtacctcagcccgtccctgttccacttctactccaagcctctgaacatcgtggaggggaagaggcagtacctgtacgacgagcacggccggcgctacctggatgcgttcgccggcatcgccaccgtgtgctgcggtcactgccaccctgacgtcgtggacgcgatcaccgcgcaggccgggcgcctgcagcactccacggtgctctacctcaaccatgccatcgccgacttcgccgaggcgctggcctccaagctgcccggcgatcttaaggtcgtcttcttgaccaactctggcacggaggcgaacgagctcgccatcctgatggcgcggctgtacaccggctcccacgacatcatatccctccgcaactcctaccacgggaacgccgccggcaccatgggcgccaccgcgcagaagaactggaagttcaacgtcatccagactggcgtgcaccacgccgttaacccggacccctacagaggcgccttcggctccgacgctgagaagtacgtgcgcgacgtgcaggagatcatcgagttcggcaccaccgg

SEQ ID NO: 21841 - DNA, 629 bp, Setaria italica
  Peptide Sequence Number=SeqID_87815
tcatggcgagatcactggctggcttgctcgagaacaccccgctctagtttcgcaaggtttggcaaccgggcgcgaggagagatgggtctcgccggcggcattgtccgaagggtcttctccaagagcccgtgctcgtcggccggcagcggacgtgcccacagtgagaagggcgctgcagatcaccggagaagatggagctctctccgactgtacctatgcggcgacgagatgaatgcagccccagaagatgacgacgacgagactctctccgtcaagagcttcgagacctgcgtgatgccgcaggaggcgcacgtcccagtggctcaaccaagcgacgtgcacaatgccgatgacaacactggggagcctgaagatcagagggtccccggcgagcatagccacattgttgcgccaacagagccggccgagaaggaaggagcggcaacgctgatccagtctgcattcagaggattcatggcgaggagggacctgcaggagctgaggaaacgcaaagaaatggacggcggcgccgacgagcccaggagccccacttcggtgtctgttgcgacgtcggtggtagtccaggtaggcgagtcggtgagcaacctccggctaagcggcgaggacag

SEQ ID NO: 21842 - DNA, 550 bp, Setaria italica
  Peptide Sequence Number=SeqID_87816
taggtgagaacaaaatatcaggccccataccgaaatcatttgctaatttaacaagcataaagcattttcacatgaacaataactcactaagtgggcaaatcccatctgagctgtctaaattgccttcactccttcatcttcttgttgacaacaataatttatctgggcctcttcccccaaaattagcggaagcacaaagtttggagatacttcaggctgataacaacaacttcagtggaagctctatccctgctgaatacagcaacatacgaacacttctaaagctgagtcttaggaactgcagtttgcaaggagctgttcccgacatgagtggcatacccaaatttggctacttggatgttagctggaaccaattgaaaggatctataccaactaataggcttgcttcaactatcactacaattgatttgtcacataactttcttgatggaaccattccaccaaacttctcagggctacctaaccttcagttattgtcagtcaatgggaacctcttaaatggttctgttccaccgacaatttggagcaa

SEQ ID NO: 21843 - DNA, 292 bp, Setaria italica
  Peptide Sequence Number=SeqID_87817
gaccatagctagcacctggaggatgggggcagcgaggggaccatggactttcctcaggaagtgatggtggattggcttcagagatgatctgcggcacgatgctgatagataggctgcgcatgcgcgcctcgtgtaaaatcagcatagtatagtatgtgtcgtgttggtgttcaagcttcggacatcgaagttagatggagccattgcttcctgatcgttgacgtgaggggagagtttacgcttgcccctgtgattcatgatgttgtagtacgccactgatggcagtttaata

SEQ ID NO: 21844 - DNA, 560 bp, Setaria italica
  Peptide Sequence Number=SeqID_87818
acgagcgcccaactttgctccagccaagagattttgtttccggaccttacccaattcctggacgaggtattccaacgtgcagagatcaaatggcacgataacacggtaaactttgccagggtacttgtgctcgaagtagtccttgagcggggtcctgtctgcagccaacgtcttggggatgccctggatcattatggtgaagacggccacggagctggaattggggtcgctggggttgccgttgccgtcgcggaagcgtgtgatgcggagcgcgtcctccatccgggagatgccgaggtgggcgatggcgacgacggcggcggtgaggaggaggtggagccagaggagcggtgaagacttggggatgtgcgagatggtcgtggtggcgaattggtcgatgatggcggcgtcccccgcaaggaggttgagcgggagggccgccacgacggccgcaccggcgacggcggcgaggataaggaaggaggcgcgctcgaagaggaggaactgggcggcgtcggcgccgcagtggagcgcgatctgcggcgcttgttggtcgttgt

SEQ ID NO: 21845 - DNA, 443 bp, Setaria italica
  misc_feature (415)..(443): n is a, c, g, or t
  Peptide Sequence Number=SeqID_87819
ttccgttgggtacgtacggtcgccactggcatgacgggtccgtggggcgacatcgccggcggcctcgagcccagctggccaccgccggggaactgatcgtggcagccggtcgccgttgtgaggctccggttttagcagtgcggcctcatcatcaggttcaggtagctagtgcttcaaagttcctagtatgcagtatgttttgatgagctatatatccagctaggaatgcaagcagctcaattctcctgtggtttcgctgtttcttctcgtccttgtaacgaaatgaaatggtggcaagtagttaggtcggtggatcatgatctgtagctgcctggagggaggattataagatctgtgcagtgattattgtgacaataaaattaagtttgtgtacaaaaaaaaaaaaaaaaaaaannnnnnnnnnnnnnnnnnnnnnnnnnnnn

SEQ ID NO: 21846 - DNA, 384 bp, Setaria italica
  Peptide Sequence Number=SeqID_87820
cccccggatgaggaggaggagaagcggggaggacggaagggggtgccatggcggatgacgctgagcctggcgtaccagagcctgggcgtggtgtacggcgacctcagcacgtcgccgctgtacgtgtacaaggcggcgttcgcggaggacatccagcacacggagagcaacgaggagatcctcggcgtgctctccttcgtcttctggaccctcacgctcgtgcctctcctcaagtacgtctgcatcgtcctccgcgccgacgacaacggcgagggcggcaccttcgcgctctactccctcctctgccgccacgcgcgcgccgcgctcctcccgcccggccgcgccgccgccggggacgacgaccagctcctcgacgccgccgcc

SEQ ID NO: 21847 - DNA, 569 bp, Setaria italica
  Peptide Sequence Number=SeqID_87821
aaaaagctgctcaagaggagagagagcttcttctcgggggtggagaagagtctaccatccgcaggcgtaatctccagacaaagactgggatgacatcttctgctgaaagtatcactgagagcctccgacggtctcgccagatgatggttcaggaagtggaaagaagtgcaagtaccttggcaacatttgatgaatcaacaagtgttcttcggaaggctgaaggtgaatatcaaggacaccgctctttgctgtcgcggacccgtggtttgctctccacgatgcaacggcaagatgttcttgatagggtcatcctaacagccggctttatcattttctccttggcggttctctacgtcgtctcaagacgcattggtctgctgactctgcaaaggaaactggctgatgccatcagatcaggttcgctgtcagccgaggacatcgtagcgaaagcccagcagcatggacctgccgcagctgatgctgcaggccccgctcctcccatttacgatgaactgtgactcgcatctgcccatgtagtttttttttttttttgtagggcgtagttgtcc

SEQ ID NO: 21848 - DNA, 208 bp, Setaria italica
  Peptide Sequence Number=SeqID_87822
agccagaggctggccggaaaggtcgccgtcattaccgggggcgcgagcggcattggcaaggcgaccgccaccgagttcgtcaagaacggcgccaaggtcgtgatcgccgacgtccatgacgacctcggccacgccgttgccgcggagctcggcccggacgcggcgtgctggccgggatcaagcacgccgcgcgcgtcatggtcccgcg

SEQ ID NO: 21849 - DNA, 911 bp, Setaria italica
  Peptide Sequence Number=SeqID_87823
gtagtacgtaaccttcgagacgaacctcagcttgctccttgttaggactgtatctgctcagcaaacaagcgagtgggcagtgggcaccatgttcatcagagccttgcaattggttgtcagggagaagaagagcggggtcattgcgtcaggatgcttgggcgtcgtcaatgccttctcctctgcttcggccgctcagagtcagaggctggctggaaaggtcgccgtcattaccgggggcgcgagcggcatcggcaaggcgacggccgccgagttcgtcaggaacggcgcgaaggtcgtcatcgccgacgtccaggacgaactcggtcacgccgtcgccgcggagctcggcccggacgcggcgagctacacccgctgcgatgtcaccgacgaggcgcaggtcgccgcggctgtggacctcgcggtggcccgccacggccagctcgacgtcatgttcaacaacgccggcatcggggggaaccacgggccaccaccgccgctcgacgccgtggacctcgccgaattcgaccaggtgatggcgaccaacgcccggggcgttctggccgggctcaagcacgccgcacgcgtcatggtcccgcgtcgccgcggcagcatcatctgcactgcgagcaccaccagcttggtgggcggcatcgcggcccccgcgtacggcgcgtcgaaggcggcggtggccgggctggtgcgcaccgtggcggtggagctggcgcgctccggggtgcgcgtcaacgccatctctcctcacatcatcccgacgccgctggtcatggaacccctcgccttgttgttgcccgggaagagcgccgaggagctcaggcggctcgttgaggtgggcatgaacgtgacggtcgggggacggtgctggaggtggacgacgtcgcgagggcggcggtacg

SEQ ID NO: 21850 - DNA, 296 bp, Setaria italica
  misc_feature (159)..(159): n is a, c, g, or t
  Peptide Sequence Number=SeqID_87824
ttcaacaatcaaacagctcaacgaggcaccaaactcatgatgtgaatttcgtatcattacaatgtccctaacatatcatcactgatctatgttaagatgcttaacagtgtatgtgcatctgtgtagatacacattctgagagtatttctcaaaataccngttttgcagcaacactgatatggtgaaggtagaacgtctccatagctggcgtggacacagcatatgatgaccaaactatacatccttgacactcacatatccctgtacccttgattagatgattgatttagcttctc

SEQ ID NO: 21851 - DNA, 918 bp, Setaria italica
  Peptide Sequence Number=SeqID_87825
ggaccgcctcccccgcgcccgccacccgcctccttgcccccttcgccctccgcgtcttcctcgccttcaacgcacccgtgcgcctcctccccaagcgcaaatgcgccgtctacgggaaccccgtccgcatgtccatcctcaagtgccaggcgtccaaggccgaggcgttggcgcgcttcttcccaagggaagaagggttgttgggcgaacaggacgcgcaggtcgtgctcgtgcttggaggagcggaggggtcgccagagatcaatgtcgcggtgcttaacgtgtactacgagatgctcaggaagaggaaggatcggtacataatatggcagactgggacggagactttctgcgagatggagagtctcgtcaggggccatcgccggctttttcttactccatttttgcatgaactggaaatggcatatgctgcttctgatgttgtaatttctcgagctggtgcaatgacatgcactgagatattggtcaccgggaaaccatcaattctgatacccttgccaacaattctggatcaccaccaaaccagaaatgcatatatcatggctgatgtcatgggagcaaaggtcatcactgaagatgaacttgattctagcagtctcacatctgcagttcatgaaatttttggtgatgagaaattgatggcagacatgtctcagaaggcactaactgcagcccgaccaaatgcttcagctgatataattcgtcactcctgttccctgattggttcaacctacccaacagtgatttgggcccaaaaatatcgggaactagtgcctccagcaacactgatatggtgaaggtagaacgtctccatagctggcgtggacacagcatatgatgaccaaactatacatccttgacactcacatagccctgtacccttgattagatgattga

SEQ ID NO: 21852 - DNA, 185 bp, Setaria italica
  Peptide Sequence Number=SeqID_87826
catccgctacagctttgaccctgtcgagcagcacctcgacgacgcgctcgagacgttggacgcagagcgcatccacgcgggcctcctcgccgtcgatgctggcatcgacgccatcaagaccaccatccgcgcggcctacaacatcccctgcgacggcggcggcggagatggatatgaatatctca

SEQ ID NO: 21853 - DNA, 397 bp, Setaria italica
  Peptide Sequence Number=SeqID_87827
cgcggtgggcgcgctcccgcgcgcccccggggtgtcgctgctggacacgtgctacgacctgagcgggtacacgagcgtgcgcgtgcccaccgtgtccttctacttcgacgagggcgcgacgctgacgctgccggcgaggaacctgctggtggaggtggacggcgggatatactgcctggcgttcgcgccgtcgccgtcgggcatgtccatcctcgggaacatacagcaggaagggatccagatcaccgtcgactcggccaacgggttcattggctttgggcccggcacgtgctagacgcgcgcccccctgctacatactttatgtactcgtctagtggcgtacacgtgcctgctaaaatgtaggcatacggggatgagagtgtatcgtacagtgtag

SEQ ID NO: 21854 - DNA, 491 bp, Setaria italica
  Peptide Sequence Number=SeqID_87828
tgcggtttgtggccatggacatgggtgttgagccggaatctctcctggagagattcagaggtcagcctcaaagcatgcgaatgacatactatcccccatgcaagcaggctgaaaaggtggtgggattgtcgccgcacactgatggtaccggcctgacgctgctgctccaggcaaatgacgtgcaagggctgcagatcccaaaggatggaaagtgggtcgccataaacgccctggatggagcattcatcgtcaatgtcggcgacatacttgagattctaagtaatggaagatacaaaagcattgagcacagggccgtggtgcacccaactagggagcgcatgtcagcggcagtgttccaccagccatgcaagtatgccaccgtcggccctctgccggagcttgtgaagaaggacggtgaggcgttctacaactcaatcggttacatggattttatcacacgattcttcgcggcaaagcttgatgggagggat

SEQ ID NO: 21855 - DNA, 185 bp, Setaria italica
  Peptide Sequence Number=SeqID_87829
caaccctggtttgaagtttgaacactggtttccgcattaagcctcagaggcagggccgcaggggctgtattcaaccccctataatctctatctatgaagattattctgtttaactcttaaaagagataggctaaatgctcgagattaccgaaatattgcgcttgaatcatgaacttgtagatttg

SEQ ID NO: 21856 - DNA, 316 bp, Setaria italica
  Peptide Sequence Number=SeqID_87830
ggcggctgtggtggccatacagactttggattttcacctcgcagaggcgctgtttctaagcaaggtggtcgcagctgttgctgtgacagcatttcttctgatccaatctcccatgctggaagcataccagttgtgatgtccatgtcccggtttgttacctctggcacaggcagtgatccagcagtctttttcagcgtccattccactgcctcatccacaggctgcatccagtgaggcgtctgtgctttcagctggatggcatggctgcggcgatggttgtgcaggctccaaattttcacatagcggtaggggatgg

SEQ ID NO: 21857 - DNA, 262 bp, Setaria italica
  Peptide Sequence Number=SeqID_87831
ggaccagtagatcgcccgttcagttggtccaatttccgctctgccaatcccagtccagttcacagctgcagcagccctggacggaagctggaattgaagctccaggccggcgatccatggcgaagaagacgttcgtgctctacccgtcgctgggcgtgggccacctgatccccatggtggagctggccaagcacctcctccgccacggcatcggcgcgctcatcgccgtcgtcgacccgcccgacaccgacgccgtgtccgg

SEQ ID NO: 21858 - DNA, 372 bp, Setaria italica
  Peptide Sequence Number=SeqID_87832
gacgttgctggccaccgccggcgccagcgtcctcgccgggttcatcgatccgccggacacaggcctgcaaatgccactcgttcccccgcgtcgtgtattagcttacatgtatatatgtgcgtgtgcgtcagtagtggctcatcagtgcgtgcagtactctgtgcctgtagctaatctttgctttttctagggtagctaatctttgttttcgtagctactactagtgactagttccaaagtcagagggtctagaaaattgtttgttagtgaaggcatgtctgacagggttcactgaacctaattcacaagaggtttcgccctgtcgcaaccaaattggcaccgtgttgttgtacaagctgacactctggtttg

SEQ ID NO: 21859 - DNA, 893 bp, Setaria italica
  Peptide Sequence Number=SeqID_87833
gcgtgtgtactatctcgatatgctcctccggacacgcatatcctagctgcaccgatcagacctggatgtggtcgagctcgtcgtcgtccgccgcgacggactggctctgcaggcggcggagcttgaaggaggagagcttctgcggcgcgtccttgttgctgggcgcttcctcgaagcggatgtaggtgtaggtccaggccccggagagcgtgccgaggacggggcccaggaagtagatccacagcccggtgtagaggttgctcgccagcgccggccccagcgtcctcgccgggttcatcgatccgcccgacaccgccctgcaatcaccactcggggtttccctcgcgtctcagtgtccagttcattcatttcgtccatgctactacttgctactaccatctagcatctactgttgctatgtcagtgtgtgacgtgttgtgctcgatcgatctgatcgttcagcagccggccggcgcacacgataggacaggacagggtcaaatttgcgtaggaaccaggtcagggctggcgtactagtgctatgctttgcatgctgaattaaagaatcgtcattgtcgcctaatcgtgttggatttttctgttgtttactagttgtaaggggcaagtggtagtttagtaatcagatgattgacgtggacctctcatctattttcaacgttgaatttaacgaattgtcagcttctaagcgcgcgtatatatgtatttaccctgcgaagatggacgtaatgcaaaccgcggaaccaaccgccaacccggccaactcacccaccgctctcgtgtccgtggcgacggcgagggtgacgaacatcatgttgaaggtcacgatgacctcgatgacgagcgcgtgccagtgcggccccgtcggcgtggtg

SEQ ID NO: 21860 - DNA, 658 bp, Setaria italica
  Peptide Sequence Number=SeqID_87834
tttttttgcaaacaagcccgtcaactgcatcaattaacttttgcaactctgacgaagcgatacaaataaaagccgaagataacataaagcattacactgctccgagatccccgctgctcaacgacgcgtacgtgcgcgcgcacgaatacgtacgtataggctacgggagaagaatacaaacacgtaggtacgtacaccgagtatgtaccggtacacacacgcagctctagctctctcccaccatgaggtcttgaacagagcgagagcacagttcacacgcatggacgacgcacgcatggtgttgaggtgtgattggtgcacaccggccagccggacggtcccggccgccactagacggtgtcgaactcgtcggcggcgagggcggactggctctgcatgcggcggagcttgaaggaggagagcctctggggcgcgtccttggcgggggcctcctcgaagcggatgtaggtgtagacccaggcgccggagagcgtgccgatgacggggccgaggaagtagatccagaggcccgtgtagacgttgctggccaccgccggcgccagcgtcctcgccgggttcatcgatccgccggacacaggccctgcgaagatggacgtaatgcaaaccgcggaaccgactgcttaacccggttaattaa

SEQ ID NO: 21861 - DNA, 1175 bp, Setaria italica
  misc_feature (1)..(18): n is a, c, g, or t
  Peptide Sequence Number=SeqID_87835
nnnnnnnnnnnnnnnnnnactgtttatatagcagtaggcaccaccaacttttggtaacaagcgacatcaggagagatacactttgcattggcacgcacacagtgttcgtcccaaaattaagctccagctctctggcacattaacagagcgagccataatctaccgtgccacacaccatcaccagacacgtgccagtgcgtatcgatcaatcggtacaagagaggcgacgacgacacacacagagacattaagctactatcttagtactgacgatacagcacaggtagagtgaccgaggagtgagagtaagtgattacttgcgtgtgtactatctcgatatgctcctccggacacgcatatcctagctgcaccgatcagacctggatgtggtcgagctcgtcgtcgtccgccgcgacggactggctctgcaggcggcggagcttgaaggaggagagcttctgcggcgcgtccttgttgctgggcgcttcctcgaagcggatgtaggtgtaggtccaggccccggagagcgtgccgaggacggggcccaggaagtagatccacagcccggtgtagaggttgctcgccagcgccggccccagcgtcctcgccgggttcatcgatccgcccgacaccggccctgcgaagatggacgtaatgcaaaccgcggaaccgactgccaacccggccaactcacccaccgctctcgtgtccgtggcgacggcgagggtgacgaacatcatgttgaaggtcacgatgacctcgatgacgagcgcgtgccagtgcggccccgtcggcgtggtggtgccgatcacctcgatggggtggagcaccgccttgagcacgaacgccgcgcacatcgctcccgtgaactgcgccgcccagtagaacggcacctgaatccaggggaaatgccggaagcacgcgaaggagagcgtgacggcggggttcatgtgcgcgccggagatgtggccggtggcgtagatcatgacggtgacgatgaggccgccggccacggactgccccagctgggagatgcgcttgaggtcctcgccgtagatggacgccgcgccgcaggtcacgaacaccagcaggaacgtcgccaccacttcggagatcaccttcttgccgaggtgcggcgggaagattgttcggtcgtagggtaactttcttaccta

SEQ ID NO: 21862 - DNA, 650 bp, Setaria italica
  Peptide Sequence Number=SeqID_87836
aaatatgatgccagcacgctaggagcaacgaactctttccggtagccggacgatcacgaaacaaatttggagcagagaagagaaaaagaagcgccaagcaggcagaagggacggatcgatgtgcagtgcagttggtacaccgtacacatacctgaatccaggggaaatgccggaagcacgcgaaggagagcgtgacggcggggttcatgtgcgcgccggagatgtggccggtggcgtagatcatgacggtgacgatgaggccgccggccacggactgccccagctgggagatgcgcttgaggtcctcgccgtagatggacgccgcgccgcaggtcacgaacaccagcaggaacgtcgccaccacttcggagatcaccttcttgccgaggtgcggcgggaagatgtcggcgagggacttctccgggtagtacatggtggggacggcggagccgccgctctgcacggtggagaggtcgtggatctcgttcgagtagttcacccgcgagttggtcctcgacggtgcggtggaggcggccatggccgatcgatagcctagcagagatcagctctctatcgctgcggcggagaggatggagagaggctgctcgatcggtggcgctagctaattaagctgtgcttgctgcttgtct

SEQ ID NO: 21863 - DNA, 1170 bp, Setaria italica
  Peptide Sequence Number=SeqID_87837
cttgttttcgtagctactactagtgactagtttagttataatagggtctggtaatagtttgttagttctggcattcctgacagggttcactgaacctaattcacaagaggtttcgccctgtcgcaaccagagtgtcagcttgtacaacaacacggtgccaatttggaggaaaaatcaaaaaaaatgtggccagcttactagcaaacgacgtcaacagcttgagaagtcacgtatgctaaaatttcctaaaaggacctaggcggtttcttcggtgtcactactgctatagctctttggtcgaaagtctatcatgttttaattcctcgtgagagtactatagccgatgtccttgctgctaattaataaggctatagctactactactagtgtttggtcagtgctcatcagtgattggttagttattcatcgtttcgttcatattaccctgcgaagatggacgtaatgcaaaccgcggaaccgactgctaacccggccaactcacccaccgctctcgtgtccgtggcgacggcgagggtgacgaacatcatgttgaaggtcacgatgacctcgatgacgagcgcgtgccagtgcggccccgtcggcgtggtggtgccgatcaccgtgatggggtgcagcaccgccttgagcacgaacgacgcgcagatggcgccggtgaactgcgccgcccagtagaacgggacctgaatccatgggaaatggcggaacacggcgaacgcgagcgtgacggcggggttcatgtgcgcgccggagatgtggccgacggcgtagatcatcaccgtgacgatgagcccgccggcgaccgactgccccagctgcgatatgcggttcaggtcactggcgctgatcgccgccgccccgcacgtcacgaacaccagcaggaacgtggacaccacctccgagacgaccttcttgaggaggtggggagggaagaaatccgccagcgaccggtcgctgtagtacatggggggcatggtggagttctgcaccgtggagatgtcatggatctcgttgttgaagttggccctggagttggatctcgagttggtcgacatttccggcgaccgagctacgtgcgtgcgtgagcacacgtgagttcctactgggaagaggaggagcaggaggaggaagaagaagctcacagctctcgta

SEQ ID NO: 21864 - DNA, 430 bp, Setaria italica
  Peptide Sequence Number=SeqID_87838
acgacgccgagacgcggctctactccatgatcgacatgcgcgcgcgcctggcgccgccgctgcccccgggctacttcggcaacgcggtggtccggacgtcggtctccgccaccgccggggaggtggtgtcgaaccccgtgggctacgcggcgcggcgcgcgctcgcggcgacgagccagggcgacgactacgcgcggtcgctggtggactacctggagggggtggacgccatgaacctgccccggagcggcatctcgcgggcgcacctccgcgccatcagctggatgggcatgtcgctgcacgactccgacttcgggtggggcgcgcccgtgttcatggggccggcgctcatgtactacagcggcttcgtgtacgtgatgcaggcgccggggaaggacggcgccgtcgcgctcgcgctgtcactggagcc

SEQ ID NO: 21865 - DNA, 236 bp, Setaria italica
  Peptide Sequence Number=SeqID_87839
acacaaaccatgtgcagatgctgggtggttcgctgctggagctgatcgcccctgcgccggaggagatccctccggcgtgcagagaggtggtctttgagtacacaaaccatgtgcagatgctgggtggttcgctgctggagctgatgtcggaggccctggggctccaccggcgatacctgtcgcacgacgccggctgcctcgacgggatcagcatcgtcggccactactacccgccg

SEQ ID NO: 21866 - DNA, 569 bp, Setaria italica
  Peptide Sequence Number=SeqID_87840
tcttccagtcgccggctgccacctggcgcgacacgctctacctcgacatggcgccgatcgcccctgcgccggaggagatccctccggcgtgcaggtaataatcatatcacctcacctccaatttgtcgtatcattggacctgatgacatggttaattaagcatgtgatttcagagaggtggtctttgagtacacaaaccatgtgcagatgctgggtggttctctgctggagctgatgtcggaggccctggggctccaccggcgatacctgtcgcacgacgccggctgcctcgacgggatcagcatcgtcggccactactacccgccgtgcccagagccggacctcaccctcggcaccaccaggcactccgaccccagcttcctgacggtgctcctccaggacggcgtcgtcggcggcctgcaggtgctcgtcggcggccgctgggtgcccgtgcctcccgtggccggtgccttcgtcgtcaacgtaggtgatttcctccagctcatgtccaacgataggttcaagagcgtggagcaccgggtcgtggctgttggtgccgccgggccacc

SEQ ID NO: 21867 - DNA, 1273 bp, Setaria italica
  Peptide Sequence Number=SeqID_87841
ggaaagtccagtccccgctacctctcgctccaaacttgagtttgattaacctacaatggcctctgcccctatcgtctacgaccgtctcagcgagctcaaggcgttcgatgacaccaaggccggcgtcaaaggcctcgtcgacgccggcatcacagccatcccccgcatcttccgccacccgcccgacccctacactccaccagatcaccacgccgacagcatcatccctaccatcgacttcactggcgccgcgaggagggccgagctggtcgccgaggtcaagaaggccgccgagacagtcgggttcttccaggtcatcaaccacggggtgcccgcgacggtcatgtcggagatgcttgacggcctgcgggcgttccatgaggagccggcagaggccaagcgaccgtactacacgagggacatggggagccgcgtcaggtaccacagcaacttcgacctcttccagtcgccggctgccacctggcgcgacacgctctacctcgacatggcgccgatcgcccctgcgccggaggagatccctccggcgtgcagagaggtggtctttgagtacacaaaccatgtgcagatgctgggtggttcgctgctggagctgatgtcggaggccctggggctccaccggcgatacctgtcgcacgacgccggctgcctcgacgggatcagcatcgtcggccactactacccgccgtgcccagagccggacctcaccctcggcaccaccaggcactccgaccccagcttcctgacggtgctcctccaggacggcgtcgtcggcggcctgcaggtgctcgtcggcggccgctgggtgcccgtgcctcccgtggccggtgccttcgtcgtcaacgtaggtgatttcctccagctcatgtccaacgataggttcaagagcgtggagcaccgggtcgtggctgttggtgccgccgggccaccgcgggtatcagtggcctgcttcttcaggccgcgtggcgtggcggcatcgaccagggtgtatgggccgatcgttatggacgcggcggcaggccctcggtcgcctccgcggtacaggagcatcacagcggaggagttcatcaaccattatatggacaagggcctcgtcggcaagtctgcactcgatcacttcaggatctgatagatctcacacgtataatgtcatattgcacctagacaagttggcattgcgcagaataagtataatgtttcttcttaatttgtctggggaactaccgaataaaaagtgcgaaaatgatgacaaaat

SEQ ID NO: 21868 - DNA, 375 bp, Setaria italica
  Peptide Sequence Number=SeqID_87842
tactaaagtaagttaatttaggggggtttactaagttttagaaaccccccaaggacccccaacgaccagataataaggacaataaagactctctctctctttcatggggcagccggggatggactctgttcaagggaaggagagcaacggtgttgcccctgactgcaacgggggtgcttctccagcaaagcagcagctggaagggaaggaggcattgcggtatgcgaacatcctccggtcgcgcaataagttcgctgatgcgatccagctgtacaacgttgtgcttgagaaggagggcaccaatgtggaggcccttattgggaaagggatttgccttcaggcgcagagcctaccaaggcaggccattgagtgctt

SEQ ID NO: 21869 - DNA, 1248 bp, Setaria italica
  Peptide Sequence Number=SeqID_87843
cgcctcctccgagctcgccgccgaggtgtcaacgcgccaacatcgcagtcgctcctgaactacatcctcctcgccctcgtctacggcagcgtcctcctctaccgcaggcagccactcacgataaaatggtactattatttgatccttggaataatcgacgtggaagctaattatatcgttgtgaagtcataccagtacacatctttgacaagcgtgatgctgctggactgctggtcgattccatgtgtcattgttcttacttggatatttctcaagaccaagtacgggctcaggaagttctttggcgtgggagtttgtgtggctggccttatactggttgtattttcagatgtccatgcctctgaccgagctaaaggacctaaccctctcaagggtgatttgcttgtcattcttggttccatgctttatgcttgcagtaatgttaccgaggagtatgtgatcaagaaaagcaacagggtggagttgatggcaatgcttgggctttttggagcaattgttggtggtatacaaataagtatactcgagagaaaagaacttcattcggttacatggaatgctggtgctgtgctcccttttctaggattcgcggtagccatgttcctgttctactcaactgtgcccacagtattgaagatatgtggagcaaccatgctgaacctctcgctcctaacttcggacatgtgggctgttctgatccgcatctttgcttaccatgagaaggtcgactggatctacttcgttgcttttgcctgcacggcggctggcatcatcatctattcatacaaggactccaaggaagcagaggagacagcacaggtcgctggggccagctatgagcaggacaaggagggggatgaagaggctggagcgcacaacgccggtgagggcagtggcagctcggtccatagcaaggaagtaccatcagctgcagggacatccaggaggttactaggttagctgtgagttgtagcacgccttgaatggcgaatgcatatagcaccgggcgaatagaaagagcctgagagagtgtaggcttgagagcagcaaatgtatcagaaacaatttgacaaagtgtagcaggacttactttagacttgacagaagtggtggaatttccataaacgaagaacaccaactgtcagaagtttaggctgaggcattgccgattcttcaaacttaacttgaagatttgaccttatatagctcaccaatttccaaacaaaccaa

SEQ ID NO: 21870 - DNA, 927 bp, Setaria italica
  Peptide Sequence Number=SeqID_87844
gtaacagattgtgaactgtcgtaaagaggatttttttaaaccagtttccttggcacctgacgatattcttttttcctcagtggatatctttttttcctcagtggatcaacgtttgatgatcattaaagaagtattacacgcaaagcacttacactggcggaggctgcgcccgggctccgtgcagaactactactcactaatcgttaccgtgcccccgatgccatatctcgtcccatcaggcgatgtggctcgagataggcaaaagaatgtggtttctctcgttggatcttcttctgatttcctatcattcgggtcttgtaacttcagcaagcaggaggatgcaacaacagctggcattggacggaactgatctgccatgcgcctaattgtttgccatagatgagtccataacactgcatgacttgtccatgaactttttcatagaatgtaactcccgtccaaaaggctctaggaacttcaaatctatatcaaggggccaaaccttgaggcccatgagccttagtggcgcctgctgcccgggtacgatgcactctggcccggctgcctcagcgaacgcctccatggccagcccctccccgatcggatccggatgcttcatgacggcgagggcgtaggcggcggagtcgtcctgcgcagcgacgcggaggacgggcgcgtggtggatgcgcgggacgggccggatcccctggccccccgcagcggtggcgcgccagggcgcgtcgtcgcccgcgaggagcggccgcttggagccggcgtggggggacacggacgaggccgcgggggcggtggtggccgccgggagggcggccggtgaggaggtggtggtggtggtgagggacgccatcggataaggcggagggccgagagggaagcgttccgcttgcgtgttgggctcgctcgcgctgt

SEQ ID NO: 21871 - DNA, 505 bp, Setaria italica
  Peptide Sequence Number=SeqID_87845
ggcgagccggcggagggcgagggcggcatggacctggaggcctgggtgcggcgcgcgttcaaggaggagcggccgctatcggaggtggtggacccgacgctgctcggtgaggtgcacgccaagaagcaggtcctcgccgtcttccacgtcgcgctcggctgcaccgagcccgaccccgagatgcgcccgcgcatgcgcgccgtcgccgagagcctcgaccggatcggctgaaaccgtggaacggcgacggccgccggcggccgccactgatcaacaactaggtccaacgcataaagactcggtgtagtcctgtagattagcagtaagcaatgtggatttggagacggtaaacgtaggctaagaatcatccgggcgtccagtagtcaatctgaatcactcaacgtagcagcagctgcagccttcgcagccgagcttactttggaatcttttgtggcattctgtagatcatgatcttgatcccttccaaagcaattctgttaccaag

SEQ ID NO: 21872 - DNA, 440 bp, Setaria italica
  Peptide Sequence Number=SeqID_87846
attttaatttgggaacacatggtctatgtattttatcatttattaattgtactgcttgttgatttgttaatttgcttgcctttggatagtaggaactatgggttccacatgttctttgctttactgcaatctaggacacttaccaggactttcaggtcagcacataaggataggcagcttttgtcatgctatttgggttagcggttcaaatataatctggaagtaccagattgcaactgtagaactgtttctgcatggctagacatttggcgaagctgctcagcaatgtttagtatgtctttcttttcttctggtgtttcatgacagtgtccagactggaaggttttagggattatgtgccatcgccacaaatatttcgtcgaattagcatgctgattactgtgttgtagctgagaatctttgcataccatgttcctgga

SEQ ID NO: 21873 - DNA, 954 bp, Setaria italica
  Peptide Sequence Number=SeqID_87847
gaatgtcagtgcatcttcaacggctggtggtggtataatagtgatgggttctctggagcaatctctgccaaacctctccctttctggctcaattgaggcaaatggtggtagttttactggcttggcatctcatgccacaattggaggacctggtggtggttctggtggtacaattcttctttttgtgcggactttactcctaaaggaggactctgtactctcaagtgtcggtgggattggaaacaatggcagtggtggaggtggagggggtcggattcactttcactggtccgatattcccactggagatgattatgttccttttgcaactgttaagggaacaatacttacaagaggaggagtcagtgaaggccatggttttcctggtgagaatggaacagtcacaggaaaggattgcccaaaaggtctttatggaacattttgcaaggaatgtccttcaggaacatacaagaatattactggatcatctaagtccttgtgctcaccatgccctccaaatgagctacctcgccgtgctgtatacataagcgtccgaggaggtgttgctgaaaccccatgcccatacaaatgtgtgtctgatagatatcgcatgcctcactgttttactgctcttgaagagctgatatatacgtttggtggaccttggttgtttggcctgcttctttctggccttcttgtcttattagctcttgttttgagtattgctcggatgaagtttgttggtactgatgagttgcctgggccagcaccgactcagcacagttcccaaattgatcactcttttcccttccttgaatcactgaacgaggtattggaaacaaacagggcagaagaatctcactgtcatgtgcacaggatgtatttcatgggcccaaacaccttcagtgagccttggcatctcccacacaccccaccagagcaaatttcagagta

SEQ ID NO: 21874 - DNA, 835 bp, Setaria italica
  Peptide Sequence Number=SeqID_87848
acagccagtacccacccaccaaacccagaccatgtcgggcagcggaaatggcagtggccgcgccggcgttgccactcacgtcgtcatgttcccctggctcgccttcggccacatcagcccgttcgcccaactgacgcgcaagctcatctccggcgacgagacgctccgtgtaacgttcctgacggccgccgggaacgtgccccgcgtcgaggcgatgctggcggaggccgctggcgcggtggccgtcctgccgctggacctgccaagcgtgccgggtctgcccccggtcgctgcgagcacggctgagctctcggccgacggcgccgagcttcttaaggtcgccctcgacggcacccggccgcaggtcgccacgctcctcgcggagctccgcccggacgccgtgctgttcgacttcgccgtgccgtgggtttgcgacgtcgcggcgcccctcggcgtcagggcgctctacttcaatgtctattccgccgcgaccctcgcgctcaccgtccctgcgcggtgtcccggtgggcagcgcccgtcggcgcacgagctcactgcggcgcccgccggcttcccgtcggactcgccgcttgtcacgctgccggcgtaccaggcagccaacctgacgtacgtgttcgagagcttctacggcatgccgagcgcgtacgaccgtttcatcgaatgcctcaagggctgcttcggcatcgtcatgaagacctgtgccgagatggagggcccctacatcgactacatcttggcccagatcggcaagcccgtgctcctggccggacccgtcgtcccggagccaccggaaggcgagctcgaggagcggtgg

SEQ ID NO: 21875 - DNA, 1394 bp, Setaria italica
  Peptide Sequence Number=SeqID_87849
caaataccaccggcgagcaaatccagagccaggtaacgccgagcaaccatacaccgtgcctaccatgccgggcgaagctattcacgtcgtgatgctcccctggctcgccttcggccatatcagcccgttcgcgcagctggcgcggaagctgttctccgtcgagggcgggcacaacatccgcgtgacgttcctgacggccgacgggaacctgccgcgcgtgcaggccatgctggcgccggccgccggcgcggcggccgtcgtgccgctacacctgccccacgtgccggggctacccgagggagccgccagcacggccgagctcacggccgacggcgccgagctcctcaaggtcgccttcgacggcactcgggaccaggtgtcggcgctgttgtccgagctccgcccggacgccgcgctgatcgacttcgccaccccgtgggtcaccgacatcgccgcgcctcttggcatcaaggtgctctacttcagcgtgttctcagccgtcgcctctacctacaccgtcgtcccggcgcgccgcctccatggggcggccccgtcggccggtgacttcacggccgccccttccggttttcccaagggctccgcgctagccaccattccgccctaccaggccgccgacttaacctacctgttcaccagcttctacggccagccctgcgtctacgaccgtgtgaccgccggcatcaaggcctgcgatgccatcgtgataaagacctgcgtggagatggagggcccctacataagttacctctccgcccagttcggcaggccagtgcttctcgccggacccgtcgtgccggagccgccgcagggccatctcgatgagcggtgggccagctggctctcctcgttcccggagaactccgtcgtcttcgcctcgttcggcagcgagacgttcctaccgacagcggcggcgacagagcttctcctcggcctcgaggccaccaaccggccgttcctcgccgtgctcaacttccccaagggagccgacacggaggcggagctccgggcacggatcccgccggggttcgaggagagggtgaaggggagaggcgcggtgcacacggggtgggtgcagcagcagcacatcctgcagcaccagagcgtcgggtgctacttgaaccacgccgggttcagctccgccgtggaggggctcgtagccggttgccggctggtgctgctgccgatgaagggcgaccagtacctcaacgcggcgctgctcgcgcgagagttgcgggttggggtggaggtggcgcgccgcgacgaggacggctggttcggaggccaggacgtgagcgatgcggttgccttggcgatggcggagggaggggatagggacgggaggaagtggagggagttcttgacggacgacgccg

SEQ ID NO: 21876 - DNA, 496 bp, Setaria italica
  Peptide Sequence Number=SeqID_87850
ttttggtctgacgatcttgaaagggctgatggaactccgcgatggcaagatatgggcgcgatttcttgtcgagacaaacagagaagtcacaaggatggatatatttttgtcacttgttcagttactggagcaaaacagcctcgttcgatcaaacgagcagatggcaaaggtcatgaacagtggggttccatccttcacagaccatcagcggtctccgctaccgattccggtaggcgttgctgagagactgcagtgactgcagatgcttagattagataggattaggcgactcgactgatagcaaaattggtagccaggactccatgcatttgacagagcctagtgttgacacccgacagcctcactgctgctagaaatgctagtatcaagaatatcattgatgcaaacatgagcttttagtgcagaaatcatgaacgccccggatgatgactggggtgatctatgatgccaatttcaattactactacctagacca

SEQ ID NO: 21877 - DNA, 966 bp, Setaria italica
  Peptide Sequence Number=SeqID_87851
aagataacagcaaacagcatagtaataagtagctgggagaagcggaaaagatggcgtctccgccggtgaagctcatcggtttcttcggcagcccgtacgcgttccgcgcgcaggcggctctatgcctcaagggcgtgccttacgagctcctcatggaagacctgttcgggaccaagagcgacctgcttctccagctcaaccccgtgcacaagaaggtgcccgtgctcatccatggcgacagggccatcagcgagtccctcgtcgtcgccgagtacatcgacgaggccttcgacgggccgcccctcctccccaccgacccctacgaccgcgccatggcccgtttctgggccgacttcatcgaaaacaagctgaccaagccgttcttcatggcgcactgggtcgagggcgaggcgcgggaaaaattcgagaaagagggcttggagctgctgacgcttctggaggcgcagctcaaggggaagaagttcttcggcggcgataggcccggctacctcgacatcgccgcttccgcgttaggtccgtggcgcagcgtggttgaggaggtgatcggagtgaccgtggtgaaggaggacgagcaccccggtatcgtccagtgggtcaaggattacagctcccacgaagctctcaagccgtgcattccggacagagagagactcctcgcctacttcactaagaacaaggagatgtacaaagctggcgtcaaggcaatgctgcagcagtaattgggctacgttttcagttttctgcccatggagtagtgtatccatcagtttgatcagtctagctttatgaacgacgatgtaggagtattgtgctgtttgcagggcacaagcactctgtagtctgaaccagtgactagtgagttactcgagtcggattgtaatgacgttgctacttataaattataattgacaataaaagctacccgaaattaacctaagaaaaaaa

SEQ ID NO: 21878 - DNA, 256 bp, Setaria italica
  Peptide Sequence Number=SeqID_87852
gaccagtgagcgtcgcaagtctatatatacccaatcatgcatgtgatagaatgccactagttagcactttatataaccaaactgaatttgataccttgagctatggttagtttacacctaatcccaaggttaagtaccacctatacctaggttcattgcatttttccacgagcaaagtacagcgttaacaaattgagtgttttggaatcaatgctccacgcatctcttcaagttgaagggtggcttcaacttgtgc

SEQ ID NO: 21879 - DNA, 458 bp, Setaria italica
  Peptide Sequence Number=SeqID_87853
tgttagggcggtcaagcgccaagggccaaggctctattttctgtgactaatctgagctgccacaggagctgccatcgatttcagccaactcctgcaccatcaacctgatcaccggctgagccgcaccggagccagacgatgttgacgttcccgacaatgccgggacgacgtcgaggcactcctggaagtcggcgtcgcaggacaagagcacccactcgttgtcatcgtccaggtacttgacgtcgaactcgctggcctccagccccagcctcttagccacctcccgcttcaccgtcgctacgcctgcagagcttggcaccctgaacctgatgatgtcccctttgtagctggccttgaccgtcaccacgccagcgtccacgccatgcaaaggcgtgcgcaatgcggcgtccctgggaggaggcggcggcgcatggcatgagccttgggaggaggccact

SEQ ID NO: 21880 - DNA, 541 bp, Setaria italica
  Peptide Sequence Number=SeqID_87854
agaatcctgctgagtcagtcatgtgcaaggattatggatggatggttgctctagggtgttcagttgtttgcaatgaaaacagagaagggtgaaattaactttattcatgtatatatgtcactggagactttattccatgatcacaccacatagggtgatctgcagttcctggtggggatgctgctgcagtagcttgggtccatgttgcagatggagggcagggtctttgccatctccatcaccttgctcatcatctgatgatgatcggagcccggcagaccgccgcgctgcagctcctcgaccgtgctgcggatcgccctgcacctgcagctgggtggcatctgctccagctgctcgcagcagcgcagccgcagccgccggcagctgctcatccgccatttccagggccaggtgatgggcatcgccgacgccgtgcactgctgcttcaggtagtccctgcacgcgtccatggtctgcccttcctggcactgcttctcctccacctgtgcgtgtgcggcgccgatgatcgaactggcgaggg

SEQ ID NO: 21881 - DNA, 930 bp, Setaria italica
  misc_feature (882)..(930): n is a, c, g, or t
  Peptide Sequence Number=SeqID_87855
ggtagttgctcctactgcgagaagagatttatctttgttcggaaatcctccgacttctcgactgggcgcggcgtcgatcctccgcctgctccttgccggcgacgtgcgaggtcctcccttcactcgcagcagggggagggaacacgaagaggggagctgagcggagaagagccggaggccatggacacgatgcgcggcgcgctggagcgggccaagatgctggtgggcatggaggtcgacgaggagtccgcgctgccgccccccgaggagcagtccttcttcgacgacatcaaccgccagtgcaccctcaacaccacccagaggctctatggtttcgcgatttgcttggctgccggcctgacatgcaccttcttgtcaatgcttgttttcttcaatccggtgaaatttggggtaacattcacccttggcaacttgatggcccttggaagtacagcatttcttataggccccaaaaggcagtttgatatgatgcttgattcagtgcgaatatatgccactgctctatacattgcaagcatcataattgctctattctgtgctctcttggttcacagcaagctgttgactctgctggccatcattttggaatttggtgcccttgtttggtacagccttagctacatacctttcgcaaggtcgatcgtgtccaaagtgatgacatcctgcttcgacaccgatttctagagcaaacattgttgtctgccggatttagaaagatactatctgtaatctagcgtgtacttctgacagatgaggagggagtcacctcaccacctccaacagggcaacaggctatcttgtaatcattaatcaatgtgaatctagttgtgtgcatttcttcatgctagactagaagattgnnnnnnnnnnnnnnnnnnnnnnnnnnnnnnnnnnnnnnnnnnnnnnnnn

SEQ ID NO: 21882 - DNA, 160 bp, Setaria italica
  Peptide Sequence Number=SeqID_87856
tatattagtttgttgcacatgttctcatgttggaccactgcacatgttcgtacattgatttctttaatgtgtactgtaccgaaagtgagggtaaaccttacagtcatttttttaccaacagtagaaacatcttgtggtgtaaactgagttccttatcaaa

SEQ ID NO: 21883 - DNA, 360 bp, Setaria italica
  Peptide Sequence Number=SeqID_87857
agcccagccggcgtgcggggtgtccgcccgtacggtgtgctcctcgctccaagggatagttgccgctccggcgtgcggggtgtcaggtggcgcggagtgcccagggacagggagggcgagcgtctgaagtctctgagttttgatgggagagcgagaagcttgggccggagtgacgacgcgcgctcgcccctctccatggcgtcccccgcatccatggcgatcgagaggtacgagctcttgggatcgggtgcgagctcccgttaacagagccgccgtgcttctcgtcggcgcgcgcttcggcgccgccttgctctgttcgggctccggccgctggctgctccggttagctaggtgctggtg

SEQ ID NO: 21884 - DNA, 353 bp, Setaria italica
  Peptide Sequence Number=SeqID_87858
agataatggatggaatattgagctaagacaaaggaaaaacaaagattacgaagactctgtctatgtttctcctgaagggactggctactggtcaatcactaaggcttatgcagtttaccaagagcagtttcaaaatcaacgcgatatgggctgttcatctaagcttaagaatattatgccaggtgcttcagatgccatatcaacggatgatctagcaatgctgaaaaagaacatagttaggagaaggacgaataaagaaatttatggtgctaaaaagaaacctggggccaacagaagcaaaggctcaaaagatatccttgctgatagtaagttcttagtaaagtaagtctact

SEQ ID NO: 21885 - DNA, 568 bp, Setaria italica
  Peptide Sequence Number=SeqID_87859
atgcagcaaagttatctataatgggttcatccatctcttgaagaagatcatcaattttatggacagatgaatcttcaagagatggatgcagcaaagttatctataatgggttcatgtgatgggcgatataatttatgtggcatggaatcaacttccggatcactcgtacaaatattcactcaagaaatttggaaatgagaatggttctcagcaactgcaatccctggaccatggtgactcttcagatggtttccagaagcatgacagtgaacattctcttttaaaaacaccgcaaggtatgctaagtctataccatatccttgatgacaatagtagttgctaaggaatttaacttgatttgtcggaagtatcttgctttatagctcactattctatatattctagatgtacaaatgctttggtggcctgacattcaatatcatattgatgatctaaagcattttgaagcttacatacttttttaacaatattctaccatcttctgctatcatgtaacatttgcaagttaaacaagaatagaagcccttaagatttcgttattactaga

SEQ ID NO: 21886 - DNA, 2161 bp, Setaria italica
  Peptide Sequence Number=SeqID_87860
ccttgcataagcaagatagcaagatagtggcaaaaagaccataaagttgttggacggtccaccttgttcaaaaggccgaagcttgagccagtacaaactggaagagatgccgaagctaagggacatgacttcatatcacagaagaatgttcctgaattggcacaatgtgcagcatctgaaaaatctcggttgctcaagcagaagcgcatttctgatgcaaagagaattgataagaagaatattaggtctggtgtcagatcaaaatatgattgtttctcatcaaaggctggtttagcaaattttgattctggtttctcgggaaacagcgtacttggagcacatggccttaaatctgatgtccgtgacatcacaaatcacattgagaacctctcattgagtgaacttctcgatggtacttacaagtattccagcttaggaagagataaaggaaagaaggtattgcgtacgaaagatgaactcctagtctctgtcagaaaagcgttttctatgctttcagatatggactattgcaatggaaaagatgctaatctcatcctgagccctaaacttccttctgcaagcacttctagctatgacatcaaagagcaatgtggtgacaagccaccccccttggttaaggactcttcacaaatcaatgtctgtgatacatcactttgtcctccaaaagatatcttaagccgtttaacacttccccatggacaagatctggactcacttttagcaccaggaagtgagagcacagctgcagttaagccttatatgccttccatgactgttcatggagctagtttgccaccatttccttggtcacattcacaggccgggggttatcgacaaagtgttgactgtggtaaacatgggtcgagtaggagtagttcccagtggcagtggatgagggttggatgcaacctcactctagattatgaagattcatctgtccataaaattgatgatcttcttcaagagatggatgcagcaaagttatctataatgggttcatgtgatgggcgatataatttatgtggcatggaatcaacttccggatcactcgtacaaaatattcactcaagaaaaattgggagtgagaatggttctcagcaactgcaatccctggaccatggtgactcttcagatggtttccagaagcatgacagtgaacattctcttttaaaaacaccgcaagtatcgccaaagatacagcgcgctgctgagatcttatgtgatatgagaagaagcactgaatcatggagtgcccaaggatacagcaatggagcaattaagtggccaaaatcaccatctgaaaaggtgatgaaggcccgcaaggcctcatcccagtttggtacagctgagagctcatcaggttctcgtaacaatgatgcaacttggaatgggagcaatcactctaccaagaaaatagttgacaggaagaatgattctgcacgcttgaataaccctagtaaggggactataaggtggcctgtgcctattgaagatggtgcctctcctgtcaggtccgagcgaggtcttatgcttgatacaaagcaaccccatggcaatggcggaaggcatccagtccaggtgtcatcacaggcacggctcgagaaggagtatgagaaccagcagaagttgaggaaagcaacactgacctcatctctaggatctgcaggagattggaatagggagaggaacaggagaatgtgaagtgtacattattcatgtcgaaatcataggctatggtatatcgtctgggggacagcggaaccaggcaactgtttcataagaggtcacagaacattgggagatgtgataatttaggtggcgggtgctgtatctattgggccatttgttgttgggggaactgttgtaactagtgtaattttccttttcattaccatcacatcacaggtctctcactgtctcactatcttctgttgtgtattactaatatatctcgacctactatcagtgaagtaataatagcatgcgaggtaattgcattccatgggtgactgggtgactcagtagcttgcatcttgctcattctgatggttggaaaatcaacattggttatcggcatagtcatgttaaatcgccatctcagtcgtctgagctatattaactatattgttacatctgttga

SEQ ID NO: 21887 - DNA, 459 bp, Setaria italica
  Peptide Sequence Number=SeqID_87861
aaagacttacaaataatcttcacacggatgcctgagtggtttctcataatgctgtcaattatgttgctgaaatcctctttatgtacatgtgcttttgagcaaagtgtatcgctattcaaggtaaggttgggacgacatctccaggaatgcagaaaggcacgagacaggcaagcagaacgagcagcatcacgtagtggcataagggaatgtatgtggcacaagatgtcctctggaagttcggggacagcttgggaatcaccatcttcctcttgttgataggtcgagccttttcgtttattcactggagcaatcgattcattcccggctcgcattttccggcgacgtccctcccggcctcggccgcgctgcagggacacgatcctctctagcgccggcagccgatacgatgagctctcgacgctgcctccctcgtcccgttcttctcctgtcttgttatcg

SEQ ID NO: 21888 - DNA, 310 bp, Setaria italica
  Peptide Sequence Number=SeqID_87862
agtaggggcgccgggcactttgatgttgcacttgctgaaggcggcctggtcctcgccgcacgcggcgggcagcgtggcggcgcgggtcatgttgatcgcgacggggtacttctgtttgaatgcggcgcagaggcaggcgacggtggccgggctcttgagggcgcccttgacgccggcgcagcactccatggctggctttccctgcgggctcccctgctgcacgtacgagaggcacgggaggagccccgccaccgccgccccgcagtccatcgatgacgacggggccggcgccagcgcctgcgacgccgcg

SEQ ID NO: 21889 - DNA, 231 bp, Setaria italica
  Peptide Sequence Number=SeqID_87863
cctatcccctgtgtgccttgcctatcccctgttgcgtgtctcaactagaacgcgacactgaaacccttaaagctaaagccaatgttcttaatattcataagtttctgaccagcaggggaatcgaatgcaatgatcttcaagaattgtctatcaaagctcaaatactaactaatgaaagtgtggataagattgtcggccatgctattagtcatcacattcagcacaataaac

SEQ ID NO: 21890 - DNA, 549 bp, Setaria italica
  Peptide Sequence Number=SeqID_87864
ggcgtggaacatgacgctggagaagcttccctgtgacgacggcgacggcgacgccaggcggcgcacggtcgggctcgccgtcggggtgcccgtgggggtgaccgtgctcgccgccgcggccgttctggcgtacgtctgcgtggcgaagcggcggaaggcggcgcacggcggcggcgacgacagcagcgccatcaccggcacgatgatccggagcctcgccggcggaccgcgggagttcgagtaccgcgagatccgcaaggcgaccaacaacttcgacgagaagatgaagctggggcagggcgggtacggggtggtgtaccggggcgtggtggtcggcgaccacacctgccccggcggcgccgggagcgcggtggaggtggccgtcaagaagttctcgcgggcgaacacgcagggccagaacgacttcctcgccgagctcagcatcatcaaccgcctccgccacaagcacctcgtccgcctcgtcgggtggagccacgacaacggcgagctgctgctggtgtacgagttcatgccgaacgggagcctgga

SEQ ID NO: 21891 - DNA, 835 bp, Setaria italica
  Peptide Sequence Number=SeqID_87865
aaccttttactttttgccggatatcactttcccttttgacaaacttcgtggtgccttgcactccgccccgcctagtcgagatgttgctgtgcgctttcgtttcaaaagggaaagtgatatccggcaaaaagaaaaggtgatagtacatagtattacctagtcaaacatcagaatcagacctcggtgcggacgcaccagcatccaggattcagagcccctctatgcctggcaaaacagctgaatgggttcaagtccgaaggagggtgttggactgcggagatttcgcttttcgatctacaaacgagtcatcgtacatgaatatatggatatcttctcttctgtgctcagtgccgcctcactttagactcactcctcgcgaggatcatgccggagagcttgtcaacctcgtaaaggagtccagcggaaaataggaagcatgttgtgatacagacgcggtggacagtaccagctacaataagagcaacaagttgtgctacaacaactgcacccacccagttctatctccactagcttcttggtagttcccaataaaggtgagcagcagcaggaagaggagggagcagatgaatccgccggcgatggtcatgagctccgatgaggcgaacttggccctgtacatctcgagcagcgacagcgtcaccgcgaagagcagcagcgacagcagcatcgaccgccccgtgctcgccatctcacctcacctcggccggatcgcagatctggggcgacagggcacgggcaggacgcaggagtagggttttgcggaactccttcgtcttcttcccctgttcctcagcgatctcgcgagatgattgag

SEQ ID NO: 21892 - DNA, 376 bp, Setaria italica
  Peptide Sequence Number=SeqID_87866
acgaccaggtgcccgacgccttccgcagcgtcgggctcgcgctgtgcatgagcatctttggcgtggggaactatgtcagcggcatgctcgtgttcgcgaccgattgggcgacgaggagcaagggcgctcagagctggttctccgataacctcaaccgagcgcacctcgactacttctactggctcctggcggggctcgccgctttggaggtggccgcgttcttgcattttgcaagcagataagtctagagaaacaaagtatagcgatgattcttaaacttcgaaagtcacaatgaattgcctgtgcgaaaactgtatacaaggtgctcgcagagggaaggtaaagaattatgatttcattctctcaaaaaaaaaaa

SEQ ID NO: 21893 - DNA, 453 bp, Setaria italica
  Peptide Sequence Number=SeqID_87867
caaacaaatggaagttcacaaaagactcgcggaacttccaactgaatatgttcattgttcaacccggaagagccatcgaaagaaaaagcagagtccgcagcacaccaggattcaacctttcctcagagaccagtaaagtcaattgattgcacatggcatgcttgaaaacccatacattgcaaagtgcagattgccttaccgagttccagactacccaatcgccaaaaggcaatgaaatcactcaccgactgcattgcatggtcctaactctaagaggtctagggcactcctcagcaccataggagtaacatgtacagatcactggatctacaacggtatgcactgtcacaaacagctaagagcaacaacatttgttacccaacatcaacaaccaaggtctacacactagtagagcggcatgaggagcgaatatcatttgccctttcgcttctt

SEQ ID NO: 21894 - DNA, 315 bp, Setaria italica
  Peptide Sequence Number=SeqID_87868
tacttggtaagtctaagtattggtagtattgttaaagtctttgggatgcaaaaaattcccagctggtctttcactggccaaagttgcatgaacggcacaccttttttcaaccaacttccaggggcttcggtggtgttgttagggctgcggtaacagacctacaggttctgtctcatggtttcatttcatgtggaggtgatggctctgtgaagcttgttcagctaaaagatgatctcgctacggtacatcaacaataaagcggggggggggggggggggtgggtagcggcgatgcgtaaaccaaaggtttacgttt

SEQ ID NO: 21895 - DNA, 453 bp, Setaria italica
  Peptide Sequence Number=SeqID_87869
tgttcccccaagaaacgttcttccttccctcccttctttcattcagtccagcggcctctccgaccttgtctccttcatcatccttgccatggctctggactctgttcctacttatctcagagacttgggatcccacagggctaccagaacccagcagcaaagggtcaggaaagatgagcgcacctggacctcggacacttatgcaccttatgacgacgggcaccagtggaggaagtatggcgagaagaagctctccaactccaacttcccaaggttctattacagatgcacctacaagaacgacatgaagtgccctgccacaaagcaagtccagcagaaggacaccagcgatccaccattgttctccgtcacttatttcaaccatcacacctgcagcaccagttcagctcccattggaggcactagagataccacagcgcagtcatcttcaag

SEQ ID NO: 21896 - DNA, 469 bp, Setaria italica
  Peptide Sequence Number=SeqID_87870
ccgcagcccgagctcagatcccttgccttcctctcccaaaccaccagcaacagccgctccggaggcgaagagagcagcgacgatggctcggcaaggtggcgtcgtgtcgttctcgctgctgctggtgctgcttctcggcgcctacctgccggcgccggccgccgcgggggtgcacctctccacgctgcccaaggcgctcgacgtcaccgcctcccccaagcccggccaagtcctgcacgccggcgtggacacggtgacggtgacctggtccctgaacaccaccgaacccgccggcgccgacgccgcgttcaagaacgtgaaggtgaacctgtgctacgcgccggtgagccagaaggaccgcgggtggcgcaagtccgaagacgacctgagcaaggacaaggcgtgccagttcaagcactcgatgcctggctgaaaatccaatcggtagctttctcgatattaccaccag

SEQ ID NO: 21897 - DNA, 995 bp, Setaria italica
  misc_feature (969)..(995): n is a, c, g, or t
  Peptide Sequence Number=SeqID_87871
ctcctctccaacccacaccagtcaggtaactagctagagaggaagagatcaccggccggcgatcgattattaacgcgtcaggagaagcgatggctcggcaacaaggcgccgtggtgttctcgttgcttgcggcggtgcttctctgcggctgcctgccggcgccggccgccgcgggggtgcacctctccacgctgcccaaggcgctcgccgtcaccgcctcccccaagcccggccaagttctgcacgccggcgtggacacggtgacggtgacctggtccctgaacaccaccgaacccgccggcgccgacgccgcgtacaagaacgtgaaggtgaacctgtgctacgcgccggtgagccagaaggaccgcgggtggcgcaagtccgaagacgacctgagcaaggacaaggcgtgccagttcaagctcacccagcaggcctacgccgccggcgcccggcgcagcttcgactacgccgtcgccaaagacatcccctcgggcacctactacgtgcgcgcgtacgcgctcgacgcgtccggcacgcaggtggcctacggccagacgggccccgaagccgccttcgtcgtcgccggcatcacgggcatccacgcctccatcaaggtcgccgccggcgtgttctccgccttctccgtcgtcgcgctcgccttcttcttcgtcatcgagaaccgcaagaagaacaagtagggggccagcgggcggccgtgtggaacgcatggcgtcgtcgcgtgctgagttcttaatttccggcccggttgtaagctagcttggtctgcttcacggagacatgtgagtggccggccggtgcttaaaattgaaggtgtgagtgtcagagctgcatccatggatggatggatttacacgggtgcagcgcaacccaactattttcggtgtatgcttatttctttgtcgtgtgcgtgaagtgaagaagatatgaaataactttggttaaagnnnnnnnnnnnnnnnnnnnnnnnnnnn

SEQ ID NO: 21898 - DNA, 232 bp, Setaria italica
  Peptide Sequence Number=SeqID_87872
gcagtaccctccgacgatgctgctgacggcggaccacgacgaccgcgtggtgccgtcgcacacgctcaagttcctcgcgacgctgcagcacgtcctgcgcgcgggcgcggagggcagcccgcagacgaaccccatcatcggccggatcgagcgcaagagcggccacggctgcggacgctccacgcagaagatcatcgacgaggcggcggatcggtacgcgttcgctgcgaag

SEQ ID NO: 21899 - DNA, 444 bp, Setaria italica
  Peptide Sequence Number=SeqID_87873
aataatcagcatcgccgtcgggatcctcaactggttcttcgccgtcgacccccacttccccgccggcgacgacagcaccaccgccaaccaccagcgcgacggcaagcatccggccaccgcgcgggaggtcgtggcggagatgatcgaggaggccaagttcgtggtgcggatccccacgttccagatcttcgtggcgcagggtgtcagcggctcgttcccgtggtcggcgctctcgttcgcgtccatgtggctggagctcaaagggttcagccatggcgacaccgccgtcctgatgaccatcttctgggtcgcgagctccctcggcggcctgctcggggggaagatgggcgacttcctcgccgtgaggtaccccgacgccggcaggatcgtgctatcgcagatcagcgccggctcggccgtgccgttagccaccgtgctgctccg

SEQ ID NO: 21900 - DNA, 333 bp, Setaria italica
  Peptide Sequence Number=SeqID_87874
cacaaaatatagaaagaacgccagtgccacagcccacatccaaaacaaccttgcctgaaattagatcttggtgatgcataatagcatttctataagtaatagttctcacatggtccttgagcatctcctcgtgcacgccgatgtgggagtaggccttgaagtaggccacatcgtagtcggtgcacggcggggcggcgggatgcgattgcacccccgaagccaactgtccctgcagaggccgcatgccgccgccgccgcctactccgccgcgccggggcctgcgcggccgcggcaggtggccgttgccgtcagcaccgccgccgaacatgaggg

SEQ ID NO: 21901 - DNA, 403 bp, Setaria italica
  Peptide Sequence Number=SeqID_87875
cacagcatctggatcagctttcaagaaggctagggtccaagaaccctccccggctcaatctactgtgaaggtgaggaaggagaagctaggggatcgaataactgctcttcaccagcttgtctccccgtttggaaagactgacacagcgtctgtactccttgaagccattgggtacatcagattccttcatagtcaaattgaggctctgagctcgccgtacgtgggcggcagcaatgacggtggtggggccggctcctccatcagctctagctccaagcatcagcagcagctccacatccacgagtctagtgtgcacggagaaaggcacagcatatttccagaagaccctggccagctcctgcatgacaatgcattagaaaaaacgcggacagcctgagcagga

SEQ ID NO: 21902 - DNA, 473 bp, Setaria italica
  Peptide Sequence Number=SeqID_87876
cgaattcgaatcctccaccaaatctctcctagcagctgagtcttcctcctccccggcttcggcgatgtctgggcgcggcaagggcggcaaggggctcggcaagggcggcgcgaagcgccaccggaaggtgctccgcgacaacatccagggcatcacgaagccggcgatccggaggctggcgaggaggggcggcgtgaagcgcatctccgggctcatctacgaggagacccgcggcgtgctcaagatcttcctcgagaacgtcatccgcgacgccgtcacctacacggagcacgcccgccgcaagaccgtcaccgccatggacgtcgtctacgcgctcaagcgtcagggccgcaccctctacggattcggcggctgagcgcgtcccctacctcgtctgcagctgttgatggtggtggatgctatgtaatggtctaattgaagttcaactccttgttaaatctcagctggcttct

SEQ ID NO: 21903 - DNA, 624 bp, Setaria italica
  Peptide Sequence Number=SeqID_87877
ccaatcacaccttgaatccccatcttcacttcgatccactcctccgaggaatccagctccgttggcaagcatgtctgggcgcggcaagggcggtaaggggctcggcaagggcggcgcgaagcgccaccggaaggtgctccgcgacaacatccagggcatcaccaagccggcgatccggcggctggcgaggaggggcggcgtgaagcgcatctccgggctcatctacgaggagacccgcggcgtactcaagatcttcctcgagaacgtcatccgcgacgcagtcacctacaccgagcacgccaggcgcaagaccgtcaccgccatggacgtcgtctacgcgctcaagcgccagggccgcaccctctacggattcggcggctaggccggggcgcctctccttcgatccccgtgcgttttctgggttgttgccgtgtgtggttagggatgttaccatctcttgttacggaattagcctatgtcggcttctgtggtaggagtagtagtattgctgcaattgttgcctttctgaatgtaatcttatctttctgaaatgaaggaatgcgtactggtcaacatgtatgaggattgaacatacctgcagcaaagaaatgatagtaatcatgt

SEQ ID NO: 21904 - DNA, 643 bp, Setaria italica
  Peptide Sequence Number=SeqID_87878
atcccaccccccaaaaatctccaaatcccccccatcctcttcttcgagttcgagcgagcgggcgaccatgtctgggcgcggcaagggcggcaagggtctgggcaagggcggcgcgaagcgtcaccgcaaggtcctccgcgacaatatccagggcatcacgaagccggcgatccggaggctggcgaggaggggcggcgtgaagcgcatctccgggctcatctacgaggagacccgcggcgtgctcaagatcttcctcgagaacgtcatccgcgacgccgtcacctacacggagcacgcccgccgcaagaccgtcaccgccatggacgtcgtctacgcgctcaagcgccagggccgcaccctctacggattcggcggctgaggggcgccgccgccgccgcccggtggccgtggcggaagtcttgggtcgcggtcaagaaatcggtggaggaggcgagggtgttctggtccatgttcagtttcataggcttatcagtagtgctaattattgttccgtgttcagagccgtggtcaaagtagtagtatgtggagttgtactgcaaagttcatctgcatttccctgtctgttctgaatttctaatatatgaatccggtgccttgccgtgtttataagaaaaaaaaaaaa

SEQ ID NO: 21905 - DNA, 750 bp, Setaria italica
  Peptide Sequence Number=SeqID_87879
cggcgaattcgaatcctccaccaaatctctcctagcagctgagtcttcctccgcttccctctcctccagattccaattcctccgagcggttgctgcgagcgaagcttcccggtttccggcgatgtcggggcgcggcaagggcggcaagggtctgggcaagggcggcgccaagcgccaccgtaaggtgctccgcgacaacatccagggcatcaccaagccggcgatccggaggctggccaggaggggcggcgtcaagcgcatctccggcctcatctacgaggagacccgcggagtgctcaagatcttcctcgagaacgtcatccgcgacgccgtcacctacaccgagcacgcccgccgcaagaccgtcaccgccatggacgtcgtctacgcgctcaagcgccagggccgcaccctctacggattcggcggctagagtggctccccatcctctcctggtggcgaaccacatgcggtggtggtggtgatgtgttctagtctagcggagtcggtggcccagtgctttctgtatcgatgctgtgttctgtggtgcttgtttagtaatctttcacaaatctgtcccttgcctcattgcctgtgtttagtaatcatcagtatataaactgatgagtttacacacagatgaaattagcctgcgttcagtcttcatcggtatcaaaagagggacacaaatctattccttgcctttgctgggtcttcatcagtataaaagtaaatgcattgccagttttt

SEQ ID NO: 21906 - DNA, 718 bp, Setaria italica
  misc_feature (679)..(718): n is a, c, g, or t
  Peptide Sequence Number=SeqID_87880
aaagacaagctccccccccccaaaaatcccccaatttccttcgtgccgcaagaggagcgcgtttttgcggcggcggcgatgtcggggcgcggcaagggcggcaagggcctgggcaagggcggcgcgaagcgccaccggaaggtgctccgcgacaacatccagggcatcaccaagccggcgatccggcggctggcccgtaggggcggcgtgaagcgcatctccgggctcatctacgaggagacccgcggcgtactcaagatcttcctcgagaacgtcatccgcgacgccgtcacctacaccgagcacgcccgccgcaagaccgtcaccgccatggacgtcgtctacgcgctcaagcgccagggccgcaccctctacggcttcggcggctagaggctgatgcgcccgtcccctgctgtctccctcctgcagctccgacgttgtctggccgtgctcacaagtcttgcggttaagaaagtttcagactcgcttgtttagctcacatctggctgtagtaggtttatctgaatcatgagacagtaatgaaatgatctgatattagaaatcaagcttgttgtgcaatgtgtcgttttcaatgcaaatgtagcttgttctgtgatatatgtgattcttatttgcagttacaacacaaaaacagttctctaaaaacaaaaaacaaaannnnnnnnnnnnnnnnnnnnnnnnnnnnnnnnnnnnnnnn

SEQ ID NO: 21907 - DNA, 1494 bp, Setaria italica
  misc_feature (1)..(56): n is a, c, g, or t
  Peptide Sequence Number=SeqID_87881
nnnnnnnnnnnnnnnnnnnnnnnnnnnnnnnnnnnnnnnnnnnnnnnnnnnnnnnnaaaaaaaagtatgatgcactaaactaattttgcacgaaactgcattacatcaaatttttttgtggaaaaaaataaaggaggaccttacatcatcttgctgcctacctacggatgcagaacaccagtgagatgttccgcacgcgcagcaccagcaccgagtttattataagaaaacagagcaaagcgagagcaaacagctcgctacagcatagccgcgagaaccgacgaacaaaaggagaatacacggacaacggcaggagtaggactaatgctcggcttgcagcgcgtgccgggccggcttccggccggcgactagcagatcctcttgcagaagcacttgcgcgtgccggccgtcgtctggcactcgccgtcggggaatctctcgacgcggcacacgttggcgcagttgctgctgctcaggcacaggcccttgaagtggtggctctgcgacaggcagtgcctcgcctccgccaccgtcgccggacccatctctgaggcgatgaggaggagcaggaagacgaggaccggcgcggccatgcgtcgagagagtgccatctctgctcggtggcgaggttgggcagaagctgaagaacaggacctaaactgagcttaccacggtcaccggtttttgttattaggtggatgggcgcaggagtgtcgcgcggcaagggcggccaagggtctgggcaagggcggcgcgaagcgtcaccgcaaggtcctccgcgacaatatccagggcgtcaccaagccggcgatccggaggctggccaggaggggcggcgtcaagcgcatctccggcctcatctacgaggagacccgcggagtgctcaagatcttcctcgagaacgtcatccgcgacgccgtcacctacaccgagcacgcccgccgcaagaccgtcaccgccatggacgtcgtctacgcgctcaagcgccagggccgcaccctctacggctttggcggctagatcggttcctcttctggtggcggactacatgtggtggtggtggtgtgttctgggcatagtgtagtcagtgctctgtgtatggatgctgtgttctgtggtggttgtggtctacccttcgggatgttcgagtctctagtccgtctgctgtaatatctagttgctgttatcaatggaaaaccctcggttctatcctccaaaaaaaaaaccttcgatccccgtgcgttttctgggttgttgccgtgtgtggttagggatgttaccatctcttgttacggaattagcctatgtcggcttctgtggtaggagtagtagtattgctgcaattgttgcctttctgaatgtaatcttatctttctgaaatgaaggaatgcgtactggtcaacatgtatgaggattgaacatacctgtctagtctaaagtaaattgtattagtttaatttcttatttgtttttgtttctttaaaaaaaaaaaaa

SEQ ID NO: 21908 - DNA, 565 bp, Setaria italica
  Peptide Sequence Number=SeqID_87882
ctgggcgcggcaagggcggcaaggggctcggcaagggcggcgcgaagcgccaccggaaggtgctccgcgacaacatccagggcatcacgaagccggcgatccggaggctggcgaggaggggcggcgtgaagcgcatctccgggctcatctacgaggagacccgcggcgtgctcaagatcttcctcgagaacgtcatccgcgacgccgtcacctacacggagcacgcccgccgcaagaccgtcaccgccatggacgtcgtctacgcgctcaagcgtcagggccgcaccctctacggattcggcggctgagcgcgtcccctacctcgtctgcagctgttgatggtggtgctttgttcctttgtgttccctgtgctgtgcttttcctctggcgatgtagagaggtcagattcatagatgattgatctatggtgtgctttattcctaggtggtggatgctatgtaatggtctaattgaagttcaactccttgttaaatctcagctggcttccctcgctgcaaagaaatgttaaccctgatcagatagcaaatatcatggtttccttttg

SEQ ID NO: 21909 - DNA, 601 bp, Setaria italica
  misc_feature (560)..(601): n is a, c, g, or t
  Peptide Sequence Number=SeqID_87883
cccccaaatcaccaccaatcctctcgagttcgagctcaccgcctccgagggaagccatgtcgggccgcggcaagggaggcaagggtctgggcaagggcggcgcgaagcggcaccgcaaggtcctccgcgacaacatccagggaatcaccaagccggcgatccggaggctggcgcgcaggggcggcgtgaagcgcatctccgggctgatctacgaggagacccgcggcgtgctcaagatctttctcgagaacgtcatccgtgacgccgtcacctacacggagcacgcccgccgcaagaccgtcaccgccatggacgtcgtctacgcgctcaagcgccaggggcgcaccctctacggcttcggcggctgagctctgcctcccctgtctggtggcgtgccgggagctttgggtcgaagctggttgatggttttagggttagcaatgttgtggaggcttttgttgtcatagtggctgtttcgtgcaaagttctgttctgtgatgtgaaatggaattcgaagcgtatgaatgaaatcgatcttggacaaaaaaaaattgtctaannnnnnnnnnnnnnnnnnnnnnnnnnnnnnnnnnnnnnnnnn

SEQ ID NO: 21910 - DNA, 807 bp, Setaria italica
  misc_feature (784)..(807): n is a, c, g, or t
  Peptide Sequence Number=SeqID_87884
aaaataaaacaaaaccaaaaccaaaataacctaactacgaagttcgagctcaccgcctccgagggaagccatgtcgggccgcggcaagcgccggagtaccgtgtaggttggcctggcttgggcgtgtaacttctcctagtctcctcttcacacgggagtcacaacctccaccaccaacccaccacttcggaagcgcggaggcgagcggcggcggcgatgtcgggcaggggcaagggcggcaaggggctcggcaagggcggcgcgaagcgtcaccggaaggtgcttcgcgacaacatccaggggatcacgaagccggcgatccggaggctggcgaggaggggcggcgtgaagcgcatctccgggctgatctacgaggagacccgcggcgtgctcaagatcttcctcgagaacgtcatccgcgacgccgtcacctacacggagcacgcccgccgcaagaccgtcaccgccatggacgtcgtctacgcgctcaagcgccagggtcgtaccctctacggcttcggcggctaggttaggtgtctgtctgtgcggttcggatcgatgggtagcttgtgtcgccttcatgtgttcttgtggtagttgctgtaggggagatgtagctggttgcttggtcctttcggtgtcgggtgtgtggatgtaagaactgcttgttcgaagcaattggtctggaatagatgctgatgtaggaaatcaatttcatcttaattttctatatttctcctcctgcagttgctaaaagtaatcttttcacaatttacattcaaannnnnnnnnnnnnnnnnnnnnnnn

SEQ ID NO: 21911 - DNA, 729 bp, Setaria italica
  Peptide Sequence Number=SeqID_87885
gaaaaatcaccaaatcttcgtccgcacaaatccatctcgaatcctcctgcttccggcgagctccaagtcttcgcagcatcagccatgtcgggccgcggcaagggaggcaagggcctgggcaagggcggcgcgaagcgccacaggaaggtgctccgcgacaacatccagggcatcacgaagccggcgatccggaggctggcgaggaggggcggcgtgaagcgcatctccgggctgatctacgaggagacccgcggcgtgctcaagatcttcctcgagaacgtcatccgcgacgccgtcacctacacggagcacgcccgccgcaagaccgtcaccgccatggacgtcgtctacgcgctcaagcgccagggccgcacactctacggcttcggcggctgagccttgaccccgtccgcgtcttgcaggcgcgagctagggtttctgatggatttaggggagttgctgtgttgggttctgtcctgtgtctagctgcgttgtggtgttaacttaataggtgtttatggttgtaatggagaattggaagcctatcaattgaatgaatggatgttcgtaggtataatttggtgttcttggtccctctgttcccattggctctgttcttgttctgatgactggtcaagtattgtttgtggccctcttaagtagtcctgtaatgtttctttggaaatttgcagtctccgtcgatgatttgtgactttaaaaaaaaaaaaa

SEQ ID NO: 21912 - DNA, 357 bp, Setaria italica
  Peptide Sequence Number=SeqID_87886
gttgatggagagaaggcagaagaggatgataaagaatagggagtcagctgctcgttcaagggctaggaagcaggcctacactaatgaactggaaacaaggtatctctattagaagaggagaatgagaggctaaagaggcaaaaggagttggagaagatacttttctctgcgcctctgccagaacccaaatatcaactgaggagaacaggctcagcaactttctgattatgtccagaatatctagttttgtagttctctaagtgctgtggcttgtaagtttttgcctctttggcttagaatcatttgctaacttgggagtttttggcttatcctagctcgatggtttgctctctagat

SEQ ID NO: 21913 - DNA, 591 bp, Setaria italica
  Peptide Sequence Number=SeqID_87887
tagggtaagtacggtactaagaaacgactcttggggagatgactcttgaggatttcttggtgaaagctggggttgtcacacaaggatatctgaaggacttgaacgatgtaggcaatgtggaacaggttggtagtgctggggtttctggtttgacggcgggagcacagtggttagaccgctatcagcagcagattacagctattgagccccatcagcatgggcaacatggtgtgccaggtgcttatatgccgagtcagttagcccttcagccactgaacgttgggccgggtgctattctggaatcatactctgatggccacattacctcgccaatgatgggtgcactttctgattcccccacacctggtaggaagcgcggtgccccaggagatgtggcggataagttgatggagagaaggcagaagaggatgataaagaatagggagtcagctgctcgttcaagggctaggaagcaggcctacactaatgaactggaaaacaaggtatctctattagaagaggagaatgagaggctaaagaggcaaaaaggaagtttaggtaagtaaagtaattaacttttttacttactta

SEQ ID NO: 21914 - DNA, 469 bp, Setaria italica
  misc_feature (440)..(440): n is a, c, g, or t
  Peptide Sequence Number=SeqID_87888
tgctacgtgatgtgcctcaccgacaacaacttcaggaacctccccacgggggacgtcgtcgacaagctgatcagggagtggcagacgcgctcgcacgccggcgtcgcggacgccgacgggtactacgaggcggagctgttccacggcgactacgaggtcaccgtcagccacccggcggcgaactccaccgtggtgcagagcctcagcgtcgacaggaagaccgaccccaaccacgtataccccatacacgtctagagtatcactagctccgatcctataggaggatttatgattgttacgcatacacatgtgcatgattgtgggtctagggttctagagcattgtggcttgtgatgtcatgagtcagtcagtcatacatacgcgcccgagagatagaattcctggtgaggcgatcgatgtgatgttcatatattaaaacngaaaaaggaattcgatttgtttttcaagt

SEQ ID NO: 21915 - DNA, 766 bp, Setaria italica
  Peptide Sequence Number=SeqID_87889
ccatctcgcattcacaccgctgcctctgcctccactccacttccttcctttccatctcttcttccccctcttccactccttggtttgcttttcttggaatccttctcgggttcaggccgattggatgttgcagtaaaggcggtaggtgctttgcttctcacccgttgggagagggacggagcagttgaagaccgataaagattgcagcgacgacagaggaagggagaccttgaggggctgcaagttcttgggagcggcaacatgaagaagctgttcttcatcttcttcctcttcctgctgaccggcgcagcagttcgtggcgaagatggtgcgtacatcggcgtgaacattgggacggccatgtcgtcggtgccggcggcgacgcagatcacgacgctgctccgctcgcagaacatccgccacgtccggctctacgacgccgacccggcgatgctggcggcgctcgccaacaccggcatccgcgtcatcgtgtccgtgcccaacgagcagctgctcgccatcggcaactccaacgccacggcggccaactgggtggcgcgcaacgtggccgcgcacttcccctccgtcaacatcacggccatcgccgtggggtccgaggtgctctcagcgcagccaaacgctgcgccgctgctcatgcccgccatgcgctacctccagaacgcgctggtggccgcggcgctggaccggtacatcaagatctccacgccgcactcctcgtccatcatcctcgactccttcccgccgt

SEQ ID NO: 21916 - DNA, 218 bp, Setaria italica
  Peptide Sequence Number=SeqID_87890
atgtggcggcggttccaacgaccatttcattatacccctagcacgtactggatgtcaaatgaagcctgacaccgcattctgccggctaattcgctggttaattaagaatgatgaaagtggggtgactgtgacttgattaagacgttccttatcgtccataccagtatttttaaacggaacagtggactacagcatcatgacggccaataggcaaccta

SEQ ID NO: 21917 - DNA, 435 bp, Setaria italica
  Peptide Sequence Number=SeqID_87891
agatatgacctttcaagcagattttttatgatgggcataaatacttcacctctcttcaccactaccaagtgacagcaggggtggagaaggaatgagaaaaatggtgctaatcctctcattcacttccctttattatatttcgtacatcactatgcagctatctagcctaccaggagtataactgttcagctacgaaaatgttaatggatcattcttcgatagaaattctgttccaaattccttttgtatccgatcatttgactccattctagctgctagtatcacatcattaataaaactcttatctgggaattcatctggcacaaggcttctgtatatatcaaattgcttatctgcatcttctttcctgtctaaaagtgcatacacaatgccctggcaaagatgaggccgaaaatctcgaggatcctcatttat

SEQ ID NO: 21918 - DNA, 415 bp, Setaria italica
  Peptide Sequence Number=SeqID_87892
ctgtcgggttccccacctcgctgagctccgggcgaatcttgaggcgagggaaggcggcggaggcagagatcgacggcggcggcgcaaagggcttgtggcggcgcggagctgtagatgcggaagcggaggttctgcggttggggaaaacaaatagcggcggcctttatacgcggtctcggcgtgcgggcccgcttcgagtcggtcgctgggcaggggcgcgggacaaactcgcactcgagtccgagcggagaaagcagcgctgaaggaacgcgtgcgagctgggcggaggaggaaacaggcgtgcaagctggagaagataatggcgggccccagcggccagagaagggaaccgcggtgcgggagggcagctgggccgttggccactagctgggccgagcgaagcttgggccggttg

SEQ ID NO: 21919 - DNA, 272 bp, Setaria italica
  Peptide Sequence Number=SeqID_87893
gagctgtcgacgcttcgagtcttggaagacgaggatgctctgaaatgataagctggtggagtgatcacgcaagaagagctcatctggagttcagtcgtgtgagaacagctacgagaataagcccagccgtggctctttctttctgccacatttctaattcgattacatgcgtatgcatcttctttcggtaagcgagatggaaattgtgttgtttcctgaagcatcaaactgagacacgcaacaggggaaaggcaaggcacacaggggatagg

SEQ ID NO: 21920 - DNA, 264 bp, Setaria italica
  Peptide Sequence Number=SeqID_87894
cgttttgatagcaagtgcttgcaatatgggtagatagaaaagctcatttctcttccgtactagccgcgcccagcacatggtacagctgaatatctggataaacaccaacagatagcataatcggtatgagcatcaaagcttcttcggtgaattgtcttttgcatagtctgttgattgtggcactaaagtcttcaatagaagcctcaaaccctgcatctagaagcttaccaacccacataatcgccctgtaaggcattccttttg

SEQ ID NO: 21921 - DNA, 226 bp, Setaria italica
  Peptide Sequence Number=SeqID_87895
atctgcggttctggaacagaccttgatctgcttgggctcgatgttgctgagtatggggcactccctgatgagctgctgccggcgcagcgagctgggcttggggcactcgctgtagacccgctcgagcgcctcgacctgctcgggggtgtagcgcacgtacttgcccgtgtccacctgcggcgccccaccgccgccaggcgaggagcgatccttgccgccccgccca

SEQ ID NO: 21922 - DNA, 665 bp, Setaria italica
  Peptide Sequence Number=SeqID_87896
gcctgtgaaggccaaggggacgtcaagcaggagactgtgacgcggatcctcatcaactacgcgcagaactcgctgcacgggctcatggcaagggacgtgcacggcggcgccaagtgcggcggcggaggcgcggacgccgacgccgccaggaagcagcgcgccgtcgtggaggccatcgtgggcctgctcccggcgcagtcgaagaggagccccgtgccgatggccttcctgtcggggctcctcaagacggcgatgtcggtgtccgcgtccagcatctgcacggccgacctcgagaagcggatcggcatgcagctggaccaggccatcctggaggacatcctcatcgccgccggcgccggcgcgggtgcggccacggcgtgcgggcagctgcacggtctgtacgacacggacgtggtggcgcgcatcttctcggtgttcctgaacctggacgacgacagcgaggaggacggcgggttcgactacgacagcccgcggtccccgaagcagagcctcctggtgaaggccgccaagctgctcgacagctacctcgccgaggtggcgctcgactccaacatcctcccctccaagttcatctccctcgccgagctgctccccgaccacgcccgcctcgtcaccgacggcctctaccgcgccgtcgacatctt

SEQ ID NO: 21923 - DNA, 610 bp, Setaria italica
  Peptide Sequence Number=SeqID_87897
ctcaaacctcagatactctaatacaaacaatggctttccatctacgatcagttagcctgccatctaagaggctctccaatgaggctgaaatcgaagccgagctgcaaagcctggaggcaagcacctcttccccctctgcaaccatcgagtcagcatgcgataggtttagaaggaaggacttaggaagaatgtactacagccacatcgaggagatcatccacttgcctagcaaccaagtttgctccatccagcaaaggaaggagttggacgaggaaatggaaagttctctcgagataatcgatctctgcaatgccatgcaagagaactttgccgagctgaagaccaccatccaagatctgctggtggtcctcagaaggggagacgattcaaacactcaggccaaggtcctttcatacatccgcttggtcaagaaggcgcagaagcaatccaagaagactagcaaaaagcctacctctaacgagtgcaagctggtcaggctattgctcaaggctagattggtcgccgcctctcttcttgagttagcactgcgcctcgtatccaagcaaggggtgatgcccaagaggtctcttgtctccaaagcattccagaa

SEQ ID NO: 21924 - DNA, 182 bp, Setaria italica
  Peptide Sequence Number=SeqID_87898
ttcgccgccctccatacatgaagactacaatatgaagatgatcaaggctttgagcacaccatagcctcatggcagctttgagaagctttgaagattccgccagataaagtacttgaggaacaccaagactactcggcgaatatcttaaaagtactcgaagactgctgcattcgactatgaag

SEQ ID NO: 21925 - DNA, 415 bp, Setaria italica
  Peptide Sequence Number=SeqID_87899
tcagctgctgattttgcatgtgccagagaacaaggattcaatgtaatagaggtaaatacatctgacatgagaaatggggcttacgtaaggcagaagtttgaggaagcaactaaatcacatggccttgaaaaaatggtcacaggaggagatcatcaattcgctgaagggtgatttcttggatccagattcaggaactcctgataggactgaatatcaacattcgatgtcccgtgctactagattagtgatcgactgtgatcaacagaaatcacctgtaggatactacccaggctccaaagtcagtgatgaagcttctaaacaagttcttaacaagacactgatcctatttgaggatgtggatactgtctttgatgaggatcgtgggtttatttcgaccatacttaagatggcagag

SEQ ID NO: 21926 - DNA, 321 bp, Setaria italica
  Peptide Sequence Number=SeqID_87900
cgccgtccaggttagttagttattgtttctgccgagatctatctcgccgtccattctgcagtatataaatgcattggatttgcattgcatgcatgcatcatggtcatattacagatgcatatgctgctttaattttttccaaaccgaaacaaatcccttggtaagtctgtaaaaagttaatttcagtggtacaataacgtccaaattactgatagtatcaccagtgtatttctcacttgggatatataaacacaccaccagaataaaagatgacatatatatatatatatatatatatatatatatatatatatatatata

SEQ ID NO: 21927 - DNA, 1112 bp, Setaria italica
  Peptide Sequence Number=SeqID_87901
attgaccgaacacctaaaactggtataattttgtactcagtgaaaccagcttcaaatataatcttcctccactcttgctcatctctctcaatgccattgacaaccataataaagagatcatataatacttctgtttctctatgcttaagatttgaaggccctgcaccaactacggtgtctactattatcacctttccacctgcatctcgtggaggtatagccttcttgcagttctttaatatcgtaacacatttggagtcatcccagtcatgcataacccacttgaggaagactgcgttcgcaggtggaatgctctcaaacatgtcaccagcaatgtatttaagtccggtgctagcaggagcactggctacgacgtgtgagagatccagcacactgcagtctatgtgagggaaggcctttgagatggcctgtgccgctgcaccatggccccccgcaacatcaatgagggagcttatcccctggaaaacgtagccacactctttgatggcaatatccatgaggaagcggctatctgcgaccattccagcattgaagagagggctcacggtttcgtcgtggccgatcacatcccacacagtctttccatgcgaaatctcaaagagggtcagatctggcagctcatgctccaaccaggtggcaagaccgaggaagggggacacaaaagtgttatggagaatcaagcttagtgtaggagtcaagctcagagtgccgacaagaagtcgagatgccggagtgagaccatagacacaatcaccatcaccagccgagtgcttggcattggcaatgctgaagatgccggtgacactgagcacgcgcatgagtctacgcatgcatggtatctttgaggggtgaagttggaccttggtggctatttgggtgatggtggcagtgccgccatgatgatggattgcgtcggcgatgcggagttccatggcggatttaagtgccatggacttgatgtatgcgaatgtgctgtgccaaagctcaagctgagcatcgagcaaggcctgctgatcagtgtagtgttgctcctgggtggatcccatggcacgatgtttccgctttgttagcttatcagttatggcctgctg

SEQ ID NO: 21928 - DNA, 686 bp, Setaria italica
  Peptide Sequence Number=SeqID_87902
taattaattattattattcctccttttactccattcttgaaccccagatttcttccttcagctaaaactgttactcttcaggttcttttaacaccctgacataaaagattaaaagctgaagaggaaaaggtaccacgacatagttcaagttacggccttacagacacagcacatcaagcctgatactgctactgcccaagaggggaatgttacaagcaggaggcccaaccagtacaccacacagaactaagtaatatgcacagaaatggttatccgagtactctgataacccgccacctttaactcttccagaagcgcaactccgttctgaatcagaagccatctgcgaccttcagaatagaagctttgatcaaccaaaggtcatgcatgattggcctggccttttagcttaagctctaactctagctccttctgtcttagctcaagttccaattgcttattctcaatcatcatatgctcattctccatcgccatcctttctatctccctatccttcttcttcctgaatcgctcccacttaacacactgctttttgagttccaggttcttttcttcaatctgcaagagacgtttccggacctctagtgattgtgaagccaagtcctgttgcaacaaagcccagttggttccatctgggaaagccttgttgatgtccactgttatgc

SEQ ID NO: 21929 - DNA, 1968 bp, Setaria italica
  Peptide Sequence Number=SeqID_87903
tcagtgtgagtagtattctcatcatctcaaagcacatggacaaccagggcatgctaaactcgacaatatataagcaagcagcaaatcagttatttccagacaaaggtacctttggtaataatattggaactaattaatcactaaccatgtcaattatagtgttacacttacaactagatcaaattttgggcttccagtactagaacaagcatcaacaacctagggtcttagagctaagatagtttgagatgtcatttactagtttaacaccttcagaatagaagctttgatcaaccaaaggtcatgcatgattggcctggccttttagcttaagctctaactctagctccttctgtcttagctcaagttccaattgcttattctcaatcatcatatgctcattctccatcgccatcctttctatctccctatccttcttcttcctgaatcgctcccacttaacacactgctttttgagttccaggttcttttcttcaatctgcaagagacgtttccggacctctagtgattgtgaagccaagtcctgttgcaacaaagcccagttggttccatctgggaaagccttgttgatgtccactgttatgccatggggatcagacctcttaataccttcatgagagcttgaggtgagcaaagctgcatcgccgtggcgagcccttttgtccatggagggctccctcatgtttgtatgcacaggatgttgctcttcatcatcattctcctcatgatcagaatccgcactttgatcatcttcatcagcatctccacttgcatccctcagaggatcatggtcctctttacatctgagagcaagcagtagtgaatgctgaagtgcatgatcttcaggcaatttcctacggttgttgttatggtaggaacacatctcttcaaagaacagttgttttgagttaagtagcttcttcacatcatctttcatcttatcagaaagatgattcatgctatcaagaagttctggcttttccacaacatcgcaagcagtacccctaccaaggatgtctatcagccttttgtacctcttgttaaggtcattgaacttatcctcgcactgttgtggtgacacatggcaatctctctcccccatgaccttcgatatcgccttccatttgcccttcttctgcattattgtagagttcctcctgccaccacctaaatcagcaccatgatcatctccagtgtaagacactgctgtaatcaaaagctttaccattgaatctgtccacttcatgcgatgccacatagaggccttcttgcctttgacactgggggtattggtagcatcttcagtcatataatgtccctcgtcatcaatcaagccgttctttgagtgatgactgtgctgatggtggttcttatcactccttccatcttctttgaactgaaacccaggaaagtcatcaggctctgaagccctgttcattgtgagggtcccaggtatttgagagttgataaagatttgctttcctaagtttggagcatgtgtttccatagagttgccatgtaagtctaaactgccaaagggagccccttgcatcctgcttccagggggttggttagtgccttccatttgctcaaaaggatcacccaaacacttacttgtaagggatacaagtgccacaaaacttcacatcgatatcatgttatcaccattgggggttagcgaggagaagagcagtggtgccgtcggattgatgctttgccactcgtgcgcccccttgctcactccttggattggtggttactcttggggttggcagccaatggacaaggaggaccgcaatatgagtagtaggaagcgtcaacggacaaaacaaaggggaagggatggagaagaggccggcagatctgcaaccctcaaataaccaaacaactcatatcctgtcggagctgcgcacgaagtccttttgtaatctccgctgagtgatagcg

SEQ ID NO: 21930 - DNA, 335 bp, Setaria italica
  Peptide Sequence Number=SeqID_87904
cacgcttcccccaagcccctcatctcccaaaccctagtgactagcgagagcagcagcagctgccgcgcagccctcgccatggcgccgagctctccgtcctccgccgcgcccacgcgcgcctccgggcggaagcgcgccgccaaggccgaggagatccatcggaaccaggaggaagaggaggaggtcgcggcggcgtcctccgccaagcgccgccgcggagcgtcctccgggaagaagcccaagccgccgcccaagcaggccaagacggccaaggcggggaggaagaagaaggcggaggcggagagggcggagcccgtggaggacgacgtgtgcgc

SEQ ID NO: 21931 - DNA, 494 bp, Setaria italica
  Peptide Sequence Number=SeqID_87905
cggccgtgcgccggctgctgaacccggaccgtggactggaggttccacggcccgcgcgcgcaccagcacctggtgctcatgcgcctgctcaccggcggcgctggcgccggcggcctcccgttcaagatccggtccctggacgcgttcggacccaccgtgctggcggagggcaccgacgcgacgggcgcgctgtactgggtgcacgcgtggaccgtgggtcccggcggccgcgtcacggaggtgcgcgagtactgcaacaccgcgctcgtcgtgacaaggctcggcggcggccgcgacatggaggcgcgggcggcgccggcgagcgaggatgtgtgctccaaggctcagcaggtgtggcagagccggctgccggaccaggctcggaggaaccttcctggcctcgtgcttgccatctgaactgatcagatagtgtcatgtaacagaactcctgaggcaaactggccggctgtaatttaactggccacaggctctac

SEQ ID NO: 21932 - DNA, 261 bp, Setaria italica
  Peptide Sequence Number=SeqID_87906
ccggcgtccacgccgcggccgccggagagcccgtcgaggcaggtgttctcgtcggtcagcgccgcgctgcaccaggtctgcacgttgctgaggtgccacttgaacgacggggagcccgcgcggcccatcccggcgccgcccatctcctgtgccgcgtcccggaggtgccccacgctgtccgccaggttctccaggcagtcgcgcacggggcccgccgcgccgccgctcttcttcctgctgccggcgcccctgctggccccg

SEQ ID NO: 21933 - DNA, 282 bp, Setaria italica
  Peptide Sequence Number=SeqID_87907
ggacggcatggacggggaggaggcggacgtgggcggcagcaagcagaaaggagaaagagcgggggagatggccggcagcaccaccccgtcgcgccaagccgaagcccaacaggaaccaccaccaagaccggatctggtggaggaagacagcaatacgggtggagggagagggggaaggggagcgtgcttggtgctgtggctcgggaacccgccgccgccgccgcttgcggacgcaacgatggcgacgggccaaggagcgccggagggagtgagcttttcggg

SEQ ID NO: 21934 - DNA, 2188 bp, Setaria italica
  misc_feature (1)..(80): n is a, c, g, or t
  Peptide Sequence Number=SeqID_87908
nnnnnnnnnnnnnnnnnnnnnnnnnnnnnnnnnnnnnnnnnnnnnnnnnnnnnnnnnnnnnnnnnnnnnnnnnnnnnnnntttaggccacaagaggtgagctttattaacagccggacgttattttcttccaaggatgcatgcttgcccggaatattattcccaaagatacatacatggacaaagcatcaggtcctctttatctttacagccaggtgagggcattttggacaggtacctgccacaagcctctagtctacactctacagcacagctcaaagcatcacaagagcaggtgcccaaggaacactacccgccggtgatcagtgcagcgtgtctccagagggtgtagctggctttccctcaacccggctgggccggttgcgctatgaggcgcacggcattctggtgccagcaacctcctgggacatttttaggaacaggtccaggttgtggtggtactggccctccatgccatcatcttcacctgttccccttccatggatggtgctctccagggctagtgagttcttgctgctgctcactgcttgctcgtcatcggaccagtcgccattctccatcacatcctgcatggctagatcctcatattcctcatctgatttggtagagtgctcgtccacagagcctgcgtctatctctcggttgtctctttcttcatcggttaggtcttcatcagtttcgccatcacgagggtcgtctgcttcttcttcgctgccatagactgagtactccttcataagctccttagaagtggaatctgacatcttcggcgaactgcagcatgatgataaatttctaccaccagtctccacactatcaaccctcaggtcttctacacttccagtatggctagttccacctgtgtcactcatccaggcactgatcccaaaaggaccaaactgtagattgactgcctctgccttcccaatttgtgagggatccaacattgggttttcagcagacttcttgctgtttgtaatatcattgagatccccattgccatcactcgtacctacatgccaagctttggtgactgaaccatcagtgttaaggagagccatcagattccttgaggaccccttcctctggatcaactgaaacatgcccttagaacccaaggtgttagctgcacactggttcctgtattcctcatccaccacggcaacggtgtttgtgttaaggtcatagagttgctccccagcttcacggcggcgaagacagctgaaaactgtggcatgtatagctgccacactctggtcgacattcgtgttgttaatctttggcacaagatgcttgtcagctctgttgcataggtattcctggatagctctgatatttcggatgtatttgatatatctgttctttgctgggtcaagagtcatgtactttgcacgtacagcaaatcgttccatgtgtttctcctcatttgtaatgtatatcataaatggtattatggaaggatgtttcttcattaggcccatcacaaaattaaggcttagatgaactccttcaacaatcacagattctttctgctcttcccaggatgtaattaatctgtccaggctgtcaatcaccatctcgctttgcgccttgtagccttctactgccatttgcttgttgccaatcaattcagttctaggaggtaactctgaggatccatggtgagatttgccatctgaactgtcatcttttcctccactggtattaggatgagaaacaattgtgggtttatttgccttgcgctttgccttcgcctgagcaactgcaataggatctaaatagtcgcctgcatggtaggttgaggcatagagaagagggttttgtttttcatctgcaaagcctctcatcatatgtcgtattgaatcagtagaaactactgtcgtgatacccaatctactacccagcaaagatgatagggtggacttgccacacccgcttgttccacacaagagtattgtcactgattcctttctctctttaattctgcaagcgagaaggaagtcagctttctggttaggtccgacatacttgtacatagagagggcatcgcatacaacacttacgaactgctcccttgaaataacgacagtagtctggttcttgtataattcaaatggtatgctgctactacttctctccaaattttttggagtatgtagtaactaata

SEQ ID NO: 21935 - DNA, 295 bp, Setaria italica
  Peptide Sequence Number=SeqID_87909
ggacatccgcgtcggcgacatcgtcaaggtcgagaaggatgagttcttcccggccgacctcgtcgtgctctcgtccagctacgaggacgccatctgctatgtcgagaccatgaacctcgacggcgagaccaacctgaagctcaagcagtccctggaggccacctccagctcgctgccggacgacgagagcttcgggggcttcggggccgtgataaggtgcgaggaccccaacgcgcacctctactcgttcgtcggcaacatcgagatcgaaggtcaggagccgcagcagcagcag

SEQ ID NO: 21936 - DNA, 265 bp, Setaria italica
  Peptide Sequence Number=SeqID_87910
cggaccgcgaccaggacctccgcgcgttcccgacgccggccgtgtccgtcgacagctgggcggagcgcgggtactctgtggtcaccgtgcagtgccgcgaccgccccaagctgctcttcgacgtggtgtgcacgctccacgacatggactacgtcgtcttccacggcaccgtcgacaccaccggcgaccaggcgcgccaggagttctacatccggcacgccgacgggagccccatccgctccgaggccgagagggagagggtcag

SEQ ID NO: 21937 - DNA, 735 bp, Setaria italica
  Peptide Sequence Number=SeqID_87911
ggcgattaagctgtccaattactgtgcctacttggtggccttccaccctgagctactccccgacaacaaggaaaaagcggaggatgtctttgaggcaatgaagaaggagttgaaggacatgctcgggtgccgagtgtacttcctgtcatcgaagagcacgagggtcgagaagatgatgaaagccgtagaggatgagagtaacaagcagcaggaaaccagtacagaggatgagagtaacaagcagcaggaaaccagtacagcagtgcagataagggacattgaagtggaaacaccaggtcacagcgagcaagacaacaagaaaacggaagccgcagcaggcaagagtgatgggagcaaagttgtactgaacggcgcaaagctagggaagctgctaatggacgaggttgatcctgaagcagtgtggaagctcctggccgacgtgtggacggagctcatcgtctacgtcgcgccgtcgaacgacgaggagcgcgtgaaggggcacgaggaggtgctggtgcagggaggcgagttcatcaccgtgctttgggcgttgaccacccacatcggcgtagcccggccgccgccacagaccaagcaatccactccaggaccttgagggaagaaagggaaaaaaatcaaaactggatatgcatttggtggtttcgtttgtgcttcagtgtactgtgcagccagcttttgatactcttgtttcttgcatccgagtgtgtgtttgta

SEQ ID NO: 21938 - DNA, 247 bp, Setaria italica
  Peptide Sequence Number=SeqID_87912
gcaagaagcacagagggctaggccaaggcggcggaagaggagctcggagaccaaggcgccgaacgccatggcacagctgctgctgcacgggttgatcgacgccaggatcgtggcggccgacctgtccgtcacgtcagatggccagctgcagccgaccaagaagactcggatgaagaggaaggtcttctcatggatcagcaagctgcccttctgcaaatgccagcagcggctggagaacgccatccgg

SEQ ID NO: 21939 - DNA, 1104 bp, Setaria italica
  Peptide Sequence Number=SeqID_87913
cctcttccagtatatacatccaccgatcgatccacactgctacatactgactatactcactcactcaaatcatcagcagcatatccatggcggccttgatcaataacgtggacggcgccaacaagctggccggcgttgtggacgccgagaacccgcgtgccctcccttgcggcggcgttgacgaggacgacgtcctgtcgcagcgcgccaactggctgcgcgccgccgtgctgggcgccaacgacgggctggtgtcgacggcgtcgctgatgctgggcgtgggcgccgtgaaggcggacgcgcgcgccatggtcctatctcctgtgtgccgtgcctatccgtggcgggtcccagagcatggccatcggcgagttcgtctccgtctgctcccagcgcgacgtcgagctggctcagctcgatcgcgacggcaagcgcggcggcgaggaggagaaggcgctcccgagccccgtccaggccgccgtcgcgtccgcgctcgccttctccgtcggcgcgctcgtgccgctgctggccgcaggcttcatccgcgactacaggctccgcatcggcgtcgtcatcgcgctggccaccgccacgctcgccgcgttcggctgcgtcggtgccgtgctgggccgcgcccccgtcgcgaggtcctgcgcgcgggtggtgaccggcggctgggccgccatgggcgtcaccttcggcctcatgaggctcttcaaagcaagcggaatatgatgatgttgatctcgatagatcatccaacacaccacacgcttctggtgtgtcgtcgttgcttttatcatttcgtttcgtacgtgcatccatctcctaaccagtaaccatacactagatatatgacagatgcacacgcgactcatatcgatgatccatcatccatccctagctgctacctagctagttgcatctatgtatgctacctgctgctgttgaatatcgatcgagttaccatgcatgaacgctaatgtaatactacgtacgtactgtgagcatatcgtgcatgcttgtactgctcttaagacgactgcggcaggcatgtgtaaacactgctgaactaatatcaaccgtattaattaattaatttct

SEQ ID NO: 21940 - DNA, 172 bp, Setaria italica
  Peptide Sequence Number=SeqID_87914
cccacggcgtccgcagccgccggcgtgaacgcgtgggccgggaccgtgctggtgctgccgcttgtcggcggcgtgctgtatctgctgagcttgggaatgctgacggcctcatccgcgctgcaaacagcgcggcctcactccgggagctcggcgccgtcgacgacgtcacctg

SEQ ID NO: 21941 - DNA, 269 bp, Setaria italica
  misc_feature (21)..(21): n is a, c, g, or t
  misc_feature (260)..(260): n is a, c, g, or t
  Peptide Sequence Number=SeqID_87915
cagtggtcgcgttcttggagngcctcgggttctacggcgtgcagggcaacctgatcatgtacctgaccggcccgctcggcatgcccacggcgtccgcagccgccggcgtgaacgcgtgggccgggaccgtgctggtgctgccgcttgtcggcgcgctcgccgccgactcgcggctcggccggtaccgcgccgtcctggccgccggcgtgctgtatctgctgagcttgggaatgctgacggcctcatccgcgctgcaaacngcgcggcct

SEQ ID NO: 21942 - DNA, 443 bp, Setaria italica
  Peptide Sequence Number=SeqID_87916
gaggcccaaccgcggctgcgtcccggcggcgccgccggtctcgtgcgcgaccccgcgccgcgcgcagcggcttgtgtcgctgcccggcctcgcctacttcaacgaccacgccaccagcatgaggacgctggagagggtgagccaggacgcgtgcaagaaggcgtgcttggatgactgcaagtgcgtggcggcgcagttcatctacgggaacaacgccggcgacggcttctgctacctgcagtcggaggtgttctcgctcgagacgtcgctgccggaggtggtgcactacaactccaccatgcatctcaaggtgcaggccgcgcgcacgtcggccggactttgaccaccgaaagattcattgcagcatcttcgaaaatgacatcacttcatcttcatcatctcagctgttgactgctattgtcctgcatggattatgatccggt

SEQ ID NO: 21943 - DNA, 905 bp, Setaria italica
  Peptide Sequence Number=SeqID_87917
ccatgcgaaaatttaaagcacgagagtcccatgctgcccgaaataactaaagatcaacaacaatggatgtgacccataggccaagggtaattacaaacaagtgtgaatccagccaggaaatgatgtcgttaattgcggttgaaatccggtcgtctggctctccctctaagattgagtggtaactaccttcatagagcttcagggtcttgtctttcgtgctagctttctcatacagaaatttgcttacgtgaggatctgttaccatgtctgcggctccatgaagaatcagcaatggggaggagatcttctccaactgtgattcaatatcctttgtagccttcaaaagttcaactgctgttcttaatctcatttggtcggaatatgagatggcattgtactcagctacttttcttttccttgggtctctaaatgccaaatctcctatatctttctgcggaaatagcttcgcttcagggagaagacatgacaatatgttcagggccttcaatactggtgcgggtggtgttacctcttctgaaatcttgcacataggcgcaacaagaagcacgccatcccattctttttgttgcttcaagtgtactttcagggcaactgcacctcccattgactgccccaagagaaagtgcggcagctcacgcacttccttcatgcctcttattcgtgcatactgttcaatgacatggtccaccattccatcaaagcttgcaatgtagccatgcagaccatatgacaagccaaaaccagggtaatccatagcatacactgcatatccagcagcagcaatcctcttagcaaccccttcaaaaaagaaagtgcaggtatccccatatccatggcagaagaaaagtgcagcctttgtggcagtgccctcttcttggcagcca

SEQ ID NO: 21944 - DNA, 689 bp, Setaria italica
  Peptide Sequence Number=SeqID_87918
agtaaattgctactagtactacaagtcaacgactaccaagaactactagcataaaaagcagttaacacggagcaagtaagcataaacacattgttcacagagcagaagcggagcaggatcatcatcaatcctcttccatagcgttggaagctggggagtgcctggctttcttgtgctgctgctgcttgccgaggaaggcttcaaagaagagctgctgcgcgtcgagcatcgtctgggtgcgcttcatctctgactccatccattccttctccatctggagggagagctccagcctgcgctcctccatccgcaggaaaccctccccgacggcccgcaacgcatcggccacctccgccatggcctccgactcggcgtcgtcctcgccgccgttcctctccggcttcacagctgccaccccggcgggtttgctgcgggaggccttggggatggtgaagcgcaggccgctcccggctccgccgttggagatgagcccgtgcaggctcctgctccgcacgccctcctcggaggaaggggaggacacgggggaaggcgtggacgccagcggcgcggggcccttggtcttgatcttgacgatggcgttggggctggggtccggcacgccgccgccggcgaggtcgtggaggagcgggaagaagggccacttgggccctttggacctgcccgcggag

SEQ ID NO: 21945 - DNA, 333 bp, Setaria italica
  Peptide Sequence Number=SeqID_87919
gacggcgccgcggcggcggcggcgggtgagggcgccatcctgggggacgtgacggggaacagcgggagcagccgcggcggctcggcgcccctcggggacgggtgcaagaagaagcctttccgcgcgatggccgcgcgctcggcggcctcctcctcctcgcccggggacgcggatgccggcgaccggttgaaggggtccgccaccagcggcgtgacggggctcccgagcgccagggacgggaagtcgagcacgctgggcgacagcacctcggggccgaccttccgcggcgacgcccccgccgcggcggcgcgagccatcgccagcggcgcgatc

SEQ ID NO: 21946 - DNA, 468 bp, Setaria italica
  Peptide Sequence Number=SeqID_87920
ttttttttttttttattttttcccaaattactatttgtatacacatacatacgtacgatacacacacatacacacatacatacaggtatatctggagcaagcattagctgcatgtgtatgtggccggtcaagaagctaagctagctagctttttacataggtaggtgggggcagtcgaaggggtcgtcgtgcggcagcaggtcggcggtgcggagggcgctgaagagcatgagcgcgagggtgacggccacggacagcacggccagcgccagcatcagcgcgttcgccgccgcctgccgcacctcctgcgcgtactccgccgacgccagcgccagcaccgtcaccgggaacgagtaggcccaccacgccacgctgaaccgccgcatcgcacgccggaacagcgccggccgggaaaccagggacgcgaagaggaagagggatacgaagaatagcatcttgcagcatgtg

SEQ ID NO: 21947 - DNA, 780 bp, Setaria italica
  Peptide Sequence Number=SeqID_87921
caggagggcgcgcctctcctcccgtggcgcgactccctccgcgtccgcttcggcccatgggacggggagcccgacctcggccgcctccccgcggcctgccgcgacacgctgcgggagtatcagcgcgcgctgacggggttcgggaaggagatggccgggctgctgtccgaggcgctcggtgtcggggtggagcggctggagcaggcgatgcaggtggaagggtggctcatggcgtgccactactacccgccgtgcccggagccggcgcgggtggtgggcagccttgagcacaccgatcccagcttgttcacggtgctggcgcaggactgggtcggcgggctgcaggtccggcgcgacgacggcactggtggcggtggggagtgggtggacgtggcgccggtggccggcgcgcttctggtcaacatcggggacgtgctcaaggttgtttccaatgatgaattaaagagcgtggagcacagggtggtcatcaaatccacacaagatgccagggtgtcgatcgccctcttcatcaatcctgccaagcgtgacaagtccgacctctttgggcctctcccagaactggtgacagcagaaaagcccgcacagtaccggagtttcacagtgcctgagttcatgagttcaaggagggaatacggccatagcagatcgtccattgaacggttcaaggtgagctcgagttaaatagtctggagggatgacgatgagtttgatggcgaagcaaccatgcttgcactgttgcacacgtacgttaatttgtcg

SEQ ID NO: 21948 - DNA, 344 bp, Setaria italica
  Peptide Sequence Number=SeqID_87922
atgccggccgggacgccgtggttgatggcgtggaagaagccgcacgaacgtgccgcggcgcggacgagcgccacggtgtccgagcgagggagggagaggtcaacggccgggatcgcaaacgccgtagtagtcgacgccggggactgcggcgatggtgcggtggccgtgaggaagattggaggcacggcggtgacgccggactcgacgagcccgcggacgccggctcgggactcgtggaacgaggccagcgcggcctcggcgtcgtagtcctcggttgcagccatccctgcttggccaaacttggtctttcttctgctgtaggtggatcacccggctgcgctggc

SEQ ID NO: 21949 - DNA, 446 bp, Setaria italica
  Peptide Sequence Number=SeqID_87923
ggatcgacgaaccagattgcgctgccgctgcctggagcgatgtggcagcattcggtgatgaaggaggaagctgttcaggcgcttgtcgacgccaagcttttgcagccgaaagaggtactcgagtgacgccctgcttttgcgaatgcgtggcagttcaaggaacaccccaacgagacggtgatgcttgcacattttgtggagaggggtttggcagtgcccacctctgacttcttcaaaggtatcctcgagtattataagctttaacttgtacacttgaaccccaatggtgtactgcatatgtcaatttttgtgcacctctgcgaagtttacttggaggttcctcctagccttgaactgtttaggaagttgtttcgctgtaaacctcagcctagtgcacttaggacggaggtcttttgaggcgccgggttccaactcaggaactcggg

SEQ ID NO: 21950 - DNA, 334 bp, Setaria italica
  Peptide Sequence Number=SeqID_87924
atcattcgaacccttttcaaaatgaataccatcggaggcatgaccttgcgttaactgaacctgtccattgtctttatcagattttcttcgagaagaaccaaccaaaacaggttcactagaccgttgatcattgcctgcaacgccaactgaaattctactatgagagaccttatcaatgttagagtttctctgtggtgatgatgaaagagactcaattggggaagtccttgtagcttgagtgttatgcttctttttttgtgagactgaagccttcgaagaacttgaagttacagctgcagtctgaatataggccacatcactagcaggttcatcc

SEQ ID NO: 21951 - DNA, 1482 bp, Setaria italica
  misc_feature (69)..(69): n is a, c, g, or t
  Peptide Sequence Number=SeqID_87925
catttttacctacttaccagcgctctcctacttcctcaaactagaagtccacccaaggcagcagcaaangttacctcaaaatctccctttcaccagtcttttgaggttgagggcatgtctcaaaacccttcggctgtgtcagttccatctgtcccccaaaataatggttctgtggtgccctttcctggtgattcaagtaaaaaggaaacacgtccaatcacaaagtctgaaaggggttctgggccttctggctctcatgattcgtatgggccatctaaatctagtgaccaaaatagatttaaagtccggataaaggttggttctgataatgtgttggcgagaaataatgcggctatttacagtggtctgggccttgatatttcttcaccttcatccattgaggatagccccgatggctgtgggagcctctcccctgaagttaacaatgtgtcacatgaatctccacgaactattcttcagatcatgacatgcttttcagttcccggaggcttcctgttatcccctctgccagccaatatcttgcaattgacaaaaaaggtcgtggcttcgtcaaaaaagtgggaatcaaatgtggacatagaaaatgtacaagaagcatatgaaggccatgtggctaaaaaggtgaaatctgatggtaggaaaaagaaacaggtagatgcaaagaattcaaagagcagaaatgatgttagtgcagttatgagaaaggagattgacatagaaacagttgctggtcaaaagatcgtatctgaagctctcaacatagcattgctgtctgattccagagctatggaggcaaaaggtgagaatcgacttgaagaggagccaacagaaaacaacttgggcggaaataaagatgctcgattgaaagaacgggccatcaagagtgactccttgacaatcaaagtggaacctcccaaagcggaggtgacagaatgcttagagaacagtagttttggcagttcagaaatggaattttcagcatcgaagggggaaccaaaacccaagacagaaaagggagagacaattttagaagagaggaatacaacaaatgacaaaaacctaatattggataggaagcaagaaaagaaaataaaacctgagagtaaatctaatgcctctaactttgaaggcaacaacgttataaatgaaagagctccagttgtttcgcggagcatggggaaagttccttgtaaagaaactttaccttatgacacaaatggggaaaataactccaagagtgaggccaaaaaaatgcagagagaacaaaagaccaacgcttcaacaccttctgatttcctggaggatgagaagcacattcattcttctgctgcagttaaggagaggaaaaatgaaatgcaatccaaatctagccatactggaaagaaacccaaggcaaaatcacatagagatgttagggacaatgtgcttgaaggatcttatgcaggcaaggaacatgatgta

SEQ ID NO: 21952 - DNA, 4220 bp, Setaria italica
  Peptide Sequence Number=SeqID_87926
tggaataacaaaggtggaagcccaatttgataaattgcagcagaatgatgctctgggctcgattagcatcggcacgggtcacatagttaaaattcggcgagcaattagcatcactgtactccatgaactgaaactctaaattatgctacaagtttgtacagaacacggaacttatcttgcattctgcaacaagttctcggtactagacaagacactatctatcagaaacaactaaatgttacaaaatttgaagaatagtgaacaactaaaagcttggcagaatcgaaggcgtcatacatgcaccagctcatcttaacaaatgtttccatctttagtgtataatatatacatgtacatgtgctggtgacagtcgtggtattggttgtcatgaaaaagggttagcctattgtacattagaactctttgtacaacatccatacatggctgatggtccaagtgatttcttatttgaaacctgcatgaactttatccagaagacgtggcatcatcgcaagggtgaaaagaaaaaaaactgctagctgatttgttggttagcacaattagttggttttgttgtcctctcccatcaaaattgtcaagtggctacacaccatcttgtactgctcaaggaaactatgatactgactcttcagccataagccagccttgatggagaaccacataatttacatcatgtaggaagagaacgctcaggagcgagccactttccaaataacaatgtagttgatagtagcttatcaactgctggcagtgaagcgcctccttctacctcaaaactattagaagtgttgagccgtgcggagctcatcttcagttgcatcccttatctaatccaaatcatccaagtggatgtgcaactatgtatactaattgggtaccatcaaaaataataaaggaagaagaattccaagagcagtttctgtacaaattgaccagcacgcgcaaatgagaagacctatgctttttgcactgtcgaaccattcagcttcatgctacctcggcaaggacaaagttagaaattggatttgcacatccacaggaactgttcaactgatggcatttcctcggatacggaacatgtcagcaactgatggactccattgaaatccgcacaagccttaatagatcattcacacttcggaagttgaaatccagaactgttcttactgaagaaagaccatctgctccattttcatgattgccagcagcagaagaaattgccaattgtgacttccgagttgcctcaaaggcaccattgacatcattcgtataagctagtaaccgcatcaagtgtggttgattacgagcggccagcaacaaatgattcccagccacttgtggtgaattagcatccttgcttgaagagcccttggataatgcattgttatttaaattatcaatgtccgaggctgaagatgatggtgattcacctggtgcggtctgtacaactgcctgtaacacttgtctatccttgcttgcagttgggtatttgtagtatgcagccttaagataagcaacttcaacacacttgtatgctaaagcagcagcagccatcttcttgcatttttcatatgcatgaccaacaaagttgcaaagttttgcagtatctgaatacatgctctgggctgcatctccttgttttgaaccatcacaactaggaggttccaaaagtgacgcaacatgcaaaaattttaaggcagcctcaaagtagagtcttgtactttcaagctcttttccttcttccttcaaacgattagccttgtgctttaagtctcgggcttctttgagagcatatgcagtcgaagtattgtccttcctagctggactagcagcatgagcaggactaggaattacttgttttgcagtgccatgtcgccctccattttcagaattgtactgtcttatctgtggagttaattttgacccattaggttttgatggagtggagtgggaatccaatttgctttctttcggaggtgagcagaccatctggggtttaggcttctgtgaatcttgcttgttgctcttgagatatgatttctcttttccagatggcaaacctggcagaggatttccatctggtgggccatgagttgatccatttctgtcttgaagggaatttgcgcttttcttattttcatgcatgctcgaatcacctttagcatccaatactgatgtctttgggtcaacagtatgctttcctggttgcattggagagccatctgcatgatggttatttttctcaacagaatgcaaatggttagaacctctaggtatatgggagcccttcagattggaatcctttctccctgattcatgctgcagatcatcattcgaacccttttcaaaatgaataccatcggaggcatgaccttgcgttaactgaacctgtccattgtctttatcagattttcttcgagaagaaccaaccaaaacaggttcactagaccgttgatcattgcctgcaacgccaacttcagtatttagttgttttaccatgctcggaatggtgcttgagttagcattcagagatccatccttacctgaaattctactatgagagaccttatcaatgttagagtttctctgtggtgatgatgaaagagactcaattggggaagtccttgtagcttgagtgttatgcttctttttttgtgagactgaagccttcgaagaacttgaagttacagctgcagtctgaatataggccacatcactagcaggttcatccaagtccaaagcttgatcacaaaggttattttctagttcaggcggacctcttttaccactaaagagagtgttatcctcaactaactcactgttcatatggctcccatcataagacaaaatctgatcagcatgttgaattttgcctggtttggagtctgcataaaacagttcttcagacttcaatgactttaactttgcttccttcaagttctgatccttataggtttcctttgtaacagagttgtggttcactgtagctcctttgcttacatgagctactgaattgtattgactctcctcccattcctttactatcctcttcttactagacaaatctgatctttgtacatctgactggtgaaaatattccttgttctcatcttcaggaacaactacatcctcttgtctagctttcttggaattttccaaacgattatgccgtgaaacatttttttgctttgatgaagaaacatcactcctttcacctgaaccctttgaggttgctgtttttgtaggcaaagccttggcctcatcaggaatatctccactagctaaatcagggttcctatctctgtcaaaacgatgtcgctcttctttcctaattttcttagaagctttgtactcatcatgatccatgtctctcttgctctttacttttgaatgtttcttagatctttcaataagatctcctccatcagaatagctactgcgatgcttgctcttggacttcttcttttcaatagttgggtcaaccaatttgcttacagaatctctctcaatcgaatactggctaccatcagcataacttttacttttactaggagcatgttggttgctcattagatgacctgaagcctgtgcttggtgagaaccctcagtcacaaaattaccatcattcagagtattcttccttttcctactctgctcaaccggtccatttaaatgggaagtgctggatgttactagtcctgccgaagcaacatgaggatgaccaactgaaggaataccatttgcgggggctggaatgacatataatgcatttagagcattcgtagtctcttcttcactgatctcacacctattcatcccaggcagccactgtagcatgctacatttccacttcttaggaagacttgaaggattcatctcgtatggcaggagacgccatttctggcaaatgtcacagcacacccaatgttcctctattacaactggggctggaagaggagctgcattggtagttgatacagtggcaggtggaggtatattcatcttctgctcctcagaagctgcatgtctgtcatgctttacgctagaagaagtctccctccttgaggccccaggcacatcagaatccctctcgctatcatttttccaaggcttttccttcggtcggggatctccaaagccactttcattctccagtacatcatgttccttgcctgcataagatccttcaagcacattgt

SEQ ID NO: 21953 - DNA, 1117 bp, Setaria italica
  Peptide Sequence Number=SeqID_87927
ttttctcaatcaaaccggcaccattcgattgagactaagatgcacagtgcagcatgtatagagactaatccaacctggtagttctgagttcatccgaccattccctcatcccgagtcaactatggggcttccccttgttgcctgacaacacgaaaacgggaagacccccacaacttcacgctgcatgcaaaatacattacatgacgccacaaacaccgccaagataactagctctacctatgaccccaacatgttaaatgctatgccacttttcttccccatctttctgagattaagggaacagcttaacgacctcatacattaatagaatgctactttctaggaagtccagacctatgcgggattaggtgattagcagtttagcaacaaaacacggccaaggatgtacacaacggaaaattttgtctagagaaccgaacacccccctcccaagcagatcatacagcgcctcttcattctagagatttgaggagcctgaacagccccgccgcctctcttattcgtgagaaggcgatgcaaaatgcttgcacctcgacgaagagatcttgcacatttattatcttgtttcggataaggctctgtaggaaaacacatactaatctcactagcctgttttgcatatacttgtcctgaatgtcgtcgcatgatcgaatacagtttgagatgtagtcatgaatgaatcctggcggtaaaacaactgcagtagtgagcctgtttactacttccattgaatgcaagctcatttccatatggacaagaacattaaagtattcatccatgtccggagagttgattagccttgaaagaacttcgacagctatacatgtattatgttcaacaaggccacggagcttctgtggtgtcatcccacagtgatagactagcttccagtcctttcccaaatctaaaacaattttctcttgttgggcaggtgcaagtggacctttacaagctttttcgactagatctcggatcacagcccctcggctagtgtctgcacacatgctaccatcccatagtagctcatggttgttgtctaggttcagccactgtaactccccttcaagaatttcaagtcttggtggagggggacgta

SEQ ID NO: 21954 - DNA, 713 bp, Setaria italica
  Peptide Sequence Number=SeqID_87928
cccgatcgccaactactcctactgctataaccatcgctccgcccgcccaacctccgcccgaatccaatcgccgcgccgctccacttcgttcgtcctcctcctcacttcattgccaccgccggggcgtcgccactcggctcgactcgagggttttgcggagtcgagttcgggcggcattggtttattcagtcctggtggaggcgttgttggaggtaccaacaccatcatgaaaccattcatattcagatgacaggagtgttggatctcgtatacatgttttagaaagagatgaaagttggtggtctcctgacctctgctggaatcaacattggcctctgtgttactttttctgtcactgtactccattctaaggaagcagccacaaaatgttaaggtctattttgggagaaggattgctgaggagcacaaccggctccgtgatgcttttatcttggagagatttgttccatcccctagttggattgtcaaaagtctgcggtgcacagaggatgaaatcttagatactgctgggctggatgctgtagttttcaatagaattatggtattcagcatacgcatcttctccttagccgccattctttgtgtatttggagtccttccattgaattattttggacaagatatgcatcatgttcgtattccctcagcatacaatttaagtaagtaactaaattttaactaaaattaaagta

SEQ ID NO: 21955 - DNA, 386 bp, Setaria italica
  Peptide Sequence Number=SeqID_87929
atctaccatggctattgctagggcaacggcgatgaacaagtacggctccatgatgctcgtgctgttactgatcatcgtagaggtctcagccacggccgccgccgagcagtcgtgcaacatcccagcgacggagctggagcagtgcgtggtggatgtcgtgaatagcggcctccgcatcatgcagcccaagtgctgtaacaggatggcgaaggagttttggttgtggctgcgtccttcgggagatcctcaaaaattacggatacgacccacagaagcccttctgccccgagggcaccgcctgcgacaaggtctgactaacgttcccacaatgagctagatctccctagcttgctgcttctgctaccggggtttctttggttttgtcg

SEQ ID NO: 21956 - DNA, 259 bp, Setaria italica
  Peptide Sequence Number=SeqID_87930
tccttagagttgggatcggtgtagtagatgcggccgaggagcttggtgaccagcgcgatgcagaacaggtcgtacgcgtcggtgaagaaccccataccggcgatcacgatcgccatgaaatggtaccattgcgtcttggcctggtcgagagtggccaagacgttgagctgagctcccgccattgtgctaagctttcccttctcctgtgtgcttcctgctctcacacctgcaactggagcagggagaggaagactggcac

SEQ ID NO: 21957 - DNA, 181 bp, Setaria italica
  Peptide Sequence Number=SeqID_87931
ccggttcccgtgtaggcgcccgaggagagcggcatcgcgaaggcctcggcggcgggcgcggccttgtgcttctcggtcgccgtggccctggtcccgcccgtctccgcggcgcggcgtcgcccgcgcgagcagatgaacgccatgcgcgcccggtcattgcgcgccatctcggcccaggtcg

SEQ ID NO: 21958 - DNA, 753 bp, Setaria italica
  Peptide Sequence Number=SeqID_87932
ccgcctctgcggcagccgcctcgtcatcagctctccactttttcacgcgagaaagcagcaggtccacgcccgtatacttgtcactcttcaccatcgtaagatcatgcttcctgtgttccgacagcatcctatcctcgtactctttcaccttcacctcccgtgccctcgccttaaggcagagcttgcagtaccatttccccttgggcactctagtacgacgaggacgcaggcagtagaggtgatatgcctcatcacagccgtcacacaggatgatctttttgtcatcctcgtcacggtgacaaacccggcagaggcatgatgggcagtaccagcattgctcgttcagctgctttttgcttgcgatctggtcaggactcatgcaccggatgtggtagtacttgtacatgcaaggagggtggccacagattaggaacctcttgctgtcctcttcaggttctccacacagcttgcaacagcctctgcgagcagtctccgacaggttcggaaccttggaggcggccatagtgcgggcaacaacagctccccttttagaggcagatacatgttcagttcacattgctagaactagtagggttgaaccgaagaagtaagcaatctgcacaaactgccacaaatgcaccacagcaccagcgatgaacttcactttctgcacctgaaccaaagaaagactcccaggtgttgatatgatggctttgatacatttgcaagttttaaagatgacaaacatgtgta

SEQ ID NO: 21959 - DNA, 507 bp, Setaria italica
  misc_feature (204)..(204): n is a, c, g, or t
  Peptide Sequence Number=SeqID_87933
ctaccaatgcagtgatgatctccatctcatcaaaattagtactagcctaaagagtgtcctgttcaaggcttcaagcagtcaaccaaaacaaaaaacgctactaggaaagtgctcttatcatgtgcttttcctcctaaaggttaagcaaaatcggcgagtatttttgacagattttagagttgcagcattgatatatagcatggnggaaaaattgccacgttcaatcacttatcatgtcgcatcttattccgcaggtacagtaatatagaaaccatgaagccctctcagctgtactgtggttcaacaagcaagacacagtgttgattccacacagaagacaagagtaacagccgatcttacccaacgcacctgcttctgtccatggaaaaagcgaaataggaatagcctcttacacaattgcggtgtatgctgctgatggtgcttcttccaataatcagtttcacgcatgtgcttgctgtctcaccatgagtggacgaatagctccgc

SEQ ID NO: 21960 - DNA, 1347 bp, Setaria italica
  misc_feature (1)..(26): n is a, c, g, or t
  Peptide Sequence Number=SeqID_87934
nnnnnnnnnnnnnnnnnnnnnnnnnngtataaactccaaacggaacggatggagaggaactgtagtatcagaaattcttcccagaattcataacaaaaaaagggacaaaacccaaagtaacgaaaacaagcagatctcttcacaatggtcatcttgagtgtactctcaagtcgtattagttttcacactattattcaatggagtaaaaccagagtttgtatggcccgactcaagaggaacccaaaatgattacctagtcaagatttggtaaaactatagttgtatgtacatgaggcgcacacgcagtcacgcacacaccaggcgattgaggtataaatctcaggaatcagaactgctggtccagatatgcatccttctccgacttctcgctcccactgaggtacccaacaaagctcccagaaacgtctgtgacccaggagacactgcgtgccagccaagccttgggagttgatgacgcttgtggggtctcagccgcgatgcgcctctgttcttcctcaagcaagatgtccagccacctctttgacatgtactctttcaccgcgtcgacacccttgtttacaatatccatcggtggcatcgccaaggggttctgctctaggttaagcttctccagtttatccagacgaccaaaagtgtcaggaagagcatgtatctggttgttgctcaaatcaagctcacgtagattcagaaggtcaccaaatgaagcaggaagctccttcaaatcactgaagttgctgctaaggttgagaatttcaagactgctaagcttcccaaaggcagatggcaaaccacagagttcattgaaatgggcatccagaaggtagagcgatgtcatctcgcagactgatgatggaagagatcgcaacttgttcatgtggacccagagtttacgcagattgaccagctcatagccaatatttgttggcaggtatgtgagcccgttgtagcttgcatcaagctcaactagtaacctacacttggagatgctatctggcagtgccctgagcctattacttgacacattcagaatcttaagattggacagcagtccaatagtatcaggaagagaaatcaaagcattggcagcgagatgaagctcttcaacatgatcaagtcctcctatagcatccggaataacctcgagctggttgcgcgagacgtcgagcacgcggaggccctggatcctcccgaacgcctcaggcagtaggcgcagctggcgatccacgaggcgcacgctctccaccggcttgccctcctcggcctgcctgagcaccgccaccacctcctcctgcaccgcggcgtccccgccgtcagcgcccgcagcga

SEQ ID NO: 21961 - DNA, 1050 bp, Setaria italica
  Peptide Sequence Number=SeqID_87935
agcggcggcggcaacagcaacaacggcgggccgttcggcgagcacgacggcgggtcgtcctcttccggcccagctggagatggcccgggcagcggcggtggcgggaacggggagatggtcgcccgccggccccgcgggcgcccgccgggctcgaagaacaagcccaagcccccggtgatcatcacgcgggagagcgccaacacgctgcgcgcccacatcctggaggtcgggagcggctgcgacgtgttcgagtccgtctccacgtacgcgcgccggcggcagcgcggcgtctgcgttctgagcggcagcggcgtggtcaccaacgtgactctgcggcagccgtcggcgcccacgggcgccgtcgtgacgctgcacggaaggttcgagatcctgtcgctctcgggctccttcctcccgccgccggctccccccggcgccaccagcctcaccatcttcctcgcggggggccaggggcaggtggtcggcgggaacgtcgtcggcgcgctctacgctgccggccccgtcatcgtcatcgccgcgtccttcgccaacgtcgcctacgagcgccttcctctggaggaggaggaggcccaggcagcgccacccggcctccagatgcagccgcccggcggtgccgatggcgcaggtggcatgggcggcggtggcccgttcccttccgacccgtctgctgccggtctgcccttcttcaacctgccgctcaacaacatggccggtggcggatcgcaactcccgcctggtgccgacagccatgggtgggccggagcgcggccaccgttctgacaaaatccatgggggtgtgtaattcaggtgtgtaagaacaggaggagatggcaagaagaaagcattgaagggcacaagggttgaaggcagcttgcagaaggttagcgcacgcatgcttgcaaggatattatctctactatttctatctcgatctctgtacaagttcgtagtgtttgctcggtctctctctgattatgtgttctccttgttcttcttcttccttctttcccttttcttctctcatgtctc

SEQ ID NO: 21962 - DNA, 629 bp, Setaria italica
  Peptide Sequence Number=SeqID_87936
taggtaatttaacttacttacttagtactaattacgtaaaaaggtactacttaagtcttagtaattgtcttggggtagcaagtgaagaaatcaactatgtgaatgctcatgcaacgtctacacaatcgggtgacttgaaggagtacgaggctatcgtacgttgtttcggccagaatcctcaactaagggtgaactcaacaaaatcaatgactggccatcttataggagcagccggtggaattgaagcagttgcttctatacaagctataagaactggttgggtccatccaaatctgaatttagaaaatccagaggacgttgtggatgtgggtgttttggtaggaccgaagaaggagagatgtgaagtgaatgtggccctatccaactcattcggatttggtgggcacaactcatcaattctcttcgcaccctttaagtgaacatggccaacaaactgccatcttcctcgtcgtccaacagcttcatacatctagacctgcatatagaagactagtggactctgtgacttcctctacaccacacatactaatgatatagtttaaccttgcagggccctcgagtttcacgtagtttaaccttgtatggcacagcgttctcccctcagcttg

SEQ ID NO: 21963 - DNA, 610 bp, Setaria italica
  Peptide Sequence Number=SeqID_87937
tttattctcatagccatgaacactcgttaccattaccacaactgctgtttcggtgtttttggctttcaatgcaagcatggtgggctcatcatgggaattcctcttcgtgttcattgcaggctataagaactggttgggtccatccaaatctgaatttagaaaatccagaggacgttgtggtaagctcctttagtgatgcaggatttaatgtcatcttatctgctttctacttctactaaagaagttatatatgaaagatttacagtaaatctataagttgagcaaaatctacaggaaatctataagttgaatggtgcccagataattatcaactcaatatggagctaatattaatgttttaatgttgatcttgatacaggatgtgggtgttttggtaggaccgaagaaggagagatgtgaagtgaatgtggccctatccaactcattcggatttggtgggcacaactcatcaattctcttcgcaccctttaagtgaacatggccaacaaactgccatcttcctcgtcgtccaacagcttcatacatctagacctgcatatagaagactagtggactctgtgacttcctctacaccacacatacttaattg

SEQ ID NO: 21964 - DNA, 502 bp, Setaria italica
  misc_feature (139)..(139): n is a, c, g, or t
  Peptide Sequence Number=SeqID_87938
atgggagaagggtctggtgtgctgttttgagaacttgaacacgcaaagcaaagaggtgcacaaatatacgctgaattttttaggaggaagcttcacatgtgatgcgtaccacatgacagagcctcatccagaagggganaggggttatctttgtattgaaaacgcactagcagattcaggcgtaagaaaggaagacattaactatgtaaatgcccatgcaacatctacgcagatgggtgatttgaaggaatttgaagctctcacacgttgtttttggccaaaaatcctcagctaagagtgaactcaacaaagtcgatgacgggccatctcctaggtgctgcgggtggaatagaagctgtcgctgctatacaagctataagaactggttggctacatccaaatatcaatttggataatccggagaaaaatgagttcgacagtgccaccttcacatcacaccttagtccttaggttagggtcactaaactaagtaaaggtaaaa

SEQ ID NO: 21965 - DNA, 881 bp, Setaria italica
  Peptide Sequence Number=SeqID_87939
aattcctcgttcttcagactcatttctgtagtttatcttgatctttgtagacacaattattttaaccacatgccatgcaggattgggaggttttgtggcctgcagggctctttcacagagaaacagtgatccaacaaaagcttcccggccctgggacatggtttgtatattttgttgtgtaccttagattatcatagattcatagtagttaaatgatttacttcatgtgcattctctctaccgatttttttcaagtggcccgtttcttgacaaatgttgctggctggcaataattaccataattctgtacaagcacatcagcaccatgttggtttaaataactttctggcttggtacatttgttgtgctagtgtgaggtgatttatctttcatggtgcaggaccgtgattggttttgttatggggaaggggctggtgttctcgttctggaggaacttgagcatgctaaggaaagaggtgcaaaaatatatgctgaatttcttggtggaagctttacatgtgatgcttaccacatgactgagccacatcctgaaggtgaagagtatatcttgaccaccatgctctttcctgttcttttcctacctaaatctaatgggaccatctaattctagcattttcattaattcaatatcaggaagagggattactctctgcatcgaaaaggcactagctgatgctggggtagcaagtgaagaaatcaactatgtgaatgctcatgcaacgtctacacaatcgggtgacttgaaggagtacgaggctatcgtacgttgtttcggccagaatcctcaactaagggtgaactcaacaaaatcaatgactggccatcttataggagcagccggtggaattgaagcagttgct

SEQ ID NO: 21966 - DNA, 593 bp, Setaria italica
  misc_feature (553)..(553): n is a, c, g, or t
  Peptide Sequence Number=SeqID_87940
tggcattgtaaggttttttaatgatgcgattgaagcactgaagggtctcttacaagaaaatgaacccgttttgtgttccttttagcaactacaaacatgggctctgcaatccttgcaatggatctgggatggatgggaccaaactattctatttccactgcctgtgctaccagtaacttctgtatcctcaatgcagcaaaccacatcagaagaggggaagctgatgttatgctctgtggtggttctgatgcacctcttatcccaattggattgggaggttttgtggcctgcagggctctttcacagagaaacagtgatccaacaaaagcttcccggccctgggacatggaccgtgatggttttgttatgggggaaggggctggtgttctcgttctggaggaacttgagcatgctaaggaaagaggtgcaaaaatatatgctgaatttcttggtggaagctttacatgtgatgcttaccacatgactgagccacatcctgaaggaagagggattactctctgcatcgaaaaggcactagctgatgctggggtancgaagtgaagaaatcaactatgtgaatgctcatgcaacgt

SEQ ID NO: 21967 - DNA, 1599 bp, Setaria italica
  Peptide Sequence Number=SeqID_87941
ctccaagcgccgctgaatccgagtgacccgtgcggccgctctttgtgggcgggatccagcaggcggtgagcgggagccacacacacaccaggggacgggcaatggcggccgtgacgggcccactctgcacgtggctcgtcgccgcgtgcttgtccgcggcatgcgacgccgacgagcacaagcagaagcattgctgccctggcggaagcggcgctgggggcggcgtcatgttcggtcagggccgtgagcgccgccgcctcggcgcgcggcggcgtggcgcggcgcgctccggaatggccatgtctgttgccttgcaagctgaaagaaatgttatcgaaaagaagaaacctgatatcaaacaaaggagggtggtcgtcactggcatgggtgtagtgacaccattgggccatgatcccgacgtgttttacaacaaccttcttgatggtgttagtggaatcagtgagatagagaggttcgactgctccaacttccccacgagaattgcaggagagataaaatccttttctactgatggttgggtcgcacctaagcttgccaagcggatggacaagtttatgttatatttgataactgctggaaaaaaggcattagaaaatggtggactcactgaagaactcaggaatgagttggacaaaaaccagatgtggtgttctcattggttctgcaatgggtggcatgaaggtttttaatgatgcgattgaagcactgagggtctcttacaagaaaatgaacccgttttgtgttccttttgcaactacaaacatgggctctgcaatccttgcaatggatctgggatggatgggaccaaactattctatttccactgcctgtgctaccagtaacttctgtatcctcaatgcagcaaaccacatcagaagaggggaagctgatgttatgctctgtggtggttctgatgcacctcttatcccaattggattgggaggttttgtggcctgcagggctctttcacagagaaacagtgatccaacaaaagcttcccggccctgggacatggtttgtatattttgttgtgtaccttagattatcatagattcatagtagttaaatgatttacttcatgtgcattctctctaccgatttttttcaagtggcccgtttcttgacaaatgttgctggctggcaataattaccataattctgtacaagcacatcagcaccatgttggtttaaataactttctggcttggtacatttgttgtgctagtgtgaggtgatttatctttcatggtgcaggaccgtgattggttttgttatgggggaaggggctggtgttctcgttctggaggaacttgagcatgctaaggaaagaggtgcaaaaatatatgctgaatttcttggtggaagctttacatgtgatgcttaccacatgactgagccacatcctgaaggaagagggattactctctgcatcgaaaaggcactagctgatgctggggtagcaagtgaagaaatcaactatgtgaatgctcatgcaacgtctacacaatcgggtgacttgaaggagtacgaggctatcgtacgttgtttcggccagaatcctcaactaagggtgaactc

SEQ ID NO: 21968 - DNA, 1091 bp, Setaria italica
  Peptide Sequence Number=SeqID_87942
tgctaaggttttaaacatacaatttctgctgtccctatatccttctgttgtttgtttccagcttgatgatgtgattagctggagttctcgttctggaggaacttgagcatgctaaggaaagaggtgcaaaaatatatgctgaatttcttggtggaagctttacatgtgatgcttaccacatgactgagccacatcctgaaggaagagggattactctctgcatcgaaaaggcactagctgatgctggggtagcaagtgaagaaatcaactatgtgaatgctcatgcaacgtctacacaatcgggtgacttgaaggagtacgaggctatcgtacgttgtttcggccagaatcctcaactaagggtgaactcaacaaaatcaatgactggccatcttataggagcagccggtggaattgaagcagttgcttctatacaagctataagaactggttgggtccatccaaatctgaatttagaaaatccagaggacgttgtggatgtgggtgttttggtaggaccgaagaaggagagatgtgaagtgaatgtggccctatccaactcattcggatttggtgggcacaactcatcaattctcttcgcaccctttaagtgaacatggccaacaaactgccatcttcctcgtcgtccaacagcttcatacatctagacctgcatatagaagactagtggactctgtgacttcctctacaccacacatactaatgatggaggtccaagctgaggggagaacgctgtgccatacaaggttaaactacgtgaaaactcgagggccctgcaaggttaaactatatcaaaattgcaaatatatccatccaacgacttactgtatctgggccagtgttttcgccttcaccgtgaatgcccattgtcagtactatttcctagatttcggttagtcccggagctgatcctcacccttgcggaggtgctgggattttatgttgtattgatgttgtgaacaatgtcgttattagccatgaaatgctagtttcactgtaagcattcgctgggcattatcactttcgttgattttctgtctgttcctgagttaaaaagatttgtgattggt

SEQ ID NO: 21969 - DNA, 2007 bp, Setaria italica
  Peptide Sequence Number=SeqID_87943
ggatccaggccgtgagcaatggcggcgccggtggcgccgccgctgtgcacctggctcgtcgccgcctgcctctccgcggcctgcggctctggcgagaaggagaagcatcgaaggcaccgcggcggcggcgttggcgtcgggggtctgttcggcacgcgccgccgccccggctcggggcgccgtggcggggctcgctctggaatgtccatggctgttgccttgcatcctgaaaggggagttgtggaaactaagaaagctgatgtcaaagaaaggagagtggttgtcactggcatgggtgtagttacaccattaggccatgaccctgatgaattctacaataaccttctacagggtatcagtggaataagcgagatagaggcgtttgattgctccagatatcccacgagaattgcgggagaaatcaaatcattttcaacagatggttgggttgcaccaaagctagctaagcgaatggacaagttcatgcaatatttgataacggctggaaagaaagcattggaaaatgctggaatcactgaagaaatcatgaatgagttggaaaaatcaaggtgtggggttctcattgggtctgctatgggtggcatgaaggttttcagtgatgcgattgaagcattaagggtttcctacaagaagatgaacccattttgtgtaccttttgcaactacaaatatgggttctgccatacttgctatggatctgggttggatgggcccaaattattcaatctctactgcttgtgctactagcaacttctgcattctgaatgcagctaatcatatcagaaaaggggaagctgatgtgatgctttgcggtggttctgatgcaccgatcatccctattggattgggaggttttgtggcctgcagagctctttcacagagaaacagtgatccaacaaaagcttctcggccttgggacgtggatcgtgatggatttgtcatgggagaagggtctggtgtgcttgttttggaagaacttgaacacgcaaagcaaagaggtgcacaaatatacgctgaatttttaggaggaagcttcacatgtgatgcgtaccacatgacagagcctcatccagaagggagaggggttattctttgtattgaaaacgcactagcagattcaggcgtaagaaaggaagacattaactatgtaaatgcccatgcaacatctacgcagatgggtgatttgaaggaatttgaagctctcacacgttgttttggccaaaatcctcagctaagagtgaactcaacaaagtcgatgacgggccatctcctaggtgctgcgggtggaatagaagctgtcgctgctatacaagctataagaactggttggctacatccaaatatcaatttggataatccggagaaaaatgtggatgtcagcttgctggtgggtcaacagaaggaaaggtgtgatgtgaaggtggcactgtcgaactcatttggatttggcgggcacaactcgtcgattttgtttgcgcccttcaagtgatttttgttgatgattttcttgtggttatgcatcatcgaaaaattaagaccttataaaaccaccaggctcagccacatttctgtactgcaaattagatgaaatccaaaagcttagtaggatatattgctacacaaccgagggaggatagcagttgggttcatttgtaatagcaaagcaaaaattatcccgagccagaagagcatcaattcagatgttccatgtaccccttggctcattctattttttgtttcggatgcttattgtatttgtcatataggaactttggttgggggcggtatttttggtgtagccgtccgacagatacagttgtttacttgcagatctagcacatgttgcctagttcatctattgttgcagagcacactagcgctgtggctttatactgtagttatgagttggtagctgtagcgatctgatgtgacacgagttctgagtctctattttgatttcctattctctcgcccgcattaaaaaaaa

SEQ ID NO: 21970 - DNA, 757 bp, Setaria italica
  Peptide Sequence Number=SeqID_87944
accgccaagatccgcgccaaccgcgtgctcaacgcctgcggcagctccggccgccgcgtcggcaacacgctgggcgtcatcggcctcatgtacgccgggattgagagcgccatggtcgcggcccgcgaccgcgacgattggatcaacagcgtcgctgccgggctcggcaccggggcgctcttccgcgccgccaacgggccgcggtccgccgccgtcgcgggcgccctcggtggggtcctcgccgcggccgccacggggggcaagcagctcgccaagcgatacgtgcctgtcatatgatcgtgtctgtgtggtagctattgttcgctagcttgagcggacaatgaaacaatctgtcgcgaaagaaatgttctttttttgttcgttcgtagtagtatggtgttcttcaggcaagctactccatatgggaagggattaccttctcttagtgattaatccgtgctgtgctagtaacttaagcatacgggaacggtctggatggaaaattttgagctgcttgcattgctatgcaacatcatgcttaatgaaatagcattgtactggtgttgctgagcaataagagttgatccttgtgtcttggcagtgttttgcctgtgaaatacttgccattgcgccttttgttgagaaagaggttctgtgcgcgatataggtcctttgatctgttttatgtgttcttttgccgttggatctgaattctgaatgatcaaatgataggtgatctacaatcttgagtttgcaa

SEQ ID NO: 21971 - DNA, 367 bp, Setaria italica
  Peptide Sequence Number=SeqID_87945
caaagcttgctacgtacaaggcatctatagaaagctgctgctcatggcttagctgcttcacccccaatgtcatgaccacttcccggcatgtttccagggctactccagctatcatactcgggcctcggtatggcatgatggttgtcaaccgacgtcccgtcctctgtcccagccttcactccgtgtactaattcatcccttgccgccatgtgaggtgccgccgtggaagcgttgaggataagcatagcaaggagatacagaggcagaagcttcatggtgaaacaagtgagatcttggaagagacagaagggaggtgcgtggaggttggataggaaacacggccagtattccacctctaattaccgtt

SEQ ID NO: 21972 - DNA, 923 bp, Setaria italica
  misc_feature (1)..(49): n is a, c, g, or t
  Peptide Sequence Number=SeqID_87946
nnnnnnnnnnnnnnnnnnnnnnnnnnnnnnnnnnnnnnnnnnnnnnnnnaagaactgctcttccaatacttgggcacatcgtgttagtacatcatcatacttgcaacacacaatatagatgccaatactaacattgacataacatatatgctacccgtgctcttttaattgagctagagcaattttcctgtacagcgtttctgtagtgaactatatcatgacctttcaaaatcaagaatctaatcatcagctgaaaattgatatgaagttacagaatcagcattatcaggtgagggattgcttgagtcagctgcatccttgctatcttcagtagagtcagaccctgagatggcgccacaaggttcaacatatgcttcagccaaggacctttcggctaattcagttacactgtcatgttgagcatgcagagcatctcttttcacgatgttaagtagaataccgttagcagtgctttcaggttgcagcaaatctccttcagaaacagcgatgcttgtgggagtagaagcttgactacctctggtgttgacagtgttgtatgactcggtctcagaaatttctgtgcctggtgtagtaactctagaactattgtttgggcatgggtcgtttggaaaggtagattccgacaaaatgcctgtagtctcaccctctagagtacagggcttaaagaaatcagtgtcagtctcaagattttggataaaactgatgaacttgtcagcagatgctgtcctcatcagaggcccaccacttctggtccagcaattaaggtcaatggtttctgattcactctcacttccgtcatgagaattgcaccgaacgtggtgagaaatatttggtgtgccaacaacaagaacagtaccctgttgcgtggatgaagtagcaactgcagaaatttcttcagagag

SEQ ID NO: 21973 - DNA, 711 bp, Setaria italica
  Peptide Sequence Number=SeqID_87947
cacacattgtaagtggcaaaaatcagcaacatggatggtgtattcaagcagactatgaagagacaatgtctgaagtttcctctgcataatttcttacaagtgtcttcaggatcatctcctatcaaatgggtgcagtttgtttgcaacctactttgtatttactacaaaacaattcaacgaaatattgaagaaactttctttaaaaagattgaaaacattattctgtacagatgcacaatatgaaaaaaatttatatttatgaagcatattctgtacatcattatgtacatattgctttgttggttggctatatagccatagtaacatgaggttgctagtgcaaggaatagtgcagtggctatgtaaaatgcatgacattatggaaatagcaattaaaaaatttagcaactactccctccattagtttttagtaggtgtattattattagaaaaggtctttagaagcatacctcggccaccaattctcatacaatatattatccattgttacaaaatcaatggtgtattaaaagattattgaaatacaaatatattcatcttttctttacactaaacatggatataattaaattaattgttggttaaaattcatgaagtttgccctttcgcaatcctaatacacctacttaaaagaatggaaggagtatgtactctctgtttaagcaatatcacaaataattgcgctactgc

SEQ ID NO: 21974 - DNA, 320 bp, Setaria italica
  Peptide Sequence Number=SeqID_87948
gcggtggtggcggagccggtgggacggcaggcggaggaacccgtggtgctgctgctcctccgccgggagggccaccccggcggcggcgcccgcctcggcggggaggtatggggttgggcgggccattctcgtcgtcgtcgccggccgcgacggcggcgactggttcggcgtcgtcggtggcggactgcgcttcgatggggcggcagtgcgcgacgacggcgaggagggagaggaggaggagtaggagcgcagcggtggctgacgggcgggccatggtggcgtgctcgggaggggaacgcggtgagccggacggcctgtga

SEQ ID NO: 21975 - DNA, 1148 bp, Setaria italica
  misc_feature (1069)..(1069): n is a, c, g, or t
  misc_feature (1098)..(1148): n is a, c, g, or t
  Peptide Sequence Number=SeqID_87949
cggctgtcgccgccgccttcccctaaacccttctccccgaatcccctgctcatcggtttggaacaatggcgctggctaacaagcttggtggtctgctcaagaaagccactagttcaaatccttctatctatcaagcaatcagatgcatgtcatcatccaagctctttgttggagggctttcttatggtaccgatgatcaaggtctcaaaaatgcttttaccagatatggacaggttattgaagctagggttatcatggatcgtgagtctgggaggtctagaggttttggctttgtaacttacacatcaactgaggaggcttcagctgccatcacagcaatggatggatcggatctcgatggaaggaacattagggttaaccatgctacggagagaacaggtggcttccggggcagcggtggtggtggctatggcggcggtggcgggtatggtggtggttatggtggtggtggtggtgggggctatggtggcaactatggtaacaggggtggtggtggctatgggggtggagttgcaggtggagatgagggcaattttgctgctggaggaagcaacaattttggcaacagctttggtggtgacagtgggtttggtggaaaccctgctggtggatttggtgctgccaatggctcccctggtggtgacgagttctctcccagcttcagcggcaacaagaacgacgaaatcatggatgacatgttcaaggatgacgagcctgacaactacgccgacaaaagggcctagctttcatcctccgagctaccctagcgtatcagtagaaatgaggtgaagtgatcatcaggatcaattccagaacaatctgtagtggctggtgtttttctgttaactttataggtctcttctgtctaaataacggaacgaggcacgttgttttgagtttgccgaactatcgaagtgtgctttatttgacctgctctgttgcatgtttgcacttctggcaaacgatggcaaacattcctgtctttaggccaaaaagctagtgttatctgttatgtcctggcctgctaatccagtctggcttgctttangccatctggaattatgtagattcagtagnnnnnnnnnnnnnnnnnnnnnnnnnnnnnnnnnnnnnnnnnnnnnnnnnnn

SEQ ID NO: 21976 - DNA, 172 bp, Setaria italica
  Peptide Sequence Number=SeqID_87950
accttccgctccgcgagcgcccgtgagaacgcggtggagcctccgccgcggctggtggggcggtggacgggcacgtacatgatcaacgcgttcgtggtggcgtgggtgctggtggtcggcttcggcttcggcggctgggccagcatgaccaacttcgtccaccagatcgaca

SEQ ID NO: 21977 - DNA, 306 bp, Setaria italica
  Peptide Sequence Number=SeqID_87951
ggagtccgagagatccggccttcgctgctgggtcggagatgtcgtcggacatccggaaatggttcatgaagacgcaggacaagggtggggcctccggggccgtgaagccctcagggccggctgcggcggagaagaagaagccggtgctcagcattccggagaagaagcaggcaccaccttcgttggcgtcctgcgaccatgatccttctgctagaaggaagacaagcaagtactttgggtcaaaaactgaaaaggactcggatgttggaatggcagatgccactgcaggaaagagtactgagaaga

SEQ ID NO: 21978 - DNA, 277 bp, Setaria italica
  Peptide Sequence Number=SeqID_87952
ggcagctataggtttgtcttcgtacccaccgccttcatcgatgatgaatcggaggccgtcgatgtggagctgcccatggtgaccgcttacaacaatggtgtgcttgccagtcagatcctgaaaccagattgtcactgtattaaaatttccatttctgttcttgtgatatgcttgaacaggaaaacaatggtgcccatgaattcagagagcgtgagaacgtgttccacccatcagtcaggtcatatggatgtcatgcatatcccccacgagcaaaaat

SEQ ID NO: 21979 - DNA, 562 bp, Setaria italica
  Peptide Sequence Number=SeqID_87953
gggctgcgcgtcgtagatggagcccctgtacgggagccccttcttcgggttccacctctccttgatgaccccgccccaccgcctcccctgcacgtgcatgccctcgtaccccggcccgcggaaccacccctcgtgctcttcgttgtggatgtactcgtcccaggtcgccgagaatggggagccgtcgggaggcggcggcagtaccccgacgaacgcggcgaaggcgaggtcgtggttgccgcagaggaagacgtggcgctgcgcggggtggcgtcccgggagcgcgaggaggaagtcgaggacctcgcgggtgtgcgggccgcggtcgttgtagtcgccgaggaagatgaccagcgcggtggcgaaggcgtcggcggggagcgcggactggaggttggaccagaggctctccaacttcgcgatgtagccgtggacgtcccccacgcagatcaccgtgcggggcggggccgagggagcagacatctcgccggcgcttccgccaccgctgctcgccggaggcttcacttgtccgtaagtaagtaaagtacgggttaagtacgta

SEQ ID NO: 21980 - DNA, 1396 bp, Setaria italica
  misc_feature (1)..(80): n is a, c, g, or t
  Peptide Sequence Number=SeqID_87954
nnnnnnnnnnnnnnnnnnnnnnnnnnnnnnnnnnnnnnnnnnnnnnnnnnnnnnnnnnnnnnnnnnnnnnnnnnnnnnnngtatgcgtaaagggccctgagacctggaaatttcgaatgtgcagggataggaaatttcatgtccaagttgacagtaccaagggtatagaataccaaagtttgcagttcacattgtgactatactgtacatgcgaaaatgcaggtctggtcctcaaacctcttatttcctgtcgacggtgtacctatgaatcgtctgaaacatgacacgtgaccacggccaaatagcaacaagcaagaggaaaaagaaaaactgcacctccctgctcctgatcatgacatccatatcaattctgtgatgcggctccctctgtgcttctgatcaatgtcttggaaggaaaaacgatggcagctataggtttgtcttcgtacccaccgccttcatcgatgatgaatcggaggccgtcgatgtggagctgcccatggtgaccgcttacaacaatggtgtgcttgccagtcagatcctttggtgtgttccaaacatcctgcctcccactaagcatcggaacctttggcacccttgtgtctctagttctcagaactctaagctgctcattcaaatctatggacttctctaggccagcatgaaccgcaattagattgcaaatgatttggccttcatccgtatcaattggcacgttttcctcttcatgtatccaaaccaagtcatgcagaaacatcttatggtcctctggcacagcctttgcgagatcaggggaaccatgggcaacgccatatgattcgaaggtgggctgcgcgtcgtagatggagcccctgtacgggagccccttcttcgggttccacctctccttgatgaccccgccccaccgcctcccctgcacgtgcatgccctcgtaccccggcccgcggaaccacccctcgtgctcttcgttgtggatgtactcgtcccaggtcgccgagaatggggagccgtcgggaggcggcggcagtaccccgacgaacgcggcgaaggcgaggtcgtggggtttgtccgtcttagtttggttaagcgacgtttgtcgtcccgggagcgcgaggaggaagtcgaggacctcgcgggtgtgcgggccgcggtcgttgtagtcgccgaggaagatgaccagcgcggtggcgaaggcgtcggcggggagcgcggactggaggttggaccagaggctctccaacttcgcgatgtagccgtggacgtcccccacgcagatcaccgtgcggggcggggccgagggagcagacatctcgccggcgcttccgccaccgctgctcgccggaggcttcactgccgagagaagcgggtagcgagttatcctgttgagttgagactc

SEQ ID NO: 21981 - DNA, 719 bp, Setaria italica
  Peptide Sequence Number=SeqID_87955
tgcatgacggagtggagctcgacggggtggcggacagggacttgatgatgctgctcccgaacccgttgcgcggcgacgacagcggcgcgccggtcggcttgggcaggctgagccccttgtgcagccgcacccgccgctgcgccatctccacctgccccatcaggtgggcaagcccttcctcctcgtcggcctcctccgacgcggcctcgtcgtcgtcgtccttgcgcgccggcgccgccttccggtacgccatgtacagcaccagctgcgccgtgcccaggacgaagccgatggcgttggggactccgatgaagtagtctttgacgagcacagaatagacgctccagacgccgccgttgaggaagaggaagaaggacagggagaagggcatgtactcgacgctccgggtcttcaccaccgtccgcatcgcgcccagcggcgccgcgtacatcccgatcgtcagcacggcgcacagcaccccgacggtgagcagccgggcgccgccgtgcagcgccgccagcgtcaccacgacgaccgccgcgaggaagccgacgttcacggccagcaccagcttcaccatcttcgccttggtctccctgggcgcgtagatgaggtagagcgtgacgtaggcggcctcgagcgcggcgccggcgccgttgacggtgacgacgaggaggccgccggcgttgagcaggccgtagaaggtccagagcgaggtg

SEQ ID NO: 21982 - DNA, 655 bp, Setaria italica
  Peptide Sequence Number=SeqID_87956
ttcggttacttagggttacttttgttatttgttatttgttctttgttctttcccgttaacccgtttgtcgtcggtcgtacgtactagtcgatcgtcgccggtcggcttgggcaggctgagccccttgtgcagccgcacccgccgctgcgccatctccacctgccccatcaggtgggcaagcccttcctcctcgtcggcctcctccgacgcggcctcgtcgtcgtcgtccttgcgcgccggcgccgccttccggtacgccatgtacagcaccagctgcgccgtgcccaggacgaagccgatggcgttggggactccgatgaagtagtctttgacgagcacagaatagacgctccagacgccgccgttgaggaagaggaagaaggacagggagaagggcatgtactcgacgctccgggtcttcaccaccgtccgctgcatgtgaatcacacgcccaaagccattatcagtgttcgtacaagcaagccagcggactttctggatcccacaatgtcaccaaggcatcaaacaagctggatgcatcgtacaagggagttgggatagtggctgtaaggatttaggtaagtggtcaggttcatggacatctgatgaattcgtgctagatagacacattgctgcttctggtgcggctataaat

SEQ ID NO: 21983 - DNA, 590 bp, Setaria italica
  Peptide Sequence Number=SeqID_87957
gcaaaagaaaaagaaaaggaaaaaaggaagctgctcgcgcatacgagtttcaagacacagtcaagttcactaaccactccattctaaccgctactgatctgtatttctccacggatactatgtacacacgcaggctattcgaattcccgtcgtctctacgcagcgcacacagaaacgcctgaacgatcctcctccgatcctccattatccgtcactcgttggcctcggcgtcgtcgtgcttcttgacgggctcgaaccggccgtgtccgtgctggtgcatgacggagtggagctcgacgggggtggcggacagggacttgatgatgctgctcccgaacccgttgcgcggcgacgacagcggcgcgccggtcggcttgggcaggctgagccccttgtgcagccgcacccgccgctgcgccatctccacctgccccatcaggtgggcaagcccttcctcctcgtcggcctcctccgacgcggcctcgtcgtcgtcgtccttgcgcgccggcgccgccttccggtacgccaatacaaggtagggacaaagaccctttaccttaacttacgttacggtaccttaccttaactaa

SEQ ID NO: 21984 - DNA, 416 bp, Setaria italica
  Peptide Sequence Number=SeqID_87958
ccccaatccagaatgacatgaagaacggccttgcaaacctttggtcgatgaactgggcccagaaacgcgcctgggccctctcgtaggggtcggccggcagcagcggcggcccgtcgaaggccttgtcgatgtactcgacgatgacgagcgactcggcgacggagcggtcgccatggaggaccacgggcacgagcttgtggacggggttgtgcttgagcaggagctcgctcttgttgctcaggtcttccaggatgagctcgtaggggacccctttcaggcgcagggccacctcggcgcgatgcgcgaacgggctgccgaacccgccgatgagcctcaccggctcggacgtcatcgtcttctctcagtacaagccgcaaaagctcaacatttttttgacgcaacttgctcgtgcgcca

SEQ ID NO: 21985 - DNA, 648 bp, Setaria italica
  Peptide Sequence Number=SeqID_87959
cgcgacaggcggcgatgtcgacggaagccgacggcgtcgccccagaacctcctccccttgagctgcgcttccaggagcgccaggttctccttggcctccttcacgaaggccttcttgtgctcgtcgtcgtccccaatccagaatgacatgaagaacggccttgcaaactgcatccaggagcacatgaaagagatccatcgatcgatggatcgagcatcttatcctgttctagcatggagatgcatggagtgaattgattgttaccctttggtcgatgaactgggcccagaaacgcgcctgggccctctcgtaggggtcggccggcagcagcggcggcccgtcgaaggccttgtcgatgtactcgacgatgacgagcgactcggcgacggagcggtcgccatggaggaccacgggcacgagcttgtggacggggttgtgcttgagcaggagctcgctcttgttgctcaggtcttccaggatgagctcgtaggggacccctttcaggcgcagggccacctcggcgcgatgcgcgaacgggctgccgaacccgccgatgagcctcaccggctcggacgtcatcgtcttctctcgtggaagctttggaacacttgtggttgcgctcctggttcccccagctggtcaatggcg

SEQ ID NO: 21986 - DNA, 1692 bp, Setaria italica
  Peptide Sequence Number=SeqID_87960
attatatagaggatctttttttctaatctcagtaaggttatatatcacacagacaaacattacacactccgttacaatggcaggtcaacgaggtaatacaacggtgcgcgtacgataattgtcccttgactccttcgttcagtttctacaaattcaagtaccttgatcatgttgcatgttacaaaatcaggtgtaaaacaatgttgccaaggaaaagttattgtcatgtgcaaatgatgagatgacagccgcactacatattctttctcctgcttcgttctagtggcctccatgcagctaatctttgtgaaccggggatcctctgcttgatcaatggtgcctgtgccgatccttttcacgagatgagtgcgaactgtagtagtcaccccggtctcgtgacgactggcgccttgacttctccttgtctgaatgtcctgaacttctttccctagaacgacgtctcctgtccctttcacgatccgagtcacggcccctactatcacgatcagaatccctacccctgccatcacggtcccgccctcttgatctttctctttctctttcccgactccggtcaactcccaactctgatttctcactcttcgaactcgccgccgggtcttgttttccattgagttcagcaagcaatggcttagcttcgtcgtcacttttttccttgaccttgtttggtgcagccttcgtcactgaatccttctcctggctagaactggagggtacaggagtacccttatcactagcaacagcacttgcaggactttcctttgaagcctgtggatctggtgtcctaatagtaaaggaatcattgtctttatacactggtatgtattgcgacttggggaggctgtagaggtgagcaagaacccggcaaacttcttgaattccagcttcatcagcatcgaagacagtccaccacggaggatcctcaggaagggaaataccacgtctcctggctgcagcatacacaactccgcatgctaccacttcactcttgaatcgcacacacagagttgtcctcaagctatcattggcaaggttccatgcctcttgagttagctcaggggcttcaagtgttacaaggtagttcgatatgaacttatgggggtgttcgacatggcaaataaaacccatctccttcaacagatgtcgttctgtccttatcaggtcatgcctcagttctgagtatttctttgaaaagacatctaagtattcaattggcaagttttctctcctgcattccattctgtggaatacaaatataatatgcttcgatttcctaggactctcctccaacttccctgccagccaaacacagctagcagcaactctctttgcactaaatcgaacaaatgatttcttgcagtaaaagcgatggaacaatacttgtgctgtggccatcactgcttgtggtagcctgaggaggatgccgctctcctggatgaggtcgcatccgtagacacggagcgcggtctcggtggcctcgtcgatcccatccttccgcgacggcgagtcccgcagctgctcgtccgtcaggtagaaggtgtcaatcgcagtgtagatcatcctctactccggccgcctcgccgagccgcctcccccaccgttccccgggcggtgtggcacggtgggtttcctattgtccttctttgtagtttagttcttctaagggtctta

SEQ ID NO: 21987 - DNA, 1201 bp, Setaria italica
  Peptide Sequence Number=SeqID_87961
cgtccgcgcggcgctctccaccgcttcgacgcccgccaaggcggcgcctggggcggaggcggtgcgatccatccgcgcgcggcagatcgtggacagccgcgggaaccccaccgtcgaggtcgatctcgtctccggcgacggccgcctccaccgctccgcggtgcccagcggggcgtccacggggatctacgaggcgctcgagctccgcgacggggacaaggccgtgtacggcgggaagggcgtgctccaagccgtgcgcaacatcaacgacgtcatcgcgcccaagctcgttggcgttgatgtgaggaaccagagcgatgttgatgcaatcatgctagatattgatggaactccgaacaaatcaaagctgggtgccaatgctattcttggagtatccttgagtttatgcagggcaggtgctggtgcaaagggagttcctctgtataaacatattcaggaactagcaggaattaaagagctcgtcatgcccgtccctgctttcaatgtgataaatggaggtagccatgctggcaacaatctggccatgcaggagttcatgcttttacccgttggagcatcttcatttgctgaggctcttcgaatggggagtgaagtttaccatgtcctgaagggcatcattaaggcaaaatatggtcaagatgcatgcaatgttggagatgaaggtggctttgctcctaatgttcaagacaacagagagggccttgtcttgcttatggatgccattgagaaggcaggctatactggaaagataaaaattggaatggatgttgcggcatcagagttccttacaaaggatggaagctatgatcttaactttaagaatcagcctaatgatggagcccatgttctttcagcccagcgtctgggtgatctgtacagagatttcgtcaaggacttccctattgtatcaattgaggacccctttgatcaagatgactggagctcatgggcttcattgcagtcctcagttgatatccaaattgttggtgatgatttacttgtcacaaacccaaaacgtatagcagaagctattgacaagaaggcttgcaatgctctattgctgaaggtgaaccagattggttctgtcactgaatcaattcaagctgctcttgattcaaaagctgctggctggggtgtgatggtcagccacagaagcggtgaaacagaagataatttcatc

SEQ ID NO: 21988 - DNA, 238 bp, Setaria italica
  Peptide Sequence Number=SeqID_87962
ctcctgatgtttccctggggcttaacagtgggctcttctcagattcttcctcagcttcagctttaaattgcatcacagcaatgtcagtcatgggaatttccacatctacttggatatgctgtatagtagaactgaaaaaacctatactttgcactgcctgaagtaatggagtctcttcaccagcttctctccctggagttgatgtctgaagaggatgctgttcctcggtagcaatatc

SEQ ID NO: 21989 - DNA, 216 bp, Setaria italica
  Peptide Sequence Number=SeqID_87963
gtgatagcgatctccaaagaggctatgctaacctatcccctgtgtgccttgtctggaagctttatagaagactttagtatcagtgcggcgttataagtaatggcatctgccaatgccagatgcaagtcaacctcttcttgaagttgcctttgcaatttcttaacttcctgctccagctgagaccggtactgccgcatgctgcaccttctcgcccct

SEQ ID NO: 21990 - DNA, 877 bp, Setaria italica
  Peptide Sequence Number=SeqID_87964
caaaacaatctgtcaaaatacacatgatatattagcaaggtctgaacaattcagttgggttcaccatttatctctgatatgtagctaaagggtaactcttatatgatccatgcattctatcaggactacattgctatctcggactatagtatcagatgaaaggcatgtgaatagtgcccgttctacaacctagagagtgcagtgtgaagcttcaggtaacagaggagaaactttagttcctgtggtgtcacaagccatgaagcttgggaccatgagggtgatggccttccaggggacacctacagtgcttctgcaactccatgtacctctccatatcaaacttctgtgcggcgcaaagctttctctgcctcgataaaaacagcctctccatgaagtcctgatacgtcgggtcccttgaggtgatgaggaaataggcgtagccaacaagcaggccagaagcagtggtgaagaaggcaattggctccatcacatcccatgagaattcccagaatgtgagacggaagaagagcccgacttggcacatgaagaaccctaagccagaccataggatacatcgcacttgcttgtgtgccagcttgtcaatctcttccttcttttcctggagctgcttaaactcctcttttctcgggtcattctctggtccgagtgcaagtggcacagctcttctaaccaggtccaccaccttctcggggtgcaggtatgccttgtccctgaagagcagcacgacgccggcgtcatccatggcccgcgcgagctcctcggcctcggcgtgcgtccgtgccgcgccggcctcgacacatgcgtcgaggagctcggagtagcccaccacctcgtcccggccgtcccgcaggcggcg

SEQ ID NO: 21991 - DNA, 255 bp, Setaria italica
  Peptide Sequence Number=SeqID_87965
ccagtcaaaccttgtttctctggattgaaagaggaaataggattatcatattaattaaatcacaaaggtgacgtgacatggatagcaggacaaaaataagagaagttccttctcaaatctcaaggtctggcttgggaattcactagctatcaagtttcacctaatttgctgtcagctcataaatgcaacgaaggattcaggctttagagttgtaccaatatacttgagataaatactgtgataatcttttgctaa

SEQ ID NO: 21992 - DNA, 788 bp, Setaria italica
  Peptide Sequence Number=SeqID_87966
aaaaactatgtctctctttcatgattacattgaatacacgttacaaaaacaagaagcctttcaccagccagtatacgcttcaactggactaacaaatcctaagttacacgtatttcctaaggataacctgaatactacaatatatctgtttttgtgcaactgagaaaacctgtgaacctgagtcaatgatatgttggttagatattaattagattacccaacagagacaagacagacacacccctttctatttattttcctctgccagatcttgaaaatctactagatctatgcaccttcagctgaattgctggcacccttctagccagtgcttgccagatcatctggactgcatcatccttctgggatggatactgatactcaaaatgtttatccacctctttgagcctattccacatccttgtccattgttgcttgcttacaccactaatcagtctcatcaggtaaccctttttaacagcatctgacgatcggacaaagatggagaactttgaataatccaatacatcctcgtaaggtagctcaatgtcatcactgatgataacagggacacagtggctcactatcgcatcaaacagacgattggaagaaggggtgtccccagcaatgtttaggcaaaattttgatgagtgcattccttggctggctttgctggccccatggtcctggacacttccaaaggaaaaataaacattcttttcgtctttgagcatgtaatatagctcttgtcgtatgctccctccctccttcctgtaaatggctcaaaa

SEQ ID NO: 21993 - DNA, 472 bp, Setaria italica
  Peptide Sequence Number=SeqID_87967
taacctaattagaattaggttagaagtgactttgccatgtactacattgaggaagacatatctaaagaacttgatgctgaaagaattttagaacatttcaaagcatggtaactcagagaatgtagtaaccttatattgatatacttagtgaagacttgtttatagtcttctcttgtgatgtggaaattccttttctttcatgtagagttcccttcatatcaaatttaggcctagagatcaagttcatcactgcagaagctttactgaagatcctaatgcagatttagggtctcaaagattagagaaacatcatgggccctttgaagcgggaatgctccaagtgtctgtaaggctgtaactcccatatgcagaactgtcactgtataaagtcactccttggccatgtttgcttgaatttagaagagctatttaatttcttataatctagcagtgctcttttttcgcttgaccc

SEQ ID NO: 21994 - DNA, 211 bp, Setaria italica
  Peptide Sequence Number=SeqID_87968
ggtcgacgaggtggttggcgccgtccctgacgaggatggtgtagagggaggtggccgggtccttggccaccgggatgagcacggggtgcgcgcacgaagccggccaggccagcacgagcagcgagatggccgagagcaggagcggcgccggcgatggccgtggcatcttcatggtcgatgcaggagcttaacctgttgagctggcctgtgt

SEQ ID NO: 21995 - DNA, 240 bp, Setaria italica
  Peptide Sequence Number=SeqID_87969
ggaggagaagaagacgaggcgcggggaggcgtcgtgccagtggtagccgacgaggaaggcgagcgcgacggcgaaggcgaggacagcggcgcggaggaggtgcgggccgcggagcaggtcggcgccgtgcgcggccagggccttcatggctgggccctcctcaggcctcggggagtggtcggcgcggtgccttgcttcccgtctgcgtcgtcccgggacgacgcggaagggatgggatcg

SEQ ID NO: 21996 - DNA, 286 bp, Setaria italica
  Peptide Sequence Number=SeqID_87970
gtgtgtaagaaaaagtttaagcggctcaagaaaatgattgttgctattttttcccgtttctgcctaaggatgattaacaactggaagaaaggccatgaatataccgaatatatcatacatggctccacaaacatctctcccacctaactaaactaccagaactcctttttaagggaatacaaaccaagcaaactgagtcactagttaaacaacccttatacaattacccaataatcatagaacaaactggcatgagaacagggcacacataattagattaactaga

SEQ ID NO: 21997 - DNA, 1188 bp, Setaria italica
  Peptide Sequence Number=SeqID_87971
tgattcattgcgatttgaagatcacgcctggtacgcgattattgagacaaaagctgacatggcaagactagcttccacacactttacaggtcaagacactgcacttggggatcagagtgcattgattcagaagcaagccacttgctgattttataccacgcagataataaaggaagcgctgatctggaaaaaaaaagagtagatttccagtaatgattaatatcttgtccaaccaaaggctgccggtagcgacgtcggctcacagaggtttcggtgatgcaagctggtctacactctacagcatacaagcgtacggagcaattcatccttcttgtatcagtcttttaacatcaaaatctacgattttgtcttggttaaaagaaaggaaacgtacctgactaacatgaaggtttatgatttaaatagtccttctagtgtttagcttcttttgagctgcgcttatattgacaaaggtgctaatttgtattagtaaccagtcagtcaccaataagagcaactggaaataatatacatgaatctcttttggcagaaaggggcaaattgccattgtatgagacacaccacattgtatcttacaaagaacagtaaatctgatcagcatcagtgatggtacatctatacctgttgatcaatggggcttcaattccctcaaatgccgagaccattttgaggggtgacctatgccaaggccattgcaggtaagtatcatacccttaaatcttgtaaggtactcacgcaaagtatattgattgatctcgtaacagccggaaaggtcgtattctagtcgcttagctggatcacttaaaaccttgtatgcttcattaatctcctgaaatttagctgtgacatcgctatcacccttatgcttgtctggatgccacatcaaagctaatcttctatagctcaatttgatggtgtcgtcagatgcgtcatagtcaacctccagaactttgtagtagtccttgtggagaggctccttgcttgctccgtccataaaccgaaacaaatcatcacctcgagctcgcttcgcgcagcgggattcccttcttccgctcgcgcgttgggattcccgggcccgtcttggcggattggggagtaaccggagttgattgatcgatgggtaggtgggatcggagttcttgactaattcccccaccttttctgttt

SEQ ID NO: 21998 - DNA, 438 bp, Setaria italica
  Peptide Sequence Number=SeqID_87972
aattccttttccttcccgtcctcgactctcctctcatctctctagctcgcaaggacactgcgtgctacatgtcgctgccgcggctgtagccatgcaggaccacgtgtcggcctacatgcaccggagcggcgaccagcaaggggcgccgtcgtcctgcgacctcgccgccgtcgacgacgtcccggccaacgggcacaagcccggcaaggccgtcaccgcctccgtctaccgcgccaagatcgcgggccactcgcgggtcgtcaccgtgtcctggtcccgcgacctcctctcgcacgccttcgccgtcgccatctccggggccgacggcgcctccgcggagtgcagggtcgagctccggccgtggcagttctggcggcgcgccgggtcgcgccgcgtcgagctctgcggcggcgcttccacggccccggcgacggtgcg

SEQ ID NO: 21999 - DNA, 159 bp, Setaria italica
  Peptide Sequence Number=SeqID_87973
ccaagagttagccggggcagtggccttcttgcatcagcctcagtgccacagttgccgattcggcatggctcctttggcgtgccattcctatcccctgctgctcttgcaatgcatctgcctgcggtagctgttgcgttgtgccggactcgttgaacacag

SEQ ID NO: 22000 - DNA, 494 bp, Setaria italica
  misc_feature (480)..(480): n is a, c, g, or t
  Peptide Sequence Number=SeqID_87974
ctcgcatccgggctcatcggctccgtcatctggctcgtcaagaccttcctcatgaagttggtggcgtccacgttccaccggaagaccttcttcgatcggatccaggagagtgtgttccaccagtacgtgctgcagacgctgtcgggcccgccactgatggagctggcggagaatgtgggccgggagggaagtgggcttggccgggtcagtttcagcagggccaaggaggagaaagggaaaggtgtgccggaggtgattgatgtcgtcaagctcaggaggatgagccaggagaaggtgtcagcatggacgatgagagggctcatcacagcaatccgaagttctaggctctcaaccatatctaatactatcgagagcttcaatgatgttgatggcatggaacagaaggatagagagataaatagcgagtgggaggcgaaggcggcagcatatgccatattcaagaatgttgcaaggcccggntataagcatattgg

SEQ ID NO: 22001 - DNA, 417 bp, Setaria italica
  Peptide Sequence Number=SeqID_87975
acagcagagaggaaggaagagcaggaaggagactaggggggagagatggggaggaggaagctggggcttgacagggtcctggactgcttctcgctctccctgtgcgcgaacgcctgcgcctgcgtgcactccgtggaggaggaggaggacgaggacgaggccgacgagcggagggccctggtgagcagccagctggaggagctcgtgaaactcagggacttggtcgatggagctgcaagaacccttgctttccatctggagcccaagactgtggagctcaaggtgtccatgcactgctacggatgcgccaagaaagtccagaagcacatctccaagatggacggtgtcacgtggttcgaggtggatttggagaagaagaaggtggtggtgacgggggacatcacgccctacgaggtg

SEQ ID NO: 22002 - DNA, 597 bp, Setaria italica
  misc_feature (575)..(575): n is a, c, g, or t
  Peptide Sequence Number=SeqID_87976
caagcaatcgctagtttgtccctctcatatagtagatggatagatcatagatgcctgtgcagaagaacatgttgacctctgtttgagctgggtacctttgcgtaattattgatgtgtatgctctctgttgctgcatctgtgtgttgcagactgtggagctcaaggtgtccatgcactgctacggatgcgccaagaaagtccagaagcacatctccaagatggacggtgtcacgtggttcgaggtggatttggagaagaagaaggtggtggtgacgggggacagtcacgccctacgaggtgctggagagcatctccaaggtgatgaagttcgcggagctgtgggtggcaccccagcaacaaccccaagcagcaagccgcggataggttgttttgtagatgatgggctagataaaaaagatgatgggctagatcgatctcacgtatcggcatggcatcaacgctcacggcctcacctccatcatgcgtacttgcgtactcatttaacatgttgctctgggtttttatgtaaagggcaaattggggagcgtgtctgcgtgtggctgtgtacaacaagngtcaagaggcttttgcctggcc

SEQ ID NO: 22003 - DNA, 549 bp, Setaria italica
  Peptide Sequence Number=SeqID_87977
gagagagatacctagcagcatagggccattagttagcagccaaggtagagcgacaggaaagatggtggtgatgcgttccgacgtgcaggtggtggagagcagcctcgtaaccccgagcgaggccacgccgaggcagcagctctggctctccccctcgacgtcctgctggtcaacaggggccacaccccggccgtctacttctaccaccccgccgccgatgcagcggcggcgaaggacttcttcgacgtagcgcggctcaaggagtccttggccagggccttggtggacttctacccgctcgccggtcgcctcaccgtcgacgccggcggccggttcgtcatcgactgcaacgccgagggcgcgctcctcgccgtcgcccgctccgacctcaccgtcgccgacttcgccgacgtcgtcccgtcgccggagctcaaggacctcttcgtcccccgcgtcgacccgccgtcgtccgtcatgctcgccgtgcaggtcaccttcctcgggtgcggcggggtggccttcgggaccgcgctgcaccacgccgtcgcc

SEQ ID NO: 22004 - DNA, 839 bp, Setaria italica
  Peptide Sequence Number=SeqID_87978
tcttaaccacaaccaaatgccattgctgtttagatattcaaaagtcaagccattgtcagttataagaaaaagtgatctgtctgcatgcatgactcgcatgtggaaattaagatcaatgcttcttgatagaaagttgtatggttcaatttcatcactctggtggctgttaatatgtaagtagtgctgcttctcttctactttgcgcctcctggaaggttgggtattgctcaagtcatttggttcagtgtctgtggctatactctttgctccagtaatacaattggtcggaccatgctcttcgatgcagtattctgcattccaaccttctgtttctggtgcatctaggatggaccactcatacttgtttgatagtttttttctcactgtactttgtggaattggaccaaaatcagcacctccaatcccaggaaaatgcagctccccaagcctaccatcatctagtgggaatatcattctgccaacttgaacctgtacacctcgagcgtttcttgcaacctttgcatgctcagggtacatgtgatttaaccattgtcctcttatcttattgctttgagccccacctgtatattttggaacctgatactcgaatatttttcctgtggttgtcgtaaaaaacaaagaagttgcgtcattgagttcatcctgctgaacttctgcaactgaactgagtctgtgacccataggagctccatgtttatcccacttccacttccttctatgcaagcgtcgttccactaaaaggccatcctgccaatctataactatctttaacaaatagaagtggaaaaacttgttgttgcaacagaaaaggagcatta

SEQ ID NO: 22005 - DNA, 243 bp, Setaria italica
  Peptide Sequence Number=SeqID_87979
gcaaataaaagaaaaaatagtcagtccctcaaagctgggaagtcccggtagcagtgccagggttcttcgatctgcctcaaaatataaggatgagacatgtacggagccttctgttgaaccagctgcagataggaagaaaattgccagtccttctaaggtgggaagtcccaatgacactgtcagagtgcttcgctctgccttaaagaataagaacgaggcatgtactgaacctctaaatgatag

SEQ ID NO: 22006 - DNA, 419 bp, Setaria italica
  Peptide Sequence Number=SeqID_87980
ctcccccaggcgcaggcctgcaccagcccagccgccaccggacagcgccacggcggccgccccttcccgccgctggagactccctcaccgccgtccgcctgaattgcatcttcgttcgctccccggccgccccgcccgagagggggctccccgatcggtcgttgcctgcgtagatacgagcggcggcgatctctggctgtaccgccgcgggaaacggaggcaggacggtgaaggagggagagcgagggggtgtcctaccgtcctacgactcctgcggtcctgccgtgcgtcgggggtgccgaatttgtgaccaaaggtgttattctggtacttcgggatttctaagtgaagttgctaagggagtgactttaaggtgtctgccactatcacttccatggcaaccaacgagaacctcccac

SEQ ID NO: 22007 - DNA, 581 bp, Setaria italica
  Peptide Sequence Number=SeqID_87981
ttactggatgcacgtttttgatttcttagctgcattgaattactaacatggcattgatgtgcgcacacccttgctgtataagggggccagggaggcgataaaaaggtgataatttgggccatgtagattaaggaaatattaacatagactgctaaggctttttgtccataaaaggtgctattgtggcacagagacatttctaagtgaagttgctaataaggcgggttcgaagctatctgctattgctgctgcaatggcaaccaatgaaaaccttccaccaaatgtcatcaggcaattggctaaagaactgaagaatcttgacgagtcacctccagaagggattaacgtgattgtcaatgatgatgacttcactactatttttgctgatatggagtgccactggtggaactccatatgagaatggagccctcaatatcagcaaaaatagtggtgaagtcatcatcattaacactaaagaaggattggaatcctggtcttggattaagactacgttctgctggtagtgagatgccttctgattgaaccacttcccccgaattctcgccctgaatgaacaagct

SEQ ID NO: 22008 - DNA, 1362 bp, Setaria italica
  Peptide Sequence Number=SeqID_87982
tttgtaccaataaaaggtgctattgtggcacagagacatttctaagtgaagttgctaataaggcgggttcgaagctatctgctattgctgctgcaatggccaaccaatgaaaaccttccaccaaatgtcatcaggcaattggctaaagaactgaagaatcttgacgagtcacctccagaagggattaacgtgattgtcaatgatgatgacttcactactatttttgctgatattgaaggccctggtaacattctgtcaagatactttggtttacccctgccaatgttttgggtcttcctctattaatttgcatgcctatgcagctatgctgatcatgctctctaaatactttgcgtataagggtgtctttcgtcagtccataatttccttgtttctatgtttagggttaagtattgatgagttgtttttatttctgggaattcataactgcgtattatggacctgaagcattaatggttacctttttctatttcattactttataatattagttctgaatttaaatctggacactgtgcaggtggaactccatatgagaatggagtgttcaggatgaagctactattgtctcgcgacttccctcaatctcccccaaaaggattcttcttgacaaaaattttccatccaaacatagctactagtggtgagatatgtgtaaacacactgaagaaggattggaaccctggccttggattaagacatgttcttctggtagtgagatgccttctgattgaaccattccccgaatctgccctgaatgaacaagctggaaagatgctacttgaaaattacgaggagtatgcacggcatgcaaggctgtacactggcatccatgcgcttaagcctaagaacaagtcgaagagtggagctatttccgagtcaaccacagctctaaatgtgggccagtccaatactgttctcggcgagatacctttggcgtcaacaccaatatctacctctgctgctgccaaagcattaggtaaaaactcacaggatcagaatgctgctacttctgatcctgttgtaggagcatccaccgcacccaagaaggatgcagcacatgcagccaaagttgcagtcgataagaagaagctggatgcaaggaagaagagcttgaagagattgtaatcgaataatcctgagaggtgaggagtgcttagtggtagataagataatggtcttcattagtgctagattcaactgatgcctggtagaactgaaagaacaaaaaacagtgcaagaggcatctcatggggcatctctgtgctttgttgggacaaaactgtctgtgcaatttcaactattcatttattggaggaaaaaaaaaaacaaaaactagag

SEQ ID NO: 22009 - DNA, 1768 bp, Setaria italica
  Peptide Sequence Number=SeqID_87983
gttgcaaaattagcttgtggaagtggctccttgctagactaacgtgattgcagttgcatgtttacatgttcttgccgaaatgctttgttgtactagcaatttatggaagatgttgatacgtggcagtagttgctgcctgcgggcattactggatgcacgtttttgatttcttagctgcattgaattactaacatggcattgatgtgcgcacacccttgctgtataagggggccagggaggcgataaaaaggttgttatcttgtgagatttgccttttcagtgtttggatgtttagacaatgaaacgatccatccaaaagattgaaatgggatcgcgaatagatcaaagaaatttcggggcattacaattgaagtatgaaaatgattaccgaatctctccatttctcctggcctcgcctagggtttcgcttcctccccttcgcgtccgagcatcctcaggcggctgcggcggccgccacccctatctcgtcgccctgagacttccctaccgcctgcctgttcggccgctccccctgccgcccgccctgacctgagactgctaaggctagactgctaaggctttttgtcctaaaaggtgctattgtggcacagagacatttctaagtgaagttgctaataaggcgggttcgaagctatctgctattgctgctgcaatggcaaccaatgaaaaccttccaccaaatgtcatcaggcaattggctaaagaactgaagaatcttgacgagtcacctccagaagggattaacgttagtgttaatgatgatgacttcaccactatttttgctgatattgagggcccagctggaactccatatgagaatggagtgttcaggatgaagctactattgtctcgcgacttccctcaatctcctccaaaaggattcttcttgacaaaaattttccatccaaacatagctactagtggtgagatatgtgtaaacacactgaagaaggattggaaccctggccttggattaagacatgttcttctggtagtgagatgccttctgattgaaccatttcctgaatctgcactgaatgaacaagcggggaagatgctacttgaaaactacgaggaatatgcacggcatgcaaggctatacaccggcatccatgcccttaaacctaagaataagtccaagactggagctatttctgagtcaaccactgctctgaatgtggacaagtcgagtgctgcttccagcgagaacacaccatcaatgccaccagcagtatctacctccactgcatccagagcatttggcacgaacttgcaggatcagaacccgactgtttctgatcctgccgccgtaggagctgccgcagcacggaagaaggatggcccgatggcttccaaagctcctctcgacaagaaaaagatggatgcgcgaaagaagagcttgaagagattataggcgaaaacgtcccgggaagagggacgttgttgccggtagatcagaattcaaatttgctagcatgagccaggttcagcagatgcttagtgaaactgggagagaaaaaggaataagtggggagaggcatctgatgatctggaattggggacgaggcggggccagacgggggaataatgtgaactgggtccttcgggacaactttttatgttcaatgtccaatcatttggaagaagacctgcctttcgacttgcaaggaatacaaagaaaacccgaaactaagtttaactaagaaataacctaagaaccgaaccgtaaaaacttaattggggtcct

SEQ ID NO: 22010 - DNA, 1293 bp, Setaria italica
  Peptide Sequence Number=SeqID_87984
ttggtctagttcctctgtttgttagtttttttttttttttttttataaggaacgttgataattttctattgagtagtagaaagtgtgcacaatgaaacgatccatccaaaagattgaaatgggatcgcgaatagatcaaagaaatttcggggcattacaattgaagtatgaaaatgattaacgaaaaagcataagcactcttatttttcaggacaatctccatgactccttgccgacagaacgagccatgttcatgtcttgatgaacgcgacggtccgctcctgcagcgcgacgccctcctcggagtcgagcttgtcgaagtggaaggcgtggtcgacgcccttggactcgaagagctcgagctcgccggcgtacccgctggccttgagctcccggtggtaccagagcccgcgctccttgagcaggaagtcgttctcggcgacgcacaccaggacgcgctcgcacgagatcccggcggaggccttgcgcgcggcgtcgtcgacgaacgggcacacgcgcgggtcgtccagccccaccgtctccgaagccacgaaccgccacgtgcgctccatgaaccccccggatctcgggcccgaacgccgtctcgccgctgatggcctcgctgccggtgaagtacgggtgcaccagggcgagcccgcggagggtcacgccgtcggggagcgcgccgggggcagaggcccgcacggccgtgttgtgcgcgatgttggcgccggcgctgcagccggccaggaacacgcgggagaggtcggcgtggtcgatcagccagggctccttgccgtcgccgagcgtgaccgcccaccgcagcgccgcccacgcgtcgtcgtacgccgcggggagcttgtgctccggcgcgaggcggtagtagacggacacgccgatggcgcccgaccgggcgatgaggtcgttgaggtagttgtgcgtgcccggccgcgccggcgagcccaccacgaagccgccgccgtggaagtagacgacgaccgggatcttgccggtagcgcccggcgggaggtagatgcggacggaggtggggccggcgcggatgtccttggagacgacgccggtggccgggtccgtgccggcgggggcggtgggggcgccgccggggcggtggatgcggccgctcttgtactggcagaggtagggcgggaagtcgaaggcgacctcggagtcgggatccatggccgcggccggcgaggagttggtggtagtggagtcgcccatgggggttgggggaggaaatggaaatgagttggccacctacaacacagcgag

SEQ ID NO: 22011 - DNA, 230 bp, Setaria italica
  misc_feature (218)..(218): n is a, c, g, or t
  Peptide Sequence Number=SeqID_87985
agatgcacagcttaacttgtctgagatttcattgcagtgcagagtcagtgaccaaatgtgctctcccttttctcttcaatttagtacttggtgcaatttttgcttatatgcgactttcaagagattcttatctgacgtctacaaaattatacaaaccattcttggcacttggcagactgcaggatacataatgtccagcgtatggcaaacaatgcctnagtaagagagct

SEQ ID NO: 22012 - DNA, 402 bp, Setaria italica
  Peptide Sequence Number=SeqID_87986
caaacctaaattcaggcccgagggagatgctccagctccaggagtatactgcagatgcacagcttaacttgtctgagatttcattgcagtgcagaactgcaggatacataatgtccagcgtatgggcaaacaatgcctcagtaagagaggctcttggtattcacaagggcacggttccttcatggtcaaggtgcaactactccataccttatactagtgacattccaagtacggtgaagtaccatctggacgtgaccactaaggactacaggagccttgtttacagtggcgatcatgacatgattatacctcatatcggcacgcaagcctggattaagtcccttaatttctctattatggatcactggaggccatggtttgtcgatgggcaagttgcaggat

SEQ ID NO: 22013 - DNA, 435 bp, Setaria italica
  misc_feature (96)..(96): n is a, c, g, or t
  Peptide Sequence Number=SeqID_87987
tatatgagtcatacaagaagagctgcagtgttggcgacaacagccaccaaagcattgagtgcatcaacagcctttacgccatacaagaggcacatntatttcttgtttccaagcatgacatttctattcacatctccaacgatactgctacagagtgactgacaaattaaatggtttatttttcaaagtgcctcaaaggcatatgcccgaaccatgttctggagcccgtctgcgcttttgcgagtcctcatgctcacaagatggagacgaagccaaacctaaattcaggcccgagggagatgctccagctccaggagtatactgcagatgcacagcttaacttgtctgagatttcattgcagtgcagagtcagtgaccaaatgtgctccccactgcaggatacataatgtccagcgtatgggacaaacaatgcct

SEQ ID NO: 22014 - DNA, 485 bp, Setaria italica
  Peptide Sequence Number=SeqID_87988
tctaggcaagatagtgccaaccatcgcctctgagatcgccaggggtaaagaaggtggccatgaactaaatttcaatctaaagggctacctcgtaggcaatccagtcacagattctaactttgatgatccatccaaaattccatttgctcatgggatgggtatcatatcggatgaaatatatgagtcatacaagaagagctgcagtgttggcgacaacagccaccaaagcattgagtgcatcaacagcctttacgccatacaagagtgcctcaaaggcatatgcccgaaccatgttctggagcccgtctgcgcttttgcgagtcctcatgctcacaagatggagacgaagccaaacctaaattcaggcccgagggagatgctccagctccaggagtatactgcagatgcacagcttaacttgtctgagatttcattgcagtgcagagtcagtgaccaaatgtgctctcccactgcaggatacataa

SEQ ID NO: 22015 - DNA, 435 bp, Setaria italica
  Peptide Sequence Number=SeqID_87989
tttagttttttaactttaagttttaggtttacgtttaattgtttgtagtgggaatcatgacatgattatacctcatatcggcacgcaagcctggattaagtcccttaatttctctattatggatcactggaggccatggtttgtcgatgggcaagttgcaggatttacaaggtcatactctaataaccttacattcgcaactgtgaagggtggtgggcatactgctccggagtacatgccaaggcagtgcttcgctatgtttgcacggtggatttctggtgatcccctttgatgccctacattcgagctccaagcttcgttaattagttactcgctgcattacattgcaagagaagtgcattggttggtatagagttttgcaagcaaagctggtgtacaaaggaacaatgaaaagaaatgtttaaggaagcctgg

SEQ ID NO: 22016 - DNA, 953 bp, Setaria italica
  Peptide Sequence Number=SeqID_87990
ctacaagaaaagcatttcaagaaatcagaatggtcctcacactcagctcttccatcatcctcctccacttcaccatcccaaagatcctccaaggaattgtaaccgctctgtgggtggattacgaattcgactttcagcagcctaacctgcttgattccagagaactttgccatcaaatcttcaggaatagaccaatcaaatatgtcaaagttctccttgatccttgtttcgtcggcactcttgggaagtacactctggcccatttgaagcccccagcgtagagcaatctgggcaggcgttttctgcaacttctcagcaacagagatgacaacggggttgctaaggacgcttggcccacagtatccaggtgatccaggtgaacccaagggtgaatatgcagaaagatggatgcccgttgactggcatagcttacggagcttggcttgctgccaaactggatggcactcaacttcgttgactgctggaggcactcgtgcaacagcaagcaaatcctccaccttcttacaagaaaagttactcacacctatcgcacgagctttgcctgagtcatataacttctccatcgctccccatgtagcagggatatcagtacggataagattgtccgggataaacatacttcctttttttatacggattggaccatggataaggtacagatctacgtagttaagctgcaaatcttcaagggcagagcaaatatcctcctgcacatcttcaggtgcatggttaccaggccatagcttagaggtgataaacaaatcttcacgcttaaccacgccatcctcaaataatttcttcaaagcaactccaacctccttctgattgcggtatgctacagcggtattaatatgccgatacccagccttgacagcagcatagatggcgctgcagacagcttcatgctctatttgccatgtgccaaggccaac

SEQ ID NO: 22017 - DNA, 429 bp, Setaria italica
  Peptide Sequence Number=SeqID_87991
tgtccagcaccgcacgcgcgtcggcggcccggctctgcatgaccagccaccgcggcgactccgggataatcattagcacaaacgcgatggagatggacgggaggatgccggcgccgagcatgacgcgccagttgatgtggtcgggcagacccgcgaaggcgaggttggagacgtagccgaggaggatgccgaagctgatgaagatctcggggaaggatgcgagggtgccccgcagcgtcgccggcgagatctccgagatgtacacaggggcgaccatgatgccgattccgatgccgatgcctgccagcaaccgccccgtcatgagcgcggcgaaggacggcgcgaacgtcatgatggccgcgccggcctggaacacagctgcggcgaggccgatggtccacttccgtccgatggcgtccgatgttctgc

SEQ ID NO: 22018 - DNA, 207 bp, Setaria italica
  Peptide Sequence Number=SeqID_87992
tgtcctactagagaggcccttcacacatgctccctcaatcgagcatttcacaagtgcatcaagaaacttcaatattgcaagccaaccagaagagtcaatctccatatttgttttgcacatgatatcatgaatcagatggccgacgccgcgcagcgcgtcgtcggcaccggggcaagaggccgccgccgcggcggtctccgcgaggaa

SEQ ID NO: 22019 - DNA, 587 bp, Setaria italica
  Peptide Sequence Number=SeqID_87993
atgatgaattgaactgtctgcgaaccaaggaagaaagaaagaaggcggccggcaagggaactgaccgtagaggtgcggcgtgcgcgcgaactggatgtatggcgtgtagtagtcggcgtagacgatgcgtgcctcgggtcgccgccgctggagccggtcgagcgcgatccggagcatggcgttgtggtagagcgcgacgctgttgtacttcttgaggcacctcatgcgcgggtcgtactcggaccggtcctcggacgggtacatggtgagcgtgatggggatgcacccggcggggaggttgccgggcaccaccacgtgccgggcgccctcgtcgaggagccgctcgatgccccgcaccagcgacgacaccaccgcgggaaccatcgtcttcaccttctccagggaccagtccgccttccacgcgaagctgtagtcgttgccgccgaactcgccgaacacgaacagggccttggagaagaaggcgcggcactcctcggggtcggagcagatggtctgcttcacctcgtcgaaccacttgctagtcttgtctacgtttctattggtaggttgtttgttaagggtcggtt

SEQ ID NO: 22020 - DNA, 1667 bp, Setaria italica
  Peptide Sequence Number=SeqID_87994
ttttttttttttaagaattagacaaagttaatacactgactcctgagtcctgaactttcaccaaaacagtctgttgtttcttcattgctccctctatgcccaaacaagaagagtagagagtattacactgcgctgcacggcacgggcagcaacaccaaaaccgctctcgctcggttgtattcgacagggggcaccagcacaagcaggtaaagaacgagagaaacagaaaacctaagcgatcgatttttactccgatccccgaatatacatgaacgaatggcatattagcagagctctccctccacagtccactctctctgcgcgacaccatcggcatgatcagtcagtcgaccatgtcctcgcggacgacggtggcgagcggcgggtgcgcgtagggtcccttgagccaggtgttggcgatgaagcggtagggcgcctccgtcaggtggatgccgtcccagctcacgtgcgcgtcggggtcctcgcacgtcgtcgacccggggagcccgcaggaggcgctcatgttgtagttgtaggggccgccgccgccgcagcacgcacggagggcgccgcgcttgtaaccgtagaggtgcggcgtgcgcgcgaactggatgtatggcgtgtagtagtcggcgtagacgatgcgtgcctcgggtcgccgccgctggagccggtcgagcgcgatccggagcatggcgttgtggtagagcgcgacgctgttgtacttcttgaggcacccggtgcgcgggtcgtactcggaccggtcctcggacgggtacatggtgagcgtgatggggatgcacccggcggggaggttgccgggcaccaccacgtgccgggcgccctcgtcgaggagccgctcgatgccccgcaccagcgacgacaccaccgcgggaaccatcgtcttcaccttctccagggaccagtccgccttccacgcgaagctgtagtcgttgccgccgaactcgccgaacacgaacagggccttggagaagaaggcgcggcactcctcggggtcggagcagatggtctgcttcacctcgtcgaaccactgcagctgcacgttcatggaggtgttgaagggcgggatgctccacacgttgttgtccttgaagtacttgaggtccagagccgtcgcgcccatcaccgcgaagttggcgccctggctgaagttggtgcccttgttcgccgacggggggagcagggggagaccgaacgcctcggcgaggaagtcgatgacgaggcggccgttggagcagcgcgcgtacggcggcgggaacttgggcatgttgggcagcttgccggagttgatgatgacgaagttgcccgtgtccgagaaggagtcgccgaagctgaagatggcattgtagtactgcggcagcgcctcgccggccacgccggcggccaggcacagcagcaccagcacgcacgccggcggcacaaaaccgctcctcgccgccatggccaccaactgacggacctgcttagtcctcgccaatgagaaaccaacggtgtgaaagaaagagaagggactgaaggagatggtgggcagcaagcaagcaaaaagcaggcaggcgctactgcactacaacatgagcgcctcctgcgggctccccagctcacgtgcgcgtcggggtcctcgcacgtcgtcgacccggggagcccgc

SEQ ID NO: 22021 - DNA, 697 bp, Setaria italica
  Peptide Sequence Number=SeqID_87995
gtgccatttaactaggttcacatcaccaccaagctccagcagacgcttggcaaaattttcaacaaccgaatatggagcaagttgatcatcctctgaacagagtatcagtattggcccaacattcacagatgagtatagtgtttcccaataatctttacgttgttcttcaaatttgtttatgaatagggtgtcaagacctgaggcaacacccttagccatccatgacaagacacgaggaggttcagacatcttcaggacacttgggtcaaggagaaagcgagtgcctaaatcactgacaaaatccacaggacttgagtcgtacatttgcccgcacagacaatcccgtacaagctgatactcatccagacttagttgccctttacatcttcgctctatcagctgaagaaccttgtacgtacaaccctttggccctcctgaaaacgatgcgaacgcaacaggtacaggtctaatcttcagctccttgacaagctccccaagcaccctgtcggcaagcatagcagccttctcggggaaaaacagggtggggaagtcggagtggcagacgaggcacgcccacccgcgcgccgcgtagagctccacgtacgcccgcacgtggcgctcctggctcgacagccacgcgaacatcaccaccacgccggcggcggccgggtccggacgccgcccgccgccccagtag

SEQ ID NO: 22022 - DNA, 763 bp, Setaria italica
  misc_feature (740)..(763): n is a, c, g, or t
  Peptide Sequence Number=SeqID_87996
agacacttcatcttcctcccctagaactgcaagaaggtagcttggaggatggggcgtgggcggggcgtgagctacggcggcgggcagagctcgctgaactacctgttcggcggcggcgacgaggcccccgcggcgcgcgccaagccggcggccgcggcggatgagcagagggtgacggcgaccgcggcggatgagcagagggtgacggcggcggcggcggcgggccacgacgatgagaagctgaaggggatcccggccggcgtccgtggcagccagaccaacaactacttccgggcgcaggggcagaactgcggcaacttcctcacggaccgcccgtcgaccaaggtgcacgccgcgcccggcggcggctcgtcgctcgactacctcttcggcggcggcgccggcaagtgatgggctgatggcagcttccccggttcaggctacttcagagctgagctcgctcgagaacgccgtctacttcgcacgcttgatttcagtagctcatcgtaacctgcttgttccacggttaatttccaagagaattgacccgcgtgtatctctgtaaccttcttcattgatgtctgtctcgtcagtaccctttctgtgacctgtagctctgcttgtatgagtgtcaaaaactgacccatccttccgtcagcaacaagccttgcctgttcttcggtgggtcatcatttctattattcaagtgttaaattactcatatgatccagcttctagtnnnnnnnnnnnnnnnnnnnnnnnn

SEQ ID NO: 22023 - DNA, 345 bp, Setaria italica
  Peptide Sequence Number=SeqID_87997
gtgtcgctaatattgtagaaaactgtgccaatgcagaagctaacaaaagagagaattgcaaatcgcaaccagtagtagcctatgtctcggtgcatgttcacgctcgatcttttggtaagcacaagcaatttggtaaagaaaccagcttgcctttccttaattaatggcagaacatcattctctgtccccattgcctgcatgctggttgccaaattgttgagagatatgaaagaattaacaagagtttcaattgcttcagctgcacttggagattcgagactggatatttcctcatcaaaatctttgtttataattcgtaggtagtgatcagaaggattcctcctc

SEQ ID NO: 22024 - DNA, 392 bp, Setaria italica
  Peptide Sequence Number=SeqID_87998
acttcctcaatctgaaattattgcttgttttggtttttttatgtacataacttttgctatgcacctagatataaactacatatagatatataataaaaaaatatttatttagaaaagccaaaataacatataatttggaacaagggaatagataatataaccattttgtaatagggttcaagaaggtatatacctcatcaaaatctttgtttataattcgtaggtagtgatcagaaggattcctcctcaagggacatggaaagccattgtcggtgaagaactcagctgcctcaggaattcgtccaaaatacaccatcctcccattcgctagcaggcacagcccattgaagaggtcgaacacctcggcgctcggctggtgaacggcggcgacc

SEQ ID NO: 22025 - DNA, 484 bp, Setaria italica
  Peptide Sequence Number=SeqID_87999
tagtcaatgtcaaaaccatccatctgaatggagtcaccatattcctcaagtttttcaagcaaatagtgaattgtctcatctgctaatttatgaaactcatcctctggcattatcaacttggggtccaccgcagacgggccgggcgcatctccggcggactgtgtcgcggggcgcgtcgtcgagatggtcctcgaagcgaagagaagagccgctggagatcggcccgactgctgcgccgcagcggcggcggccgcgagggagcgagaggtggtagcttcagggagattggcggcccataagagttgtcctgtgcgggagcgggaacggagccgcctcccggcggtgaggaccaggaggagcttgcgggacgccatggccgccgccgccgcctgtgtgtacgtgcctacgcggcagcctacggaagtcggagaggtggcgcaaccctgctccgacggccacggcggtggtggtggcagcacgatgg

SEQ ID NO: 22026 - DNA, 502 bp, Setaria italica
  Peptide Sequence Number=SeqID_88000
taccgcgacagttgaaccggcacgaagaggtcctcgacgccgtgccacaggtgcaccttcacctcgtccccggcgccggcgaacgggttctccatctccagggggctccagccccacttcccgaacccgaccatcatgtcgcggtgcagggagtcgtgctcccccagctgccggacctgctccttgtaggttcggtccaagaacttttgagacagagccatgtcttccttggacaagatgatagggttcttgcccttgacgctggagctgtggaataggttctgggtgttccaccagtgcgtcagccacggcaggtggtgggcgacccagactgcgcgctggtcctgcgggaactgcacgtaccaggcctcctcgaccacgtccgccgggaagccggaccaccagtagttgccgaccggggcgaggatcgctacgccggcgagcctgtgagggatgtatttgaggcagctccacatgatctcgccgcccattggagaagccg

SEQ ID NO: 22027 - DNA, 1356 bp, Setaria italica
  Peptide Sequence Number=SeqID_88001
aacggacttaacttaattattattattatcatttctctctctataaaattggaataggagcaacaatcacaatgacatgtcgctagcatgcattctcactgcactacaccaggatctctagttacatcgaaaaatcaaaacaccatcacaatcaatcactcgtcgtccccgagcagcagcgacttgaggatgacgtcgggcatcccgtcggcgatggggaagaggtgtccggccgtgggcagctcgtggtagcgcacccacggcagcctctggctgatgtagcgcgacagccccacgggcacgatgaggtcctcggcgccgtgccacaggtgcaccttgccctcgccgcccgggaacgggtcctccagctccagcgggctccagctccacttgccgaaccccaccatcatgtcgcggtgcaggctctcgtgctccccctgctgccgcgactggtaggcgtagctcctgtaggcgaacttggggatgacggccatgtcctcctgggacatgatggcggggttgaaggagatgacgctggacgccgggaagagcttctgggtgttccaccagtaggtgagccagggcgcgtggtgcgccacgcccacggcccacttgtcctgcgccacctgcacgttccaggcctcccgggacacgttcgcggggaacccggaccaccagtagttgcccacagggccaaggatggcaactccagcgagcctgtgcgggatgtacttgaggcagctccacatgatctcgccgcccatggagaagccggtgaggtagaacttggggccgagctccatggcgtcggcgagctgctcgatgtccaaggcgatgctcttcacagtcctccccgggtgcgggtcgctctcgccgtacccaggacgatcaaacgagagcaggtagatccccagctcctgcgccagctccggcgagacccggagcacgtcgtatctgcaggaatcgaagccgtgcacgaagatgatcttgtgcttggcctggtccttggggacgccggactcgtggtaggccaggtgcctgccgtcctggagcctcgttctcggcgcggtcaccggaggcccgcccggcgcgccgggtatcttcgacggcggagcctgcagctgccggtacagcagcgccagcaagaacatcaacgcgatgcgcgggagccgcttggcgatgccgccggagtcggaggccttgttgggcgccggcgccttgccgccgttcgccgacggcttcttgcccgaatcagcagccatggccgtcgtcggacgagacggtgtcgcgggaagcagctaggaccggccggccgcgagaatgccctgagcgccgggatactcgcttggtgtgttg

SEQ ID NO: 22028 - DNA, 543 bp, Setaria italica
  Peptide Sequence Number=SeqID_88002
ctccaaagagaagacaaaattgagtggggcgcttaggcgattgcaggaatcacatgaactagctcacaaacaagctatggagattaagaagttgaaggatgctttagagaggtttaactccgcggtgaacctggggacagtttgcaagtcttgctcttgcgggttctgtgcaatgttgatagagttgtctaattgctcgattgaagggccatcgggtgccagatctccaaaatccaaccacatcaatgggaagttacaggaccaagcgctaatagagtggcatcctgatgaagcttcagatggtgacggcaggtaggaagttagatcgtgaaacagcatgtacatttgagtgtgcaattgaccaattgttgtagataattctttgtgttctccattgctgcctgtaaatgcatctgcattttgttaccttagctgttcaatttcacctagtaagcttccaatgggattaagctccactggcaatgaaagttcgatactaaagtaaaaaaaaaaaaaaaaacaaaaaaaaaactaagtagaact

SEQ ID NO: 22029 - DNA, 1958 bp, Setaria italica
  misc_feature (1)..(14): n is a, c, g, or t
  Peptide Sequence Number=SeqID_88003
nnnnnnnnnnnnnnttattttttaactggttaacctgttagctgtactttatttggatcacagtaaagttcgtggacaaatgacggcgagatgtcacgcaggagttgagcattacatgttaggacataacaaccaacgaaaccaaagcttcaacatcgacctggatgcaggcatgcagtatgcagagctctcctactctccggtgttggttcccacttccccggctctgttaggtaccgatcagggttcagggctcgcatgaacagcccccaccactgccggcagacgcggctctgaagctccgctcccactggtccaccggtgctgctgcagcatgaggggtgtggcgagggtgcttctccctcttgtcaccctttatctgcttaagggcgtgcttgagcgccggaaggagcgcttccatgcactccgccacagcattagggttgccaggcatgttgatgataagagtcgatcctctaattccagccatggcccgggatagcattgcaaatggtgtaatcttcaaactctcttgaagcataacaaatatgagacctggtgcttctttctctattatagattttgttgcctctggtgtgacatctctaggtgtgaagccagtaccacctaatgtcagaatgaggttaacacagtcaatgtcactccattgtaccagaatgcccttgatcttgtccacttcatcaggaacaacagcagtagcaaccacggttgctccacccagtttctctgatgaagaattcactacagatacagctctcgggccactcctatcagggccagcaccggatgaaacagtatcgcttacagtcagaattgctactttaacttcagtattctgagaagctgaaagctgaggtacatctgtggaaatactttttgaagatggaccaaaatgagatggaggtggatctgaagcagcgggtggtttatttgaaggatagctgattatgtctgaaataagtatagcttggatagatgttccagctgccaatatctgcccagttgatggtacttccagcagagcatttgcggatttcatactcaggaggcggctactagcctgatggccagtgctctcagcaacataaccaggtctaccagacccatcattaagcatccatctgattactgctcggtgaaactctgtgcgatgtaggtctgctcttaaaggatgtgataagcgcacgtgcactctttgcagatgaggatttgaccaaccagagaggagacgaattgcaggaacaacaaaaaggttgaagcaaaccatgcagctcactgggtttccaggcaaaccaaatgccagaactgttttagatggctttgatgtgtcttgtgtagtgatctcagcaaatgttaatggctttcctggtttcattcggatcttctcaaagtgaattttgcccatctttgccaggcaaggtttgacaagatctctgtcacccatggaaacaccaccagaagtaaggattatatcagcatcagaacgtaaagctgcatccaaatgctctttaagactttcttcagtgtcttctgcgatacccaggtcaaccactttgcatttctgctgaacggcagcagctagaagcatggcgcggttggaatcacgaatctgaccacgactgagggtggcagtggctggctgcactagctcatcccctgtggaaaatacagcaatggttggtcgaaggtataccttgacagtagttacacccactgttgcaagtagcccaatttctgctggaccaatgagctcaccagacttgagcactatcgaatccttctctatgtcacatcccacattgcggatgtcttgcccctcggcagcccgcaccaaaatcttaaccctcttcgacccatctgctccggcggggatctgctcagtgtcctccacctgaacgacagcgtcagcgccatcgggaatcggccctccggtggtg

SEQ ID NO: 22030 - DNA, 430 bp, Setaria italica
  Peptide Sequence Number=SeqID_88004
cactacaagaaccatattccttctcctagttaatagactactttgcccaaagtaagaaattaagaagtcatcttattgattccctgatctgaccagtaacctgtgaccacctaacggcgaaacactgctcagacgatggtgcacgcgttgggattctcctcgctaaagatggtgctgagcctgccgttggcgtcggtggcgatgctgtagatgccctcgcgcaccggcgtcgggtagtaccaccggtactcgccggagaagtactcgggccgccgcggcgtgcccagcatctcccaccgcggcagcggcgacggcgcgtaccggccgtagccgtgcgcgtacgcgtacccgtggtggccgccctgcccgccgtgcatcggcggagcaggggagtgcgacggcggcggctcagccgcaccgtgatggtaga

SEQ ID NO: 22031 - DNA, 1047 bp, Setaria italica
  Peptide Sequence Number=SeqID_88005
tctatctctcacagtcacagtcacacactccgtacagcgatggcgaggctagtcggggtggctgtgcgccctgctcgccgccgccactgtcgccgcggcggcggccgccgagacggaggtccagtcttcctacatcgtgcacgtcgcgggggagcacgcgccccggtcgtcgcacccgcgcttgctcgcccgcgggtacacctccttgctgcgtgacagcctcccggcgagcatctcgcggccggcgccgaggctgctctactcgtacgcgcacgccgccacgggcttcgcggcgcggctcacggagcgccaggctgcgcacctcgcgtcccagccttccgtgctcgccgtcgcggcggacgggatccggcagctgcacaccacgctgacgccctccttcctccgcctctcgacctcttcggggctgctcccggcgtccaacggcgccacggacgtcgtgataggcgtcctcgacaccggcatctaccccgaggaccgcgcctccttcgccgctgacccgtcgatgccgccgcctcccaggaggttccgcggcagctgcgtctcgacgccgtcattcaacgcctcggcctactgcaacaacaagctcgtcggcgccaagttcttccacgaagggtacgaggctgcatacggcaaccggcttgacgagacagaggaccccaggtcgccgctcgacagcaacggtcacgggacgcacaccgcctccaccgccgccggctcggcagtggcgggcgccgccttctacaactacgccaaaggcaaagcagtcggcatggccccgggcgcgcgcattgccgcctacaaggtctgctggacaaatggatgcgcggactctgacatcctaaaggcgtttgacgaggccatcaaggacggggtcgacgtcatctccctctccctcggtgccgtgggtgagccgccaaactttcatgaagatcagatagccataggcgcgttcaacgccgtccgcaagggcatcgttgtctctgcctccgcggggaactcgggccccggcgagtacactgagacacg

SEQ ID NO: 22032 - DNA, 976 bp, Setaria italica
  misc_feature (1)..(4): n is a, c, g, or t
  misc_feature (965)..(965): n is a, c, g, or t
  Peptide Sequence Number=SeqID_88006
nnnnttttttttttttttttttttacctccccacatataatttagctaggcccaacagccaacgattatacatagagtgtactatattttttttcagaaacacagttactaccaacgggacaaattggtagcactgcagagtactccacgcacatcaactctagacaggcgtcgcaggcatacatgacgacataaattagcttcacaagtactgtacacagcgcttaccacaacgcatgcacgtacatgaatacgcccatcactgaaacgcgtagctgttctccagggctcggaacacggtgggctcctcctccatcaccttggccagctccggcgccacgtgcacgtacaccacccagtcgccgtcgccgcgcgcactcggcatcggcatcacgtacccagcgccggcgggccacgggaagtggtacgacgcgaacgccgggagccccgtcccgaagtccgccttccccacggggaagctcatcccggacgacacgatgcacgccatcgcctcgctcccgccggtgcctcccaggtacgccctcgccgccgccggcttgggccgcagcgcctccacccagtccacgaggccgcggaagtgatcgccggtggcggcctccaccaaccaccggtgcacgtcgtccgccacgtcggcgagggccatgcggcggagctcttcggagccgatgacgccgtaggggatggtgagcacgttgccgaagtaggccttcatcgcgccgtcggggaacatgcgggtgcggccgtccacgacgacgcccatgcagcactggctctggcgtggggacgccgccctggagcagagccgccacaggtgcgccgcgaacgcctccattttcgtgcgcccggggcccgccgcggccttcagcacggcgacgtctgcggcggctatgcggtagatccggttgacggagctcgcggcgacaggcggcgggggaggcgcggcnctccgagggga

SEQ ID NO: 22033 - DNA, 581 bp, Setaria italica
  Peptide Sequence Number=SeqID_88007
tgtataactatgaatgacttttacctttgttcactgaaatttgtaagaggtattgatgtgtgggtttacatactgctagtcttgttgcattaggagggtggtctactcaaactcaataggtatggtactcaatctatgaaacttgagctaatcttaccattacatatgatgatatgcgtaataaaatgatgtaagttaataaggttatgggcagctttctagagatcgatttgcgaaagggtgtgcttagtgcgggtagttaaagaggcccttttttaacagaagaaactagacgtggtttagttggccttgattatctaacagtcatcttccttcaagaaaagaagtgtggcttgtcactttcaggtggtgacatcttgtattgttggtttgttgatgtgctacctgatgaagaactgtagccgcaattaactacccataaagtttgtgcgaatgtcttatacagttattttggtgactcatagttggacatattccccacatgcccatcaggaccgcatttttctagactttcagtatgacaatttcaaagtcttcttctgagcaaactttttcctctg

SEQ ID NO: 22034 - DNA, 280 bp, Setaria italica
  Peptide Sequence Number=SeqID_88008
ccttttgatttaggcacatagaatttcacacccagtgcaccattcattgcatcaagaattgaagggttgagtgagttgatgatatttgcaatcccatctgtcacaatccatgcatacatttcacttatcattcctaacttcttggcctttgtgaagagagtagaggcaatagaggatgacatgtgcacaatgtagacccttgtttgcattgtcattagcttgtagagttcttgttcaagttggtcactgcttgctgatacagggattgcactacgataag

SEQ ID NO: 22035 - DNA, 359 bp, Setaria italica
  Peptide Sequence Number=SeqID_88009
gtttgatgctgaaaccgatgatgtggaatcaaccccgctggttaataagagtgatccgaccactgattcatgatgtgtcaaatatcatgatcggcatatgattccactgctcgtaccctttgcgatccgtcagttgaagatgggaagacaatccatcgaacaaaggaattggagatttgatactgaaaggtgggacatgcaagtttcactacaaaggtggcagcaggcatgagcaacttagcaagagtcacagagctcaagcatagcttgttatacacagtttaggcacttcaattactccttgtaagttgtaaccatacacatttactgaacgaagtccttcctgttatagaaatcca

SEQ ID NO: 22036 - DNA, 661 bp, Setaria italica
  Peptide Sequence Number=SeqID_88010
ttttacgcactactcatgtccctacaaaagtgccgggttgctgatgtctgcttggtggggtggcctgctactgcacaagctgaatgtgactcgaatggagttcagtaacctctggatcgccgtcttgattagaaacatttcaaggacttagaacaacacactactgtttcttgttcctcaaagtgatcagaactcaacgctcctgcctgcagagatgcttcaagatggtgaatctacagaagctgtgaaggcaggatcggttgaattctctgtccttgttcaagatgattctggctgtatttctcccaatgtggcggctgaggatgaacggaccaaaatgtttgatgctgaaaccgatgatgtggaatcaaccccgctggttaataagagtgatccgaccactgattcatgaatgtgtcaaatatcatgatcggcatatgattccactgactacgtaaccctttagacgaataccgtacaagttagaaagaatagggaaagacaatccaatcgaacaaaggaattggagatttgatactgaaaaggtgggacatgcaagtttcactacaaaggtggcagcaggcatgagcaacttagcaaagagtcgacggagctcaaagcatagcttgtatacacagtttaggcacttcaattactcctt

SEQ ID NO: 22037 - DNA, 401 bp, Setaria italica
  Peptide Sequence Number=SeqID_88011
ttccctttgtctttctcttattttccttatcggtgacttgtgctggttcttttggacttagattagtgggttaccaaggtccctaaaaaactaatatgcattatcacttaagtttttctcaattaatctgtttaagatgtcttagcatataaccgtcatgagatgataaggcatcatagttgagttaatgtttttgtgatcttaatctcacaaaggaattggagatttgatactgaaaggtgggacatgcaagtttcactacaaaggtggcagcaggcatgagcaacttagcaagagtcgacggagctcaagcatagcttgttatacacaatttaggcacttcaattactccttgtaagttgtaaccatacacatttaacttgaacttaagaaaacgtaaa

SEQ ID NO: 22038 - DNA, 333 bp, Setaria italica
  Peptide Sequence Number=SeqID_88012
acagtttttcaattttcattgcagattactagttataggaagcattgccttgttgctggtatctgctaaagtactctattaaataaatatcgctagattcctcgataaagcttgcattaaccatggcaaagaaggagcctggtcactttgcagtgtgacaaaggtggaggagacaaagattgtgttccgtatgcttcctctgtttgtcagctccatgattggatacgtatcgaaccctatcatcttaacattcaccgttcagcaaggtggcatgacaaacacacggctcggcaagatccatatctcccccgcgacactctttattcattccta

SEQ ID NO: 22039 - DNA, 923 bp, Setaria italica
  Peptide Sequence Number=SeqID_88013
ggcattatcctgctaccacacggccaacaactactagccatgacttctgggatcagcaacttgatgaaccttcctagactcggcacttgagaactgaccaacaactcgtgcatgaggaatgttgggatcaccagaagcaagtgcgaccacattgtcaagaaaatactgttttggaagtctcccaacaacattgccttcctcatttccttccttatctagaaaggcaaaatgaggaatgccttctactccaaactcatcaagctcttgttcccactttgtattgtcgacattcaacatgacaaaattgacacggtccttgtattgttgctcaacttggtagatatctggagctaactctcggcaaacttcacaccagtccgcataaaattcaacaacagtgggcttgccatttgaaagagcctcttcatatggcacagcattggctgcaagatctttaagagatgcctcactaagattgagcctctgcgatgcaaagagagccactgccccaagagtggacagtaatgcaacccttctgttgagatccttgtttgggagagctggaagtccagcatcctgggttgtgctggttgtctgagcctcttcttcagtcgactcagctttcacagtatgctcatccgtctgtggctccgcggagtccggcggcgcgacgcaagcgagggtcctcgggtggcgccggccccaccgcgaacggaggcggagggaagaggacgggcgcgggcagcatcgggctccggcgaggctcggccggaggagaaggccggggcacctcgaggaggccacactcgccatttcttctcagtggtagtattttgcagctcaggctcggcgggatggagaaggcagccgaggaagaccacgactccacgagccgccggagtcaaacacggaggcggagccac

SEQ ID NO: 22040 - DNA, 754 bp, Setaria italica
  Peptide Sequence Number=SeqID_88014
actttggcggtcatatttttagaccgaatatggtcgatcgggatagatatcaaggctgaaagcagcacaataagcatgtgttacacgaacaacgagtaggagtgagctgctttcatgggccagtagcccctacaccctgctggaaaacattgataatgtagtggtacatgcacattcggggttgtactgacgtactatgtcagtacctctgcatttttttcagtacaagatgcaaccgtttccctatcactgacaaatcaacgctgaagacgggtccccagaatcaacacaggcacatcacatcctcatgacctggcatagacgattgctgtagcactttcttctggcatttactgtgtttccagctcccgcaagcttgataccaagagacagtgattgtgttaatagcatagtcttagggtcgcctcttgtcaaatggtcttggcattatcctgctaccacacggccaacaactactagccatgacttctgggatcagcaacttgatgaaccttcctagactcggcacttgagaactgaccaacaactcgtgcatgaggaatgttgggatcaccagaagcaagtgcgaccacattgtcaagaaaatactgttttggaagtctcccaacaacattgccttcctcatttcccaatttacctaagaaaaggacaaaaatagaaggaaatagaccttactaactaccaaaactacaatactaaagtacttactttagtttaccctaacttttagtta

SEQ ID NO: 22041 - DNA, 1438 bp, Setaria italica
  Peptide Sequence Number=SeqID_88015
ttcgttcttagtcgcactcgcgcagcagcacaacatcacaattcacacagagcagcactcaagccgagcatcagggcatggcggaccagctcatctccacggccgtgcacgaggagctgccggagaactacgtccggccggaggcgcagcgcccgcgcctccacgaggtggtctccgacgcgcagatccccgtcgtggacctcgccgaccccgaccccgccgcggtcgtcgccagcatcggcgaggcctgcaccacccacggcttctttcaggtgctcaaccatggggtgcccgtggagctgatggtcgcgatgctggcggtggcgtacgagttcttccggctgccggcggaggagaaggccaagctctactccgacgacccgggcaagaagatgcgcctgtccaccagcttcaacgtgcgcaaggagaccgtccacaactggcgcgactacctccgcctccactgctacccgctggagcagtacgtccccgactggccggccaatcccccatcattcagggagatcgtgagcgcctactgcagagaggtccgggcgctggggttccggctgtacgaggcgatctcggcgagcctggggctggaggatgactacgtgaagaggacgctgggcgagcaggagcagcacatggcggtgaacttctacccgaggtgcccggcgccggagctcacctacgggctccccgcgcacaccgaccccaacgccctcaccatcctgctcatggaccagcaggtggccggcctgcaggtgctcaacgacggccgctggatcgccgtcaacccacggcccaacgcgctcgtcatcaacatcggggaccagctgcaggcgctgagcaacggacggtacaagagcgtgtggcaccgcgcggtggtgaactccgacaggccgaggatgtcggtggcgtcgttcctgtgcccctgcaacgacgtgcgcatcggccccgccgcgaagctcgtcggcgagggagcgccggccgtctacagggactacacctacgccgagtactacggcaagttctggagcaggaacctggaccaggagcactgcctcgagctcttcagaacctagctatctagcaccggggtccacatcgatcgatatatacttggatcggaaaggactacatactactcctaggacagtggttagcgttcgacgtttctgtgtcgccttttagccattttgtgttcgcctagctagctagaacactgtggagtcgaatgtcagggttcggcttaccaggctcgcacggctttcttgagaaaatagctctggctcgtatggaaaattagtttttcttagctagcttgttctgtagaaaaaatatttggcaaaacggtttcttctacctttttagaatgtgtagaagatgttaattgcccattgtgcccttgcatatctatatgagttttatatat

SEQ ID NO: 22042 - DNA, 1213 bp, Setaria italica
  Peptide Sequence Number=SeqID_88016
gccacggcggcggaggcgtccgcccgccacgccccgagggctccctgcgccggtgccgccatctccaaggatgttgctaaggctgaagcttcatctttgaaaaactcaaggtggtacatgaccaggtcaaacacttcaggtcctttgactactcattctgagtgccgcaaagcatttccttctttcatgaggccatctgcatcttactccacaaaagcttcagaccaaaatccaaaacaggagggaaaagacttgtcaactacagaacatccctttgatgatattacctacaacatacccgagaagccagtgacatttactgaaggtgcttcttacagtcttgtaatactggctggacttggaattgcagcgctggctggatatgctgtgttcaaagagcttatatttgaaccaaaagagtacaagatatttgggaaagctctagcaaggattcagagtgatagccaggtcacggcaagaattggccaccctattactggatatggtcaggaaactaggaaccgtgcagctcggcaacgaattccaaataagatttggacagatgaggatggtgttgaacatgtggaggtgaactttctcatccgtgggccacatggagctggaaaggtctattcagagatgttcaaagataactctgaccggacatggaagttcacgtaccttgttgttgaaatcgtgtctccacaacatggaaaaacacaactgatgttagaatcttacttaccagcgtaaggatgcaagtaacaaaagcagttagcagtggcatgatgttgtaagaggttggcacaactgggaagatccaaaataagttttggctaaactgggaatgttatgaacaagtccgggcagatcggtaaacttaggaacaagctttcagaatgtactggcatcaaacctgtattgtggagtaataaccggttcttgcattactagaaggaaaattggtttcagaattcagacaattgatatctcaaaatgttttgatgttcctttgaaaaattttgtgtacccaaattaattggggaaagacctgcatacctggacgttgagggtattttttatgtgttgatctcatgagtagtttatatcgtccaaacgatgtggcctaactctacaagtcatctatgtaaaatcataacaacttttgttaactgtgactatgtgttggaattattttgttttcaaaaaaaaa

SEQ ID NO: 22043 - DNA, 274 bp, Setaria italica
  Peptide Sequence Number=SeqID_88017
tgacgcgtctcgccgggggcgattgcttttgaaatgacgctactactagcgtatcatctggcaatcatccaaagggcgtgtgcgccgtgcaagcgcgcgtatgcgctctttaacattttctttagatcagatgaggcctgcagagcatcggcaggaaaccttgaccatgtgaggactcttcccctatccttgttacttaaagtgaaagagtttttacaattttacgtacaacatgtgaaaagagttaaatttcatgttgaatttgaaatttgtt

SEQ ID NO: 22044 - DNA, 265 bp, Setaria italica
  Peptide Sequence Number=SeqID_88018
cgaaactgacctcgttaggcagggaaaacctcgtcagtgtgcggcgccgaagacgtccccgccgccgactccttccgccgcggtttctcgcccccgcggccgccctgtcctctcccggcggctccgcctgacctccgcgccgacggctttgccgaacccgccgcaaccccttgctcgcaccgccgcccattcgcccccgcccgaattctttactcccaacgcagcccaaccacgccacccgcgaggtcgacgaccccgtccaagc

SEQ ID NO: 22045 - DNA, 291 bp, Setaria italica
  Peptide Sequence Number=SeqID_88019
gggggaggacgaggccggctcggggtcgggggagtccgacgccccggcggcggcggtggcgaggggcgaagaggatggcgcagggtggtggtggttgtggttgtcatcgggggagtcgggcgcccgcggattgggcttgcggccgcgcttgcgcttgccgccggaggcgtggccgtggccgaccatggaggcgagctagggtttcgcctcgccggcggcgggcggaggtgctagaagcctagaaggaccgagacggggaactagctgggtcgggcggttcgtgtgcgttgt

SEQ ID NO: 22046 - DNA, 729 bp, Setaria italica
  Peptide Sequence Number=SeqID_88020
caattcttgcaattcttgcaattgttctgtaattgtttgcctattcttgtgttatgcactagataaaatgtgataaggcacaatggtcagaacaaaatacatatttattatgtgatttgtgtgttgagcaaattagagtaggaaattatcacaaatgtaccatgtcaggacgagggtacaaggtaattgctgaaaagtatttcattaaaactagactgaagcatgacaggaggtagctaaggaacaggattcaccaactgaagactctttacaccttctggggggtcctgcaaaaacaaagtggcttgggctgacacctcaatgttactgtttatgcacctaattggtggtgggagcaaaacacaatggtacatattctttgttttgcatccagtcattttgttgccaactcagttgtctaatctcaacattcacgttctttgcagggcaaattagaatgtaagaaactaaaagatggtcctccagagtatcttgatcagcttgaggaaatgttccatgatgttgttgtggatgggtccacctcctacatggctggacaagaagaggaggaggaaggagctgaagaaggagataaagaagatgctgaacaagatgggaaccctgatgatttggatcataacccaatgagcactagtagcaggaagaggtcaagtagtactagcaccaggtccactgcaacaagtcctggtgttggtcggcgatggggca

SEQ ID NO: 22047 - DNA, 218 bp, Setaria italica
  Peptide Sequence Number=SeqID_88021
agcctgagttggcccgtgcttctaagatcaagtgcagtgtttgtggcttgaaaggtgcagcacttggttgccttgttaagagctgccgcaagagctttcatgtcccatgtgcccacaagatcaaaggctgcagatgggatgaagaaaactttgttatgctgtgtcctactcattcatacaaaaagttgccttgtgagagatcaaagtacaaaaagagg

SEQ ID NO: 22048 - DNA, 419 bp, Setaria italica
  misc_feature (358)..(358): n is a, c, g, or t
  Peptide Sequence Number=SeqID_88022
ttggcaagggtcattctccaacctcatgttttcagcttcaatatatgcctggatgtcggcgagcggcatggggcggcctgcgaccccggcgtcttcaacttcgtccccggggccggcgagcaggcggcaccgcggcgcgtcgcagcgcgggttgaatcggaggtggagcgcgacggggcggcgcgtcttggtgcctcccccgacgtggttgaactggaaccccatgagcgcctctaccagcgcgctcttgccgtccgtctggtggccgaccaccacgacggccggcgcccccgccgcgccgcccagctcggccgccagcgcctgcagctcgttgtacgcctcgtagaggagctcccgngcctcctcctcctcctcctcctccgcgcccgccttcgagtccggcgggagcggcggcgtcg

SEQ ID NO: 22049 - DNA, 894 bp, Setaria italica
  Peptide Sequence Number=SeqID_88023
cggcgtcggcgtcgtccgtggccagcatcctctccgcgatctccgcgggcgccgcgtccacctcccgcagcagcgcctcgacctccgggaacagggggtggccgtcgtcgacgacgccgtggtacgtggccgcgagctccttgaaggcgccgaagccgcagtagcccatgtggatgtgcttgtccatccggcccggccggagcagcgcggggtcgagccggtccatgtggttggtggtgaagatgaggatgcgctcgtgcccgctgcaagaccagagaccgtccaccatgttgagcagcccggacagggtgaccttgtgatgcttggaagatgggatgttcccatcgaagcctccgtcagcttccctcctcctcggcgccgccgccaacgcgcagtcgacatcctcgaccagcagtatggacctgttcttcatccggatcagcagcttcctgagctcggtgttggaccggacggcgccgaggtcgaggtcgtacacgtcgaagtggagatggttggagatcgcggcgacgaggctggacttgccggtgccgggtggcccgtggatgaggtagcccctcttccacgcccgccccgtgcgcccgtagtactccctccggcccaggaacatgtccaggtcgcccaccacgtcctgccgcagcgcggcgtccatggccagcgtcgcgaacgtggaggcgttgcggagcctcacgggccgccacttgccccactcgttgctgtagagcttggcctgcctctgctcccgcgccatggcctcgacgcgggccatgacgaacggcaggtaggcgccgagcaccaggtccttgtgccgcccgtcgaagctgagcctgaacgcctcgcccgcgccgccgccgtccgcccgtcgccgcccggtgc

SEQ ID NO: 22050 - DNA, 607 bp, Setaria italica
  Peptide Sequence Number=SeqID_88024
ctactgcgcgcacgacgccaacaacatcatcttcactgtcaaggccgacaacgccatcggcgccacgctcatcggccgcgcctacctgcccaccagggacgtcgtcgccggccagaaggtggagcggtggctcgacatctgcgacgagaagcgccagcccctggaaggcggggacaagatccacgtccagctccagttcacggacgtcgccgcggaccccgagggcggctggggcgccggcgtcggcggcgcagggccgtacgggggcgtcccgcgcaccttcttcgagcagcgccgcggctgccgggtccgcctgtacgaggacgcgcacgtcttcgacggcttcgcgccgcacgtccagctcgacggcggcaggccgtacgagccccgccggtgctgggaggacgtcttcgaggcgatcaataacgcccggcggatggtgtacatcgccgggtggtccgtgaacaccggcgtccagctagtgcgtgacccgcggcggccgtcgtcggagacgctcgggcagctggctcatccggaaggccgacgagggcgtcacggtgctgatgctggtgtgggacgaccgcacgtcggggggctcggcccgatc

SEQ ID NO: 22051 - DNA, 716 bp, Setaria italica
  Peptide Sequence Number=SeqID_88025
ggcggcgaagtgctcgaacaggcccatgtcacggccgtcgtgcatgaggtgcgcgggcatggtgatccgcttgcgcatcatgtccgcgatggcgagcacggcgccgtccgggtcgagctgcaggagctgctccacgatgcgcccgtacgccgtctcgtggcgcttctcgtcggcggcgatggtgccgcaggtgcgcgccaggacgtcgtcgccgtgcgccttggcgagccgcgcggtgttgccgtgcgagacggccgtcgcgcgctcctggaagctcgtgtacacgaagcccaggtacgggttgttctccgttcccgggtccatgccggagccgatgaggtactgtacggtcttctcgaccatgcgcatgtcgacgcggccggagaggtacatgtacttgccgaggatgtcgccgtggcggttctcctcggcggtccaggtgcgcgtccagacggcccaggggcatgcgctggcgccggtctcgtcgcggacgccgtcgagcgtgttgatcatggtctggtacgtgggcagcgcctcctccgtgatcatgtcgcccaccagcacgacgaagtactcgtcgggcagccccgcggcgcgcgcgcggagctcccggacctcgtgctcgaacatctccgacgacgagtccggcaggaagtccgtcggctgccagcactcctccacgggcttgagcagcggcagcagcgaccgcgccgccc

SEQ ID NO: 22052 - DNA, 1170 bp, Setaria italica
  Peptide Sequence Number=SeqID_88026
gaaatgaagcattgcactttcattattacatggcaccgatgaatcagaacacatttgtaaagcatgtgtgcagcaagagctaaccaaaaatgaaaaaccggcatcactgtaaactacaacagccgatccactccagactccagagcacccaaactgctcggtacattgccatgttgtcagatactgtgccgaagtctgaatgccgagacagttttatctttcacttcacgtttggaattaacaagaaaagaagtggcattacactcgtatcagctatcaagatctgactgaacttctaaaaccagccttaagattgcctgggcattgctgacataaacaaaaggcactgttccttccttcttcaacctgaacttaggcagcaacagcaacggtctctggcttatctattccttcaatgttggttattctaagttttgtcaattcctgacggtggccctttgttcggcggtaattttttcgccgtttcttcttgaatacgatcacttttgcgtctagggcatgctcttcaacaacagcgtgaacagtagcttcagaaagaattggcctcccaataactgtttgagtttgtgaaccaagcatgagaactcggtttaaaaccagcttgtcatttacatcacagaacttcaacctctccgtaaagatggagtcaccattgctcaccttgaattgatgagagccaatctgtacgacggcgaagacgggctcgtagggcttgaagggtttctcgtcgggcccgagagggcccaccaccttgtacccgatctccgccgcctccgctaccatctcctcctctgtcttcccgctcggtttcttcgccgccaccgcctcatcctcctccccccactccccctcgctcccgtcgtcgtcgtagtgcccttcttcgtcttcgtcttcgtcttcgtcgtcgtcctcgtcgccggaggagcgggtcgcgaagtggcagcgcgaggggtagtagagccggggggaggcgagggcgcgtggagctgggtttccgaggggctccgacaaagaggctagggtccgggtcgcgatcgagaccggtgtgagggtttgagatctctgagggacgaggcgggtcgagaggaggcggagaaggtagcgccgcgacgccatggctgcggcgacgacggcggcggcgggtggagg

SEQ ID NO: 22053 - DNA, 288 bp, Setaria italica
  Peptide Sequence Number=SeqID_88027
ggacaactgcctcatgaccttccgcgcgctggagagcgaccggcggtgcgggccgcctaatgtggactcgtacaatatcctcatcagcctcttcggtcgttccctcctcgttgaccacatggaggccacgcttggttcgctagatgcttctgggcatccccgcacgattggtacgtataatgcaatcatcgctggatacgtcactgcgtggatgtcggacaaaatggaagcagtgttccaggaaatgttgtcgggtcatgttgctccagatgctactacacatctctt

SEQ ID NO: 22054 - DNA, 858 bp, Setaria italica
  Peptide Sequence Number=SeqID_88028
tcaacaggaggctgcgcgagcgcgatgcctgcgagccccggaagaacgacttcctcgacctgctgctcgacgccaccggaggaggcttgaccacggcggggcttgatcgtgacacgctccggtcattcttcacggatttgtttgctgcaggaagtgatacaagctccagcacagtggaatgggccatggtggagttgctcagaaacccagtttcaatggctaaactaagcaacgagctcgtagaggtaattggttcaagaagaaaaattgaagaatctgacataggccagctgccctatcttcaagctgtgattaaagaaactttccggctgcatcctcctgttccattgttgctaccacgccaagcagaggctgcaacagaaataatgggctatatgattcctaaaggcgctcgtgttcttataaatgtttgggcaatgggtagagataatgacatttggcctgagccggagaagtttatgcccgagagatttttggaaagtatgattgattttagaggtggagactttgaactcataccatttggtgcaggacgtcggatctgtcctgggatggcgttagctactaggatggtgcatctggttcttgcatcactattaaatcaattcaaatggaggctcccggctgaggttgaaagaaatggtgttgaaatggctgaaaagtttggcgtgacgcttaaaaaggccagccctctttgcgcaattgctacaccaatctgaccaagcagaccagtttaatcagaacaccatttttacaggttcaattgatgaatagcctttcatgcgtgggattcaaataattgatactgtacaatactgtcatttagcaagaatgtta

SEQ ID NO: 22055 - DNA, 1164 bp, Setaria italica
  Peptide Sequence Number=SeqID_88029
ttagttaccttaggttaggtttaggttaactgcctggtggtggactccaacctgcgagggatccagctggtggcggaggagctcggcgtgccgacgctcgtgctccgcaccggcggcgccgcctgcctcgtcgcctacatggcgttcccggcgctctgcgacaagggcctcctcccgccggcatctcaagataaggttcagttggacatgccattggatgagcttacaccactacggctgagagatatggtgttctcgcgcactactacgcatgctaatatgagaagatgcctacaagatttattggatgcaggaagtagttcttccggtatcatcctaaacaccttccaagaccttgagaattcagatgtccaaaagatctccaatggcctcggcgttccgttgtacacgatagggccacttcacaagatttcttcaggcactgagggaagcttgctagcacaagaccagacttgtttaaagtggttggacaagcaagaggctgattctgttctctatgtgagctttgggagcttggcatctatggatgaaaaggaaatgttggagacagcatggggcttggccaacagccagatgccatttctgtgggtgatccgtcataacatggtcaagtcctcacaccagatgagcattcctgaaggctttgaggaggcgacacgtggaaggggaatggtcgtgacctgggctccacagcaagaagttttagggcaccacgcaattggtggcttttggactcacaatggatggaactcgactctggagagcatttgtgagggtgttccaatgatatgtaggccccaatttgccgaccagatgataaatatgaggtacgttcaagaagtgtggaagatagggtttgagatagaaggggagttggagaggggggagatcgagatggctattaaaaagttactatgcacagaagaaggtagacagatgagactgagggctaaggatcttcaggacaaagctgttaagtgtatcgaggaagaaggctcttccaaatctgcaatggagtcgctgctgaagcgcataatgtcattttagatattttccgtgcataagaagaaagtattgctgttagatgtgataagtgcttcccataaattgagaaggcagttaataaagccgtgtattgacatt

SEQ ID NO: 22056 - DNA, 554 bp, Setaria italica
  Peptide Sequence Number=SeqID_88030
aggacgtaaggacgttacgtacaaggtagttgtgccaggtcacaagtttcatcatgtgtcactgagagactctttgggcttcctgagcaataagtccacaaggaagagtgatagttgtaccacatttcaagaatagaattggcaagttctacatgcacattatcaacagtagcccacgcatcacaaatccaccaaatgatctgatgctgagtatactccagaggagaccttgaagatgaccccagcgagtaattcttagcataagtgagcaggtacccagaattcacaatgatctcgtgagcttcagaaggatctttttgtgcacacttggatagccgtttaagtaatagagtatccaagtttatgctcttcaaattgagcaaagaaagactcgctaaccagccgttgaaccataaatattacatagaatatcagaggacactgagcaacagaagtttacttcaggcactgaagttttggacaataacttgctcctctcaaaatcaactgtcccacgaagcctctggtgaacatcatccaatcggccaacaata

SEQ ID NO: 22057 - DNA, 480 bp, Setaria italica
  Peptide Sequence Number=SeqID_88031
aaaccccagtataagtggggggttctccaccaaactttgcggcctcagggaaagagtgctgctcatctcaatagtatttctgagtacccattccgcaacaccatcacatgtgtccttccttctccataattggatgatcgagtacgatagaacaaggaagccaagtccgccaccatctgctggcatgatcgagacttggataaagttatcagggtcaagtgcatctgatgggacttctatgacagcaagtctctgcaaatgcatgtcaaactcaaggatggctaggctttgcccagtaagcaaccagcaaatggaattaccaacacgggtactggaatgattggcagaaacagcccggaaatgcccccgcaatatggaggtgcaattgccccatgcgccggtctccgatgagtagacgcacgcgaaaatacgtcgggccgtacggcctagcaagaccacctggaaggggccggagcagca

SEQ ID NO: 22058 - DNA, 406 bp, Setaria italica
  misc_feature (1)..(57): n is a, c, g, or t
  Peptide Sequence Number=SeqID_88032
nnnnnnnnnnnnnnnnnnnnnnnnnnnnnnnnnnnnnnnnnnnnnnnnnnnnnnnnngtgctgggaaattggatttttattatagcatatggtatttttggcagaatatcatgtacataaacatgtactccaaataaaagggcacacaccaaaaagccactagatcgattcaaggaacacgccaaagcttttgatggatgggtagagacgacactacagagaccacaggacagaatcctccaatttgtttcaaccctccacgagccacctatcttgaccagcagcccgccacaccttccgagctccgttcataagattccaccacaaaaataactgcattattagccaaacaaagataaaccctagctcctacccatacccatcacatccaccaccacacacggta

SEQ ID NO: 22059 - DNA, 546 bp, Setaria italica
  Peptide Sequence Number=SeqID_88033
aacaggatatgaaactaatttccatgttccaaacgggcatctggtattttatacagtggcatggtgttatagtgggttaggatttttttgataactgatgtgatcttgggtgtttggaaatacaatatatgaattagtgtatgttaagattaatgatgtactttgaatatttttatgcctcattatgtgccatggtttcattgtaggattccatctctgaatcagaaattcaggatatttatattacccgttgctcctggctcatcattagattttctatgattagctgtcttgttgatattttatttcatttacctcctactgtgagtattcattgatttcattgacctttcatgttgatgtggccccattgacttaggccttgatgctgcaagctctatcacagatctagctagtcgatggctgttttttgtattattgtagagccaaccttagtatatttcaaatacactggatgtagttcttatatcaaatgttttagcaaatgaaggaaaaacttcaagtagcaattgctcatttttgcta

SEQ ID NO: 22060 - DNA, 383 bp, Setaria italica
  Peptide Sequence Number=SeqID_88034
tactaccgaactacaagtgtagaagtaagtctctgcggcccacctggtgctgctgacgcggcgcctctgatccctctgaagggccctggctgggaggttgtcgtgccaacaaagagcggcggcggcatgctctcctcgctcaccagctgagcagttacctacgcctgcactgtgattttgttgttggcctcacgcctctgttatctgtccgacgatggggtgttgtagcctgtaggccacgctgatcagaccatgttttgggtgtagtatggctgttggaactgggtgttgcgcctgcagcagtacgtagattaggccatgtaaatagtcggagtaagctgccttctgactttactgtgtgctgttctgttgctgcatttcgt

SEQ ID NO: 22061 - DNA, 1083 bp, Setaria italica
  Peptide Sequence Number=SeqID_88035
ttttttttttttttttccaaaagttaataccgtagatgcgtcaattttgcaagccaacgtgccattttacatccatcactcatcgcaagaataatactgtcttaagccttcttatcacgctactgagtacagtgggcaaagcctacatctagacaggttaatggccaccggagatctatccaccaaatcatcagctactaactatgccttggcccttggcatgggattacagaattcctggcaacaggaaaccagtaaaaaaatgcatgctcaatgcatgggcatgtggtgtacaccagggctttaatttagactaaattacttgcatctttgggcaagattaatcttcagcaacttctgctgctgctgcagatattagtgatgccgactggatcttcccggcatgctccagcctcatcagaattactccccttgcgtaacgagactggatggatatatctttaaccttgattctatttacagtgccgctctggctaactaaaacaacctgctcgtcactttcaccatcatcaccgagtgaaagaccagcaacaaatacagcagccaggcggcaatcctctggaagcttgtagcctgccaaacctacaaggttgaatcttgattgccggaatgcatttaagggcacccgtttcccaagaccgttttcagctatgaaaagtagccaaggaggactcagatctctggacctgctgttataagtttcaggcattttgtgcactgttgctggaattatatccatggctgccatcttatcgccatcttttagcttcatcgcacaagcacccctggtattccttcccaggggacgaatcttatcgcatgagttgactataacctttcccttttgtgaagccaatgcaaccaggtcatcattgccacatctacggacccatttgagctcatcaccaggaaccagttgaattgatatgatcccagaagatctgatcgatgagaaggcattaagaggaactgtcttgatgtagccgttaacggtgagcatcactagatattggtcttcaccaaattcactcacaggaatgatggaggttatccgctctccag

SEQ ID NO: 22062 - DNA, 402 bp, Setaria italica
  Peptide Sequence Number=SeqID_88036
cgccatctcctacgcctgctcccacgccacctccaaggacggcaccgacaccggctcctagatccgcacctgcccagcacctagggctccacaggcgccatctccaacgcctgctcccacgccagctccaaggacggcaccgacaccggcaccgacacctgctcctagatccgcacctacccccgcacctagggctccacagggtgccatctcctacgcctgctccgacgccagctccaaggacggcaccgacaccagcaccgacacctgctcctagatccgcacctaccccgcacctagggctccacaggcgccatctcctacgcctgctcccacgccagctccaaggacggcaccgacacctgcaccgacacctactcctagatccgcaccctacccccc

SEQ ID NO: 22063 - DNA, 372 bp, Setaria italica
  Peptide Sequence Number=SeqID_88037
ccagcgccaagggcggctccaaggacggcaccgacacctgctcctagatccgcacctaccccagcacctagggctccacaggcgccatctccaactcctgctccgacacctgtgccaatgctcgcacccacgccagtcccagcacccactccaacgcccgcacgcacgccggctccgactcctgcaccgacacctactccgacttcggcacctacacctgctccgacgccagtcccgacaccttctccgacacctgcacccacgtctactccgacaccggtcccgacgcctgcaccaacacctatcccaaagcctgctcccatgcccaccctaactcccccaccagcgactcccccgccaccaccaccaccg

SEQ ID NO: 22064 - DNA, 337 bp, Setaria italica
  Peptide Sequence Number=SeqID_88038
tagttggcctccacatctatgatgccaaacagcaagtagtagtaccatttaatcatcaaatgttgccttctgtatatcagtgtcccaccataaacaagtgcaaggaggatgtaattcagcagtgactgtgacgtaggtgcattgacacctcggcgggcgagctcggaggaggaaaaacccgtggaggtgatgagcagggagacgaattggcctagcgcgagccccacgaacacctcccgccgcagccacctcggcggcggcgccattgcttgcttctctcctctctggtctctgctgttggcccccttgctagacgccaacgtcgccgtccgaagtg

SEQ ID NO: 22065 - DNA, 386 bp, Setaria italica
  Peptide Sequence Number=SeqID_88039
cacggtgccagggctccggggtccgtcaggcgtacttctgtcgacacctgcatctcagttccggcagtcagaaattgaacatgtaacaactatggcatggcaggagtaatgtaaaacactaggctacgagcgctgcagctattcaggattgtaggaaggaaattttgcttcccaaacactgattggtgagaacaaatacaacgtcaacatagtggatatgatcacctacagaaaccaatgacataccagtaatgcctggactaacaatatgaatcacaaaagaagctacatgtgccttaagagacaatgacactgaaggacatgaacatctatacaagtttctacattgttgaaatccgtaggagtggaactgcattgccatggtg

SEQ ID NO: 22066 - DNA, 467 bp, Setaria italica
  Peptide Sequence Number=SeqID_88040
tagaaccttgaggcatttactgaggagaagaaaaattctctacttgttaagcgacatgggaaaggggcagattttgtccgagcagttaaggaaatagttgagatttatgattccttaaagtacgagattaataatgaaaataataagagtgtcttgactgaaaacaatttgaggatgcatgtagaaaatcatgtcaataacaatagcagtttggatactggagatcctgaggatggtactgatctggccaatgacaacaagatggaggattgtcctacctcttccatggatcacaacatggataatactcctcggtctaatatcaatacaatggtgggtgagcactgtgttgtgaattctgcacatggtaaccctattgaaaagtcacctatccttcatgatagtagacattctcctttgcatgctagttcatgttcaaagaagagacaagaagatttcacagcaac

SEQ ID NO: 22067 - DNA, 224 bp, Setaria italica
  Peptide Sequence Number=SeqID_88041
gcacagagcaacacgaaagtggtaagagaggagatagagaagaagaagcatggagagagagatgtctgaagagtatgagctgaacgagatagacgctggcaccttgcatggttccgtggggagcaggctctccctgttcgcgagggagctcaagtcgaggaggagcagcaggcacagcggcagcgccctgaggcttccacagagctgctgctatggcagcttcg

SEQ ID NO: 22068 - DNA, 296 bp, Setaria italica
  Peptide Sequence Number=SeqID_88042
ctttcatattcttatatctccacatatttttgcgaattatatatctccacatttgaccatatgcaaccaaacacatcatgcaaatctttcttattaacttttcaaatgtatggagaggttttcacgaaggtatttcatgggaaaacctcgatgatcgattgaaaacccaatgtcggcgtaattttataatcactgaatccagcttctaagaaaatccttttccattcgtgctcctctcgctcaaccccaacatgtcgcatcataaacatatcccacaacacctgtgcctctttggc

SEQ ID NO: 22069 - DNA, 687 bp, Setaria italica
  Peptide Sequence Number=SeqID_88043
tttacccttaagttacttttaaggttactaagtacttaaattttcgttctttaaactaagtttgggggtctactttgtttgtatgtcaccatcgaatctggcagatcgaaggtagacaataaaatagagctgagatgcttaaaataatttctggtggctaaggataccccaaaacgagttgtttgtgcaaaactttcttctaattttacattattaggaaaaaattaggggcagaggataacactgacattttgttacgttgtctcgtgacaagcacgtgcatgagcatcacagcttaggctacagttttgttcttaaacgacaaatggcgactattttaagatagtgcgatccatttcaaccatgccatgctgcgcaccagctttgcaagcttgctgggttcacgtgcttctcatgagtataatagcctatgattcctttccttgatttctccacatggtgattaaccctccagtggtccccattagacagtgtgcttattgaggttcgaatctctagaccgataacactggatggggctgaaagacgggcaggttcaatgaatctggtttccggcagtttctctacctgtgcggctgtgcccagatagtcagatctcacagcgaatcaagtctagaaacaagtccatacaacacgtgtgttatgtgctagtatagagtaatgagt

SEQ ID NO: 22070 - DNA, 518 bp, Setaria italica
  Peptide Sequence Number=SeqID_88044
gagctggtggacccggtgctgggagcggcgccgtcggcgctggccgggctggagcagttcgtggacctggcgctgcgctgcgtcgaggaggccggcgccgaccggccgtccatgggcgaggtcgtcggcgagatcgagaggatggtgaagatggccggcggcggcccggggcacgagtcggcgtccgagtccatgagctacgccagccggacgccgcgccacccatacggcggcgacagccccttcgactacagcggcggcgggatgccgtccacgagggtggagcccaagtgatgaagcgcggcgaatactcgaatcattaatgtatagggtacttagttaccaagcatgctgtgtaaaatttggttaagatatgtgtgtgcgcctttggattaagaaactgattgttttggttaggagattgttaacttggtagtatttcggttcaggtttgttatacagaaagaaatgaacacaagatagcaaatgcagaaatgatcttgtccttgtttgaaaaa

SEQ ID NO: 22071 - DNA, 327 bp, Setaria italica
  Peptide Sequence Number=SeqID_88045
ctttgtccatggcaaagaaattcttctcctttagatcaatgtaaggcgactgctgtcccaggctaacaacttaatggtgcagaccatcatagttagagatcatacaagatacgccgtactttgctgataaaaggtcagaacctgaagctatgatggtgatgaagggtccagcatatgccccatgaagattactgagccagacacctcctccctaatgacaaagaagaatgggtggtcggcaacaaagtgctctgctggagaaggcttgcctatgcccgtcgagaatgaagcttcatcaatcactttaatcattaacctaccaaaact

SEQ ID NO: 22072 - DNA, 371 bp, Setaria italica
  Peptide Sequence Number=SeqID_88046
cttttgtccatggcaaagaaattcttctccttttagatcaatgtaaaggcgactgctgtcccaggctaacaacacaacagtgcgtgccatcattgaagacaatctactgataaaaggtcagaacctgaagctatgatggtgatgaagggtccagcatatgccccatgaagattactgagccagacacctcctccctaatgacaaagaagaatgggtggtcggcaacaaagtgctctgctggagaaggcttgcctatgcccgtcgagaatgaagcttcatcaatcactttatcattaacctccaaaactgctttatgaagtacatcagatagaaacaaaggaccactgggttcatcttccttgaccatatca

SEQ ID NO: 22073 - DNA, 1510 bp, Setaria italica
  misc_feature (396)..(396): n is a, c, g, or t
  Peptide Sequence Number=SeqID_88047
gcctcagaattatgcaaagtgaatgtactatttcaggcatacttgaaacccactcaaaagattctctcgttgctatatcacccattccaacgaatgatgcacaagacagtaggtgacatgctccactccttactgaaagttgcaagtgttcttcaacagttgctgggacatatctttggtcacgccatttaacctcagtggtgtaagctctcacccaatctattgtgacaaatttcaggtaggacaagcgatacttctgctctgtttctagctcatgctcaatgtccttgtaggtatcgaagatacactcaagaataatcttcaagtttgctggaaggtcctggcccacctttgtgtcccaactttctatgcacctggtaaacagttcacattccnctgaagttccatagacatcataaatatcatccacgatcgagataatggccatcacctgtgtcaatattatgcgagctcgtgagtaacatggttcgaagtatgcacctgccatccaccggaagcactctacaattctgtctcgagcgaaggacaggtttgactgaagttgtatattcttccaccaccttgtaatgattttgagttctcgctgatgatggagttgcataagatttgaattcagttttgcaagttctaatatcgtttcatgcactgtagcttctgtctcatacatggagatataatgcttcagctcatatattttgacccttctagggaggggaatttcaagtgcagacgttatttcacgtgctaatagcccttcaggatccagatgaggcattgttgtttctaaacactttttactgaaggacactgcatcatccagtatggtctctccatgagttccaagatatgcagcattgtaaaggctcagtaggtcctccgaactgttcgactcaaaatttccctcttcatccttgaactttataaacacatcttgcgaaactctgcaaccatgattgcgaagcagatagaaccatagagctactgtttgaaggtcgcagccactaagatcagcacttttaatctgagtgaacgaaccattgatctcgtcttcgaataaatgatccaggcaaagacgctgtagcacatggatgagatgaagcctttgaagcaggctgtaaccactgcttcgtctctctatcatgtctgccacttcttccttcagtttgtccgcacgttctgccatccttacctgttggtgggggaacatgctactgtgttcgagtagtgaaggaagaaatcgccccatatggaaggatggaaacggggcggattcttgcggggtcgatcatcgatctcgtcgggatcatcgtgtaaccctcctgctgggtgttgatgcgttacccggcaccggaggacgtcgtactgctgccgccgtcgacacatccatgaacgatacgggcgttttccaatcggttgtgacaacactattgcgagatggcagcttccattacactgtcctggtttcaacgcgaaggtggccatcacagtg

SEQ ID NO: 22074 - DNA, 240 bp, Setaria italica
  Peptide Sequence Number=SeqID_88048
gttgatatatacgtcgtacatttaaggtatgcccatggaggtgcgagagttagtgaaaaactatccatcacgggagaggggagacaaacatggaattcctagggatcaccggcatgaccacctgtccacctccatttacagcagcgtctgccacagattaacctcaaatgtcaggctcccatccgctagtcatgtacagatttgtgcttgacttctgtgtcagcttatcgccaatactga

SEQ ID NO: 22075 - DNA, 430 bp, Setaria italica
  Peptide Sequence Number=SeqID_88049
aattagagcagtgaggtctgtctgccgggctaaaagatgccacagtcgaaacccatcttcatccccatcctccctaccaactaatttcatcatactattttcaagcatgtcatatgtaccgtagtatcgtcttgcatatgcgggactatgaagctcaactagtatataccaccgaaggaagctagcaatttcaatgttcgacaaagcacggtttacaagaaagagagccagacgggacttgtcagatctttcaaaccgaagagcttgcactaactggagtaaatagcactgtaattcttcatcatcagccctttcaagtacgctgacagcataacctcggacttcgtcactttaaaaatccggtgagagaagctccagtgcatcagctacatcaatcatttcccactttccaatcaattcaatagcttgc

SEQ ID NO: 22076 - DNA, 472 bp, Setaria italica
  Peptide Sequence Number=SeqID_88050
aaactagatacgatcatctaatattcagaaatttgttggtcttgaagttgatatatacgtcgtacatttaaggtatgcccatggaggtgcgagagttagtgaaaaactatccatcacgggagaggggagacaaacatggaattcctagggatcaccggcatgaccacctgtccacctccatttacagcagcgtcatgtacagatttgtgcttgacttctgtgtcagcttatcgccaatactgagcccatctatggatggtctcaaccatttgtgggaacagtgcactgacgctttcattgataagatcctggaagaaatggatagcctcctcatcatccagatccagtcggaatttctcctggagcttgagacctccactttcatcggcagagatatctggaatgcctgaccgttccatcagcttaaacagattcaaaatgaggctgctcgactttcttagaatgttgtacg

SEQ ID NO: 22077 - DNA, 1881 bp, Setaria italica
  Peptide Sequence Number=SeqID_88051
gttgcagtctgtaccaatcctttgtaatgttacacgctaatactagtctaccatgttggcgataagctgagggtctaggtcgtcagcttatcgccaatattgtgcccatcgatgaatggtctcaaacatttgtagaaacaaggcgctgaccctttcaatgatgagatcctggaagaaatgtatagcctcctcatcatccaggtccagccggaatttctcctgaagcagatagacgcccttgacatctccattttggtcggcagagagatctggaatatttgatctccccatcaacttgaataggttcaatattaggctgctggatttccgtaaaatgttgtatgcttcacagcaggacttgaatctcaagtagtattggctttcggcaccacccatggcctcaaccatttctttacatagtttcattggcggtggaaatggctttggatcccggccaagaatgaaagcaaagtcaatatggaaaagtcgcccatcatctgttaaaagaatattatctaggtgcctgtctccaattcccattatatatgtaattacagagtaaccagcacagctttttatgaaagttggttataccaaaaggaccatcttcatcaggatggaacctctgtaggtaactcgtaatactgcgatgttctgatagaacctgagagagtgaactggaaggaataaattcaatcatcccttcatcttgtccagtcgcaagaactcgatatggagtaaggcgtagatccagattttcgagcaaccgatccatcaaagaaacatttatatgaccaactgatcttgccagagatcatctccttttttgaaaatgatcttggatgttcccccaacctctgttttaaatgtaatgcacaacggatgtaatgcgctcttaaatatagatgattcttgagggacaacccctgtaatgataacagcaagtgctaatggcgaacgagttggcttagtaacctcactgaaaattcctggtaataacttccttaatttctcaattttgttttgagcactaccatgtacatctcttacattcttcatgacagaacataattcgacaacgagcttgtcttgcagtgataaactatgccacagttgagccccattgtcacctccatcctccctaccaacaaatttagtcatgctgttctcaagcattttatatatattgttgtattgctttccaaatgtaggatcatgacgctcaactagtatataccaccgaaggaagctagcaatttcaatgttcgacaaagcacggtttacaagaaagagagccagacgggacttgtcagatctttcaaaccgaagagcttgcactaactggagtaaatagcactgtaattcttcatcatcagccctttcaagtacgctgacagcataacctcggacttcgtcactttcaaaatccggtgagagaagctccagtgcatcagctacatcaatcatttcccactttccaatcaattcaatagcttgcttagcttcttggttatcgctccaatccactgaacggacaaatttcgttagagctttcttctcagacatcaaagagaaacgaaatttccacaccaattgcttctcataaacctctaaagtacgtgtaggaggaaacttaataattgtttgtagtaactttcgctcatttgagcttggttttagatctctatcaactatcccacgagtcaagctcctagcaagctttaactgcttgtgctcagatggattggttcgtccaagttcagggtcccatacagtaaccagctcatttgataatgataccggggctggaatataaaagtttgctccagattcctggaagacaactctatgttcgaaactgctgacttcaacaccaggcta

SEQ ID NO: 22078 - DNA, 1421 bp, Setaria italica
  Peptide Sequence Number=SeqID_88052
atcgcaaacacttgaaaaggattgtagtagtgctactagtcatggcttcctccctgtcagtggtagtgctcatcctgtgcctagcggcgtcggccacggcgcaacgactgtcgccgacattctactctaggtcgtgtccccgagctctggccaccatcaaggccgccgtgacggccgcggtggcacaggagcctcgcatgggggcctccctgctcaggctccacttccatgactgctttgtccaaggttgcgacgcgtcggtgttgctgaacgacacggccaccttcaccggggagcagacggcgttccccaacgtgggatcgatcagaggcttcaccgtggtcgacaacatcaaggcgcaagtcgaggccgtgtgcccgcgcaccgtctcctgcgccgacatcctcgccgtcgccgcccgcgactccgtcgtcgcgttaggagggccttcatggagggttcttctcgggaggagggactcaacgacggcgagcttatctctggccaacagcgacctgccagctccgtctttggatctcgccaatctcaccgctgcgttcgccaggaagggccttagcagaaccgacctagttgctctctcaggcgcgcacaccatcgggctggcgcagtgcaccaacttccgggctcggatctacaacgagaccaacatcaacgcggcgttcgcgacgctgcggcgggccggctgccccgcggcggccggcaacggggacggcaacctggcgccgctggacacggcgacggccaccgcgttcgacaacgcctactacaccaacctgcgggcgcagagcgggctcctgcactcggaccagcagctcttcaacggcggcgccacggacgggctggtgcgcacgtacgcctccaccccgacacggttcaacagggacttcgccgcctccatggtcaggatggggaacatcagcccgctcaccggctcgcagggccagatcaggctcgcctgctccagggtgaactaactaccctaggacacacaggagcctgttcgtcgtctcagctcccaatgcaagcgatccgatccaacagtgatcacacgtgtctgggagctatgtaataaggcctttttcggccactactgtcacttgtagtgcttgtgtttgtactactgggcgtggttcatgcacaggaacagccctttaatttcttgggtcatcatcaacatcaagcgtgtgaaatgaccgagaaataagtggcgtgtagccaacccatgtcatgtactccatctgaaacttgtgagtagttgccctcatgcaaatgcttgtagggacccccccgacccccgcgtagttcccttgcccaaccatgttacagtgttacagttgcaaattgtcatcgtggcagtatcataccatcaatgaaatgaaatgatgttcatgtgagaagtt

SEQ ID NO: 22079 - DNA, 231 bp, Setaria italica
  Peptide Sequence Number=SeqID_88053
gaagcatacaagatttgatttatccattgacttgtagtatcagttacaccatatcgatcataatgtaatgtggaaagaaaacaagaaggctactgaatatatagagaactctcatcatctgaatgtagtaatgaacaacccgcttgcttgctttgcctaccctagcacaacaacgcactagctagagcacagaagaacgcagtaacaacggactctttgatctctgaacaa

SEQ ID NO: 22080 - DNA, 967 bp, Setaria italica
  Peptide Sequence Number=SeqID_88054
ccaagaagaggcggagccgaaagaggataaaggtctgaaaattgccaagatcatatatggtgtactgctatttggtccccttagcttcattggtcctataaacactgtcctagaggccaaagaaatcaaaacaccatcatgtggagagctttcggaatgtgttgggggattattaagcattggatttcacatgagctttcatggtggatgggatcgtaggcaaagagcgtatgtccgaaacattgcgcactttagccttacaatcttttgctcttttgtgatctattatctgtaccttctgcaaccaagctcactagcaaacttacaatggctaatttcaatggaagctattcttgctatgggacatatcgtggcttgggtttgggtggtactggctacaacacgtgtggcttctaaagaggaaaacagagatagtcgggtacttccaaaaaatctctcaatgtggtcaaaaacccggcaaggatgcacaagactaaggcaaggatgggggtcaatgtggtcaaaaagcccggcaaggatgcacaaggctaaggcaaggatgggggtcaaggatgagccaagagtggacaaggttaaggcaagggttgtggtctagaatgggccaagggcggtggccaaggctaaggcggtggtgttcaagacgcaaggagtaaaaaagatcatcttgtgagaaatagtgactgctctttttgagggatcttgggaatatttacacaaatcatcgagcaagaactccgctgactttgcggtaatccaaaaacactctaaggttgagctgagtttattcgctgtcatgttgcgagtagtgacatgctagaagcttattttgactgttcattgaagctgaagtgctcagggtggtggtgacatgccgttgcgttactgtacgtcttattattaccctttattctttctttgtctttgaaatatgccgtactttcgttga

SEQ ID NO: 22081 - DNA, 2135 bp, Setaria italica
  Peptide Sequence Number=SeqID_88055
ttttttttccacctttgacaatatttcctcatgttatcattaacgaatcagatggagtacaagagtggactttcaactgtacagatacaccgtggaaaatttctgatatttacatgcactcaggaatcactgacagagcaggggttccacactaagaattaccctgaactcctgaagaagaaaaaaaactagaatcctgcaaccacaaaggacgactcttctacagctaaggaaaatagtaatgtttcatgttaagagaaactccaagaaaatcgttatttttgggtatttttcaggaactttacagggctccaaattagagaggcacaaactcatccttatgtgtgaagaaagttgtccaagaagtaaaggaaagcaccggatggcttattatcagtaagcaaaagaaagccatggatgctgtagtgcttcatcggccgttggtcttttcctggggtttatttgcaacagataggatagaaaatcaagaaattctgaatcaggacactgcaagtgtcgtcgcaaggaggatttctccaggatcaaatactctagctgatctgtctcctcattcttggtaaaaagatcataatcatcagtgaagtacttttgtgtctcctgtcccaattctagcatttccatgtcaattgggccaattatcccaatcatttgagcaagcatcatggacacaggctcattaggaaataatacttcaccagtgtatagttcagcaaggatgcaaccaagagaccaaatatcaatcctctgatcatatggtaggcccagaatgacctcaggagctcgatatgagcgtgattggacatagaggcataagttgtctgtcaagaagcaactacttcccagatcaatgactttaatttcacatctactgtagctcttgataagaatattctctggctttaggtcacaatgaatgatcctcaaatggtgcaagtaaaccaacgcctctaagcattgccgagctatagcctgtatcctaggcaaagtaaaatacacctcaccgccagattcctgattatatttctgaaactcatacagatttgctctcagtagttcagtgacaataaaaaggtgttcctgatggtagaagtagtcatagaggcgcagcagatggtgctcgtctagtggatcgtatttgttcacgaacttcaggagttttatctcatccaagctctggtcaaagaaatccttatcattttttattattttaaggcaaacatccattcctgtctgaagatcatgtgcttgcacgaccttgctgaatgcagctgaacctagatattcagtgacataatatcttccagcaataactgaactcaagacaatgggaaaatctttgttttcttcaaagccagtccctgttcttgcggtggataattctcaattcaaatacctcgtattctcgatgaaaattagagagagcaagatcaatatttgtctctggatcttcctcagctttaagagcagtagaatgttgaacatctgcatttaacgacccaacattttgaaactcgtatgcatcatcaggatcaccactttcagggaaaggttgcatcctgtgaccttctttcagatattctttatcactgctgcttttcagatttttgttactgctatcgtcgagttcaacattgtccgtgaaatcatgtacaccgtgatttgcaacagcatcagtatcgaatgaactgagcatttgaagctccttctccacaacactcagctctgaatcatcatctcctcgtccagggtcccttagcatatcgcactcaaacacaacatctctactctgcttcaactgaaacccaccctgggcacaatcatccagtatctctgtctggtcatccatgatctggtatctcccatacacagtggagcttgagctcctggccacctccagtccgtcaatcttgagcccccctccacagcaaccacagagtggcgatgagcatgtgtacacctcggcgcacccctcacagcggtcaccaccgatgtgttcgtgacggtgattgtggcctgcaccaagcttgcctatttctacccgctctgagccttcgtgagcaccgagtacaaacttgtcctcctctttgccttcgtcatcctcatcatccagcatg

SEQ ID NO: 22082 - DNA, 811 bp, Setaria italica
  Peptide Sequence Number=SeqID_88056
aaattaagacaataacaacttaggggttagtcaaatgtcggtgctgcagggggcaaagtcatcctgaaagagctgaggaatctcacccaattgcgaaaacttggagtgtctggggtcagcaagaagaacggcaaggagttctgttctgccatcttgtgtcactcccgtctagaatcattgtcagtatggctcaacaaggacaatcaagattgcttagatggcatggtccatgggaacaccaatgaaacgtcagggcctgtgaataaacttcagagccttaagctgtatgggcctgtagaaaaattggcgacgtggaccgagcagcttaacaacctccggaagttaaatttggagataagcacattatcagaagctgacataaaagtccttggggccttaaagaactgcgaattctacgcctttgcatcaatccacagcaaaatggtaacctcaagttttatgtggagatagctggggtagaggatcgctgctatgaaatgataaaggttcttgagattggtagcaggtccaacttacatttaacttttggatcattagcaatgaaaaatcttgagttactcacagctggctcctgtagcaacggatcacagcttcggtttgatgggctaaaacatctctccaaactcaaggatgtccgagttattggttccaaagatgaaacgctgaagaaaaatttgaaggaccaatttgccgaccatacaagcaaacctgctttgaagctggaggaagtcattccgccgacccaggcatcgactggacgaaacgatcaacactactattcatttccctt

SEQ ID NO: 22083 - DNA, 426 bp, Setaria italica
  Peptide Sequence Number=SeqID_88057
ttattttcagaatagcatgtttgtgtgctaattagttggaaatacagtatagattggactgtaggaattactttagggatgataaaacacaacacgctttggcatcctttcgaattgctattcctatgttttcctcagtttcagtttgcattgatatattactgttgatattgacacctaaagtcactggagcttactttcctggtcatctctgtatctgagctgtaggcgagttcttgacaactgaagaagcacggaggcggcacaggctgtatgatgagcttgcctctgctgggaagctctctcctgcactcattgtgattcgagagcacctgccttctggaaaagcatgcttaagagtcaacattgatgcaaccaaagtgggaaatgttgctcgcttttatcaacctatttctattgttgtaa

SEQ ID NO: 22084 - DNA, 462 bp, Setaria italica
  Peptide Sequence Number=SeqID_88058
gtgggggctgcacgcagcggaggccctcggtcgcaggcagtttgtctgcgagtacgccggcgagttcttgacaactgaagaagcacggaggcggcacaggctgtatagaatagaagacttagacctactagctgggaagctctctcctgcactcattgtgattcgagagcacctgccttctggaaaagcatgcttaagagtcaacattgatgcaaccaaagtgggaaatgttgctcgctttatcaaccattcatgtgatggaggcaaccttcatcctgttctggtgaggagctccggttcgttgctcccaaggctctgcttctttgctgccagagatattgtggaaggagaagagctgaccttcagttacggggatgctagggttaggccgaagggtttgccctgcttttgcgggagctcaggttgctgtggtgtgcttccttcagaagaaacttgagagct

SEQ ID NO: 22085 - DNA, 156 bp, Setaria italica
  Peptide Sequence Number=SeqID_88059
acacaattctcctgtgttcaagagaaaactactgatcgtgaggccaatctcagtgtatggtttcatcgcactgttaccaagattgtcatgtcatgaaactgttactctcattgcacggtttcatagacagcctataacatttaatttttgcataga

SEQ ID NO: 22086 - DNA, 370 bp, Setaria italica
  Peptide Sequence Number=SeqID_88060
ctgcaagccctggttctggatcttgtgcttctcgctgttccacccgtccagcaggatggacgcgtcgcaaccctgcgggaagcagtcgtggaagaagatgcggaggaggccggcggtgatctgcgcgccgccgtggggattggagcgcgcggcccacacggcggagctcaccatgccgtgcaggttggggcacgacagcgcatggaagtcaacagacaagatcggagcactagtgtcgttggtcatcgtctccagaggcagaggcaacgccgacgatgcggcgacgagcatggccaggaggacgacgccgctacccctcctagtcgtcgtcatcgctgctgctggatggtgccaagcaagtgacgatggt

SEQ ID NO: 22087 - DNA, 898 bp, Setaria italica
  Peptide Sequence Number=SeqID_88061
tacttcttgcagtcgccgtcctcgtcctcccctcatcttggcgagtagcggcgacctggagtggagagattcatccggacctcgattggttccttctgctgttggctcgatgggaagcagggacgacagtagcgacatcacaagaggccagggttatgctgctgacatcgattccatcagggaggcgcaggcccgcattgcgccgtacgtgcacaggacgcccgttctgtcctcgacatcgatcgatgccattgcggggaagcagctgttcttcaagtgcgagtgcttccagaaggctggcgcattcaagatccgaggtgcttcgaattcgatatttgcgcttgatgatgagcaggcatcaaagggtgtggtgacgcatagcagcgggaaccatgctgccgccgtggctttggccgcaaagctgcgtggcatacctgcacacattgtcataccaaagaatgcaccagcatgcaaggttgacaacgttaagcggtatggtggtcatatcatctggagtgatgtcagcattgaatcaagagaatctgtttgtaaaagagtccaggaggagactggtgctgttcttattcatcccttcaataataagtacactatcagtggtcagggtacagtatctcttgaacttttggagcaagttcctgaaatcgacacaataattgttcccattagtggtggtggtttaatttctggcgtgacccttgctgcaaaggccataaacccttccatacgtattctggcagcagagccaaaaggtgctgatgattctgcccaatccaaggctgctggaaggatcatcacattgccttccacaaacaccattgctgatggactacgagcttttcttggcgacttgacatggcctgtggtgcgtgacttggta

SEQ ID NO: 22088 - DNA, 872 bp, Setaria italica
  Peptide Sequence Number=SeqID_88062
ttagttgatactaacctcggcacataatgaacttatcacaccaacccactttttttattttgcttgttgggttatttggtttaagtgaatatgaacccatttttatttatagacaaaaaggaggaccctgcttgtacagaagattacagatttcaaaagaaatgtggattaggaaacgaaggaacttaaacattagcttaagtgtgcacccggacacaaaaggaagaaaaatgaaatgaaatgaaatgctacttaacatcgaagacggtctagctgtaaattattaaccaaatgacactaactactgctatcatttgaaccatttttggatctgctaactttctcaggttttgtttttgtgcattgtcaacatgtgctcttactgtgtgaaaaattgtgatgattttccagtggtcagggtacagtatctcttgaacttttggagcaagttcctgaaatcgacacaataattgttcccattagtggtggtggtttaatttctggcgtgacccttgctgcaaaggccataaaacccttccatacgtattctggcagcagagccaaaaggtgctgatgattctgcccaatccaaggctgctggaaggatcatcacattgccttccacaaacaccattgctgatggactacgagcttttcttggcgacttgacatggcctgtggtgcgtgacttggtggatgatgtcatcgttgtggatgacaatgccattgtggacgctatgaaaatgtgctacgagatcctgaaggtggctgttgaacccagtggtgcaattggccttgccgcggttatgtctgacgagttcaagcaaagctctgcttggcatgggagcagcaagatagggatcatcgtctct

SEQ ID NO: 22089 - DNA, 409 bp, Setaria italica
  Peptide Sequence Number=SeqID_88063
acaagtcaactcatggtccattacagtatccaatccaagcgccaagagggaggaaacgtaactacataagctaataatgtagtattttgtagttgagacagaataggagatctatcaagttaatatgtaaatctatgtcaatacaagctaaatgtacactacagcatcagagtacatatcctagaaagaaaaatcctcaggcaaacgattgccaaacttgctggatagaaagctcctgtacttccccttaagttcgccaactctaaagtcttcagtttttgatgtcaggcaggttgtgagatagtgctaactctaatagtttcataagccccttgccatcaatgtactttccagagtgcttagcattgatcagatatgctggtgcatcatcttctttcaatgtgagaat

SEQ ID NO: 22090 - DNA, 710 bp, Setaria italica
  Peptide Sequence Number=SeqID_88064
agccttgaacctatttcatataatgttagtacgtactgtgcaatcaaaatggaacagtacaaagcatgtggaattaatgaaacctcaccatattcctgacttgttgcactatatttgcctcgaattgtttgtaggagttcaatacttgtacagtccgcaaattagcattcagtcgttcactgccaccaagaaccattgtgtctgcacacacattgggagaaatacctaaaaatgttctagtcagtattgaatgcatgaaagtattgacaagcagtttacctgcaaagaagtttctaattctgccctgtttcggagcttccagcagcttttgcttctacaagaagctccaaaagccaaaatctcccccaaacggggttattacttccaaaagcaaaagttggaaaagctcgttttacactaccaacctaaaagctcatctcctgtaatttcccgagcttttccaccgaattgtttttccctatctcttctcaagtctcaacccgtcactgccctcatcctcattcgtcgtcctcgcacctgtcgcctccctcaccttagcgcaaacgtcccatcaagggccgccgttgccctcatcctccttgtgccccgccgtcgcccccttccctcgacggccgccgccccttcccgtgatgctgcccctacccatctgcgccgccaccgtcctctcctaccaccaccacccaaatccc

SEQ ID NO: 22091 - DNA, 975 bp, Setaria italica
  Peptide Sequence Number=SeqID_88065
cgcatgacaatagcagctgcccttgcatccaagcctgatgttggctcatccatgaatatgattgaagggttggatacaagctcaactgcaattgtgagccgcttccgttgctctgtagatagtccatttatccctggtattccaaccaaagcatctcttatttcgtccaactcaattgtttcaagaacttgattgacaaattcatttcgagttttggagtcgatttctgttggaaggcgcaaccaggctgaatatgcaacagactcgcccactgtgatctgtggggagtgaacatcagtttgttcacagtagcctgatatcctagcaaaggtttgttgaactttaggataacctcctatttttatatctccttcaataacaccgccagttttcctccctgcaagaacatcgagcagggttgttttccctgccccggtaacccccatgagcgctgacaggactcctggctggaaggctcctgtgatgttgtggagtagttgaagttttctctccatgtaaccttgttccctcatttccgcaggtgtgtccacatagtagttcacatcttgaaatgatattgcaaggggtgtaaaaggtaataccatccttccagtcctgttaggagtagaagaattttccgcttgtttcttatgcatcctatcttcagtgttcttggatatacgttggtcttttccattgaatgtggtaaggttatcacgagaaataatagctcgagaagttcctggaggccttttaacagtcaaaccgatggcaaaacctatgttgaataacaaaataaacccaatcaatgctccaattgagatccagaagaagtaactggagaagtttaatcctctgtccattagtatcctccttccaagtgtcacaccagatactgtatactttagccatcttgccgccaagaactcatttccagttaagcctatctcagcgtatgataacggagagagccaa

SEQ ID NO: 22092 - DNA, 522 bp, Setaria italica
  Peptide Sequence Number=SeqID_88066
aatgatggtttcggaagctgaacaagttctggacgatgttctgaaatctacttcagagctcaaggaactaatagccctttttgcagaactacaacgtgctggattgaaaaggagtcttacttctgcacaagccatgtcaaagacatcaattgatttctttaaagacatcaggatacatgtgtctcggctcatcaaacttatggaacagaacaaaatagaaaggtccacaaagcttctcgaatttgagaatgaatttaaggaaatttgtgttaaagacgagcaagctgctctgaacaagattgctacgattttatcagggttgactgccaagaaaactgcaatggtttcagcatatgccggacagctgaatgacagatacaatgaagagcagaaacacctaaatttggagatgtccaacctacagcaggtttcagataatggcaaaaatgagactgcggcttatgttagagtggtagagaaccagttccaggaggacatgtcatcgcatgctaaattaaatga

SEQ ID NO: 22093 - DNA, 149 bp, Setaria italica
  Peptide Sequence Number=SeqID_88067
gtcggccgacagtgcggagcccaagaagcccataacagaccccttgtttctcctcctgccttgtcctctttccgaagatcgagaacctcgctttcactatgtgtctggggcttcgcccccctcgacgcttgcgcgcgcgtcggactcct

SEQ ID NO: 22094 - DNA, 1066 bp, Setaria italica
  Peptide Sequence Number=SeqID_88068
agctctggcacgtcggccgcgtctccaccaccgccttccagcccggcggcgccgccccgatctccagcaccgaccgcgcggtgcccccgcagatgagcttcgacggccatatggaggagttctccccgccgcggcggctggagacgcacgagatccctgccgtcgtcgacgacttccgcagagccgcgcgcaacgcgatcgacgccgggttcgacggcgtcgagatccacggcgccaacggctacatcatcgagcagttcctcaaggacgccgccaacgaccgggacgacgagtacggcgggtccctggagaaccgctgccgcttcgcgctcgaggtggtccgcgccgtcgccggcgaggtcggcgcgggccgcgtgggcgtccgcctctcgccgttcacggactacatgggctgccacgactccgacccggaggccctggcggcgcacctcgtccgcgagctgagcgccgccggcgtgctctactgccacatgatcgagccgcggatggcgctggtggatgggcgccgccgcatcccgcaccggcttcggccgtacagggaggcgttcaggggcaccttcatcgccgccggcgggtacgacagggaggaggggaacaaggtggtcggcgaggggtacacggacctcgtctccttcgggcggctgttcctggcgaacccggacctgcccaggaggttcgagctccccgacgcgccgctcaacaagtacgaccgcaccaccttctacacctccgaccccgtcgtcggatacaccgactacccgttcctcgccggcgacgtccaggccgcctgatcgttcgtcgtcgtgttgtcagttgtgctctgctcgtccatggtcaccgtctcgtcgaccaccttgtactctgctcgagtggttctgtacgcatgctatatacgtcatctttcctagtggcaggaggtgcaaaataaaccaagtttgatccgtaattttacaacacatttggactgtctaacatgaatggcaaagtaaactgagtttgatgctgatgctaaaggtgtgtgtttggaatttgaagtttgaactag

SEQ ID NO: 22095 - DNA, 462 bp, Setaria italica
  Peptide Sequence Number=SeqID_88069
tttttttttttgtctaaactctagtacatatattcagtagaggcaccgaggccaccaatattacacaagttacctatatactagtacacgactacttctatgatccatcactccacagtccacatatgtcatctatctatataatatatgttgctaataagtttaacctcgctcagtacggagtacacagaagcaaagtagcagtcagtcagttgggtataagcttgaagcgaggcttggcaaacgccggagtcggatcgtagcgtccgtagtcgtttgtcttaaccatgtcgcctgaggctgttgctcccttttcagatgcagcggcgggatgcaccttgtgaacattttctttcgctagctcccttcctcctgcttcggtgcataccgaaagcgctgacacaacaatgagcagaaaaacaagcaccgaagctctgcatactatcttcgaagtcatcttct

SEQ ID NO: 22096 - DNA, 245 bp, Setaria italica
  Peptide Sequence Number=SeqID_88070
ggagaaggcaaatccaaagaccaaaaaggatcttcgtagcatagaagacctcatgtgcacgagcatctgccatgtaaagtatgaataggaccaaaggaaagtactcttgccagattgatgcacagcaatggtggggcaagtttagaacactcattggctatgaacctgttagattgtaccttttcaatgctctattgagataggagattctatgctatcttaaagattaggagattttgggttca

SEQ ID NO: 22097 - DNA, 807 bp, Setaria italica
  Peptide Sequence Number=SeqID_88071
gttgctgcacacaggaacagaggtgtagggggtaggctcgtttattgcagagcgggttcttgggtggtggtgttgttgtgtgagctgctgctgctgctcccggtcatcgtatcgatggcgatccggaacatgacggtggcgacgcggtcgctggacgcggacatgacggtggacgagttcaaggagtggctgcggcggttcgacacggaccgcgacggtcgcatcagccgcgaggagcttcggcgcgccatgcgcgccatccgcgcgcggttcacgggatggcggaggcaggcagggcatcagctacgccgacgccgacggcgacggctacatcgacgacagcgaggtggacggcctcatcgagttcgcgcagaagaacctcggcctcaagatcgtcgcctactgatcatgcatctcgccgccggggggcggatcccttcgccgggcgcgctttgtcggcatgagctagcgaaatgactcgccaaccttctccagcatccccccgctaaaataagaactgtttgatcgatcgaccgcttgttgcttaaagcttgctttcttgtacgtactcaaatcaattcctgcactctgtatctctgtgtgtgtgatctatatgtaaggtgtgcatggtgcccatgcgccgatgcgcgcctgcctcggcttgcctgctaggtcgggccgtgccatgggtgctgcggatgttaatttgctctagtgaaattgacagtgtatccttgaccatcccgtgtctcgcttgaatctccctattttgaggatttcttcgagttccttgaaggtttaaaaaaa

SEQ ID NO: 22098 - DNA, 1860 bp, Setaria italica
  Peptide Sequence Number=SeqID_88072
caggcacgcaccaataccaagcctcctcccgggcccagcttctagcattggctcatcaccagcactccagcaggcaggcaaaacgcaagcaacacctctccgccagacatcatggccgcttctgtcgagccgcggcagcagttcggccgcctcgaggcggtgcggggagccgccgcgaacggcgccaaggcgtaccctcctccggcgagccacatccctcgccgcgccgactctcccgtgcgcggctgcggcttccctcccctcgtctcgccgccgcgcaccaagcccgacgaggcgtcggacgacgaggacgacgagcaggaggactggcgcgagctctacggctcccacctgcagctagaggtggagccggcggtgcacgactcgcgcgacgagggcaccgcggacgcgtggatcgagcgcaacccgtccctcatccggctcaccggcaagcacccgctcaactgcgagccgccgctgacgcgcctgatgcaccacggcttcatcaccccggcgccgctccactacgtgcgcaaccacggcgccgtgccgcggggcgactgggcgacgtggaccgtcgaggtgacgggcctcgtcaagcgccccgcccggctcaccatggaggagctcgcccgcgacttccccgccgtcgaggtccccgtgacgctcgcctgcgccggcaaccggcgcaaggagcagaacatggtgcagcagacggtgggcttcaactggggccccgcgggggtgtccacctccgtgtggcgcggcgcgcgcctccgcgacgtgctccgccggtgcggcgtcatgccgcgcaagggcggcgcgctcaacgtctgcttcgagggcgccgaggacctccccggcggcggcgggtccaagtacggcaccagcatcacccgggagtgggccctggacccgtcccgggacatcatgctcgcctacatgcagaacggcgagccgctgctgccggaccacggcttcccggtccgcgtcatcatccccggctgcatcggtgggcgcatggtcaagtggctcaagcgcatcatcgtcacccccgtcgagtccgacaactactaccattacaaggacaaccgcgtcctgccgtcgcacgtcgacgccgagctcgccaatgctgaagcgtggtggtacaagccggagtacatgataaacgagctgaacatcaactcggtgatcacgacgccgggccacgacgaggtgctgcccatcaacgccctgacgacgcagcggccgtataccatcaaagggtatgcgtactccggtggcggccggaaagttacacgggtggaggtgaccctggacggcggcgagacgtggcaggtgtgctcgctcgaccacccggagcgcccaaccaagtacggcaagtactggtgctggtgcttctggtccgtcgacgttgaggtgctcgacgtgctcggggccaaggagatagccgtccgcgcctgggacgaggccatgaacgcccagccggagaagctcatctggaacctcatgggcatgatgaacaactgctggttccgggtgaaggtgaacgcgtgccggccgcacaagggcgagatcggtctggtgttcgagcacccgacgcagcccggcaaccagaccggcgggtggatggcgcggcagaagcacctggagacggcggaggccgccgctccggggctcaagcgcagccacgtccacgcccttcctcaacaccaccgacggcaagcagatcaccatgtccgaggtgcgcaagcacgcgtcgcaggagtcggcgtggatcgtggtgcacggcctacgttcttacgtacttgtctaccttaagtttccttcaaggaccacccgggcggcgccgacagcatc

SEQ ID NO: 22099 - DNA, 1090 bp, Setaria italica
  Peptide Sequence Number=SeqID_88073
ccaattatgttatgcatggcagtcatagcttatagataaatcgagcaggattgtaggtattcttccaccatattcggtggcatattttgcggaagagggcaacttgatcaataccaagagataaccaacgctccacgaccgaccaaaatccgcgattcagcaagatgcacgcctattggggcaaggccgccagggtaatacaggttgaaacagtaaggatcgtgatcgaggaaacgcatgtgcattgcataggctatccggtaatgtgctctacggccagcaaatgaatggccactacccatcaatgctcaaacgcatgtaactggccactaaacttacaaagatgtgtctacttgcgtgaacaaaaaaaaacactatattaaatttgatcttttgagttctgatacgacaccgctgtcttcctggattttctcgttgtatatcaccttgtcaatgatgccataatccacagcttcactggggctaaagtatttaggccgcctgatgtcccgagcgatctcttcaattggtttaccaatgtgcctggccagcagcttaaccatttctatcttgacatttcggatctcttttcttgcaatatcaacgtctgttgcctgaccttgaaaacgaccaattggctgctttatcattatcgacgatgatggaagtgcagcacggttacctttagcaccagcagctaagagcaaagcagcttctccccatgcattaccaacacaaagggtgaaaattggaacttttacatacctcatagcatcgtatactgcaagagcttctgtctcataacctaacttctcaccattcttggtggtaccggtggagttgatgtacaggtagatgggcttctcagcgtcgtcgtactggaggtagaggaactcggcgagcatgagctccgtgaccgacggcacgaggcacatccccaggtacacgatccggttcttgtacaggaacgaggccaaatccggcggcggctgctcccacgcggtccccctcaggaacggcaccaccatcgcgacgacatccctggcgccgcggccgccgtcgacggtcggggttcttcggttgggggtct

SEQ ID NO: 22100 - DNA, 1260 bp, Setaria italica
  Peptide Sequence Number=SeqID_88074
gtctctctctctctccctattcctgttctctctctcatctcacagcttgagagagataggagagataggggagagatcatgtcgataagcttcttgagcatggtggaggcggagctgccacctgggttccggttccacccaagggacgacgagctcatctgcgactacctcgggcccaagctcggcggcaaggtcggcttctccggccgccggccgcccatggtcgacgtcgatctcaacaaggttgagccatgggatctccctgtggcggcagcagttgggcctagggaatggtacttcttcagcctcaaggaccggaagtatgcgacggggcagcggacaaaccgggctacggtttcaggttactggaaggctactgggaaggatcgggcagtggcgcggcgaggggcattggtggggatgaggaagaccttggttttctaccaagggagggcccctaaggggaggaagacggagtgggtgatgcatgagtacaggatggagggtacacttgagcaatcctccaaggatgaagattgggtcctgtgcagagtcatctgcaagaagaaattaccaggaggcgccagctccaaggcgtcaagaagcctcgccaccaatggcggccatgacaccgcaccaaccagctcgccgccgctgcccacccctcatggacaccaccctagcacagctccaggccgccatgaacaccaccgccggcgcaatcgagcaggtgccctgcttctccagcttcaacaacattgccagcaacagcaacagtgctgcagcagctcagccatgctacctgcccatggtcactggcagccatggcatgagctttctggaccatggcctgcctgagcttggcggctgctttgatcctctgaactgcgacaagaagttgctcaaggcagtgctgagccagtttggaggtgaggtggtgccaagcctgccgcatgagatggctgctggtactgctgcaacctccacttggatgaatcacttctagggaaattgattcagcaagcacaagcgattgatgattccatatgaactatatttacttattgtgtggtacaagtacaatatttatgtgtgagtagtagaacatgcaactattttttctgtcgattcgataaggcaggacaaaaattaggagtgatactctgtaatggctgttgaagtgtgtatattcagatgtagaggaccagaggattgagtgatcaagagtaattcagattaaaaactactcacactgagtcg

SEQ ID NO: 22101 - DNA, 345 bp, Setaria italica
  Peptide Sequence Number=SeqID_88075
tgatcgatgatttgtggatgcagggcctggacccggtgacgatcgcgtccatcttctcgacggcggagcacgccggcgagaagcaggtggacggcgaggattgcttcgtgatgcgcctggacgtgggtccctcggtgctgtcgagctggagcgacggcacggcggaggtgatccggcacgggctgacggggttcttcagccagcgcagcggcctcctggcgcggctggaggactcgcagctgacccggatccagtcccccggcgcgcccgccatgtactgggagaccaccatcgcgtccgccgtgtcggactaccgcgccgtcgacggcggcgtcgccgtggccc

SEQ ID NO: 22102 - DNA, 241 bp, Setaria italica
  Peptide Sequence Number=SeqID_88076
aaacaaacttgggccatggccctttaacaagttcagggttcaaaccttctgccacctatgcaaacattgtacatcagtcctacctggaaaacactcagctatcttttttccaatttttccctttgtaagtttcaacagctttgcgaagtatgtcatcctcttctgcagtccagtttcccttcgaggagcgacgtgctggaccagttgtcctcccattgggcaatcgccccttttgacattg

SEQ ID NO: 22103 - DNA, 538 bp, Setaria italica
  Peptide Sequence Number=SeqID_88077
aacttttttacaacaacgaacccgtaccaagaccaagcccattccacagcgccggcgaggggcgcgacaagaagccgccgcatttcttgcggctggggcggtgatcgatctcccccgtctcttcctctcccaaacgcgtaaggatggggagggcgccgtgctgcgagaaggtggggctgaagaaggggaggtggacgaaggaggaggacgagatcctggggaggtacatcaaggagcacggggaagggtcatggagatcgctgcccaagaatgctgggctgctgcggtgcgggaagagctgcaggctgcggtggatcaactacctgagggcggatctcaagagggggaacatctcggaggaggaggaggagatgatcatcaagctccacgccacccttggcaacaggtggtccctgatcgccggccacttgcccggccggacggacaacgagatcaagaactactggaactcgcacctgagcaggcgggcggccgacttccgcgacggtgtcgtcgtcaacgtcgacctcagcaagct

SEQ ID NO: 22104 - DNA, 344 bp, Setaria italica
  Peptide Sequence Number=SeqID_88078
accatcgacacgagaacggaacaaactgtatgatcagcactcacacttcagttttttttaaagataatttgacacgtaggatgtgatatagtatgatgaatagttggccaacaattgtcaaagcttcgcttgccgggtcgttactggaccgcgttgcacatcccggggcgtgtccggcaccagagcggctggatgggctcggcccggacccctctccccaccatgcggttgcgccagtcggtgagccggtccgtcgcctcggcgtacctcttcctgccggaggcgtcgcggttgccggaccagagcgcctccgccatggccgaggtcctgggccagacccggcc

SEQ ID NO: 22105 - DNA, 1545 bp, Setaria italica
  Peptide Sequence Number=SeqID_88079
acgtgcgcgtcaccaactccttcagcgcgaagaagttttgcgaccgccggaggtacctttacctgctccccgtgttcgcgcttgaccccagcgcgcacccggaccgcgaggccgtcatggcgagcatgggaagtggaagcgagctgaccaagtgcctggagtgctccgagagggggaggaaggtgcctggtgtcatgggccgggaggggaagctgcccagccctggggtgaatggtactgatgctcccgtggagggaactgtgaacactcatgacgaatcgggatctattggggctgcgaaaggtgatccaacagtttcagaagaaactcaagctggaaatgctgagctgggatcaaatggtgctagtgatgttgtaccttcaggttcagctgatgcagatgcttcaatcggcaatgaggagaataaacttgaggccacagctactgaagagaaagtacaaggtatggatttcgagaatagcaatggagaagagaagccaccaaccaagagtgacttttcttacaatgatgagatgaaggagaggttcaacaggattctcaagtactatgttggaacccataatttccacaacttcaccacaagaactaaggcagaggatcctgcagccaaaaggtttattatttcctttgctgccgatcgtgttgttagcctggatgggattgattttgtcaggtgtgaagttgttggccagagtttcatgctccatcagatccggaagatgattggccttgctgtagctgtgatgagaaactgtgcacctgaatcgatttatgatgttgccttccgcaaggatgtcaaacttaacgtgcctacagcacctgaggttgggttgtacctagatgaatgcatgttcacctcatacaacaagaaatggaaggattcgcatgaggcagtttccatggaaccttattgtgaggaggctgaagagttcaaggtcaagtatattttccctcatattgcggcgatggaacacaaggagggagctgtagctttgtggttgcactcattaaatcacaggaattatccagatttccgctacatggaaactgctggtgctgaggccaaggttggggctgaagttgctgctggtgcagaggtcaacgttggggctgaaaatgatggtatcgaagaagtacaaatgccaagtgataatgtgagtgagtaaatcaattttgccttggggcatacaaagccaatgagtatatttgcttaatgtatgcaccgaaagagggacctgagacactgcttatgggatgaaataaagaatgaagatggtatcaaaaggctaaggtgcatggatttatacaacggtgttttctttaggcaatacatcatgatccctatattaatcttcccagaatagaatttataggttgattaatcttatatctgaacttaatcagttacttccatacagttgtatggaaaatgatggcgcctgaaaatgcttcagcaatgtttttgtttgctgaaattgttatggaattcactatatttcgtcttatctagcatataaatgaatt

SEQ ID NO: 22106 - DNA, 243 bp, Setaria italica
  misc_feature (26)..(26): n is a, c, g, or t
  Peptide Sequence Number=SeqID_88080
ctccgacatggcccattccagcgtgntccctgacgtgtcgctcccgccgctgaagaggtcaagaatgagagatttgacgatgtccatggtgaggggcacctcaaggccaccttccttgtgtatcctcaggagcacgccaaggatgccctcgtcctcctccttcacggtgccatccggcgcggaggccacggccgcccggcgctcctcgtgctgcctgatggcgcagtccatgagctcgaacat

SEQ ID NO: 22107 - DNA, 565 bp, Setaria italica
  Peptide Sequence Number=SeqID_88081
cctcttcctgccctcttcacattgatccaaaatgtagagctgcccctgaaaagatatacctcccatccccctatcagcttccaagtcccacctttcatcctcctccctcctcgccaatgctatcaccgctctgatcacacacaaacctaaccctcactgttctacccccctagatggcttccgccaacaactggttgggcttctcgctctcgggccaggacaacccgcaggctaatcaggatagctcgcctgctgccgccggcatcgacatctccggcgccaccgacttctacggcctgccgacgcagcagggctccgacgggcatctcggcgtgccgggcctgcgggacgatcacgcttcctatggcatcatggaggccttcaacaggagccagcaagaaacacaagattggaacatgagaggtctggactacaacggcggcgcctcggagctctcgatgctcgtcgggtcgagcggcggcaagagggccgtggaggacggcgagcccaagctcgaggacttcctcggcggcaactcgttcgtctccgagcaagaccaatccgg

SEQ ID NO: 22108 - DNA, 421 bp, Setaria italica
  Peptide Sequence Number=SeqID_88082
aattgagggaaaagtgttccgtgagatgtctgaaagtgcgagagcagatgccgctgacaagataattgtgatggggagatcgtctccaaatgataaacttttgcttgtccaagctttaaaaaagaagggacatgttgtagctgttactggtgatggtactaatgacgcccctgcattgcacgaggccgatataggtctttcaatgggcatttcagggacggaagttgctaaagaaagctctgacattataatcttggatgatgacttcacatcagttgtcaaggtttgtttagtagatagaattgtagaagagaacttaactgccttactgcactcaacagtgattttttcctgtaaataattccacttggagctagccagctgcattgataaatgtacctttaaggatgttatattgggt

SEQ ID NO: 22109 - DNA, 1548 bp, Setaria italica
  Peptide Sequence Number=SeqID_88083
tatgcactactgccggtgtaaaggtgcgcatggttactggagataatatcgagacagctaagcctatagctttggagtgtggaatactagatgcaaatagtcttatttcggagcctgttgtaattgagggaaaagtgttccgtgagatgtctgaaagtgcgagagcagatgccgctgacaagataattgtgatggggagatcgtctccaaatgataaacttttgcttgtccaagctttaaaaaagaagggacatgttgtagctgttactggtgatggtactaatgacgcccctgcattgcacgaggccgatataggtctttcaatgggcatttcagggacggaagttgctaaagaaagctctgacattataatcttggatgatgacttcacatcagttgtcaaggttgttcgttggggacggtctgtctatgcaaatattcagaaattcattcaattccagcttactgttaatgttgctgcacttgtgattaatgtggttgctgctgtgtcctctggtgatgtgcccctaaatgcagttgagcttctctgggtgaaccttattatggacacattgggagctcttgcattagcaaccgaaccaccaactgacaaccttatgaagagaaatcctgttggtcgaagggaacctcttgttacaaatatcatgtggagaaacttgtttgttcaggccctttaccaaatagcaattcttctcatctttgattttgctggagtaagaattctgcggctgcagaatgaaagccgatataatgctgagaagataacgaacaccttcatctttaatacatttgtcttctgccagattttcaacgagtttaatgcacgcaaacctgaggagaggaatgtcttcaaaggagtaacaaagaaccacctcttcatgggaataatcggaataacaacagtacttcagattctaataattcagttcctggggaagttcttcaagacggtgagacttgattggagactatggttggtttcagttgctattggcgttataagttggcccctggcatatctcgggaaattcattcctgtgcccgtaagaccactccaggactatttcaagccccgctgctgccggagagcgcgccgagatgaggaggaaggcaggcagacgtagggcgcaatcgagtaagccggtgtaaatagccatgtcataagaagagaagataaattttctactggttccacgggaacagccgcttggggaatgtataagttgccacaacagagccccggcctgttaatttcctctacaggaaatgcagtcggaaactgtacagcagccaaactcctgtcctaggctactagcctactactaggtgtaggtggtatggctttgcggcagcggaagcgcaagcgcagtcggagctactagttttgtgcctcgcttaattagcttgcgatctaaccatttttctctcaatctggctgtaaatttgtaaatgtttatctgctacgagatgttctcagttttccatccatataatctgttattatacttaaaaaaaaaaaaaaaaaaa

SEQ ID NO: 22110 - DNA, 347 bp, Setaria italica
  Peptide Sequence Number=SeqID_88084
ttaaaaacggagggagtattaataaattttagtttttggatttagttggtatagtatgcaacaacttaaagctgcaatttgtgttgtgattctactgtataatttatcgacaaaacatttagaaaattacttgtgtctgtatctcagatcagatatgttcgatccaacaatgcatatttttaattatttgaattattgaagcatcagtagcatattgtgggaaacagttagtttttaaggacttttctgtctgtacattcattcttttggagctaatcttttctctcaagtcattccttaatgatctgcctgacacgtgtttattcagacaagttgatcttgtgtcc

SEQ ID NO: 22111 - DNA, 1497 bp, Setaria italica
  Peptide Sequence Number=SeqID_88085
ttagtttttttttttttacgtacaaccatcttttaagtagaatggtataaaagaaaagattctaatacagtcctgaatctgcatacaggaaccatcggaaacacaaaattccatggtgttttcatagttcaagagcgatgaagtaagatacaatgcaggataaaccactaacataaaacgatggactggtcctcagaactatcaccatccacacagcaaatgcttaagcaaagatagtattatgaaaagtgcaataaaagcatcatgactacaaaaatttaaccggttttttggggtctatttcggtcttgtattgtcctttaattccaatgctttctatgaagaactagggtgtacagaacatcaccagaagggtaaataaaaagaagtgaaatggtacattatttatgctgatgtaatgcaaggtgttgcaccaaacatcagcagaaccaccaatccgtcaactgaaaatgaaaccatacgaagcccctaacattggaaaacattgctgttggatagccactcacaatggcaggcacaagtcaaggacagcaattttatgaccttctggattgtaactctactagcaatgatgtttcccttcaacccttcccatgatcatccgctccaaccaaaccaaattttgcttaagcccgcattcgccgcctgggcttcttgacaaagctcattctgagcttgtatagcctcttgctcttcaatctcttcttctccggcaaagtgagcctcttcttcaccttcttctccttctttgccttcacatacttcttgtcaatcttatactctcctggtgccacagttacaccgcgtgcaactgcctccctgaacagtgcatttgcacgatcccctaaattgtgcttagtcagcttctcaatcaacaagctatacgactttactccaggagcatgcccatatcctttcatcatacggaataccttgacggcatgctcaaccctctcaataccacacaagatcttgatgaatccataatacaccttcctatcaagcttatctccaaatccggcagatcgcatccacgtcatcatctcatccccctctgaaatacgagcagcttggtacaagctcctgatgagcaccaagtacgtgtcagcatccggtgagcatccccactcacccattcggcggaagagattcatggcatcctccgtcttgcggatcttgcaaagatttgtgatcagcacccgaaatgtcccagcatcccggggaatgccattggcctccatgtcaagtaagaacttctccgcttccacgggcatcctcagtgggtccttcttgcggcagagccggcagacacaatcaagaacagcattgtatgcatccaaacctggctgaaacccaccacggcgtgtctcaccaatcaacctcagcgcatggtcgagctttccagcattggcatagccagataccagcaaagtgcagatattgtcatcagggaagatctcattggcgaccttcttg

SEQ ID NO: 22112 - DNA, 522 bp, Setaria italica
  Peptide Sequence Number=SeqID_88086
actaggtaggttaatgatcacaattacgtgcttgaagctggaaaactaaggttaggcttgcgacatgtggcaaaagtggtagacccgtcaagcttgagggtcctagacatttgggcagatgcacctggagtgcagttctacactggaaattttcttcatggcattgtgggcaaaggaggtgtggtttatgggaagcatgctggcttctgccttgagacgcaaggcttcccaaacgctgttaatcaacctaattttccatcaattgtcattcgccctggtgagaagtaccagcatacgatgctgtttgagttctctactgagtgatgtagctcctgtacatatcaccatttttcttgtgtttcctgcttgtcattagttagaaactacggtgcagcagttgttaaattgattcttgatagggttagatatacaacagaagtaacagaattagtcgggaaggggcaaatttgccatgaaagagtaggttgcattccatgtgaaccttgtacttatgagttaatg

SEQ ID NO: 22113 - DNA, 728 bp, Setaria italica
  Peptide Sequence Number=SeqID_88087
acaaaagtatatgggaagttgctgagtataacaaaggggacaacccttcaatcacctttaagtatcatagtaaagatggagaggaaggttacccaggtgatgtttctgttactgccagatattccattcttccaagtgcaacactgaagcttgagatggaagccacaccattgaacaaggccacacccatcagtttagcacagcacacctattggaaccttgcaggccacaactcaggagatgtgcttccacactcggtccagatatggggctctaagataacaccagtagatcaaacctcaatacctacaggcgagttcatgccagtaagcggcactccctttgattttctgactgggaacaggatcggaagcagaattgatcaggtccctggtggttatgatcacaattacgtgcttgactctggtgaactgaggttaggcttgcgacatgtggcaaaagtggtagacccgtcaagcttgagggtcctagacatttgggcagatgcacctggagtgcagttctacactggaaattttcttcatggcattgtgggcaaaggaggtgtggtttatgggaagcatcgctccggcttctgccttgagacgcaaggcttcccaaacgctgttaatcaacctaattttccatcaattgtcattcgccctggtgagaagtaccaaggcttagacgaacaatagtaggacaaaaagtaggtaagaacccgtaca

SEQ ID NO: 22114 - DNA, 190 bp, Setaria italica
  Peptide Sequence Number=SeqID_88088
cgcgggcaagctggcgtccggggaggtggaccagtcggagggctcgttcctggacgacgcgcagatggccgagggctacgtgctcacctgcgtcgcctaccccaaggccgactgcgtcatctacacacacaaggaggaggaagtgcactagactgttgaagattggtggtggtgtttcgagtcctgtggt

SEQ ID NO: 22115 - DNA, 253 bp, Setaria italica
  Peptide Sequence Number=SeqID_88089
cgcgcggaatctcgcggcgcccgctcgccgacggcgcttgcttgtcgccgctgctactatggcagcttagctggattagcgagaaagcgatcgtcgcaattaacgtagcgaaattaaagcgcgcaccagcgtgcatcatttgggcttctcctttattccaaaggcgaagcttgcacaggaacaggcgtatcttaagcttccagctcgtgagatgctctcagatctctctcgcccgacgcggagagctacaggg

SEQ ID NO: 22116 - DNA, 928 bp, Setaria italica
  Peptide Sequence Number=SeqID_88090
gacgaatcatgatgcttgggtccaacttgagagaaaagatatgtgagaggagataaacatatggagaggcatgctctctctttggttgcctggaagtggctacctagctatatagcctacatgctgaaagaaagttgctattgattagcacaaattgatcttctgcagtatccaacagaaagcaaagctttcagaagctaaagaccaagcgcaaacagagagaggaactgtgtgtcgacataagtgatatggatggatcttttttttaccaaactttaatttgatttgtacctctaagttataattttattagctctcttggcacctttttacatcattgtgtgtataatactgtcattgcccactgcacctgactactgccacgaccttttcccttcgatatgatcttcttatatgagtacatggaagagaaggaaactaggagacgtgccacgtactagtgggcgccaccaacataaacatgcggtatctggtaaccaatctcgatgtgtacgttaacaacgacctcgcaaccttcagatagctacgtaatttaaaccgggcatcatatgatgcatgctgcagtaaacattacgtatgccacatgtcatctccgacccggaagatattatacatgctaagtttgtttatgccattatcgatccattctagctagagagacgggcgtggggatgcatgcagtttagtagtcctgtcctgtcctgtgtcctgtagtggtaggcaggtaggcaggtaggtaaggtggtgcccaacttctgagaaattgtggttacatcgccgtagtacacgtcctagacggaaagatattataagcagaaacaagatgcatgttcgagcaggagctaattggctcatgcgcatgccttcccttgtcatcgagagagttcgctctcgccggccgtgcaac

SEQ ID NO: 22117 - DNA, 1032 bp, Setaria italica
  Peptide Sequence Number=SeqID_88091
ttccaaatattcctctctttcctacaagtttctgaagctatcaatgtctctacaagttacagcaccaaacaatgcaaaattccatgatttcttatttcagttgatgaaaagagtatctccttctgtacaagataattatttatttcacctcaatttatcatttgcttgccgtaaaaaacatttgcagaaatctaccttatctgatcctgttgcttctcagaaagacaaactatgctgctatttgtgtgtttttttcttttccttgtacaccagactgaagctgaaggtgagagctccgatgctcaagcctggagatcacccttctcctctggctcgagctctctgagctcgtcagcttcactcctcttgcagctccggtagaacatgcagctgacgatgatctcgagcacgacgcagatcgcgtggatgtaggcgatggagaatgcctcgccggcgacccccggcgcgagcctcccggcgctccggcgctgcgcgacaacgcggagcccgaacagcgcctcggccgccgccatcccgaggttggtcggtagcgccagcgccagcgccgtcgacacccggcccctgatcgccacgcacgccctgagcacggcggcgtgccccgcgcacccgggctccgtcgcggccacgatgacggcgaggttgcagaccacggtggcgacgccgatggcgagggagtagacgatggcgcccgcggcggagagcgcgagcgtccagaagtgggaggtgaggccgagcaggtcggcggcgccgaaggcgaggaggagcagcgagaacacggcggcgttggcggagagcatgaggaaggcgttgaggaggtgcgtggcggcgacggccgggtacgcgcggacgacggcgccacacggcgggagcgcggaggcgagccttcgttgctgccgccggggcggcgcgacgccgccgtcgtcccggtcccggagcatggcggcgacgcaggccttggcgagcagcaggaacgtgagcgcgaacggcagcgtggccgcgaacgtgaagacg

SEQ ID NO: 22118 - DNA, 792 bp, Setaria italica
  misc_feature (745)..(792): n is a, c, g, or t
  Peptide Sequence Number=SeqID_88092
tatctggttttttaagttagtaagggcgacaagaagtaagcctttctggctttgtctagtaatatatgttctctggctcatcgaaatgccatggttttggggttgcgcaacatctgaagatggagaaattgctcaaatgtacttatctggatggagcatgccatttcatgacgggggcttcacaggcaacaaactgagcaacccagatgtgcttgtcatcacactaccattcctatatctggtgcttgtccctgtaatagtccttatatatggcctgtttgcagaaaaggctattgcgtatttgcggcgcagcagaagaatagaatactctgctgactcagcaaatatgcatactgagtcggcatgcttgctgccagttgccccaagggctttactaatgtccgacaatatggtgtccatgatgatccagttttgtggtagctggacaaggagggctcttctacttgcatgcttgatcactgcagcaatacatttgaagctttgttcaaagctaatgtcagcttatggaatggtaccagtagccttgtctcccccgttaacatggatgccactgttattattaggtgttgctgcctattgtacaaagttacatgcagattaacacccagcactttgcattcctgaagtgaacttatttgcgtttggaatacttgctgctgctgtatgctaaatcctggtacgcgtttccctttaatggttactgtatgggtgctagtttaacccnnnnnnnnnnnnnnnnnnnnnnnnnnnnnnnnnnnnnnnnnnnnnnnn

SEQ ID NO: 22119 - DNA, 1658 bp, Setaria italica
  misc_feature (1)..(20): n is a, c, g, or t
  Peptide Sequence Number=SeqID_88093
nnnnnnnnnnnnnnnnnnnngtactcgaagcaaaattcctacgctgatatataaccacagaatgagtgtgtacaagcagattttgccgaggcacgaaggtctcagcattcatcaatagggaaaggaacatcggagcaactaaccatagctccaagcacactatattaacggattctggtgtagatcaaatgtgttctttgattctttctgatgtcaggcaatttgacagccttgttcaaactgaccgcctatgtagcagctacttgcaaaacacttacctttggcttgttagaattaactgtttctgaatcgcctggtttgttagaatcaactgtctgtgaatcgcctgcagaatctgaacttggcttgcttgcagaatttgtggctgatgatgtcctgggtttcctctcagaggtgccaaatgcttccaaagcgtccaggaagaactttttattcggaacgatcccctgcttattcattctcttaagcaacttctgcacaagtaccgtatcgtttgccttggtgtaggccttgtagagcagcttgtatgtggaaccactgggcacaatacctttctgaagtgcagtatccaacagccgatctgcttccgagtgcaaaccgttcatgcagtaggcatcaagcattgcgttcaatgatgacaggtgcactttgttttgtgaggtcacaagctcatcaaatatctgccgggcccttgaaacacaatcgcaatgtgcgtacatcatgatgaggcattcctgcgtcacatagtttggtttgaatcccatttcctccatcttctcaagcacagattccgctttctctctgagccttgctttcccgtaattcgttatcatggaattaaacgttgggtgggtaggcctctcctttgatcgcagtaggctcttgaacacctgctccattttgtcgaatgtctgctttcgtccatatgaatctatgagtatattgaatgtgatcacatctggacggcattgcttgcttttcatacgctgcaacacagattccatgtcttttatcatgccattcttcccatatgcatcaatcactccattataagtgtatatatcaggagagactatactttcatccagatccttgaacaagatgtctacctgcttcgtgtcaccagcctgagcaaaagctcttaaaaggatgttgtatgtcacaatcgttggttggcatctctctatagatttcatcttctcaaaatagccaagagctttcgccaaagccttactcttgtctcgtgaatgaaggtgcgcaccgataagagagttatacacagaagtgtcaggtttgcacccgctgttccgcatctgagagaacagccacattgccatacgtatctggcctttccttcccattacagatatcaacttggagtagatgccattgtcagcaacataccacctttgtttctgcatccatctgaaaacctcgagacactggagccagccgtcgcggcggccgagctcctcgaagaggaggaagcagtgctcggtgcggaccacccgcacgtgccggtccagcaccggcaccagccgctccttgccacctcccgtcctccgcagcagcgagcgcaccagctccgccgcctcagccgcctcgtccaccccttccgccgccgcggcgcccgcgcc

SEQ ID NO: 22120 - DNA, 803 bp, Setaria italica
  Peptide Sequence Number=SeqID_88094
ccacttctcatcttgcaactatatttgtgcatgctacactagtatctgcaactgtagccagatacatctttttcattcagtgcagttctaaactcctaataatagtcagacgtggcttagcataatatttctaacttctctgcaaaactgaagcttatgttaatcacagacttagcgctgaattttcttaggtgaccaattcggtttcctgaattcctgacagaagttttaacttgaagaactctgcacatgtgacgatatactgatacagtttcattttacagtatgtaaatgctgataaacagaagcagcatgaatttgaagccatgaagactaacagacgcaaagagaatttctcatgtccaactgaggcaggcacaggagtatcagcagtcaatgatccaccaaagaagggattgttgcagtgcacaacagccacaagaaatacaagatcgagtgagcatacagaggagaacaagagccatcaagagctgcaatgttcgtcaagatgcgaaacgacagaagatgttgctcaggatatgctaaacctgtttctcggtcctctatggagtaagcctgcaggcttttcaaaaaattctgagcctgtagaatcaataactaggaatacgaataatcatatgccagaggagacagactggcatagcgaagtgcaaacgcagggggaaccagtgaagaaatccatgctgactgcaactataaatcatgtgccaaagaagaaaggctgttgtagcgaagtgccaccacaggggggaaccaatgaagaaatcaatgctgactgcgac

SEQ ID NO: 22121 - DNA, 808 bp, Setaria italica
  misc_feature (1)..(21): n is a, c, g, or t
  misc_feature (706)..(706): n is a, c, g, or t
  Peptide Sequence Number=SeqID_88095
nnnnnnnnnnnnnnnnnnnnntgctcaattacatagggaatttcttggtggatgtgatgcagcatcttctcccgcacaacctccaaagatatggttttcattacttcttcagtcattacagttggttcttcatcccatggtcttcttacagcctgttccatcaaatactgcacaaggtctttcactcccttgccttttagtccagacaccatgaagtacctttcatatccaggaagatcttcaaattcttttgcaactttaaggaggtcctttttgtcttccaccaggtcaaccttattcatgcataatatacgcctctggtttgggtttacctctgtacccaaacgtttgattaactttataacacgtgaatcaggcatattaagatgcctactgacatcaaacatgactattagtacatcatagaggttaattgagctccaggcactctccacacgaactgtaacatccctataaggaaatccatggtgccctaacatgagccctggggtgtcaaaaaagcatatctgtgtgttccctttagtcagcactcccaaaatttcatgagttgtagtatttgtcttgcgagaaactgcagctacttttgtcccaaccacggtattggtgagcgaggacttgccggcgttgggcgcgccaacgatgccgacggagagcgacatctggtcctcctcctgacctccccggngtcctcgtcctcgtcgggcggctccattgcggcgtcgagcagcgcgagcgcgacgtcccgcgaccgctcctcgtcctcctcgtccacgacccgccccgccca

SEQ ID NO: 22122 - DNA, 473 bp, Setaria italica
  Peptide Sequence Number=SeqID_88096
ctggtccgtgagcagcgggaagcacagcatgggcacgcccgcccacacgctctccaggatggagttccagccgcagtgcgtcaggaacccgcccacggcggcgtgggacagcacctccacctggcagcaccacggcaccaccacgccgcgccccgccgccgccgccgcgaacccctcgggaagcgggtccgggtcgtcggagctcaccacgtccgggcgcagcacccacaggaaccgggcgccgctggccagcacgcccgcggcgatctcgtggagctcccgccgcgtcacgtgcgcgtagctgccgaaggagatgtagagcacggaccccggcggctgcgcgtccagccaccgggagcagtcggactcggcccacatggacgtggccacggcgctgcgcgcgaaccccgccgggaggacggggcccacggcgtagaagggcttctcggcgcgcagagccgcgatggtcgacg

SEQ ID NO: 22123 - DNA, 266 bp, Setaria italica
  Peptide Sequence Number=SeqID_88097
aataaataaaaactgtactatggaggatctgaagatgcatactcacacacttgtctaattcagttttctctggccaaataagtactgaagttagcacaatcccgtttttaattagctctgtatttcataactaggatatgtaaacagttttggtagaaacaacatgttgcttttcaccaaaatatagccggtattaagatgggttctacttggggcctacgtgactgttgagctaaaagctggcttgtgactagcactacattgta

SEQ ID NO: 22124 - DNA, 412 bp, Setaria italica
  Peptide Sequence Number=SeqID_88098
ctgtaagacctttcacttctccatgggacagctcatctgacttcaagctcccacatgccaaggaaataagagagctatcaacaaaagttggggcaataactggacaagttcatttcgataaatctcacctgtccaatgccattccaacactcagccatggcaaagatgagctgttgccaatgaaaggtccggacacatcagtaactgcttcaaaattcgatggagcaccggatctccagcgtgctctctctcttctgtcagctggcccttgtggattgccggatcctgtaccgcaagcatcttgccttatccagttcactggtgccagtgagaacaacggtgaccttcatttatcacatggagggaactctggtccagcttcatgtactgatgaacagcatatagcacctca

SEQ ID NO: 22125 - DNA, 787 bp, Setaria italica
  Peptide Sequence Number=SeqID_88099
ctaaagcattctaattttctttgttgtcccgatttcactcagagatgaacatggtgagaactattgaatggaaggtccggacacatcagtaactgcttcaaaattcgatggagcaccggatctccagcgtgctctctctcttctgtcagctggcccttgtggattgccggatcctgtaccgcaagcatcttgccttatccagttcactggtgccagtgagaacaacggtgaccttcatttatcacatggagggaactctggtccagcttcatgtactgatgaacagcatatagcacctcagcctcagctggttcgttttaccatggacactagtagcaatgtctatgagcccactttctttggtctaaaccaaataaattaaagcgtgaaagatgcacgctacttatcatttgataaattgccacaaagatggcctgggatcttgcaaggagttcttcaatcaactgccggagatcaagatctctctgttaatgttatctacatatttattctccctgaactaagttgaactgagcgtaggccagcttgtgttgaatatgcagttccaacctgtgattgacccatttttttctgttcctttttgcccccttgatgtgactactttggaacttaagtgtgatattgtaattttaaacttgtataatcctactgtcaactgctggatatctttgaagctgtccttggagaatctggacatgtattttcgtgtgtatagtttctacaacattttctcttaaaaaactagctgttgattcgaaaaaaaaaa

SEQ ID NO: 22126 - DNA, 988 bp, Setaria italica
  Peptide Sequence Number=SeqID_88100
cgcgccggcgcggcgcggcgggagggagcgggaggcgaagcgtgccaagggcgaggagggcgggggagcggaggtgaggtgccaggtcgaggggtgcggcctggagctcggcacggccaaggagtaccaccggaagcaccgcgtctgcgaggcccacaccaagtgcccccgcgtcgtcgtcgccggccaggagcgccgcttctgccagcagtgcagccggttccatgcgctgtcagagtttgatcagaagaagaggagctgcaggaggcgtctgtctgatcacaatgcccgccggcggaagcctcagccagatgcgtatgcctttgcctctgcaaggctgccttcatcattgtttgatgataggcggcaaataagttttgtctggaataaagctcctcttagccatgtaagacctttcacttctccatgggacagctcatctgacttcaagctcccacatgccaaggaaataagagagctatcaacaaaagttggggcaataactggacaagttcatttcgataaatctcacctgtccaatgccattccaacactcagccatggcaaagatgagctgttgccaatgaaaggtttgattttccagacgttattcctacctaaggcagaaatgtgttcatcaatgaagaagctgctgcttgctttgttaagtggttcaccacattagtttagaaaaagatataaaaaaatctctggcttagtgggaccttacttaaaacatataggacaattgacacataaaaggaactttttggctgttccctcctcactgctaaatcttgcagagattgactgattttttgttgcagaagtttgtaaattaaaagtcaatacatttgtagctgtttgcctgtttgtaggatttagcctatctagaacgcatggtgaaataaagaatgcgcaacgccttgccataactctattcttactgggctattggatgtcttattattgattacagtattattta

SEQ ID NO: 22127 - DNA, 415 bp, Setaria italica
  Peptide Sequence Number=SeqID_88101
acatgctgacgggccccaatccctgacctcagtggctcctccaacctatccatcattcatctcgagaacaatcaactgaccggaaatgttccttcatacttgggcagcttgccaaaactgagcgagctgtaccttcaaaacaacaagctgtctggatccgttcccagggctctgctaagtcgaagcattattttcaactactccgggaacatgtatcttggaatagccaagcaagagaagaagcatgtaatcatcattatatctgctctgcttggagcatccttgttgcttgcagccgccctatgttgctacatgctgacacgcaaaaccatcaagaagactcctcgccggaaggaccagatgacgacgattttacaaggaaaacaaggccctgcctgcacagaagaatttgcag

SEQ ID NO: 22128 - DNA, 496 bp, Setaria italica
  Peptide Sequence Number=SeqID_88102
cgtcggcgccgcgcttgccgatgaagtgggcgttgatgtggaggtcccggtcggagacgacgcagaagtcggcgtccctccggccgtggaagtagaaggcgttgccgtcgccgccgatgaaccgcgggtcgccgcaggcccccggaacgctgcacacgcagacggatttgcaggagttgcagtcggcgtagcacgactgggaacactcggcggggcactccatgggtttaccatagcagtaagggtagagcttgcggtccttgcacttgaccttcatcggcttcggcttgggcttctcgttccgcggtggctgcgggtctttcggcccctgggccttgggtggcctggcggcaggcgtggcggcgtccacggcgacggcgagcaggaggacgacggccgcgagggccaaaggaagcaatgcccccagcctagccatctggactacagaaaagcacactgcactgtggctgtggagctagccgcagtggtgccgaat

SEQ ID NO: 22129 - DNA, 753 bp, Setaria italica
  Peptide Sequence Number=SeqID_88103
tgcggggtcgaataatgggtaggtttggtgaaagagttctctcctttgcctttctgtacttttcctcatctgcatcatcatcaaaattgagtaacttcaagcagttttccttgatcatttcctcaaaggagagcaatgaagcaaacttgctacctgcacagtcatttcctgcaccaggagaaggcactttggaagggaaactgaaggaaggagctttatcagagacagcaagatattttctcctatgactttccatgtcaccttcagtcacagacagcatgttgttatttgaaggatcatcatttgaagtggcagcatgggccttcaattctgaatgcagcaaaccatgtttataggggagacaagcagcaggttctacagactttttggtcctttttctcctcctatcaccaccaagtgttttatctgtaacttctgtacaaccagacaagggcaacttcgatgcttctagaggcaatgatctaccattactatctttaggacaccgctcaggaacaacagaagcctggttatttctgatatctgttgatgaggacacaaaaaggccatccttaccctgagatcggtcgtgtgcagctttctctgggtaactgatatgaagtgtatcctcttgggatagaagagccgaatggaaccatcccagactgcaacccaaaatatggtgcaggaactgaatcattaggaagcaacttttgttcgaagccacgtatctccgggtgctgctccaactct

SEQ ID NO: 22130 - DNA, 252 bp, Setaria italica
  Peptide Sequence Number=SeqID_88104
ctcttccttttgcttgctcgcttccgccaccgcccatcagccaggccgccactgctcagaactcacagcccaagcaactcggcaagcaatcatgtgggtgacttcgatgccgcaggtgtgggacgaggagggggcggccaagggcgccgccgacgcggtcacgcccgcgcccgccgccgccatgctgggctccctcgccgcctggctctcccgcaccatccagccgcagccgccggcgccacgggtgtgcgg

SEQ ID NO: 22131 - DNA, 265 bp, Setaria italica
  Peptide Sequence Number=SeqID_88105
aaggccgaggcgcgtcgggtgcaggatgcccgcggtgaggttgcgccggagcacgccccaggccgggccgtagggtacggtgctgatgctgtggtgccgcccggcggcgtcgaagtctagagggaagggtttggtcgggcggttggagaaggcctcggcatggtcgaagagcatgcgccgggcgacgtccgggtccctgatctcgacggttggctgtaatagggtgtatggagcatgcctagtgcttcgcagtaagatgccgacg

SEQ ID NO: 22132 - DNA, 261 bp, Setaria italica
  Peptide Sequence Number=SeqID_88106
gcggaggaggaagagccccggtggtatgattccggtgaggtggttgtgggagaggtcgagcgcctggaggttgctgagggacgcgagcgccgccgggatggagccctcaagctggttctgccaggcgaagaagacctggagcccggcgaggcggccgagctccggcgggatgaggccggagatctcgttggtgtccacctgcagctggatgagcgaggtggcgttggcgagcgacggcgggagggtgccggtgatgttgtt

SEQ ID NO: 22133 - DNA, 296 bp, Setaria italica
  Peptide Sequence Number=SeqID_88107
tacctgaccaagatctcgcggcggctgcggggcgtgcggctacgcgccggcgccgccgccgaggcgagggggctccgtcgcctccgcaagagccggtcggcgtccgccgcccaggcttgcgtcgcccgcggccgcccgccgcgacgactcgctcgccgagaagcaggacggcatcgccagcgccatcgcgcactgcaaggagtcgctccaccgagcgtccgtctcggagcttgacacgtcgctgctgcggtcgcggagtgaccccgggacgtgacatccacgcgagcaaccagcat

SEQ ID NO: 22134 - DNA, 276 bp, Setaria italica
  Peptide Sequence Number=SeqID_88108
cccggaccccgccgccgcgatgcagtccgccggcgtcgatctctcccacccggacaccgtccccgcgctcctcctcgacccggggctctctggaaactaccccgcggcctcgcgcttcttctcttgggccgcctctgaccccgccgccaaggccgcgctcaactcgcggtccttcaactccatgctccagctcgccgccgcgcacggcgacgccgagcgcttctggtccctcgtcgcctccatgcggtccaggggctacgggatctccaagccccg

SEQ ID NO: 22135 - DNA, 312 bp, Setaria italica
  Peptide Sequence Number=SeqID_88109
cgccggaggtgtcattgagaggccgttcccggttggccacccagcacacggcggtctccgagacggagaaccatatccaaggtacctccgggtggtcactccaggagagaagaaacccagcgtgaagaacccaccgggcgagacgagcgtctcgccgtcggtgatgttgcggccgtggtcgaacatgtcggaaatgcaggcggctggtgttccgagaaggaacagagacagagataggaagacgaggacatggctggccattaagctcgtgatcgacggataggtgtttcctgctcttgatgagcaacaagg

SEQ ID NO: 22136 - DNA, 320 bp, Setaria italica
  Peptide Sequence Number=SeqID_88110
tggttgtggtggtggtcgcaacagaagtacaagagggagtgccgctactactactactactactgcagctgctaaaggcgatcatgttcggaggaggagggggcggcggcgctgctcggtggctaccacctcctgctgtctgctgctcatcctgctccagcggaggcggcatggcgatcgatgtatcctttcgatctgtctccctgttctatgatcacttcacacaatcacacctggtgtaggtgtaggagcttaacaattttggtttgctactctcagtagtcagtagtactactcctacttggttgatcagctgcaag

SEQ ID NO: 22137 - DNA, 579 bp, Setaria italica
  Peptide Sequence Number=SeqID_88111
cgatacgatcgcgtaacaactctttgtggtttctagtaccacgagaacagtgacgcgcaaattatttcgtgatacatcaaataataatagtaactagcaacaaacacttgggcgagggatcaagccagcaaaggcaccacaaatggattaataagctcgcgtgcatcgacccatggcgatcccttgatcagaaattgctcactcagtgggggcaatggtatatggccttgcagccccggttgtacggctgccctggcgccgggcacgaccgtatgcaggccgggcggttgggattcagcgcgcccggtttgatgacgccggccagaacgcggcggtgcagctccaggtccaccgtgagctctggcgccaccccgtcctccagccttgtcgacatcagccgtcgcagcgcggccgcgtctccgaccccaacgccggctgcgaacgtggcgctcatcccgccggcgacgacggggcttgcaagagcgagtaggacgccgacgagcacgagcaaggatgcgtacgccctcctcctatccatgttggcgagagttgcaaactggggatgcgttgggtttgtgc

SEQ ID NO: 22138 - DNA, 718 bp, Setaria italica
  Peptide Sequence Number=SeqID_88112
tgcaggaacattagtggtgtgccctgctagtgttcttaggcagtgggctaatgagttgtctgtgaaggtcacggaaggcgctaaattgtcagttttggtttatcatggaggttcaaggactagagatccaaatgagttggcaaaatatgatgttgttgtcactacatacatgaccgtggcaaatgaagtgcctaaagaaaactctgatgatgagaaatatgacattgaaatgtctggaatttatccggaattttgtgctggcagcaaaagaaaacgactaccaaaaaagcaaagcaaggcaaagaagaaaaataaacctagcaattcagatggtggcccacttgccagggtgaaatggttcagagttgtgcttgatgaagctcaaacaataaaaaattaccggactcaagtgtcaagagcttgttgtggactgatggcagaaaggagatggtgcttatcaggaacacctatacaaaataaaattgatgatctatacagctatttctgtttcttgaaatatgagccatattctaaacttagttcttttaaagataagatcaagtacgaaattactaaagatccagttcgtggatataagaaacttcaagctatcttgaggataattctactgcggcgcacaaaaggtgaaataaagtaactcaaccatatataatatctgtcagcattttgtacttcttagctacaccacgctttaatg

SEQ ID NO: 22139 - DNA, 868 bp, Setaria italica
  Peptide Sequence Number=SeqID_88113
taattttaggcatgaatttccttcttatctcagcccgggccgctttatctccatgataaatgatactagtaacggatggaacaaacctcgagatctcattcacccagttcgagagagtggacaaaggagcgattatcatgtacggaccatgcattcctttccctttcagatgagcaagaaatccaatcgtctggattgtttcccaaggcccatttggtcagccagtatcccgttgagcccattctgccacaatgaaattagccacttcacaccctttatctggtatgacttcaacttcccaccagtcattaaaggcacaagattggcttgctcttttttccacctttcttcttctgagagattacaatcatccgcaaggcgttcttcacgagatcttgtaagcatggctgccactgccgtcttagcttttttatcattgtattgtggcgcagcattagctttccgctttcggccacgtcctttcttcttttcttctgccggtggctcttcagcttgaggttcaacaacttcatcagcaatttggtccattttctcaagtaaaaactctgaaaagagttgcgtcttcgtcagcaactcatctaacttgctataccgtgcctcaggatcaaaagcctgtttcgcagcttcttccctcttcctggcttcctcttcttcctctgacttaacccgtgccccctcaagctgctcttcttcctttttcattgcttctgtgattagggatgcatcaccattcttggcctcgaggtcaataggtacagataaactttcgtccacgaaatcatcaacttcctcctccttcacaggctcctgaagctgctcttcctccttgaccgccttagcaacagga

SEQ ID NO: 22140 - DNA, 179 bp, Setaria italica
  Peptide Sequence Number=SeqID_88114
cctcttcagcgacctcctcggctccgcgctcggtggctccaaatataaatgatgttccacagcaagtccctccctaggcccaaggacacgtcggtggtcgtggtcgtcttggagacaaccgaggtgtacattgtgatcagcttgtcgacgagggccgatactcaggtaatatatgtcga

SEQ ID NO: 22141 - DNA, 286 bp, Setaria italica
  Peptide Sequence Number=SeqID_88115
ggttctgatctctgttatttcaaggcaaatgaagaaacatttagatgtcttttgtcaatgaaatgtccaactatatagctgcagcagtcagctctttttttgtttgtgtaatatgcaattctgaaactgcaacatcaacatttagatgtcttttgtcaatgaaatgtccagctttatagctgcagcagtcagatctatttttgtttgtgtaatatatgcaagtctgaagctgcagcagtcagaacctatgtagcaatgcagcatcaacatatcagcatcagatgtt

SEQ ID NO: 22142 - DNA, 383 bp, Setaria italica
  misc_feature (336)..(336): n is a, c, g, or t
  Peptide Sequence Number=SeqID_88116
ctccctgtctcagcagctattgatccaaacgtgcccgaattcttcttctccccccaaatttttgaaagggggaaaagaaatcgggggcgaaaccctaaccctagaggagcggagaggaggggagtggaggaggcggtcggcgatggcggaggaggcggaggggatggaccggttcgacatggagggggacttcgagggcgggcgattcggccgggacggggagttctactaccggagccggcgggagcgggcgccgcagacccgcgacgacgccatctacggggtgttcgcggagggcgactccgactacgactcggaggacgacgaggggtcccnccgccgcggacgccggaagcgacgcagggacggcggcgggagcccga

SEQ ID NO: 22143 - DNA, 431 bp, Setaria italica
  Peptide Sequence Number=SeqID_88117
cgtccagcagctccgcgtggccgcgacgaacggcgatgaggtggaggtctcccgctgtgcgcatagtgtagatattcgctcctccaattcctcctcctctctctgttcttccactaaaatctaccagcgaggtaatctctggcgacggactgactcccttccaattgggcagcgattaagctccactacacctccctatccatcccttgggtggctgagtcagagccggcgcgagtgctgcgattcagtaaggcgagcgcgatccgggattggggcggtcgatcaagcggccgcgatgacgccgcatccgacggaaccggaggcaggaacacgagcaagaagatgaagatagaggcatctagttagcgcagtgggggacaccggactaccggagctcttagcagcatgtggggaaggagaggaggcgcgga

SEQ ID NO: 22144 - DNA, 294 bp, Setaria italica
  Peptide Sequence Number=SeqID_88118
ggaaaagaagcacctaaaccaaagcaaaagcttgcagcaggctgaggcaaaagcagggagagagaggagaggagagagaggagctagcacagcagttgtagagaagtagagattgcgagtgtgtgcgctggggcaatatgtatataggtccaggatggcatgggtcaaattggatggcttatgggcatcatcaccccagcctttcctgccatgaaagggggaggaagaagctagagggagcagcactggagcgaagtgttgtggtgcactggtgcggccggtgcggtgagttgc

SEQ ID NO: 22145 - DNA, 1796 bp, Setaria italica
  Peptide Sequence Number=SeqID_88119
aatggtgctacaaatattaataagctaaaggctgcaatttcagaaagtgttatggaaatacttatacaaggactatttgtgaacactggttctgaggtggtgaagggagatgatggcaaaagaaatatcctgggcacaccaactgaagcagcattgttggagtttggcttgagcttgcaaggagatctatacgatgagtacaacaagttggcaagagtaagagtagaacctttcaattcagttaagaaaaagatgtctgttttaatacagttacctaacggtggcctccggtccttctgtaaaggcgcatcagaaattattttagagcagtgtgatactgtcttcaatagtgaaggaaatataataccgctatcagaaatacagaagcaaaatgttttagatataatcaattcatttgcttctgaggcattaagaacactttgcatcgcgtttaaggatctgaatgaaatttctgacgatcaaactataccagaggagggctacacactaatagcactttttggtataaaggatccagtccgtcctggtgtcagggatgcagtaatgacctgcatggctgctggtattaaagtaagaatggtgactggagacaacgtcaacactgctaaagctattgccaaggaatgtggaatactaactgaggatggaattgcgatagaaggacgagagcttcacgataagagcacagatgagctgaaggagctcctgcctaaaattcaggtaatggcccgctccttaccaatggacaaatataaattggtaacaagcttaaaaagtatgtatcaagaggtggtagcagttactggtgatggaaccaatgatgcccctgcattgtgtgagtcagacattggtctggccatgggcattgccggcactgaggttgcaaaagagaatgccgatgttataattatggatgacaacttcagtaccattgtaaatgttgctagatggggtcgagcagtttacttgaacattcagaagtttgtgcagttccagcttacggttaatgtagtggctctgatagtgaatttcgtctcagcgtgtatcataggtactgcaccacttactgccgtccagttgctatgggtgaacatgatcatggatacattaggcgccttggccttagccacagagccacctaatgatgaaatgatgaagagaccacctgtgagacggggacatagttttatcactcgggtcatgtggaggaatattcttgggcaagctttatatcagctccttgtacttggtactctcatgtttgctggaaagaggcttcttaacattgaaggcccgcatgctgatagaaccaccaataccctcgtattcaactctttcgtattttgtcaggtcttcaacgaaataaacagtagggaaatggaaaagatcaacgtgttcagagggatattcaaaaactggatatttatcggtgtattatcagccactgtcttattccaagtgatcatagtagagtttcttggcacttttgcaaacaccgtgcctctgagttgggagctctggttgctcagtgcaattcttggctcagttagcatgatcgtcgcggtgattctcaagtgcatccctgtggaatctagggaaacaggcaataagccccatggttacgagttgattcctgaagaaccagaaactgtgtagttgttgcttttcaccctgttgctcccatgttcaccaaccaaatctttggcagtggctggaaacagatgccttgtcaggatttctttcacagtgatttttgttatggtaaccagaagatt

SEQ ID NO: 22146 - DNA, 649 bp, Setaria italica
  Peptide Sequence Number=SeqID_88120
ccgtcgccgacggccattcggtgtggcagttcatgagggcatggtctgccgtagcgcggtcggcgtcgtcccaaagcctcgtgccgccgccgacgttcgaccgggcggcgattcagcacccggaagcggaggagctgacgcgcaggttcttgcgcacgattgcgccggcgctgcctacggccgccgccggcgtcccgccccacgctggagctggcccagcggcgaaggagctttctgatacgccgcgatcagatccactcgttgaagcagcgcgtaatggaacagagcgttgccatcagcgagccgctggaaaaacttccaagcacctatgtcgcggtgtcgtcgttagtgtggacgtccatcgtgcgcgctaaggcgctggaccacggcggcggcggcggcggcgacgacgacgacacctgctacttcctggtgcctgtggactgccggcgccgcctgctaccgggcgtcggcgaaggctacttcgggaactgcctctctctgtcgtttgcgaaggccgccgcgcgtgacctgacgaaacccgacgccgggatggcgcacgcggccgcggccatccgcgacgccgcccgcgagaagctggcgaacccgctgcggggtgccgagcggtgggccgaggtctacgcggggg

SEQ ID NO: 22147 - DNA, 1006 bp, Setaria italica
  Peptide Sequence Number=SeqID_88121
acttttgatagctgcaaaagatagaataccccctgaacaatcccagcaggatccttgtagtgccagactttctctggctccgtgtcacttgacattgttactccagacgacgaaagtgatccagcttcatacatagagctgtttgctatagtgttgttctcaaactttcttccagctccagatccatgtattgtactttgcgagtacaatttttttggatggtggctagaatcagaaactttttgtggatggttttgcatagtgtttggatattttgattttcttcgtgatatggacgtatctgatcttgtccgatttacagaccttccaacagcttttttgtcatccatttcttcggcagattcataatcaggatccatatgggactcaacatgcacttccagaacctcatttatcctgcgagttctttcctcagaattgttgagaagctgcagcttttctacacattctctaagttcttttctgcgccctgtttcacttgcacggtcacgaagatgccccagcctctccttttcgttttcaaaccaatcattcactcttacagactgcaagatcttggctttctcttgaatatcccccacttttagtctgctaattagaccacacttcatgctctgccttaagcgtttgcactcctcctctgtaaaatcctggttagatattgtatccatcttgataatctcctttttgtctaaatttaatatctcaagggcaaaattcgtcatcttcttcccaatgcagtacttttctggaaccttgtgtgtcccaacaacttttactagacgatatatatcttgtttctgaccaacaccagaaatttttatcctcacaaaagcaccacaaattttgtctgagaatgtggcatcatcaattaagtcctccatcaggctgcgccgcatgtaaattaaatttatattatgcatatcaatagctgcataagcctcaagattaacttgtgcttctctatccacctttctatgcatcc

SEQ ID NO: 22148 - DNA, 279 bp, Setaria italica
  Peptide Sequence Number=SeqID_88122
cctccctccaatcctcttcttccttcctgacgcatcttcggctgctgccaaccgtaaaccctagccgccgccgccgccgccgccgccgccgcagatcttcttgagatgggaggcaagtgcccgcaccgcaaggtcaagaagcgccgcctctcgcacaagacggctcgccgtggcaagttcctcctcaaggccgacgatgccgtctacgaggagctcgtcaagctggccgaccacgggaaggacgccgaagccaaggagctcccgtgacgaagacctccc

SEQ ID NO: 22149 - DNA, 1041 bp, Setaria italica
  misc_feature (649)..(665): n is a, c, g, or t
  Peptide Sequence Number=SeqID_88123
cgtagctataacataacatatgttatggttttggctgcagccgtactagcgcctttttactttttaagttttaagggtttggttgtttgagatgggaggcaagtgcccgcaccgcaaggtcaagaagcgccgcctctcgcacaagacggctcgccgtggcaagttcctcctcaaggccgacgatgccgtctacgaggagctcgtcaagctggccgaccacgggaaggacgccgaagccaaggagctccccgtcgacgaagacctccccggcatgggacagttctactgcctccactgcgaccgttactttgcaagcgagagcgtgaaggatgagcactaccgctcaaagcgccacaagaaaagggtgaaggtaatgtctgggccggccccacacacgcaacttgacgcggaccttgctgctggaatgggaatgcctgacaatggcctgaagctcatgtccatgtgaaggaacaagggacctcttgttagtagttgttccatgtttttcttgctgtcatacatctgaagtttgcttggctcagtagctaatggagttcaggggtcaatgcctgtatcatgaatcagttacctatcaacgttggtgatgataatgtcttgtaccaaccggctgcacattgtgtgtttctgnnnnnnnnnnnnnnnnntgattctttttgcttcttctttatgatgttgtaaccagtattcagagatggtacagatgcaaatgttgcttgaacacatgctagccttgcataggctacccaattaaacgaaagcatttgatttatgctgccagtgtgatggacaaacttgtgagttatgcttgttagatgtgatgttgaaggatcaattagtttgaattgctaggtcagggcaatgcaatcaatctgttagaacactgtaatacaactagctgcatttaaaccagttatttagagttgagacttttctgtttgttggtgtacatttcatggtagctaaataagtcttgggtcctgtgataatgacctaagattgtcagtatgatatctttccact

SEQ ID NO: 22150 - DNA, 386 bp, Setaria italica
  Peptide Sequence Number=SeqID_88124
ggccgcgaaccgcgccgcccacagcgtccggttgcgcgcgtagaggtcgacaagcgccgccgtgtcgttctggctgagcagcgtcacgtccgacgtgaagagcacctcccgcgtctgcacgttcctgtagtactggttgtccagcaggagctccgtcctcgggtccaggtccaccaccctgtcccggcggcccgtcgccgcggggcaccgcttcctgaggcgcgcgccgtaggtggcattcatatcctccgcgatccgcgggtagagccggaaggagaaggcggagcagtgggagcggccgaaggagtgcgcgccggagagcgcgaccatgtcgtcggcggtgaggttcttggcggcgaaggagccgacgaggttggtgacgttgg

SEQ ID NO: 22151 - DNA, 710 bp, Setaria italica
  misc_feature (689)..(689): n is a, c, g, or t
  misc_feature (702)..(702): n is a, c, g, or t
  misc_feature (708)..(708): n is a, c, g, or t
  Peptide Sequence Number=SeqID_88125
agtggaatcagactactaaagccactgatattactgaaagttctaagcctgaaagtattggcacaaaactaagcattatagttgcgacagatgcttgcttgccactagcagcgatggcagaggcaccccttatggctcgtgtgctgatgaactatgagcttcccacaaagaaggaagcttacttaagacgcatgtcaacatgcttggcagcagatggaattgtaattaacatggttgttggtggtgaggtggctacactcaaggctttagaagaaaccagtggtctgctcattgctgagatgccaatacatgtttcagagatattatgacagtctcaactctataacttttcagatgttactattttatttccacactaactacttggggtttacttctgttaattagattttttttaaattcattttcatgatacagcttgttcctaagattagatccctgaggaattagaataatctttactgcttcttttttttcctgagaaatgaaagaattgtagtcgtggttgaacatccagtgacatgattagtttactccgcgcatcatttctatgttgatgcatataagtttaagtgctaagagcgcaagaattttcagacaaagacaagcatgggatcctttttgtggtcaatagaaaatattttcactgaaaaaaaaaaaaaaaaaanaaaaaaaaaaaanaaaaanga

SEQ ID NO: 22152 - DNA, 1172 bp, Setaria italica
  Peptide Sequence Number=SeqID_88126
ccattgacgaggcataacccccgccgatttggttacacgctgtatatcactctagtcatggaacgcacactagttgtacgcactttcgccggtgggcgggagagctagcacacatgtataacacactttgcctcctccatttcccacgcgccccaagtgcgcgcgcgcgcacacacacaaggacacacacacgttactgaaaaatcgccaaacccattgcaaaatgaaaatttgcaataatcacacggtacggtaccaaaataaaatcaacaaccgaacccaccaagctgattagtactggacgtaggagcggtagtcggtgttgggcctccagttggccgggatgacgttgtaggcgacgagcgtcctgcgtgactcgccgcggatgcgcagggaaaagggcgcgcgcagcgggtggttggagtcgaggcgccagacggagccccaggagcggcgcatcggcgtccagtagcgggagccggactcgaggaggtccatctgcgacacggtgccttccttgttggcgtactggaccagcacggcgaggtacacggggttggacccctgctccacgtggaagttgatggtcaggccccggttgtcgcaggacacccgccggaactcgatgtcgatgatgccggcgtgccggagcaggtcgttcaggcccggccgcgccagcgcgccgaacgcagtgccgctcaggtcgaagtggtacttggccaccgggtagtagttcatgtccgtgatcatcaccgtcttgggctggccggagcaggcggggttgttcttgttggtgcactttatctggtagcatgctccgcagccctggccgtccttgaacaggggctggttgccgcacgacgtcatggacatgaacgggtactggttcgtgtgcttgaacccgcacgcgccaccgttgtcgtcggggccggcgccgttgggcgcgccgtaccatgtggccttggccgggagccagcctccggagccgcggagttggcgggcggcggaggaggtgtggttcaactccgggtgtgctcggacgccatgggcgacaagcacggcgaggagggcgacgacgagtgcagctgcccgggcggccatctatctcagcttgtaagccaagaagaaccttctgtctgtgtacttgttggcttatgtgttgtagtttggtg

SEQ ID NO: 22153 - DNA, 409 bp, Setaria italica
  Peptide Sequence Number=SeqID_88127
ccgacatgccgcggcaccacgccgtcgtcgccgtcaagaagctgtggcgcgcggccgggtgccccgaggaggcctccacggccgaagggcggcaggacgtagaggccggcggcgagttcgccgccgaggtgaagctcctcgggcggctccggcaccgcaacgtggtgcgcatgctgggctacgtgagcaacaacctggacaccatggtgctgtacgagtacatggtgaacggcagcctgtgggaagcgctgcacgggcgggggaagggtaagatgctggtggactgggtgtcgcggtacaacgtcgcggcgggcgtcgccgccgggctcgcgtacctccaccacgactgccggccgccggtcatccaccgcgacgtcaagtccagcaacgtcctcctcgacaccaacat

SEQ ID NO: 22154 - DNA, 970 bp, Setaria italica
  Peptide Sequence Number=SeqID_88128
ttgcttttgctcttgcgtgcttgctgatatcgatttggcctagtctttcttgatcttcttcagtgccactgcacccaccggccaccacatcccccattgacgcaccgtcgccgctgcatcaatcatggaattcgcatgagacaccaggaactgaacccgcaaggttggtcttggttaactagcgtcaaggaggcgaacgtggtcgccgtgaagatgctctggcgcccggctccgacggacggcggcgcggtggggaactagctgacagcccaagtgctgaaggaggtggggctcctgggcggctccggcaccggaacgtcgtgcggctgctgggttacctccacaacgacagcgacgcgatgatgctgtacgagttcatgcccaacggcagcctgtgggaggcgctgcacggcccgccggagaagcgggcgctggcggactgggtgtcgcggtacgacgtcgccgccggcgtggcgcaggggctcgcctacctccaccacgactgccacccgccggtgatccaccgcgacgtcaagtccagcaacgtcctcctcgacaccaacatggacgccaagatcgccgacttcggcctcgcccgcgtcatggcgcgcgcccacgagaccgtgtccgtcgtcgccggttcgtacggctacatcgcgccagagtacgggtacacgctgaaggtggaccagaagagcgacatctacagcttcggggtggtcctgatggagctcctcacggggcggcggccgatcgagccggagtacggcgacagcacggacatcgtcgggtggatcagggagcggctgcgcagcaacagcggcgtggaggacctgctcgacgccggcgtcggcggccgcgtcgaccacgtccgggaagagatgctgctggtgctgcgcatcgcggtgctgtgcacggccaagtcccccaaggaccggcccacgatgagggacgtggtgaccatgctcgg

SEQ ID NO: 22155 - DNA, 539 bp, Setaria italica
  Peptide Sequence Number=SeqID_88129
ctggagatcaatcctcacagtttgacactgcacacaaattaaagcccattccctatatatgactaactaataacagaataaaattttagtatatgtaattgacatgcactaagtgcatagcaaaatacacgacctgaaacagaaacgagacatattacaaagatgaagagaaaaggaaaccaaaaatcaaatgatcgtagataccctaagtcatgatcatcccatatccccatagctactactcctcgccgcctctaaaaattcagatcgtaccacatcatcggagtgcccccctactacatcacgatcaggcttcgtccccgttgctgatcacctctgccctggcgttgttccattgcttgttcccggggctccacttggggcacttggggctgaagtacctgccctgcaccctcgcgtcgagcagctcgaccaccgggccggggcgcacacaccgcggcgccttgtactggttgatggacgcgccgcggctgatggcgtagtccatgagcttgtcgaaggtgccctacggaaagaaa

SEQ ID NO: 22156 - DNA, 741 bp, Setaria italica
  Peptide Sequence Number=SeqID_88130
acggcttagattagccggctaaatcctcaatcaggcgaccgctactccgccattgccgtcggctttcgtggcgccggcggcgagggcggcggcgttgccgctccactgctggccgccgccggggctccacttggggcacttggggctcaggtacctggcctgcacccggccgtcgaggagctccaccagtgggcccgggcgcacgcaccggggcgccttgtactggttgatggacgcgccgtgggcgagcgcgtagtccatgagcttgtcgaacgtgccctcggagacgacgcgtatctcgagtgggccgatggacctgtcgcaggcccggcactgccggtacacgctgttgagtgcctcctccaccgacaggcagcagtcctcgaacacggacgccggcacggccgtggtgcccgcgcgcagctcccagaagagcacgtagtggcccgggatggccgccgcgtccgcgtagctcgtgtactccaccagcgatgctccgaacggcgccaggtgctgcaccgcgccgctcacggccgcatgcagctccgtctcgtcggtcttgtcggagtcgatgctcagcgccacgttctgccgcctcacgaagctgaacatcggcgcctcgttcttgaatcccgccactctcagcacgtcgcccacgcgataccgacacaacccggagttggtgttgatcacgagctcgtactcgtgcccaagcttcacatcgacgaggtcgaccaggtc

SEQ ID NO: 22157 - DNA, 115 bp, Setaria italica
  Peptide Sequence Number=SeqID_88131
tagcatatggacttgctatgacacctcctggccacccaatacgggtaatgaaaatttacgttcctgcttggactgccataccgtattcaaagtgatatctaaaattgttcaacgg

SEQ ID NO: 22158 - DNA, 685 bp, Setaria italica
  Peptide Sequence Number=SeqID_88132
tacacgtaacctaccatcactcatctaatcgcttactactagttagctactaccttcggtccaatccctacttgggcgccggcgatgtgtctgccattcatctgcggtggcggcggtgaccgcgagcacgggtcacccgttcacccaggcatccagcatcctcctccgccgccgcctcgttctccatcaccaccacctaggtacgacacgacgtcccccttccaagaaacatacgatcaccgctcaccaggcatggctgccggtggcgaggccaactcgccacgatatgtggcgggagtgaacaagaatgcagagcgcatcacagccttcgacaactcaaggcaagctcctcgtcagcgtgaggatgtctctgctagtcctcggttccatgggtcggtggcagcatcgcatccaaaggagtccggtgataagatgtgggcgcctccggtggcacagatgggtcgtcgtggcggagaagacgactaccctactgctgccggcaccacaccgacgccggcagcaaacaacttctatggcgatcgtgatcatgcttttggcaacaatcgcatgccgcaaggcaagtctttgtggtacggtgaagctgggagacgtccatagatctggggtatgtaatgaacaatcacgaggattatttctctatcatctccagcgaatgtaagtagaa

SEQ ID NO: 22159 - DNA, 235 bp, Setaria italica
  Peptide Sequence Number=SeqID_88133
gtggggaattagcatccgcgtcatgcgattcgatgcgacgctgcctgtgtgttgaagtgatcaagctagacgtacgtgtgtgaaatgggtgggtggatcaacctcagaaggcggtgcagtttgtgggcaagccggtgatgttatcgacggcgacgagctccttggtggcgcaggtgaggacgtcctgcccgagcttggcgcctgcggacttgagccccttgagcgacacggcctg

SEQ ID NO: 22160 - DNA, 466 bp, Setaria italica
  Peptide Sequence Number=SeqID_88134
agcgaacaagcaactgagctgcacctgcttcctgtcctctccaccgaacaacatccagcaaccagctccaaaccacagcaccacctgcatatctctctcgatctccttcatgcggaccagctagctccaccaatacagcgcctcctgcaattccttctgttcttttctctaccgcaaaaggaagcaagcagcaacatcggcaccacctcccagctcccagtctccacgattcatgcaatcatgccacacacaaatctccaaggctgtgcttggcattgaattggtttcaataccaaatcagtcatggtattgcattggttcacaattcgaattgtattgttggatgactatgcattaccttttggaatccttggaagcatttcaattcgattcctgtttggatgtgcaaaagcgtgaaatcgaaatttatcggtgagtcaaggagctcctgccgccgcccaaatct

SEQ ID NO: 22161 - DNA, 334 bp, Setaria italica
  Peptide Sequence Number=SeqID_88135
tgtgcgcaagatgaggaggagcacaatgaaccaaacaagtatgagctagaggaagcaacatcagcatctgcaggtgaacaggaagtctgatggatcactgaagcaagcatgtgggtcaaaaccacttaaagagcgattcccaagtttgtataatattacttactatcctcgcacgactgtggctaacgttatgaatcaaatgtcactgaatatttcctttcaaagggtgttaattggggataaattggtggcttggaataacatggtggctaagtagctgactactagctaactactgagagagacaggttccgtacttgggtaggctacataa

SEQ ID NO: 22162 - DNA, 390 bp, Setaria italica
  Peptide Sequence Number=SeqID_88136
tagaaacaagtagactaaaagactagggtttaaacaattaaaggactactagttaccttaaagaattagacggctgcacttcctgggatggagaccctctcatcagcgaagcaggaagacatggttgatgtgaacttgaggtccggcaatgcaaactcgtcccagtctcaggctcaggctgggggatgcagttgttagttgcagcccttacacttgctgctcatgatcttgagaccctgagcagcagttgttagttgcagcccctgacacttgctgctcatgatcttgagaccctgagcgttggaacgcgttatctctgctgtttctctcaggaaggagagttgattctctcgccagtgaatctcaccatagtccttacccggtgaacgg

SEQ ID NO: 22163 - DNA, 380 bp, Setaria italica
  Peptide Sequence Number=SeqID_88137
taaaaagaaaaggaaaacgaaaggaaaggaacggaaagaaataaggaactacccgtagtacggacgactacgaccaaagtaacaagactcgtgttccttggggatcagtccgtcggcaagaccagcatcatcacccgcttcatgtacgacaagttcgacaacacataccaggctacaattggtattgatttcctgtcgaagacaatgtaccttgaagatagaaccgtgaggctccaactctgggatacagctggtcaagaaagattcaggagtttaattccaagctatatcagagactcctcagttgctgtcattgtattcgatgttgcaagcagcttctctctctctttctatccgctgatcataaatccacaaagatg

SEQ ID NO: 22164 - DNA, 1355 bp, Setaria italica
  misc_feature (1349)..(1355): n is a, c, g, or t
  Peptide Sequence Number=SeqID_88138
agggagaagaggaggaggaagaggacgaggaggcggagatcggatccggcgaacgctaataaaacaaatacaccaatctcggaggcaacgaccagacgcgcaaggcgaagggaggggggagcgcaacactcgcgagggagagagagacaagggggcggacgcacacacgccgaccgcgcgagcgagcgagagagatccccctctcccccgccggatccgatctgacccgacctgacctcgccgccacctgccgtgggagggagaagaggaggaggaagaggacgaggaggcggagatggctcccgtgtcggcgctcgccaagtacaagctcgtgttccttggggatcagtccgtcggcaagaccagcatcatcacccgcttcatgtacgacaagttcgacaacacataccaggctacaattggtattgatttcctgtcgaagacaatgtaccttgaagatagaaccgtgaggctccaactctgggatacagctggtcaagaaagattcaggagtttaattccaagctatatcagagactcctcagttgctgtcattgtattcgatgttgcaagcaggcagtctttcttaaatacatcaaagtggatagaggaagttcgcacagagaggggcagtgatgtcatcattgtgcttgttgggaacaaaactgaccttgttgacaaaaggcaagtctcgatagaggaaggggaaggcaaggcaaaggaccttggtgtgatgtttattgaaaccagtgctaaagctgggtttaacattaaggctctgttccgtaagattgcggctgcacttcctgggatggagaccctctcatcagcgaagcaggaagacatggttgatgtgaacttgaggtccggcaatgcaaactcgtcccagtctcaggctcaggctgggggatgcagttgttagttgcagcccctgacacttgctgctcatgatcttgagaccctgagcgttggaacgcgttatctctgctgtttctctcaggaaggagagttgattctctcgccagtgaatctcaccatagtccttacccggtgaacggaccatttgcgttggaacgatacgttttatgagttttctagtgttatttcctcagtggcctaagctagcaacagtgtatagatgggaccattcgagttgttgggtattagagctagtgattggttcatgttgcacttatatatttttcatctgtcttgttgcagttagcttgagtcctgttttcctatgtgtaccaaacatgtattggaatttttgtaagctataataagttctgcacggcaatagccaaatgatatcccagatatttgaccgtcgcaaaaaaaaaaaaaannnnnnn

SEQ ID NO: 22165 - DNA, 254 bp, Setaria italica
  Peptide Sequence Number=SeqID_88139
tgtgtggcctgaaagaaaatacacgtaggtacggtataagatcacagtaagtggtggggagacgataagaaaatgttaccaattgacgtgggccccgcattttgggttacgtgtagaatgagaaccttggagttcttggatagtttcagaaaagcactactagcccactgcagtgccgcaaggccttcaacggagtagtcttcgttgaaaataacaaccccatgtcgtttcgccatatctatcgtggaaacgac

SEQ ID NO: 22166 - DNA, 1136 bp, Setaria italica
  misc_feature (1)..(69): n is a, c, g, or t
  Peptide Sequence Number=SeqID_88140
nnnnnnnnnnnnnnnnnnnnnnnnnnnnnnnnnnnnnnnnnnnnnnnnnnnnnnnnnnnnnnnnnnnnnttttttttgacgtaaacgtacaatcaccactgacatgtatatagcaattaaatgaatgctacagccgaaagctctgaggctggagcacgataaagcagcactgggcacactgctgacatagcactcgacgactgagctaaataggccggcctggacaccggcctgcggacacaattaaggaagcagaaagcacacaacaagcattcgatcagaccacgaaacacggagctgcagacttattcttggacgaatggaatagtcgagagtgcgattcagcacagctgcgatgcgtttgatcccttcacttactactttctaccgcttgtcggcagcagcttctttccattctttttttacccttcgtgctactatcagccacggaggtgcttgaggaaggctccattgtccgagggacggtagggagatgagtcccgcccggcggcctagatcggccactgccccccacgggagcatcctcgggcggaggagcatccgcggccgcgggatcagccgtagatccgccactgccccccacgggagcatcctgatcgggtggaggagcaaccgcggccgcgggatcaacctttgtgagcacgacacagcattcggagatcagccgcagcagatcaatatgggtcgaccatgctcctccgaggacgagcgtgtcgagatggagttcttcgatggcgctttccagaatgtcctgaatattgcttccttcgcaggttctgccgacgacaacctcgtcattaaattgatttaggtagccatcgaacgtatcagccctgttcccgtcatgctcattagtatgttcggacagatctaacaggtcagccttgctcagatctttctgaccaattgacgtgggccccgcattttgggttacgtgtagaatgagaaccttggagttcttggatagtttcagaaaagcactactagcccactgcagtgccgcaaggccttcaacggagtagtcttcgttgaaaataacaaccccatgtcgtttcgccatatctatcgtggaaacgaccactcccaatctgaacggtcaaggaaatacactcaac

SEQ ID NO: 22167 - DNA, 293 bp, Setaria italica
  Peptide Sequence Number=SeqID_88141
tagcagtaggccgacgctgtgacctggtcgtggcggcggccggcgacgctgccaatggagcagttgcaggagttcgcgtttacctcggcggcaacggtggcggcgaggcgccggaggttgtggcctcgtaggcgctgccgggagcgtacctgccctgcgtgccgcacatgtgaccgggcgtgaggaccaggcggcggtcaacgacggtggcggcggccagcgccgggaggaccgccgcgagcgcgacgagcgccgcggctagacgcatggccggaggaagacgaacgcttttg

SEQ ID NO: 22168 - DNA, 263 bp, Setaria italica
  Peptide Sequence Number=SeqID_88142
cgcaaagccgcggccgccaaacctgcaaaggcgaactcccagtctccaacgagcaccgcagccaaaacaaagcatagcgatcgcgagaagcttccacagagcttgtctcctccacgagtgctcccgacgacaactgttccacggcgtcaatggcgagctccggcgatgatgggcgcgtggtggtagacctccgctccgcggcggagtcggcggccggggcaggcggcgaggaggcgcacgccacgccgctccacgagattgag

SEQ ID NO: 22169 - DNA, 181 bp, Setaria italica
  Peptide Sequence Number=SeqID_88143
cactggtgcacaaattcttctcatacctacataatagcaattgaggtaccacaggaatttgacccaataatatacaaaactaatttgaaagatgatacaactttagaaggagcatattaacaaaactcaacaaaatcagatataatgtaaccgaattttgacctaaaacatgccagaagca

SEQ ID NO: 22170 - DNA, 313 bp, Setaria italica
  Peptide Sequence Number=SeqID_88144
tcgagtccttgggctcggcgccgcaccacgacacgccgggcgacgggcggcacgaggtggcggtgtagttgcggtagtaggcgacgaagggggcgttggaccagtcggtcttgatggcgccgccctgcgtcgcccactcgtccgcgtcccacaggctgccgtacacccgctgctgctgccacgtcgggtacggcacgccctggtcctggtaattcttgaacgcacggatcgccttcccgtcaaccctgattatgatgtacttggggttccactcgatggtgtaggtgtggtagtcggcggtgggatcgaacca

SEQ ID NO: 22171 - DNA, 455 bp, Setaria italica
  Peptide Sequence Number=SeqID_88145
ccgactaccacacctacaccatcgagtggaaccccaagtacttcataggggttccactcgatggtgtaggtgtggtagtcggcggtgggatcgaaccagaggtagaactgctgctcccggccaccgacgccgtcggcgaagatgttggtgtggagcgtgatgggctcgccggtgaggttgccgaggaactccaggtcgatctcgtcgtggtacgaccaggggccttcggagatcgtgtagatggtgccgacgacgccggcggagttgccctcgacgagcttgatgtccatgctgatggtgccgtagaggtacgtgttcctggagcggaagcaggagccctgctgctcgtccagggagagcgccagcgactcggtgtcggggccgtccatgaagaagtaggtgtggctggcggccccagatgagctcgatgtcctcgtccagggtcgccgcgcaca

SEQ ID NO: 22172 - DNA, 356 bp, Setaria italica
  misc_feature (213)..(213): n is a, c, g, or t
  Peptide Sequence Number=SeqID_88146
tacttttgagaatgcttctaggtggagcttagagcaggtatggtgaacaattggttaaactagcctgattagaagccaaggataatgaagatctcttatgtgaacaactcaatggtagtgattatcatcaaagcatactgcacacaaacttcaacaaacctttcttcgacactaaaatttaagagctattataggaacagtaaaacatttaanatttcaggatgataacaaagcttaaatttaagcaggacaattcactatctgctctaactgtcatcctaatacatacctaattggcaaaactacagaataattccatacatacaagtatatattgtacgttctttaaagtttaa

SEQ ID NO: 22173 - DNA, 195 bp, Setaria italica
  Peptide Sequence Number=SeqID_88147
acctcaccggcacgcccttcgtccacgtgtagtgtaaatacggcgtatattatacgcgtggcgtgtagctgtagaggtgctagtggtatgtacgtgtagctgtctgttaagtacagtagtggaaacattgtaacgttccttgattaaaaaagaaaatattgcaggattcctttgacaaaatttaactgtttttcc

SEQ ID NO: 22174 - DNA, 258 bp, Setaria italica
  Peptide Sequence Number=SeqID_88148
tccggcggccagcctcgcgccacgccggcgcgcgccgctcgtcgtcagggcctcccagaacgaggatgccgagacaagcagcgcagccgctacgcccaagcccgcggaggcgaagccggcgagcatctgggacacgcttgcgttcagcgggccggcgccggagcggatcaacgggcggctggcgatggtgggcttcgtgtcggcgctcgccgtcgaggcggcccgcggggacggcctcctcgcgcaggtcggcaacgg

SEQ ID NO: 22175 - DNA, 577 bp, Setaria italica
  Peptide Sequence Number=SeqID_88149
gcgcgcgccgctcatcgtcagggccgcccagaacgatgccgagacaagcagcgcagcggccaagcccaagccggcggcgaggagcccggggctctgggatgcactggcgttcagcgggccggcgccggagcggatcaatgggcggctggcgatggtgggcttcgtgtcggcgctcgccgtcgaggcggcccgcggggacggcctcctcgcgcaggccggcaacagcgccggcctcacgtggttcgcctacaccgccatcgtgctgtccgcagcgtcgctggcgccgctgctccagggggagagcgtcgagggcaggagcggcggcttcatgaccgccgacgccgagctctggaacgggcgcctcgccatgctcgggctcgtcgcgctcgcggccaccgagtacctcaccggcacgcccttcgtccacgtgtagtgtaaatacggcgtatactatacgggtgtagttgtagaggtgctagtatatacgaaatgtatgtacgtgtagctgttaagtacagtagtggaaacattgtaacatcccctgaaaaagaaaatatattgcaggattcctttgaac

SEQ ID NO: 22176 - DNA, 617 bp, Setaria italica
  misc_feature (583)..(583): n is a, c, g, or t
  Peptide Sequence Number=SeqID_88150
gcagcaggacgtgctgcggcacacggcgatgcgcatcgtgtcggggcggctggcgcggtcggagccgccgctggggccggaggtggtgcagtacctgctggacacggacacgcactcgtggagcatgcggcggagcaaggccaactggttccgcgtcgtgggctgcctctcgcacgtcgccacggcggtgaagtgggcgcaccgcgtccgcacctgggcgcacccgccgaccaccgtgctcgtgcacgctctgctcgtcgccgtcgtgctctgcccggagatgatcctgcccaccgtgtgcctgtacctgttcctcgtcctcctctggcgctaccgtgcccggccgcggcagccgacgggcatggacccgcggctctcccacgtcgacagcgtgagccccgacgagctggacgaggagttcgacgggctcccctccagccgccccgccgacgtggtccggatgcggtacgaccggctgcgcgccgtggccgggcgcgcgcagacgctgctgggcgacgtcgcggcgcagggggagcgtgtcgaggcgctgctgtcctggcgcgacccgcgcgcgacgggggtnttcgcggtggtgaccctgctggcggcgctggtgc

SEQ ID NO: 22177 - DNA, 246 bp, Setaria italica
  Peptide Sequence Number=SeqID_88151
gaatatcctcggactgccttcggagccagcgagcttcctgcctccgttctcatccacgccggcgatatcctcgaacgccatccctgacgagttgtggcagcggtcagcgccgctgcatgaccggcatcggaggcaccacagcactcgaccgacagtgccgcggacgtaggaccggactgtcttgcgggccgtcacccggcagcgcggctcctccgctgccaggacagcatcgtcgatgtccatcgg

SEQ ID NO: 22178 - DNA, 996 bp, Setaria italica
  Peptide Sequence Number=SeqID_88152
gtaaaaccatcgggtgacttaagtccatccttgctatgatgtgttgttttgatgtgaaccatgattttcagaatggagcgaggaactgataggggccacttcttccatgttaggaatctgataacaaagaggacctagggtagaatacaactcattcttcaaagatgatttggtaccacttttggctggtgcagattttaattgaatggcacagcccttccccacaggatcaggtgtggagctaacctcaaaacccttctcatgaagggaatcgatttctaggcccttgcctcggacagagtcactttcaagaccttgagccgctaacgtaacagcagaaccatcaactagtgatgacatttcgtatgaagtctgcgcagttggtatggaaagagaaaggaatgcagaggagtctttcaaattatatgcctgtgaaagtgaaccgataatggaacggtgagctctcccagggacatcttttgaaccaataatgggcactttgttcagatcaagacggttgcccatagcaataggcctcatttgatccttgaaatcatcatgggcaagaaggttttgagctgcgagaaaactgttggcaccataggcatctagcctctttctcaaagaactgttccaatgattctttatagaattatcagtccttccaggaagagcttttgctatttctgcccacttattcccatgcactcgatgagcattaatgagtgccctttcctcctcaggagtccaagcatctttccttatttctggattcagatgattatgccacctctctcggcattgcttgcctatgcggccaggcaatgactttgctatgatagaccattttgtgggtccatacttgcgcacaaggtcaatgattttatcatcttcctcttgagtccaagggcctttgataagctcgggattgaggaccttttgccagcgatgtctaaactatttgttaccttcttgttcctttatttcttatttgtt

SEQ ID NO: 22179 - DNA, 1248 bp, Setaria italica
  Peptide Sequence Number=SeqID_88153
tttttttttttttatttgtaccatggacgctgcatgctagttttttattgccttattcgaaaggaaggaacacagacaaacacatttaccgtcaactagtgggtgccagttggtactcttctaggaccttgcatctatccctggttaacagtgaagtgaaatggtcactaactacgtgcagtgaatacatttttttgtaatttttttccttgcatcactactttcgtacattattgttcccgtttattcaaaacgaaaagacacgagggtatacagccttgatccggagcgtggcgcactgtctagtaaccgtgcgtataggtcaagcagtagctgttcccgcgcggagacccttggtgcagaatttgtagcacgcattgttacagcggtcgagggcgtgtttcaccgcaaaaagtttgctgccaacgccggtgaccattttgctgcacacggaggacttgcatcctgacacgcatttctcgacggcagctccttttgctgcagagttggtggggcatttgtctccgcttacggtacggcactgatacgcttcctggcagcccggatcacagattttctcagcttgttcacgtgggaagtagccgaaacaatcctcaacacactcatgaaatcctgtcatgtttgagcagcacagcgtcttcgtcgcagcttggacgacctctcctacaacagagccggatgaagggtgttcgctggggcatttgtctccgctcacggtacggcactgatacgcttctttgcagcccggatcacatattttatcagcctgttcacgcggaaaataggcgaaacaatcctcaacacactcatggaaccccgtcatgtttgagcagcaaagcgtcgtcgtcacaggttggacgacctctcctacaacagagttggtgagcaagtcagatgagtggtgtaggctgctgctggggcatttttctccgggcacggcatggcactggtacgcttcttgacaccccggatcacagaacttctctgcctgttcacgcgggtagtagtggaagcaggcctcaacgcactcgtggtatcccgtcgtgtttgtgcagcaaagcgtactcccagtcggaacctttcctgcaactgctgcagctgcatggccgcctgcccccgcggcggccacaaagaggagcgcgaggagtgtctgacgagcagccattgctccggccactgctatgctacccggcgctgcgctcagcttttgatctgctctcgctcccc

SEQ ID NO: 22180 - DNA, 181 bp, Setaria italica
  Peptide Sequence Number=SeqID_88154
gtgcggtggttgcacacgaggagcgaccccggcgagcccgggcgcggcgccggcggcggcgtgccgcggacggtgaggttgatgcccgtcaggcggtacgtgtggcggacgaggcacaccgggaacaggaggttgaagaagacgcggaacagggcgaggaggaggccgggcgggaggtagg

SEQ ID NO: 22181 - DNA, 186 bp, Setaria italica
  Peptide Sequence Number=SeqID_88155
gttgcaagaacaagatacataattagttttcaactgtacgtagcacctgtggttatcactaaaaccaaatcaattttgctcatccctttaagtgtaatactgctttgatgaatatagggctgcagaagtttgttgtctagagaaactaaaataggcagtacatggataagttataaatgcacatct

SEQ ID NO: 22182 - DNA, 740 bp, Setaria italica
  Peptide Sequence Number=SeqID_88156
cagtaattaaacgccgggttttattgtggccgctgatctgatacaggccggcctagtaagtaagaacgaagtaacacacgtacgtacgtacatggtatatgcatgctcgtacgatgggatcaggcgcgcaggtagacgtcgagctcgaggacggcgtcctttcctttccagcttgccgtcttccagagcacgtaccccgtagccatgcggaacctccccgtgccgccgacgacggcgagctcgcgcacggccaacgtgacgtcgttccggcccatcaccgtcaccgtgctgccggtgtacccggggtagtcggtgagcacgacgttcatggagagcagcaccgcggggcggtcctcctccatggacgccatcacgtaggtgccctgcgagcggcccacggccctggacgcgcggctcgggccctccgtcagaacgtcgtccatcaccaccgtgtcgccgaaccgcacgccgccggacaccagcggggcgcccgtgccgttcacgatcagcaccgccgtggggcgcgggcccgtgtacctgttgtcgtgcatgaagaagtgaaggtggtgcatggttccgtcgccggcggcggcgggacagaccacggccagctgcagctgcagcacaatggccgcgagagtgatgaggtgatgggatgccatcttgttgctactcgtcgatcgatctcttgatggatcttcctattcgatttgatggagatgaaagtgtacgtagacaag

SEQ ID NO: 22183 - DNA, 441 bp, Setaria italica
  Peptide Sequence Number=SeqID_88157
ggcatcttcttcctcctcctcggtcaggcagaggccagccactgcggtctccgccgccgctcagcagccacagctcctccaagacgaccagcaagacctcctcctccccaagcaagaaccagaagcagcaccctcgccgccgccgccgcctccacgttcgccgttgtcgcaggcgctgacgtcgacggcgaacctcgcgaacctgctgccgacggggacgctgctggccttcaacctgctttcgccgaccttcaccaaccatggcgcctgcgacgccaccacggcgctcctcacccggggcctcctcgcagtcctcgccctctcctgcgtcctcgcctccttcaccgactccctcaagggccccgacggccgcgtctactacggcgtcgccacgcccagggggctctggctcatcgactacccgcccggcgcgccgccgcc

SEQ ID NO: 22184 - DNA, 262 bp, Setaria italica
  Peptide Sequence Number=SeqID_88158
gatgggagctgttgatgactctatgaaccgtgggttggtaaattccatttgaccagacctcgagcatgtcaccgatgttgcaaacaaaggttccaggaattgggttggcatgtatccacacaccggaacggttttggacctcaagggcacacatgtcatcatcctggttaaccagtgtcagaagtccgtagtcggtgtgagatcccctaaattagtcccagaacacatggaaacacccaaaattatagacagagttagatgt

SEQ ID NO: 22185 - DNA, 255 bp, Setaria italica
  Peptide Sequence Number=SeqID_88159
accagacctcgagcatgtcaccgatgttgcaaacaaaggttccaggaattgggttggcatgtatccacacaccggaacggttttggacctgaaattgcatcatgaaagattatatacatattttgcttcgctcattaaaggaatggacaaataatggacaatacacctagagtgctaagataccattggactaggagaagtacatatacataatattgattattgtatcgaatcgaattaagctcacatcttgga

SEQ ID NO: 22186 - DNA, 454 bp, Setaria italica
  Peptide Sequence Number=SeqID_88160
agttcaaaacaagactaaaaatcatgaaagcaataaagttaaaagcacggggtgtaaaaaaagattctctaaattagtctacagatactactctctataattcaggggatctctactctctagtgaaacttgtagaagagatgcactaaccgtagtcggtgtgagatcccctaaattagtcccagaacacatggaaacaccaaaaatatagacaagagttagatgtatccagccagaaagcatatcaaggaataatagtgcaaaatttaagaaacgacatatggcgacatgctattcgcttacatcccagtttcagtgcgtttctcttctgggacatcacttgaaaccgggtaactaatcagccttagagcccagtaaggatctcctgctattcccccttcaaaggcatcaacaggcccgcccaatgccaaagctatacctcgcatgatcttcc

SEQ ID NO: 22187 - DNA, 1315 bp, Setaria italica
  Peptide Sequence Number=SeqID_88161
ttttttttttttttatttatggatacaattgtttccttttattttctacagcatatcacataagtttaacagcagatagttcattgtctgtggatatagtaatccctttattatcacagtagcgatatgactaatgctccagccctataaatcaccaaagcagcagcaggccttctgaaccagacgctccccatacacgaccttctcatacttggcgacgctgcctgttttctccacgcagaacgcaacgggctccacagctgcatcaaagtctgtctcgtagaaaaacacagcagatacgcggcgttgatgggagctgttgatgactctatgaaccgtgggttggtaaattccatttgaccagacctcgagcatgtcaccgatgttgcaaacaaaggttccaggaattgggttggcatgtatccacacaccggaacggttttggacctcaagggcacacatgtcatcatcctggttaaccagtgtcagaagtccgtagtcggtgtgagatcccatcccagtttcagtgcgtttctcttctgggacatcacttgaaaccgggtaactaatcagccttagagcccagtaaggatctcctgctattcccccttcaaaggcatcaacaggcccgcccaatgccaaagctatacctcgcatgatcttccttgaaagatctttgaggaggctgatatagttttccagcactaccttaaaatttgatgggtattcaggccacagattgtatccttcaagtgttttaccaagatctccgtatttaccaggtgcaataggagtcaagcaattaattgcttcgtgcatatcacgtttttccttggtaatattctctcctagtttttgataccccctatacccactttgacgtgtcatcttaatcttcatcttttcctcataaggaagctgaaagaatttgtgtaacacatccctcacttcccgcattagcatctcacaaataccgtggcctttcacataaaagaatccaacctccttgcaagcatagtccaacgtttggacaactcgtagcaaatccttatgatttgccatgtctggatcatcaatcttttcgacaagtggggcgatatcgatcagaggaattgccgtaacattggaacccattgtttgtttgtgcgcgccgcgcacgtacgctcgatcgtgaaagggagagagatgttccaagagtaaaatttaagatttgctatatctgaagtgagatggtgaggaactaacgttgagtcattctttcgatcgtgaaagggagagagatgttccaaaagcaaaatttaagacttgctcttgc

SEQ ID NO: 22188 - DNA, 633 bp, Setaria italica
  Peptide Sequence Number=SeqID_88162
ttttttttttttttaatacagcatggaaaggagcgtaatcgaataatttttaagggtatgctggagcagccaacgcttcccgtattgtcgccatgatcaaagaagaagttcgctttgcgcacgtagctgttacaacacgtttcaccatcaacacggcacatccaaagcaaatcaacaacataaatcagctaagggcgagcaccgtcgcacagatcactttcacacacgtccagatcaacaatgacgactgcggaacgaagtactgcggcggaagacatgtccggctcaacctcacgcgccgttgccctgcttggcgccgtccatccagatgatgcagcggaggcactttccccgcgcaagaaggtcgaacgcgctgttgatgtcgtcgaatcccatctggtgcgtgatgaactcatccagctccagctccttgtccaggcacttgtgcgccagcacggggatgtcgtccttgggcttgatcccgccgaggtaggaaccgacgaccgaccgccccctcatgatgtcgaacgacggtatgctgatgggcgcagcgatacccgaccgaaggtaaggaaaaccgtaacgtaaccgtaaaccgtaaccccctttaacttaaatttaagttaaatttaa

SEQ ID NO: 22189 - DNA, 344 bp, Setaria italica
  Peptide Sequence Number=SeqID_88163
aaagaagaactttaatagagctttatgcagcggtatcagaagatctggttgtccgttgtccttaccgctagcccaacagctcctagtccaaagatggcgactgtcgagccgggctccactgccgcaaccttccaagccgcaccaaccccggtggcgacgccgcagctgagcaggcacgccttctccggcgggagggcgccgccgaccctgacgacgtgcgcgacgtcgacgacggtgtactcggcgaagctggagacggagaggaagtggtggatgggctcgccggtggcggcgagcgagaagcgcgtggtgccgtcccgcggcatgaggccggtgcggtgggc

SEQ ID NO: 22190 - DNA, 1260 bp, Setaria italica
  Peptide Sequence Number=SeqID_88164
tttctcttcttagccggtttactttctcacagcacttagagcgtcagaagaatcattgaggaaataaagcatatattcatttgctgattcttccaaacaagcaacgggttgtgataaataaggtaatcgcctctacctggccaaagtaatgcctcatctgcctctagatcaaacctaccatcaacaggtgacaattaatccgataggcagcagagagaaagtggaagaatagcttatttctttgaacctttccaccccacgacacgttcgatttagagtgcgtcatgcgatccatccgtgcgcgagcgcgacggcggcatcaagcggtggtcttgttggcgccgtccatccagatgatgcagcggaggcattttccccgcgcgagcaggtcgaacgcgatgttgatgtcgtcgaaccccatccggtgcgtcacgaactcatccagctccagctccttgtccatgtacttttgtgccagcacggggatgtcgtccttgggcttgatcccgccgaggagcgcgccggtgaccgacctcccccgcttgatgcccgacgacgatatgctgacgggcgccgccgcggcgtcggagcccaggatgatcgtcttcccccaccccgtccgagagctttggaatgcttccgccatgactgaagggatgccgatgcactcgaagcagtggtcggcgcccccgccggtcatctccttgatcacctcgctgacagtcttctctccggtgtcgtttgggttgacgaagtcggtgacccccagcctctggccgatctcgaacttgtccggattcaagtcgaccccgatgatcctcgtggcgccatgcatcttggacccttgcgctaccgctagccccacggtgcctaatccaaagatagccactgtcgagccgggctccactgccgcaaccttccaagccgcaccaaccccggtggcgacgccgcagctgagcaggcacgccttctccggcgggagggcgccgccgaccctgacgacgtgcgcgacgtcgacgacggtgtactcggcgaagctggagacggagaggaagtggtggatgggctcgccggtggcggcgagcgagaagcgcgtggtgccgtcccgcggcatgaggccggtgcggtggggcagcgcggagcagaggttgctgcgggcggagaggcagtcggcgcacctccccgcactgcggcaggaacacgggaaccaccgtgtcgcccacggccacctcctccacatgctccccccacgctcctcca

SEQ ID NO: 22191 - DNA, 289 bp, Setaria italica
  Peptide Sequence Number=SeqID_88165
cctcactcgaacgccgccgcgccacactgctctcacctcgccaatggcgaaaccgacgagccgccaccgccgccgccacggggaaccctagcggaaaaacggagtttcttccgcgtccccgcgtcgtagctcctgagccggccgttgcggccccgcgagctctccaagtcgagaggcattcggttcggcggagagggggaatcccgccttcgggggcgacatggcgagcgaccccaaggagatgaagtacaggaggaggggccgggttcctgagccggtccagtacggg

SEQ ID NO: 22192 - DNA, 233 bp, Setaria italica
  Peptide Sequence Number=SeqID_88166
cctggacatgagaaccgacgagcgtcgccgctggtagacttgctggatcttgcacgcagcatcctcccaggagtgtccgcggccacgacgtcggaagggtacaccatggactgcatgctgctgctcacgaacgagctgctccaagaaagccgcgagaccttggagttggggtcttcatccatggaggaggagatggagatgttcgtgggctccaggtcgaacacctctgtgat

SEQ ID NO: 22193 - DNA, 880 bp, Setaria italica
  Peptide Sequence Number=SeqID_88167
cttatcaggattcaagagaggtttttggcctatgtaaaagatctgctcagaacttttacaaatattagcatgcaagatgtgtaaatttccccttgttttattcttgattgaagagaatttggtcagaattcagatgctatattagtatccaaaatgcatgacctgtcccttgtggtctcttttttttttttggaagtgtctcaactgtttttgagacaaatgctatattaaaaacatcatagtgtctcacagactggcactagcatagcaacaaagtggctaggattatcatgttcacaattgagcaaatactacagtcagatgcacaagtgcacaacacatgacactagcttgtacacagtagtattcttttggtatacgacatcatcacatgagaaagaaacaaaacgctcgcgctctttctttcagccaagatcagggacgatgaggtaatcctcctcgtcgtcggtgacctcgatcctggccttcttgttctggcgcactccagcacctgcgccagcggctttgctcggcctgtagtacgccgcgtcgctggccgcctgggatccgaagagctccgggacctccgccaacgtcctgccggccttgggcgccgcctggtcgtggaagaggtcgatgtcggcgaaccactcgagctccttgaacccgagcggcgactccttctgcagcttgtcgccggactcgtagtcggagaactggaggagctcgtcgacggcccagccctgcggcaggaactgcggcggcgagggcacctgctgcgcctcggcggagacggcgggctgcggcggcggctcgacggtggccttgggcggggcgtggtggtcggagtcgtgggcgtcgcagccgccggcgctgcaga

SEQ ID NO: 22194 - DNA, 398 bp, Setaria italica
  misc_feature (362)..(398): n is a, c, g, or t
  Peptide Sequence Number=SeqID_88168
ggttgcaccgaagttgaaccatatggcgaggaggagctggtttgagttgttgctaggatcaatgttgcagaagccaaagacgaagatgcctgaggagctggtcaggtattgagtggatgtcatggtggatccaattgtgagctggttggtttcggcagcagtggccatgaacaaatgaggttgctctagtaatgagatgatgagaaggatgagagccaggaagcagagtacaaaggaaagcaatggctccatagttggtggtcaagtttttcttgcttcctcacttcacacatatatagaaccgttggctgttcgtatgctgtctaatgttttttaacagttgaaccatattattttaaatnnnnnnnnnnnnnnnnnnnnnnnnnnnnnnnnnnnnn

SEQ ID NO: 22195 - DNA, 458 bp, Setaria italica
  Peptide Sequence Number=SeqID_88169
ggcgtgatccttaatcatcttaattaagcgcactcaaacccacatgaagaggggagtggacgagggagaagacagaatagaaactgccttgtccccttcaactcttcaagcagccagccgcctactactccaactccacgcagcctccccatccggccatccccacccccaccgcctgcctgcctgcagctgcaggcctcctcctcctcctcccccgctgcccctgctccgtgtgtgtgaccaccccggcattaactgcccgcattggtggtttcccggggtggttggattaggttgcggccctgcccaaaagcagggttgcagaccagagctcttttggttttggagagagggggagctagttgggagacagagacagggagggagcttggagttggagcgcggccatggtctgagctctctcgcggtggttgcgcgcgcgtcatctccgcctctgc

SEQ ID NO: 22196 - DNA, 207 bp, Setaria italica
  Peptide Sequence Number=SeqID_88170
tttcaagaacatgcatgagagtagattgggatatgtgaaacttattagaacaaatttgggactacacagctttctagtactaagaaccatttttccattaaactgcaaagataactgcacatattgatcctgtcataatgttcagtggacttccctgaattcacttgaaattacattccaacgtgtaacgtgccatttcgccctggc

SEQ ID NO: 22197 - DNA, 558 bp, Setaria italica
  misc_feature (1)..(13): n is a, c, g, or t
  Peptide Sequence Number=SeqID_88171
nnnnnnnnnnnnntttttttgttcttatctaaatatactactactatattcttctcattatagattatagttcatcgcaaaagaaaagaaaagaaagagagagaagctaagccaccataagcatcgcagcttacctgttcacatgctcaactcaactccctaaataaacaaaaaccacaggcataaacaagaacacggcggcacagagagaaaaagaaggggagatttttctttttaatccagcactggccacggtagtgtgaccgcacactgattgctctgtctctccatccatgggggcatggccgatcgccatcacatgacgctgcacccggcattggggtcctcgtagcacggttgctgctgctgcccgtagtacggctgccgggcgccggcgccgccgtagtaccacccctggctgtcgtacaccggcacgccgtagtacccgccgggcgcggccggcttgccgcaccggcagtacccgttgcccccgccgcagccgcagccgtagccgccgtagccaccgccgccgccgtagtacgacgacgcctcgtagct

SEQ ID NO: 22198 - DNA, 262 bp, Setaria italica
  Peptide Sequence Number=SeqID_88172
ccgtgcgtttgacctggcggagacgctcggcaagtgggccctcggagaggtcgccttcgggatcaagtactacatgcggcagcagggtaatctgcagcatgagtatgctggaagcgattctgtactactggatgggcctgaggtaaggcaggagttgatttcgctactcagatacctgaatcaatgtatgtatttctcgaagaagccatacaaggtgtttttggagtttggtggatatgaccagaatgatgttcttataaag

SEQ ID NO: 22199 - DNA, 420 bp, Setaria italica
  Peptide Sequence Number=SeqID_88173
tgatgacgtgcgtcttctcgaggatctccgtgaacacgtcccacgagcggcgccccgggaagcgcacccagacgtagggcgagtcggcgccgccgtacacctccttgccgagcgacgcgaacgtgtccaccagcacccgcgcgttctccttgtacacgcccacgacgcggcgcaccgcgccccggccttcctccgtggagaggcaggcgaccccgccggcctgggcgacgctggacgcgccgttgaagcaggtgcacacgatgcggtcgaagtcgcgcgcgacgggggatccgtcggcgtagcggagctcggcgggcaccaccgcccagccgaggcggacgcccgtgaacccggcgaacttggagaaggaggagatctcgatggccacctcccgggcgccgggcacctcgtagatggacc

SEQ ID NO: 22200 - DNA, 289 bp, Setaria italica
  Peptide Sequence Number=SeqID_88174
ggggcctcataatcggcatcggggacatcgcccctggccggggagaagcatttgtccgtggccgtcagcgcctccatggcggcgggccggacgggggtcggattaagctgctaccaatcgcgcgaggcggcggcggcggcggcggcggaagggaagatgagattgcgttttcctccgatttttatcgtgtttatccccttttccgctgtgcggtaaaatcagccgcggaggattccagcgaaatcgagcatacgagatgtcaaaaacggccgcttccactgggggtttc

SEQ ID NO: 22201 - DNA, 387 bp, Setaria italica
  Peptide Sequence Number=SeqID_88175
ccaaaccacaacaaggagcaacactgatgggttccattggtaatggtcgaagtgtctcagcggttggcatccagatgccaccggagggtagcaagacggtgctggagccagtatcacttccagtgacaacatctccagtgccaaggtggccacggctgggcgtaattatggtggcaacccgagttgcagccttggtgatggcgctgctttcggtgtctctaatggtctcctccaagcagcggggcattctcaccatatttggcattgagatcccgctccatgctaattggtccttttcttattccctgcaattcttgttggatgtctgcagcctcagctgcctactcgttggctcatctcctcttgattgcacacaaggccgtgaag

SEQ ID NO: 22202 - DNA, 775 bp, Setaria italica
  Peptide Sequence Number=SeqID_88176
tagccaccgccgggatatccgccgccgcccggcatgccgccgccgccgccgccgccgaccgccgccgcgccgaacgcctgctggacccagtcaacggtgtccttctcgagcatgaacgccttggcgaggatcaagtccgagatgggcggcttggacccgaacacggcgttggcgatggtgatggtcccggggttctggctgctcagcgccgcgatcgccacggcggggctcttgccgttgttgagctggaagtggatgagcccctgcgggaacacgaacacgtccccctccaccagctgcttggtgaagagcgtgttgttcagcagctggttggaggtcacgaaccccacgagcagggtgccctggatcacggtcaggatctcggaaccccgcgggtgcgtgtgcggcgggttctgcccgccggggacgaagtcgatgcgcgccagcgagatgcccagcgtgttcagacccgggagcttgtccaccgccaccgccgcaacccccgatccctgcgcgttaggggtctggggcattatgtggaagaagaagtcgttcgccgtcaccacctttgcgttcttgcacaccaccccattcaccaacacttggttgttgttatcagcaacgcagaagtcttggagctgggtcggatcagttgccagagcacggggaactgaagcaaagcctacaaatgctaccacggtgagcagcgcagcgaaggcacgggaagccatggcttcgtctatgctagctatgtcaatgtttgcaagtgatcgag

SEQ ID NO: 22203 - DNA, 504 bp, Setaria italica
  Peptide Sequence Number=SeqID_88177
tgtgtttagcaatgcagagttgatggcaatgctttgaagcaaatttattcctttgtttcttgctgatgcagaattattttagttgcttttttccattgccgatagtaatctcctccttaagatggggactagaagctggcaggaaaactgtggtggctactgttttactgctattcacattatctggccctgttaaagcatcatcttatctgcttatgcatggagttgttggtctcatcatgggtactgtttggaggtccgtgccctgggagcttgtggttatgtgctagtgtcatcgtttctcataagagaaaacattctcgcactgataacggttaatattcatgcttcgttgacatatatcctagcggcagctggtgtgaactcaattccttccatggatgcaatatatgtactgtttgggacattgcttctacttaactgcgcattcttcgtcttcctcctgcatgtattgtatacagtattttccctaagtctttcgtt

SEQ ID NO: 22204 - DNA, 852 bp, Setaria italica
  Peptide Sequence Number=SeqID_88178
gggtgatgaggacggggaggacctcggggaggcgctcgataggacgcggcagctcgttgagtgcgccatgttcgcggccgtcgctggactcgcctacttcctcagcaactccctcgccattgagaattattttagttgcttttttccattgccgatagtaatctcctccttaagatggggactagaagctggcaggaaaactgtggtggctactgttttactgctattcacattatctggccctgttaaagcatcatcttatctgcttatgcatggagttgttggtctcatcatgggtactgtttggagattggagaccaattggattgtttccatcatcctctgctccattgtccgtgccctgggagcttgtggttatgtgctagtgtcatcgtttctcataagagaaaacattctcgcactgataacggttaatattcatgcttcgttgacatatatcctagcggcagctggtgtgaactcaattccttccatggatgcaatatatgtactgtttgggacattgcttctacttaactgcgcattcttcgtcttcctcctgcatgtattgtatacagtattcctgacgaagcttgggataaagccatcgctgagaccaccaagatggctggacaacgttctatgaaattaggagtagaagggcaccgtagtgactgttttactaatttgtggatggaagctggcactctgacagagcctgtaaaatgagctctcttgttcaaccttctgggtacatgatccttgttgcgatagttagtgaatgatcaaatgtggtctcaattgtcagcatatatattacagaatcagtgaaagaaaaaataaaaaaaaaaa

SEQ ID NO: 22205 - DNA, 499 bp, Setaria italica
  Peptide Sequence Number=SeqID_88179
aagtagtagaagtaagtacttaccaacctccaactcggcggaccacatgggcgtggagggccagttccactggctgctgcagacggccatcgccgtcacgctcgccaccacgctcctcggcatcccctaccctcggagcttcacggtgagcctggtccggtcggcgagcctcgtgttccagggcgtctggttcatcgtcatgggcgtcatgctgtggacgcccgcgctcatccccaaggggtgcttcctcaaccgagaggaaggccacgacgtcgtccggtgccgcaccgacgaggcgctcgaccgcgccaagtcgctcgtcaacctgcagttcagctggtacctcaccggcaccgtggtgttcgtcgttttcttctacctgcagctcaccaagcgctaccccgaggagccgcagtacttgccgctggtaaaggtggcggcggcggcggcgacagcgacggccggttcagcagtcggagatgaccacgacgacgaggac

SEQ ID NO: 22206 - DNA, 226 bp, Setaria italica
  Peptide Sequence Number=SeqID_88180
cggcgggctagagccgccgctcccgagcgtggacatggcttctgcgacgacgagatggttttggacaacacaaacaacagagtagcttccaatggcgtgcataaaccacggaattgaaggatccttaagaaatcaatacaccgctctacaagaaaatggccaagattgcaaattgtggtagcaaagtaaaagagggagagatctacggagagctctctaagaagca

SEQ ID NO: 22207 - DNA, 510 bp, Setaria italica
  Peptide Sequence Number=SeqID_88181
gaggaccgcggcttgaggacgcggatgttgaccttctggccggcggcgcagtggccgggcacgccgcagatgaagaagcggtggccgggcctcttgatggcaatcttgtcgtcgccggaggtgtgcgtggcgatgggggtggagttgctgcagctgtcgtaggcgtccttcgtcacctccagcacgttgtggatgccctgggggtacacgaactctatgatgtctccaacatggaagttcttcttcgtagtccagtcggtgtagttgatgttgccgaggatggtccagccggagctatcgccgaccttgtaggtgaccgccgacgaggtcgccgccatcgcgagcccaagcgtcagcaccaggaaacccttcatgcccatggccattgctgcacctgctcccctgtgtctaagctacacaccccctctgatctcccgaagctatatatagcaagaagagatcgaggaggagatgccaagagcagaggagacgcaaggaattcagttccac

SEQ ID NO: 22208 - DNA, 437 bp, Setaria italica
  Peptide Sequence Number=SeqID_88182
cgacgacgagcgcgcgggcgcgggcgcgggcgccttggaaggggcgtcagaggaccgcggcttgaggacgcggatgttgaccttctggccggcggcgcagtggccgggcacgccgcagatgaagaagcggtggccgggcctcttgatggcaatcttgtcgtcgccggaggtgtgcgtggcgatgggggtggagttgctgcagctgtcgtaggcgtccttcgtcacctccagcacgttgtggatgccctgggggtacacgaactctgcacgcacgcggtcatcgtcagcgtcatcgttacaattcagaacgaaagaaagcagggcggaaaaacgtgctcttttcggtaagtatgatctttttcgatgccacgatgatcacgcaaagaacaaataaagaagtggatgggatgaagcaaaacgtgcagccgaaggtacag

SEQ ID NO: 22209 - DNA, 230 bp, Setaria italica
  Peptide Sequence Number=SeqID_88183
aaggcgtggctgcaagtgtattgggcaaaccctagaaaggtctccaagaagggtttgcccaatacacttgcagccacgccttcaagaattccttactgttgcagctaagcaactgaaccctcaatccgtgaaggatgctgtctcagtagctaacaatgcttgttgggctattggtgaattggcaatcaagattggcaaagaaatcgaacctgtggtgatctcagttgtta

SEQ ID NO: 22210 - DNA, 2809 bp, Setaria italica
  misc_feature (2499)..(2499): n is a, c, g, or t
  misc_feature (2560)..(2560): n is a, c, g, or t
  Peptide Sequence Number=SeqID_88184
ccgactttcttgagctcctccgccgattccttcctcctctcctgtctggctgtctcctccccagtcgccgccgccgccgccgccgccccgccccaccccaccccaccccacctcacccctcgtcgtgatcgtcgatggcggcgccggcgctgtggcagccgcaggagcaggggctccgcgagatctgcaccctactcgaggcgcacatctcccccaactccgaccaagctcgcatctggcagcagctccagcactacagccagttccccgacttcaacaactacctcgtcttcctcctcgcccgcggagaggggaaatccgttgaagttaggcaggctgcaggccttctactgaaaaacaacctgcgaacgactttcagttccatgccacccccatcccagcagtacattaaggctgagctgctaccatgtataggggcaaccaatagggcaattagatcgacggttggaacagtgatcagcgtacttttccaaattgttcgagttgctgggtggattgagttgtttcaggccctgcacaagtgtttggacagtaacgacctggatcatatggaaggtgctatggatgccatatacaagatctgtgaggatgtacctgaagagcttgatgtcgatgttcctggtttgcctgaacggccgatcaatgtattcatgccaaggatactgcagttttttcagtctccacatgcaagtcttagaaaactagcattgggctgcatcaaccagtacattgtggtgatgccatcggcactttatatgtccatggatcagtatcttcagggattattcaaccttgcaaaggacccttcagcagatgttcggaaactggtttgttcagcttgggttcagctcattgaagtgcggccatcaattttggagccacatctaaaaaatgttaccgaattgatcctacaagccaataaagattcagatgacgaagtcgctttggaggcttgtgaattctggtctgcgtactgtgacgtcagcatgcctcctgaaggtttacgggaattcttaccacaattaatcccgacattgttgtcgaacatggtatatgctgatgacgacgagtcacttgctgatgctgaggaagatgaatcgtttccagacagggaccaggatttgaagccccgcttccatgcctctcgattgcatggatcggaaactggagaagacgatgatgatgatgatgctgtaaatgtctggaacttgcggaagtgtagtgctgctgggctggatgtcctctctaatgtgtttggtgacagcatccttccaactttaatgcctttgattgagcaaaatttggctcgaacagatgatgattcttggaaagaaagggaaactgctgttttatctcttggtgctatagcagaggggtgcattgatggtttatatccccaccttcctcagattgttgccttcctgatcccacttcttgatgataaatttcctcttatacggagtattacatgttggaccctgtctcgatacagcaaatttattgttcagagccttgatcatccaaatgggcgtgaacaattcgataaaattctcttgggattgctcagaaggatattggatactaacaaaagagtgcaagaggctgcttgttcggcatttgcaactcttgaagaggaagctgcagaagaattagtaccacacttggaagtaattttgcagcacctcatgtgtgcctatggaaaataccagagacgaaacctccggatactctatgatgctcttggtactcttgctgatgctgttggagcagaactaaatcaggcgaaatatctagatatatttatgccgcctttaatcatgaagtggcagcaactccaaaattctgacaaagatctatttccgctccttgaatgctttacatctattgcacaggcattgggatcaggatttgctcagtttgcagaaccagtgtttcaaaggtgcatcaatcttatccaatcccaacagttggcaaagattgatcccactgcagctggtgcgttgtatgatagagaattcattgtttgctcattggacctactgtcaggactcgcggaaggtcttggtgctggtatcgaaagtcttgttgcacagagcaatttgagagatctacttttgcaatgctgcatggatgaggcagctgatgttcgacaaagtgctcttgcccttcttggagacctttctagggtttgcccaatacacttgcagccacgccttcaagaattccttactgttgcagctaagcaactgaaccctcaatccgtgaaggatgctgtctcagtagctaacaatgcttgttgggctattggtgaattggcaatcaagattggcaaagaaatcgaacctgtggtgatctcagttgttacttgcttgattcccattctaaaatctccagaggggttgaacaagtcacttattgaaaatagtgcaatcactcttgggaggcttagctgggtctgtccagacatcatggcccctnatatggaccatttcatgcaagcgtggtgccgtgccttgtgcatgattagagatgattttgngaaagaggatgcttttcatggcctgtgcgcaatggtggcagcaaacccttcaggagctgtgggttcactggcttacatctgccaggcctgtgcaagttggactgagataaaaaagtgaaggtcttcacaacgaggtgtgccagattctatatggctacaagcagctgcttggaaacggtgggtgggagcagtgcatggccaaccctaagaaaccaagacaagttagtagacaagaagaattaagaacaa

SEQ ID NO: 22211 - DNA, 1068 bp, Setaria italica
  misc_feature (944)..(1068): n is a, c, g, or t
  Peptide Sequence Number=SeqID_88185
gggaatcaagcaagtaacaacccattctaaaatcaccacaggggttgaacaagtcacttattgaaaatagtgcaatcactcttgggaggcttagctgggtctgtccagacatcatggcccctcatatggaccatttcatgcaagcgtggtgccgtgccttgtgcatgattagagatgattttgagaaagaggatgcttttcatggcctgtgcgcaatggtggcagcaaacccttcaggagctgtgggttcactggcttacatctgccaggcctgtgcaagttggactgagataaaaagtgaaggtcttcacaacgaggtgtgccagattctatatggctacaagcagctgcttggaaacggtgggtgggagcagtgcatggccaccctagaaccagcagttgtgcagagattagctcgatatggagtatgatgcatggtggcaaagcacctgagaagctaaggtggttgtgattcattcaagcattacataccgcggagacagaggagccaaaagagccatgagactagactgggttggtcaagcctgcctgtatgtcttgcctgtgagtgtgtgatgatgatgcattttattacatgtgttggcttcctgtgcccggctgcctactccattgtatacacagcacagcgtttccatccagagagtttagggggcatagaagtgtaggggtaaaagaatattttatttacctagcacgaacgacaggtgaggatgatgagatttgtatttgttggttggtcgagtcagtggacttggttttgtttttttgtcattccactggcaaaccctcttcctcccccgcggcaaacacaaaaggttttgtagcgtgtaatttgtggtttaggtgtaggatttgtttgacaggaagggttgtatcaattcattcgcgtgccccataataaatgatgattgatcaggtaactnnnnnnnnnnnnnnnnnnnnnnnnnnnnnnnnnnnnnnnnnnnnnnnnnnnnnnnnnnnnnnnnnnnnnnnnnnnnnnnnnnnnnnnnnnnnnnnnnnnnnnnnnnnnnnnnnnnnnnnnnnnnn

SEQ ID NO: 22212 - DNA, 477 bp, Setaria italica
  misc_feature (1)..(42): n is a, c, g, or t
  Peptide Sequence Number=SeqID_88186
nnnnnnnnnnnnnnnnnnnnnnnnnnnnnnnnnnnnnnnnnngtttgatccagtcaatgaatcaatctgttagtgtaagttggctaaacaaaaaaaattgtatatgaacttgcattatccaatacatgaatttacaatctaattcccgaaacaaaattgcaaccaaatgctcatgatgaaaccatatgaccgagaactggatttacagatgcaccacacatagtggttgaagcttgtgaatagcatacaacaatacttttctctgtcaaatctgcagtagcaatccgccaatcaatatggccttacaacaggtttcgcatctattgtacaggatttatcacatgatcatttgggagactgcagggcactcttgttcgtacgccagaacctcatcactttcacagttgccaactgatactgacttcactaagcctgtttccatttcaacagagacaacatccaaagtgccagttttca

SEQ ID NO: 22213 - DNA, 275 bp, Setaria italica
  Peptide Sequence Number=SeqID_88187
cggcgaggcggtgacccgcaccttcgacggactgctccccgtcgacctcggtggtgaggtgggcgaggttgtggaggtgctcccgccccatcatcccaattccgggggggtggctcgttgcagggaggaagacgtgtgcgaggcagaggcgccggctgcgccggccacgggccctggcggcgcgccagcgtccaggcctcgcacacgtcttcctccctgcaacgagccaccccccggaattgggatgatggggcgggagcacctccacaacctcg

SEQ ID NO: 22214 - DNA, 603 bp, Setaria italica
  misc_feature (337)..(337): n is a, c, g, or t
  Peptide Sequence Number=SeqID_88188
aggaggcggccaggagggacgctgagctcgccgcgcggaggacgcccaagcgggaccaccggggaggcgccgccgcctgggcctggaggcgccagctctggatggtcatcctcgtggatctcgtcctcctcgccgtcctcttcgccgcatggctcgcggtctgcaggggattcagctgcattggccggtaaatagctacacaaatttccaaggctgcagctctaattttaagcaagaaatctggagtgcagttgtttctccgatgttaaagtgggtgataccatagcgtggttgcaagctgccaatatttgcatggaaaggcacttcggccccccgnatgttgttgcgtccttactgtatgaatcatgtttaaaagtgaaaggccaacagtcttgctagacttgatatgtttgaatttgtggtttggttaaggtgatctgtaaaccctgtagtgcaatttttttggtcaatttttatattacgaagcaaatgttgagattttgcccattggtcctgtttcccctgcattttgaccagggcagactctggtacatgtgaatcttttactgtcataacctttgccagacttgctgttctttgtac

SEQ ID NO: 22215 - DNA, 1051 bp, Setaria italica
  misc_feature (1)..(58): n is a, c, g, or t
  Peptide Sequence Number=SeqID_88189
nnnnnnnnnnnnnnnnnnnnnnnnnnnnnnnnnnnnnnnnnnnnnnnnnnnnnnnnnnaacttagcgtgacatttcctcttggacttcttgttaggaaaaggaagcagaagcagtgatttacaaattctacaaacacagccacgcacaggcgctgacaatctctaaactgcagttacagctcagtaattcaccagcaaaactgacaatgaaagttgcagtttttctttcacacgaaaatgcaggcatttgagtggccttaaaccgttccttttcttctcctttctcagaaagaaagagacctcattccctagtactctgttctagtcggcaaagaccttgtcttcgagctggaaggccttggtgaagaaggccggccagcagaggtaggtggagaggatgctgctgacagtggaggcacccatgagcatgttcatcaccacgatctgcagctggatggcctccagcggcgacgcgccgcccatgatgagccccgtcatggcgcccggcagcgcgatcagccccaccgtcttggcgttgtcgatcaccggggacagcgcgatcaccagcgacctcttcacctgctgcagtgtcgcctgacgcggcgtcgcacccagagcaagtgcagtctccaccaggttcctctggatcttgacgtcctccctgagcttcttcatggtgacgccggtgacggtcatggcgttgccgaccatcatgccggcgacgggtatgatgtagcggggcgtgaaggggaagacgttgagcacgacgagcaggaacatggtgatggcggtgccgaccaggatggagacgcaggcgatgtacttcccgcgggggacctgcttcgcgcgttggcccgccgtgtagcccgcaaccgtcaccatgaagaggtaggcgaggaggatccagccacgttgaacgcggggctatggacatttgagcggttccatgtgccaatcacagtgactaacgaatctgaattgaaaccaaatgcagaaattatggtgagtgggactgtgagagtgacccattgttgagagcttgttagtgctg

SEQ ID NO: 22216 - DNA, 393 bp, Setaria italica
  misc_feature (350)..(350): n is a, c, g, or t
  misc_feature (357)..(357): n is a, c, g, or t
  Peptide Sequence Number=SeqID_88190
aataagtctaagaacaggcagaagatttgctgttctgagacggtggtaggcgcagaataacataccctagctggaggtgatggtgtatacttggatagcgtgtgaatatggatcggggatataaagcagttgctgggcatctgtgcgcatgtgtatagtggccaaagccagatgcggcaagcccttgtgtgctgcacgtgtttgccctgcgttcgctttgtaacggtgctcgaaacacacagaaatggtgggatccagtatagacgcttagggtgtgtttggttggttgtatcatttgattcataacgatgctcgaaacacacccttatacagttttgaacaaaaaaaanaaaaaanaaaaaactaaaaaagagaactagaccaaggacacac

SEQ ID NO: 22217 - DNA, 930 bp, Setaria italica
  Peptide Sequence Number=SeqID_88191
ggtgatgcagatccgaaatcacacttgctcgctcaattgaacttatcttgagtgcatctaaagctgctgaattaatggttttcagaccgtcagagattgctgcaagtgtgcgtcttgtggcattggggaaacacgacagttcagtacttgagagcgtggcaactagttggagacaattaataaaggagagagtattaggatgctgtgaagtgattcaagaaaagattgttatggggaacattattctgaagtcaattggctcttcagttttcaccgagcagcatagacccataggcgtgctggatgtagctgcatgcgagagccaacaaagtgagggcataagttcaggagttcctataataaacaatgagggtccatcagcaagcaaaagaaggaggatttgcacatgattggtctcatcatcaggtgcttcgctttccaacttttgcttcaagcatgccaatctaattcggccactcagaagagttttggtatgtcaagctgttttgagaattaaaagaagcaagggaaaatatggacccagtttggcccccaaaatggcaaaagccaattgacttgcagcatggtttgatgtttttcccagtttacaagagtcttgggcgtgcaaagccatttgacgatccggtgacagtgttggttattgtctgattggtttaggtagatagtggtgctgtagagatgagggttcttttgttggattttgtattcatgctcccttgtttgcttttgtgagaacttggagggatgctttgatgtgggtaatggaaatacaaggaagaaaatataaacaaactggaagaagaaaagtttgcattggtttccttgagaaagttgacgaatttttgggcactatctaatgctagattgctaaaggcttagcttgttccacttattatctagtaaacccat

SEQ ID NO: 22218 - DNA, 453 bp, Setaria italica
  Peptide Sequence Number=SeqID_88192
accacctttctccttaattccttgctcgagatccaaatctggtctctgacaaaagtgtgtctgcattatcatggagttaccagaaggcaggacacttgggtttgtgttgtttcatatctgattaaccttttgcactgacgatataatacctgtaatgaaagaagttattatagaagttcaaggtgctgagaaatgatattcagcatatccaaagacagtttaaagatggagtaaaacaagtatgtatcgtaatgatacaccaatgagaaaactgagcactgcatcttctatttggaaatacaatgctatactgttaggtaccgtttggatgtagatattcaactttggaattaggaattggtattacaccttatgcaaatctgtatcagtatgacttaccagaggcactggaggtccaatacggagggcttttaaacagaaaagtggtgtaag

SEQ ID NO: 22219 - DNA, 496 bp, Setaria italica
  Peptide Sequence Number=SeqID_88193
cacccttagcactgggacgcgaaacagcaagcacagcaatgtcgggcgtgtgggagttcaggaacggggcgaggctcctggagaagacggcgaagcaggcgggggcggcgccgtgcgagggcaagaaggcgctggtgcacacgccttcgggccagacggtggcgtcacacgaagccctgcagaggtgcctgcagcagctcggctgggagcgctactacgaggaccccgccctcgtgcagttccaccgccgcagcagcgtcgacctcatctcgctgcccgccgacttcgcccgcgtcggcgccgtgcacatgtacgacatcgtcgtcaagaaccgggactacttcacggtcgtcgacgccgcctaaccgttgctcgccgtcgccacccggtcgtttggcttggctttaggcctggccagttgtaagtgtgctcttttatggtttgtgatatgatgcttgcgtgtgtgctatatatacatatatatgtatgtatagca

SEQ ID NO: 22220 - DNA, 404 bp, Setaria italica
  Peptide Sequence Number=SeqID_88194
caaagggattgacacctatcagattgaaggcgataaaagtgagttttttgatgacagggaagagtgccgagaagcattacaatacgttgatcaattgcatcgagctggaatagacacctcagaattcccttggcggttaccagaaagccactgattttgatttagtcaagatagttgagtcgtgtttatctacacaaggagcaacatcagattcccagttttactaggatgtgcttttcaaagataggctatctgagccctgcaagaaaattacttctgcaagtgccaagttttctaaccaaagtgctaacagctaacaaaaaactagcttatcagttatactgttgtactgccatacttatgtagatgaccagatggtccatggaacttcccgtccagtaaac

SEQ ID NO: 22221 - DNA, 372 bp, Setaria italica
  Peptide Sequence Number=SeqID_88195
cttcctacatgatattagaagagttgcagtacgagctgctgttgcaatgggagaacaaggagatgtggtggttatcactggcaaagggaatgacacctatcagattgaaggcgataaaagtgagttttttgatgacagggaagagtgccgagaagcattacaatacgttgatcaattgcatcgagctggaatagacacctcagaattcccttggcgatgaccagatggtccatggaacttcccgtccagtaaattgtggttgctgtgatggcggattggtgaagcttcctggtttcaaaacagagtgtaagggctttctggcgtcacaatttcaaaacagcatgtccaatggcagcgaattattaagtattc

SEQ ID NO: 22222 - DNA, 421 bp, Setaria italica
  Peptide Sequence Number=SeqID_88196
cgtggggaagactgcgtggccgcagaagcagaaggtgtagagcccgagagccgtggggagcctggcgggcctcagcgccgtcgcccccggcgccgagaacccgacgccgtcgacggccgcggcccagagcacgctgaggacgatgagcaccgacgcgaacacgcccgtcgcggagacgtaggcgagcacgccgaggctgcgcagccacgtggtgggcgcgaccgcgagcgcgacgagcacgacgaacagctgcctccccgagagcgacgcggggccgaggctgacggcggcgcccgggaagagcttgtcgaggttgtctccgtcgacgatgaggtagccgatggcgacgaggtagagctccgcgtacatgaaggccgccacgaggagtcggccggcgcggcccgaaaggcgcgctcgccga

SEQ ID NO: 22223 - DNA, 633 bp, Setaria italica
  Peptide Sequence Number=SeqID_88197
cctagcgatcaggagctcaacgacatgatgagcgaggtcgatacggatggcaatgggatcatagatttccaggagttccagagcctcattgccaggaagatgaaggatggtgatggtgatgaagagctgaaggaagcatttgaggtcctagacaaggaccagaatggctttatctccccaaacgagctgaggacagtgatgaccaatcttggggagaggatgaccgatgaggaggttgagcagatgatcagggaagcagacactgatggcgacgggcaggtgaactatgatgagtttgtgcttatgatgaagaatgctgaacggaagatctctggataaaggggacgtaatgaaaccactagtcctcaggttggatgcttctgctataagtttactgtaaattgcaactgtatgttcagtattatgattttaagttgtacgaagtgttggattcccctagtcctccatgtgtaacaagcatagctttctgtttgtaaggttgtgatttgtttcattctagagtgttagctacgtgacccgaaataggattttagaatttccacagatatctagcagttcatataacaatgtgcacaggttcttgaagttatgttaagaaataaaaaaaaaaaa

SEQ ID NO: 22224 - DNA, 583 bp, Setaria italica
  misc_feature (513)..(583): n is a, c, g, or t
  Peptide Sequence Number=SeqID_88198
cgacctcatcttcagtctacacagaagcacttgaggcaacaagaactttgagctacaagcttgaagatgtcttgctgtggtggaagctgctcctgcggttcctgcggctgcggtgtgatgtaccttggcttcgatgagaacactagcaacaccccaggaaccatggtccttggtgtttcagctgagaagggggctggagaagtgccagagaaggctacggaatccggcgaggctggctatggctatggctgcagctgcggctccggctgcagctgcagcccctgcagctgctgaagaggccgggatgtacacacacatgcctgactgcacatgatctactctactactagtaaataagaagccatttgatggaatggctcaagatcatgtcaggcttgggtgcttgctggtctcctattactgtactgctgtgtcttgtgaaaccaaatgactaccatgtggccttgtgagttgtgactgggaaaggaaaatttcaggtttccaaagaaactnnnnnnnnnnnnnnnnnnnnnnnnnnnnnnnnnnnnnnnnnnnnnnnnnnnnnnnnnnnnnnnnnnnnnnn

SEQ ID NO: 22225 - DNA, 1233 bp, Setaria italica
  misc_feature (1)..(46): n is a, c, g, or t
  Peptide Sequence Number=SeqID_88199
nnnnnnnnnnnnnnnnnnnnnnnnnnnnnnnnnnnnnnnnnnnnnnaatcgaaggacaagtatagaaacaaaaaacatttcatatccatgttggaaagaagttggtaactttatttttagctaagcaagtatcaaatggaaaacatttcatatccatgttggaaagaagttggaacatttagctaagcaacaaacaaatggaaacctttcagaaggcaattgctctgctgatcagttatcctggacagtagtaccactctcaagctgcgcatctgcagatgcatcaaggtcttggggaaagaaaagtctgcatgtgttttggtacagagttttacttaagccctctatgtcagcaattcccttgcatccagccactacctcaagaacttgcctgactaaacagggctcattgcggccttttaccattgaatctggctcatacttttctttcttcttggatggccagaccgattttacatactggcttccagcatgggtatttcttatatcacaatatggagagtctgtctctatcatcaacctctcaacaggaatgcctcggagaacctcaagattttcattagttttcagagagcagccattaacacctataaacatcttctcaaaagaaaggagtctgtcacgatctgctgccgagtcagtaaaggagtgtgtaaccccaccagggaatctgtacaaatttcttgacatgatttcacagaagtcttcaccagcagcccgcatgtgaaggaacattggtagttttactgcttcagccaactcaaattgtttctcaaagtacttcttttgtacatctgccggacagaaatgaagcctatcataatccaaaccacattcaccaacagcaaccaccttgcctttctctatcccctccttcgctagagccagtagtgcctgaaaatgtccctccgggtctccactctcctcaaactccccacatctagtcgggtgcacgccgaccgtgcagaacagcctcccgtcggtctcggcgatctccagtgcttccctggactccttcagtgaccctcccgtgacaatgatgcggtcgacgccggtagaccacgcgcgcgcgagtacagccggtatgtcagcggcgtggcactgcttgccgtgatagatgcccttgaacatgccatcggtgaagttgactgcgatgtcgatgagcttgacggcggcggacgccatggccgcagcgcgagaggagggcggaga

SEQ ID NO: 22226 - DNA, 242 bp, Setaria italica
  Peptide Sequence Number=SeqID_88200
gggacggggacgggaagaggtcggaggtgatggaggagaggcggtggtcgaatcccgagaggatgcggatcatgtcgtcggcggcgttcttggacgtggcgagcgacttgacgatgtgctgcgccgccgccaggaccttgtcgtcgccgaccacggcggcgggaaccggcacggggagcccgccgccgtcccccacgccctgctccccctgcggcggtggggcggggcgacgagggcgccga

SEQ ID NO: 22227 - DNA, 375 bp, Setaria italica
  Peptide Sequence Number=SeqID_88201
gaaggaagctggactgcatcgttgtggagaaactgaaaggatctgggctctccttttgacatggtgggaatcgtgcgtcgccggtgaatgcctgctgcatgtgcatttgattttccgaacacatatgtacctactacattccaggttgctttgcgtccgagcccgactacgtgtatgcttgtgcacttatgataagagtgtgccttgatttcctttaataagatatcaacaagaactccgtgtgcgtcgattataatttcataaggaagtattgcgtgcttccttccgtaattgagtgctcgtgcaattgcgttgaatagatctttgctgcttacgcgctgggctcgtatccaccacatccatccatccatcctg

SEQ ID NO: 22228 - DNA, 1228 bp, Setaria italica
  misc_feature (1169)..(1228): n is a, c, g, or t
  Peptide Sequence Number=SeqID_88202
cctcttcatgccatggctcaagccaaaactgagaccagccatggcagcccagagcagggagagagcttcacatccaggcttccgaccagagaaggatggtggaaacagttcttcctcttccaaggcttctggctctcgccccaattgatcaggagcaccgtgctcgtgcaagcccagttccggccacgcgccgacgacatcttcctcgccacatacccaaagtgcggcaccacctggctgaaggccctcgcgttcacacttgccaaccgctcccggcacccggtcgctagccatgcccaccccgtgctcaccagcaaccctcaggatctcgtgccattcctggagctccaccctatcgaagagcttgaggcgctgccgtccccgagactccttagcacgcacctcccgtgcacatcgctaccctcaggcgcatcaacccttggttgccggatcgtgtacctgtgccgggagcccaaggacgtccttgtgtccacgtggcacttcacgaacaaggtgcacaaggattttcacatagatttgggtaaggctttcgagttattttgcgaaggggtctctcacggtgggcctttctgggagcattaccttgggtattggaagcaaagcatggaagagccgggaagagttcttttcttgaagtacgatgagatgatggctaaccctgctgagcatgtgaagatgctcgctgagtttcttggtgttccattcactgagaaggaggagagtgctggagtggtggaggaggtggtgaggctgtgcagcttcgagaacctcaagagcctgccggtaaactccacgggagtgtctgatcggattggcgggctgccgatggagaacgcttcgtttttcaggtctgggaaggttggggattggaagaaccacttgacggaagagatggcgaggaagctggactgcatcgttgaggagaaactgaaaggatctgggctctccttttgacatggtgtatgtgtagtcattatgcttcgacggtggtgactgctccatgggcatttgaaatgttaggagttgtgggggaagaaaataataactcctggcaactcccactttccaaacacatgcactaccacactcctggttcctttgtgtccgtgtgtatgctcgtgcacttgtgctgtcgggtataaaatttnnnnnnnnnnnnnnnnnnnnnnnnnnnnnnnnnnnnnnnnnnnnnnnnnnnnnnnnnnnn

SEQ ID NO: 22229 - DNA, 156 bp, Setaria italica
  Peptide Sequence Number=SeqID_88203
cccatggcaagaatgctggtctcattaactcatatatggcccagcagatgttgggtgcccatgatgttgaccaagttatccagggtgaacatcacgagcttttaaagagatgcaagtacattgtcatgggtgaagagaagttggtgaagaaggtca

SEQ ID NO: 22230 - DNA, 430 bp, Setaria italica
  Peptide Sequence Number=SeqID_88204
gagcggcggcagtgctgttgaacgacgtgttcatcaggccatttgcatgagcaggctaccatacgcctcgcattccatgagctgctgctgttttcgctcgagttgttgcgatgctgctgatggtggtgacgaaacagttgcatggccatcgtgctgcatctggacgcagaggatctcagccttggcgagggcgagctgcatctggagttgtgagacttgctgctggaggtaggagatggcaccgacgcagccgtagacagggtccctcatccgtgcgttggcctcgtacaccaggctgcttaccgcatctgccctctgctgagcaggcagctcctggagcatcttgctgacattgctggcgccaaagaccttgtggacgatggcgaacttgtgaggattccttctaggggggtaagttagggtcgtcgta

SEQ ID NO: 22231 - DNA, 892 bp, Setaria italica
  Peptide Sequence Number=SeqID_88205
gagcaattcttgctccaaggcgggactccaggacgattgacgggttgaactactgtggctgcacaaagcttgaagacaccctcatcacaaagagacaccagcaactaggtagcccaaatcatagcaagagaggttggcaacgggcaaggatgaacctcgacctgaatcactagcctgggtgagagcggtggccagcgcctgtggctgatcatggtcgcccgcaataagcgaggcacaacagaagccgccgagaccgtgcgaaggtgaagcacctccctgcgcgccgggcacggcactctcgttccacggcaatggccccgaatccagcgttcgtgcggaggcgaatcgcctccccgcacaccgagtgcggcgctctcgctgcacgaccgccagcgcccaaagatccgcggaataggtcggggaaggggaggggagggccgcaagctgaggcacagagggccatcgacgcagcttgccagcgaggagcgacggtggaacaggtcgtcaagaccgcaacaagatctgggagccacaggggaagtaggcaggcagaggggcccccaaatccggccgtcggagcagatccacagggccacagccgggaccagccgtgcccatacctttcacccctcacgccatgagagcaagcaggagggggcacccgagctttgggcgagatcgagatctggaaggagcttcgagtggcaaaatagatcgggggagaagaggaagcggcggggagtgaggtgctgctgtggctcgaggcccgccgccgctgccggcgacggcagcgacggcggcgggctgcggttgcgtgaggagggggagcggcggagtacggatgggggcgcccctgagtgacaggagtcctctccaagcctctgcggtcaca

SEQ ID NO: 22232 - DNA, 263 bp, Setaria italica
  Peptide Sequence Number=SeqID_88206
ttttttttttgtacaggagtactggacagttggataactgtaaacagaaataataattagagtagcaggtcatcgacaatgcaaaccggattaagctatacaacttaagataaccaatggcggcacggagcacaagctcacaagtgtggaactccttaactaattgtaccaaatatggctgtgaatcagaacagtacggcaaagtgcgaaaaggccgactattgtcgaccagcaaacaggtaccattggcctctgacgagaaa

SEQ ID NO: 22233 - DNA, 530 bp, Setaria italica
  Peptide Sequence Number=SeqID_88207
cgatggcgcctatagctggcccaaccatcaatggatccccaaccttgctggcaccttaccagctgaagtagcccattctgaccagaaacccactccatcagataaaggatcagctcgtgctgcactgcctttttcccctgttgaaccaataaaggcagacagtaatgtttctgcagctgattatactaatgcgccgcaaatggtttttcggcaacaagccaggccatctgcaccgagcacaataggaattccagcctcagatacccagggtgttatagggaaaatccaggaggtaactcctgataatcgccgcaccggtgattcaggaaaaccattcgttccaagtaaagaacaggtttcacatgcatcacaagcaatccctggtcaagaagaaatggcatctctaccaggcgccatagtttctccaacctcagatgcccaagttgcctcgtcagaagttcaggaagtcagtcctgatgatcaacaggctgcttttggaccaggtgaagtaggtgctgctgaaaagaaat

SEQ ID NO: 22234 - DNA, 519 bp, Setaria italica
  misc_feature (6)..(6): n is a, c, g, or t
  misc_feature (31)..(31): n is a, c, g, or t
  Peptide Sequence Number=SeqID_88208
ggcccngatgggcattgcgtttggccgctanccctttgcgaccgacgtgactgtcgtcctcggcgtcgatgtccttgttgtcctcctcgccgtcgccgtcagctattgtggaatcaaggtgagtatgaataaataaattcctcccacccttccactccggcagatctctccaccctcgcctccgcccgtcaccgtcgagatctgctctccgccttccccatctggcagttcctgtgtcagatccggctgctgggctcgtggatttggtcctctgtggtgcagatcagccagtccatagagttcttcccgccatctctgctccagctccacctgcctttgctggcccctccgttcgccgctgctgtgtcgcctttcgttccacgcccacctccacctggaagctcaactacatcaacaaatacaacagcatgtggtcgatcttgccgtcgccaccgccgcagcttgctatccccggctacgaggaagacgcccaataacactctgccgacgacttcaaca

SEQ ID NO: 22235 - DNA, 393 bp, Setaria italica
  Peptide Sequence Number=SeqID_88209
ccggaccatcgccgtaaacgtggttgtctccgtcgccgcgaaggccgccgtcgtcgcgctcgccgtcgcgtggcgacccgtgctgtgggcggccgtgctcgccgacgtcgggacgtgcctgctcgtcgtgctccacagcatgacgctgctgagggaacctgggacacggaggggagggaaggacgaggtgtgccgcgccacggcgaggtcgctggccatgaggtcgtcccagctcgccgcagcatcgaacggcgcgacggcgagtgttcagggaccagatgttggaggaactagaagctgccgttgctgtcagaagccaggaaagtcgtctgagcaggagcactcggttgtgatcgacataccggcggcatcatcatcatctgccgagcatcg

SEQ ID NO: 22236 - DNA, 409 bp, Setaria italica
  Peptide Sequence Number=SeqID_88210
aaaggtgagtgactttagctgaaggatattttgactttaatgcagctgggatgttgccagaaaatgctggaagaactgggaacatgccaaaagcatacatcctagaaaggattttcttctgaagagctagttgatcatctagccaggtctgaggaaggggcccaccccatccatgcatattagccattcgagaccatgcaagaaaagctggcccaccaaagaaatcatccaaatctgatttgctaatgttgtacctctgaaaaaaccctctgccatatagactcttgcccagtgaaagcaagaggcaaattgatccttgaagagccatccaggtcattctcctcccaacgttcgttcccaatccgcaaagatagctggatgtaactgcattctggtagtagctccagtc

SEQ ID NO: 22237 - DNA, 532 bp, Setaria italica
  Peptide Sequence Number=SeqID_88211
acgccgccctcgtgcgggcctcggtactccatcccttgctgctgctgctgcggcggcggcggtgccgtggaggccgacacggacggggacgtcgacgccggcgagctcatccgcgcgggcaacgtgaagctcctcttgaacttggtgctctgggcggcgctctccaccctcctcgccttgttcgagtggctctccaggctgaggtactcctccacgttctcggccccgccctgtgcggcgtccggcgctgccttctcctcgtccgcgccgcctccgcctccaccggggccgccgaacagcagcttcgcgtcgtccgcgcgcccggtgagggcggtgaagaaggacagcccgttaggccaccggaggtcgccgtcgggagcctccccgccgcccggccccatcgcctgctgctggtgctgctcgtccatgtgcggcggcttgccgccgccatggtgcgctggcgggaggtggaacatgtggccctcgtcctgcttgccgccagggaacgcggcatcgggcgcgcggccgacgg

SEQ ID NO: 22238 - DNA, 243 bp, Setaria italica
  Peptide Sequence Number=SeqID_88212
tcaagcataggctgaaggccctgaggagtaagcaaatggatctcgatgcgggtacatttcgcgatgatgaggttgagctggttggggctggtgaagttgccgacgcaggagtggctgacgctggtcggcttgtgcgccgtgaccacgtagttccacacgctcatctccgccgccgccgccgccgggggcagtgggctctggaaggtcggggaaggaggcggtggtggtcagagagggacgagg

SEQ ID NO: 22239 - DNA, 246 bp, Setaria italica
  Peptide Sequence Number=SeqID_88213
atcgtcgggtgcgggtgcggctgcggcgcgccccatgttcaaatagcgataatggtgttcagacccgtgaactttacccctgtctgactacccaagccagcgagcagcggccgccaccaaactcccagcgcatgggatgcatgcaccttgacagctcgctgctgcctaattctggatttagggggtgtttgatccccgggctaaactttagcccctatcacaaggagtattaaacataggctaatt

SEQ ID NO: 22240 - DNA, 511 bp, Setaria italica
  Peptide Sequence Number=SeqID_88214
aggcctcgccgccccacgaggcgaccccgcaggacgccgagccggaccccgacgacgcgctgttcgacctcccggacctgctcctggacctgagatgctgcggcccgtcctcgtgggccgtcgacgacgacatggccgtttccgccggcggcgcgttccgcctcatcgaggagccgctgctgtgggagtactgatcaatgcccacagacatcgcgggttcgttcttggagcagtcgccacgccagtcatcagcaactccccgcatcgccgctagttgagtattagaaccgatcggacacatgtaaatgccaccgctttcgttcctccgttctgccctttctcttcttttcgtagcaagttctttttctccagattgctgctctcccgtccgctgtcccgttcttcccctgttttccttttgccagattttaggagccgcgcttgtacaaagctattcccttttcgccttctcttgcttgatttggggaccagaatatgtataattaacgag

SEQ ID NO: 22241 - DNA, 173 bp, Setaria italica
  Peptide Sequence Number=SeqID_88215
aaggaaggtccatgctccaatttgctgcacatggagatttttattgccgatacggctgcttgcatcgcaggagctgatcgaggaggacaaacaaacagacatggcagtctggctggcctctgggaaactggggagttgcaagtcggtgagcgaatcatcagcaggcttgctct

SEQ ID NO: 22242 - DNA, 542 bp, Setaria italica
  Peptide Sequence Number=SeqID_88216
tggctcataggcctctgtcaagcaaggagaatagatgatgctctcaagatttttcgtatacttgtggagtttggcataaatgtcacaccagcttgctgttcccatcttaccaaatacctatgttgggaaagaaatctaaatgcagcagttgatgttatgctctatacattgagtaaacgctttattatgtcacaacctgttggcaaccggttacttaggaacctttgtatctgtcacagaagaaaggacgcgcaggcacttgcatggcgaatgcatcttgtaggatatgatatggatgcatatcttcgtgagtctactaaaggtttgttatacagtcaatagaaatctagtgtttgtagggctacagagctgccctcaagagggatgctgatgttttgaagttttgatctgtaccaatttgttttaggtaatcccaaagtagggtttgattcactgatttcttagctcttgcagtggattttgtaacccaccaattcagttgtaacttcaataaggaggcaagaatttgatatcctgcaaaa

SEQ ID NO: 22243 - DNA, 668 bp, Setaria italica
  Peptide Sequence Number=SeqID_88217
cgggatcgccgcctcgtggcgagggtcggtggactgttgcacgtgggacggcgtgagctgcggcggcgatggcgcggtcgcgcgcctctggctgccgcgccgtgggctcggcgggacgatctcgccgtccgtcgccaacctcaccgcgctcacgcacctcaacctctccggcaacagcctcgacggcgtgttcccgtcggcgttgctgtcgctgccgagcgccgccgtcgtcgacgtcagctacaaccgcctctccggctcgttgccggacctgtcgccgtcgccgcccgcgggggccgccggccgttcgcttccgctgcaggtgctcgacgtgtcgagcaatatcttggcagggcagttcccgtcggtgttctgggacaacacgccgagcctcgtctccctcaacgccagcaacaacagcctggaaggttcgatcccatccttatgcgtgagctgcccgttgctcgccgtccttgacctctccgtgaacgcgttcggcggaggcatcccgccggggttcgccaactgttcgcagctgcgagtcctcaacgtcggccgcaacaacctcaccggcgagctccccgacgacatcttcgacgtgaagccgctgcagcggctgctgctcccgtcgaacaagattcaaggcacgctcgatcccgagcgcatcg

SEQ ID NO: 22244 - DNA, 661 bp, Setaria italica
  misc_feature (631)..(631): n is a, c, g, or t
  Peptide Sequence Number=SeqID_88218
gaactgcagaccgagcgggataagaataagtccctaaccgagaggctcgaggatatggagaaacaacttgacactgcaaacaaggagcaagaagcaatgatagaactctttgcagaagaaagaaactaccgcgaccaagaggaggggaacctgaagaggaagctcagtgatgcctcttccactatccaggacctgatgaagcagctcgatgctgctcggaactgccgcaagagatgaaggagcagaggaagcaacttcactgcagtagtggcgcgtgtatcggcaccatctcttctgtggtgcagggtagtgcaaataatgtcgaaatggctgtagcgggagcagctgctagcagtagcagaatgttcggtatatgtgttctacaccctgttgctagatgtgcatgtatatacgatgtatatatatgtagtgtgtaccacgagagcttgagtgctactagctaataagcacgaacgaacgggttcaggtggatgcagtcctgttactggtggtagagttcacccgccgcttgtggtggctggactactcaccagtcaccactcggctcatgtattgtataatggatacgtgtaccttcgctagtgctttccactttgtaatatgcttttcngcgtgtggtagaactaaaaaaaaaaaaaaa

SEQ ID NO: 22245 - DNA, 461 bp, Setaria italica
  Peptide Sequence Number=SeqID_88219
ccacgcaaagcattgggatgctatcatacaccttccttaggagcaccaacaaagaagatatcattgttcctatggcaagcttgacttcaccattgctttattttttaaaagcaattcaccattgctttattacgtgcatcgtctttatgtttatgatagttgttgttgctttagcagcagattcttttggcaatgctagttagatgattttttttctataatgaagagtctactgggtaattgtgacaccaacaagtttgaattagaacaatatggatggattattattgtgttgctgattgaaggtgtaatagcatatgtaactcaaaaggttccaaatgaattcaacatctgactcaacccttaagtgaagagtgcaggcatggttgtcgcatgtgcatggtttgtgaggatgaactgaaatggccttgaattcatatctttgtgccacattaaactgt

SEQ ID NO: 22246 - DNA, 1955 bp, Setaria italica
  Peptide Sequence Number=SeqID_88220
ttgaaaaattgacaatgaatagaaaaataagaaagatgggactcggatgctgcttattgaagatgatggtggtggaatgaacccagataagatgcggcattgcatgtccttgggttattctgcaaagagcaaagttaagaataccattggacaatatggaaatggttttaagacaagtacgatgagacttggtgctgatgtcttagtattttcacgtagtcgtggtattgaaggaacaaggtccacgcaaagcattgggatgctatcatacaccttccttaggagcaccaacaaagaagatatcattgttcctatgattgattatgaaaaagaacagggatggaaaaggaaggtgcgcacgaactagaatgattggcgtatgagcttagagaccataatacaatggtctccttatgccactgaagcagaacttatccaggagtttggctccataggggaacaaggaactcgaattgttatatacaatctgtgggaggatgacgaaggagagttggagcttgattttgatgctgacgcaaatgatattcagattagaggtgttaatcgagatcagaaaaatatccagaaggcaaatcagtttccaaactccaaacacttctttacttatagacattctctcaggagttatgcatcaattttatatctttggctcccagataacttccgaatgattttacggggaatagagattgagcaccataatattgtcaatgatctaatgctaaagaagaaaattacttataagccagcaatggccaatggatttccaaaggatacacatatggctgctattgtgacaattggttttgttaaagatgccaaacatcatattgacattcaagggtttaatgtttaccacaaaaaccgcctaataaagcctttctggagagtatggactgctgctggatctggtggccgtggtattataggtgtactagaagtaaacttcgtagaaccagctcatgataagcaggactttgaacgcacaaattgtctagcaagactagaagcacgactaaaccgaatccagaagaaatattggtcagataatcgtcatcgaatcggttattgcgtcgatagtgatagcacaagttctgggacaggaaaaagagggctgtcatcacgccgatttgagaaaggttcccagaagtcaaattatttgcaaagagtcaaaaacgctgacagatcatgttctgacccggcaaataagaatatgaatgcaagcatgccatccccccggatgaccaagcctagttctcccaacagggagttctcttcaagaacgatatcccagcagagagctgaaaagtctgcaagaaaaataagacctgaaagatcagttttgcatggttcgtcaaatacaagtgatggcgatactgagcttgcaggaaccccatccagatcaacttcccctgtcctgaggacacctgaaaaatcttttcataaggtgaatactagtttgccttcactgtcgctcgctggagtaaaacgaagtgagaggattgcggccagatacaagtcaaaggaagcaaatgtaactaatggagatgggcaatctactgttcaccctgaagctattatcaagcagttgaaggaagaaaattcatcattaaaggataggatcttgatggtgcaggaatcattgtcaagggaactgcagaccgagcgggataagaataagtccctaaccgagaggctcgaggatatggagaaacaacttgacactgcaaacaaggagcaagaagcaatgatagaactctttgcagaagaaagaaactaccgcgaccaagaggaggggaacctgaagaggaagctcagtgatgcctcttccactatccaggacctgatgaagcagctcgatgctgctcggagctgcttgtccgttcttaagttagtttattttgttttaaggttttagttttcttttagtttta

SEQ ID NO: 22247 - DNA, 512 bp, Setaria italica
  Peptide Sequence Number=SeqID_88221
agggtaccgttccttgtcttggtaacgtcatgtcttttgaagataaagtaatcgctagtcgtgtcacttcaccctcaccaaaatctgtgttgtcagactcagatcccagcaggatgatgatagttagttcaaatggggagctttctcaaacaaatggccaggcaaatgctgttcttggtccagtggccatcttttgggacattgagaactgccctgttccaagtgatgtacggccagaggacgttgctggcaatgtccgaatggctttacgcatgcatcctgttgttaagggtgctgtgactatgctctctgcttatggagatttcaatgccttcccaaggagactcagggaggggtgccagagaactggagtcaaacttgttgatgttcctaatggacggaaagatgctgctgataaggctatactggttgatatgttcctctttgcacttgacaatcacccaccatcatccattatgctcatatctggtgatgtcgattttgctcctgca

SEQ ID NO: 22248 - DNA, 240 bp, Setaria italica
  Peptide Sequence Number=SeqID_88222
gcgtcgcctctgttccacttccacctccgcacccaggcccaaaggccgaaaccgcaagaccatccagccaagccacccatccacccctctctctctcctgctgttccacctccgccgcctcgcctcggcaactgctccacgagcggctgagcggccgctcgccggcggccaaaccctaggcgatcgcggagaaccaaccacgcttcggccgcgatcggctgccgccgccatgcagggctt

SEQ ID NO: 22249 - DNA, 350 bp, Setaria italica
  Peptide Sequence Number=SeqID_88223
ccggataccatccgcaagaggtctgatatgtacaacagcatgagaactgcggaaggagatgcaaaggcgacttggatggcaaatgggacacaatggccaggcacatggattgattcgacagaaacccatggaaaggacaccatgatccaattgctaaggttgtcctggatcatccaagccgtgggcattcacaaccgaatgctgaaggcattcccagcatcggtgccactgatgagcgcctcccgatgcttgtctatgtctctcgtgagaaaaacccaagctatgatcacaacaagaaggcaggtgccctgaatgcccagttgcgggcctctgctcttctgactaatgcc

SEQ ID NO: 22250 - DNA, 371 bp, Setaria italica
  Peptide Sequence Number=SeqID_88224
tgtgactcagtgtgagtagtccatatattcagaaattaatctttataatttacacgaacaaaaccactttcgcagagcatattatagcaaagtatatattgacgtataagcaaaggaaagaaaaaaaagctaaggctaaagatcaacaggatctctctagatctttacaattgattgtgttcatcatcacaatttttcgtcatcgtcaacatctagatgcatcgccctccatgggctctcttctcgccacaaagcttcaaaccaatcgcatcatcaacccccacaaaccaaggcgagagagaacggaggacgagccaaaccgaaagctaatcaaccagcacaaaggagacacctcgaccgattgatcaggc

SEQ ID NO: 22251 - DNA, 557 bp, Setaria italica
  Peptide Sequence Number=SeqID_88225
accagcactctgcaggtacgatggactaaacttgatgccttctacagatagcattagtggagcagacaacaagaatgccatgatagtcattatcgagaagaggtttatatcatccaaattgtcctctttgtcagcgagaagtttcttgctgaaaacattccgtgattggttggtaagatttgaagccatggcgctccaaaatccaatccagttgaaagaaacttcagtcatggatgccaataaaactccaccaacaatagggacgagcgaacccaacaccaataaagaaggtgtctctccaagaaacaggacagagagaaggacagagaagaagggctccatggccttgatggtgtgcgtgaaggagacagccaccttgcccaaactcaaattggtgaaaacatttcccagcatgtggattaaagcaagaggcaggatctttgcatactgtttaagggagagccttggtttgggatgcagattcagcagccacatgagtgtgatgaagaaggatcctgatgcgaactggaaggtggtgatggtgtacggaaagggac

SEQ ID NO: 22252 - DNA, 266 bp, Setaria italica
  Peptide Sequence Number=SeqID_88226
ccggcgaggagtaactggcccgggcacggacgctctgcgccgtcagatttacccggctgtgcaggccatgggatgctgcaaaagcagaaacggccgccgccgccgccgccgcgacaggagagctgggacgagcacccacaaggtaggcgaggttcctcaggccgtgtagagcatctgcttcgctcctccccgccgccgatccgagcgtcccctgggtagcgatccccggcaaggaggaacaggtcgtgcacggatcggtaaccccc

SEQ ID NO: 22253 - DNA, 608 bp, Setaria italica
  Peptide Sequence Number=SeqID_88227
tttagtttaagtttactttatttttttaattttgttagttttcctttggtattccttctttgtctttacactcacttcaccacagagggtgaggtggaatttcgaagtgtcctgtatgtcccaggaatggcaccccttagtaatgaggagataatgaatccaaagaccaaaaatatccgactgtatgtcaaaagagtcttcatatcagacgactttgatggcgagctgtttcccaggtacttgagctttgtgaaaggtgtagttgactcaaatgatctccctctgaatgtttctcgtgaaatccttcaagaaagtagaatagtcagaattatgcgtaagagactcgttagaaagacatttgacatgattgaagagatcgccgagaaggatgacaaagaggactacaagaagttctgggagagctttggcaagttcatgaagcttggttgcattgaggacactggaaatcacaagcgtcttgcaccattgctacggttctactcttccaaaaatgagacagatttgataagtctcgatcagtatgtagaaaacatgcctgaaacccagaaggcaatctaattatattgctaccgatagtctccagagtg

SEQ ID NO: 22254 - DNA, 1866 bp, Setaria italica
  Peptide Sequence Number=SeqID_88228
cggcatcctgtccccgggttgagagaagagttccgcttcagattggagaatcttgtccgtggtcaagcagttagccaagcagatgcttcttcaactcatgatgttgaactatctacaaatgatcattctgaatcaagacctccttctgaaactactcaggagagacatgaacaaacaagtgagaatatcagtcttcagcaaattgaaggtacagcaacaacatcaggatttgaaagcggcagccctagcgttgctgaagtcttctgtggatctcatagtcaagtagaaagtcaggaagatttggaacaggagagaagagattggcaacgattttcccatgctgtgattggagaggaatctgaaagaagttggcgtgagaatgcagacatctcatcccgtgaggggacagcagttgaggatgatcacgacgatcgtcttccagtagcaaatgaagagtcaaccagtgttgatcgtcttcctgaagcacacgaagagtcaatcagtgatgatagtcttcctgaagcgcatgaagagcagcatgatagtgatcatcttcccgaagtgcttgaagaattgcatgataataatcaccttcaggaatcacatggggagtggagcagagatgatcaccctatagaagtatatgatgagtggcagagtgatgatcatctcccagaagtcaatgaagagtggcaagatgatgatcactctgctgatcatcactccaattggcatgataatacttctgaccaaccaattgaccatggtgctgctcttattagaagaggtaacacattcatccctggggatgacgagaatgtgtatagcacagaattgagggaacttctaagcagaaggagtgtttctaatcttcttcatagtgcttttcgtgagaacttagaccggcttatccggtcatatgttgaacggcaaggtcgtggtcctctcccttgggatctggaaggaagtcaaggaacaactcctgcccctaactcaccagatcaaaatcaggagcatcaaagagatgatgatgaccaggaactgcagcaccctgttgacaggcctcctttagtgataccacctccacctatgcctcctcgtcagccactttggcattcagagttgcatcgtaataattggatcaggcaaaacattcatcgttcttcttctgacattgaatgggaggccatcaatgatttaagggctgatatggctagacttcagcaaggcatgagccatatgcaaaggatgttggaagcttgcatggatatgcagctagagttacagcgttctgtaaggcaagaagtttcagcggccttgaatcgtttcattggggagcaaggtgagagtaaagaaataattgacgatggttcgaaatggataaatgtgagaaaagggacctgctgtatatgctgtgagactccaattgactcccttctgtacagatgcggacacatgtgcacatgctcaaaatgcgcgaacgaattggttcggggcggagggaaatgcccactgtgccgtgcgcccataatcgaggtgatccgagcatacttcatcatgtagatacgtggaagaaagcaagaagatagaggaaacatttggtgtttgtgggcgcaggtgtggagttgttagtgggtggtgtatggttgtattcaattttgttcgttctatctaattctttgggggtttgggggttcctttcatttttgccctgcccagccctgccgcggtgtaagtaatgtatggttttgggtgtggcggcagatgggggaggtggccttctctgattgagacttgggtcactactaatttttgtttcacagcgactaatgggggttggggtgggttggaaaatgagatggaggt

SEQ ID NO: 22255 - DNA, 457 bp, Setaria italica
  Peptide Sequence Number=SeqID_88229
agtactccgactcagtcgcactagtaaggctcatgaaagcacagacacttggcgacacgtcaagcttagagttcatgagaggtagacgaattttcgaaatcaatcctgaccatcctatcatcagggatctgagcgctgcttgcaaaaatgagcccgaaagtactgaagccaagagggctgttgagttgttatatgaggctgccctgatctccagcgggtatactcctgaaagtccagcggagttgggaggcaagatctacgagatgatgaccatggcccttggtgggagatggggaaggtcagatacggaggacgctgaagctacctctagcgaagccagcgttgaggttgattcttctgaaggtgccgtgacagaggtggttgaaccctctgaagtgaggaccgagagcgatccgtggaaggattagggagttctgctgctcttgtctagggatta

SEQ ID NO: 22256 - DNA, 1961 bp, Setaria italica
  Peptide Sequence Number=SeqID_88230
gtgccccacgaggggtcgagatgggaggccgagaggagcagggggagattggtcacggtgaggtgcgacgcggccgtcgtggagaagcccgccggggaggaggcggccgaggagaagttcgagtaccaggcggaggtgagccgcttaatggacttgatcgtccacagcctgtacagtcacaaggaggtatttcttcgggagcttgtcagtaatgccagtgatgcattggataagttgaggtttcttggcgtgactgattctgctttacttgctgatggtggagagctggaaataaggattaagcctgaccctgatgctggaacaattactatcactgatactggtgttgggatgaccaaagatgagctcaaggattgccttggtacgattgctcagagtggcacctcaaaatttttgaaggccctcaaggagaacaaagaccttggggctgacaatggtctaattggtcagtttggtgttgggttttactcggcttttcttgtagcagagaaggttgtggtgtcaactaagagtccaaaatcagataaacagtatgtgtgggaagctgtggcggacagtagctcttatgtcatcaaggaagagactgaccctgagaagatgcttactcgtggaactcagattactctctttttaaggcctgatgacaagtatgagtttgctgacccttcaaggattcaaggcttagtgaagaactactctcagtttgtatcattccccatatacacgtggcaggagaaatcaagaactgttgaggttgaagaggatgaagagccaaaagaaggtgaagaggcaacagagggtgagaaactaaagaagaagaagactattactgagaaatactgggactgggagctggctaacgaaacaaaacccatttggatgagaaatccaaaggaaattgagaaaactgaatacaatgagttctataagaagacattcaatgagttcttggatcctcttgcccacactcacttcacaacagagggtgaggtggaattcaggagtgttctgtatgttccaggaatggcacccctcagtaatgacgagataatgaaccccaagaccaaaaatatccggctgtacgtcaaaagagtcttcatctctgatgactttgatggtgaactgtttccaagatacttgagctttgtgaaaggtgttgtagattcaaatgaccttcccctcaatgtttctcgtgagattcttcaagaaagtcgaattgtaaggattatgcgcaagcgacttgtcaggaagacatttgatatgattgaagagcttgctgaaaaagaagataaggaggactacaagatgaatctttattttactaccagttattttgtttacttgatgttaaagctctttaatttgtgctgtaggactacaagaagttctgggaaagctttggcaagttcatcaagcttgggttgagttgttatatgaggctgccctgatctccagcgggtatactcctgaaagtccagcggagttgggaggcaagatctacgagatgatgaccatggcccttggtgggagatggggaaggtcagatacggaggacgctgaagctacctctagcgaagccagcgttgaggttgattcttctgaaggtgccgtgacagaggtggttgaaccctctgaagtgaggaccgagagcgatccgtggaaggattagggagttctgcagctgcaggcaaggattatgccttgaaggtgtatgagcacagcatagaagtatgaaccagagccaggtttacgaatggttcgggttgtgctgcgaagataaaattttgtaggctatagtcgtccaacgaaatgtgttgcacatcgtgcgttcaagagccctttttttggtgtcatctcgagcggtcacatacattcacgcacacaagggtggacccagctgatgaacatggatgtaccttaaaccattttgatacaaaaaa

SEQ ID NO: 22257 - DNA, 468 bp, Setaria italica
  Peptide Sequence Number=SeqID_88231
tgaccaaaaatatattcacaaggtaccaatggagaaggacgttttcttgttctggtaatcccatgtacaacaaatcgatgcatctcaatatttttctgccttgaatagcagttcttgtgttccaaggcccacagataggacccttatcaagcagctctatggcgtaaacatctgaaaacttgattttgttgtctaatttaggctgcattgtaatggatgaccaacatgaagagaacagttccggatggaggggctgtagcgagaggtcgctgcggccgatggacacgacgacctccccggcgccgtccaggaacagcacctcgccgccgtccaggagcacctcgccgccgtcctgcatggcctcctcgacaagttgtccggcgcgcgctcgtgtgggtgtcgctttcttttccgttgccggtgtgctgctcgacgtagtcttttcggttggggtagtcggtaagtagt

SEQ ID NO: 22258 - DNA, 277 bp, Setaria italica
  Peptide Sequence Number=SeqID_88232
tacggccgcgcctccatgccgtcccacgccgctgcgaccttccttgaccttccccagaagcacaagtccgtcacggccttcaacgccctcctcgccgcctacgtggactcaggcaacttcgacatgctcgtcgccgcgttccagaaacccggcctctcgaccgccctcgacgtcatcccgctcatggagaagtgtggtcttacccccgatgggatgtctttcaacagtctgcttaatgggttttacaacaatgaccgttttgatgatgccgagaaag

SEQ ID NO: 22259 - DNA, 593 bp, Setaria italica
  misc_feature (27)..(27): n is a, c, g, or t
  Peptide Sequence Number=SeqID_88233
cgtgtacatatacggactaaccgtgtnaagggttacggtacagatacggtagtcgtgtattacagtagtataaactccaaaactctcgtatctgaagaaggtgcgctctctggcctctgctccattcctctctgcacgcgaatgcaggaggagagctcatcagttcctccgctcctggccccacggcgagtgccgggcgttggcgccggagcccgggtagtcctccagctccagatccatcctcccgccggcgccgccgtcgccggctgccgacgcctctaccgccaggacggcctgatcgtctgcgccgcacgaaggcggagctgctctggtatcctgcttgaccttcaatcctggagaaaacgaagtatcagcagcagcgcttgatgcgtggatgaggcagcagcacaaggcgagggcgaccacggccaggcgcatcgccatctctctcttctccaggctttcttgaaacaattcttgtgctctttactcactgttcttctacatccatggagctcacatggagctctggatcctcacctatttttatagcgattccagtgtggaagaagatgatagaggattctgaagcg

SEQ ID NO: 22260 - DNA, 449 bp, Setaria italica
  Peptide Sequence Number=SeqID_88234
ccgaacgccgccgccggcctgagctgcgcgcactggtccagcttggagagccccgaggtgagctgctccttgcacacgttgctggcgatggcggcgatgaggcgcgcgacgaggttgacgtcctcggcggccgggagcagcgcctcgcagctgcggagcacggagacggagctggcgatgctggggagcacggcgtcgcggaggaaggcctcggcgcggagctccaggttcttgtcggagaagtcctcggtcatctgcaggtagtgcgctgcgcagcgaagcatcgcgacgttggcgaccgtgacctcgacgtggacgccgtagcagaacttggcggcgagctcgaacgcctgcgcgccgccgggcgtgccgtgcaggctgagccgcgccagcttggcgtccttggcctccgcgacgagccgccggatcttgccgctccgggacaccag

SEQ ID NO: 22261 - DNA, 956 bp, Setaria italica
  Peptide Sequence Number=SeqID_88235
ctgatcggcggcagctcgtcgtcctccgccgcgcacggcgcgcgcgtgcaggggaccctgaagcagaggtcgaaccccgtgcgcgcctccatgtcgcgcgacctcccgtacggcacgaccgcggcgagggacgccaggagcgacgcgtagaacgggtccgggaggtgggtgtacgtcgtcccggtgtcgacgagcacaccgccgttgccttgggagtcgacgccgctcaagctcgggggagcagcggccatggtggaagcagagccgccatcggctccgaagctgacgccctccaggccgatgtagtagaagtttgggtaggtgacgctcttcagcatcggggtgaagatgaagccgccgtcgtcggtcgccgacgacagcgctaggtcgcccatcaccagagggctggtgaagttggggttcctcgcgaaccggaagccgaggaagcagtgggagaagcccttgcccaggaaccctagctgggagggcagggacagcgtgcccttgccgaacccggcaatgccgatcggctccctgatggagctgcccacacagccgaagctgaagcctgggaactccacaggtgacagaggatcaatgccatgtatgcttccatggagcgttacagagtcccttgcaagggaccccaggaccagtgctccaccgccgtaagtgtaggagaaaggagggcaaggtctggggcagagaccactggtgaaggcagggatggcgcatcccaccgctgcgcaaggatcaaacctgttgtcggagctgtggacgtcgacgcagaagcggctgccgcagaggtcccatgtgttcgacgaggattgagacggcaagaacattggggttggcttagaggagctatgctgatcgccacactccatgcactggtaactgctggtgccacaggggacccaggtgaggtcactccccgtgtccaggtacacttggaa

SEQ ID NO: 22262 - DNA, 1084 bp, Setaria italica
  Peptide Sequence Number=SeqID_88236
tcgccatcgcccccgcagcagcagtgccggtgtgccacttgctgtcggccagctcgagctttgagctgagtaagagagggagttgggggagggttggtgttcagagcatggacaccatcgaggagtgtggcgatggcagcgaccgacacctgctctccggctccaggatcctcgtcggcgtgccggacaactcccgggggtgctcggagctcctgtcgtgggcgatcggcgccgtcgccaaggccaatgactccgtcgtcgccgtccacgtcctcggagggagagggaggaaaaagaggctgcagaaggcgaacgccttcgtcatctacatgctcggagagttcgtggaggcgtgcgaggccaagcagatcaatttggaggctaaggtggtttgcagctcaaacattgggagagccctgacccaagaagctgcactgactgatggaaacatccttattgttgggagatcaagaaatgcataccataggagccattttgagactgcaaactactgcttcatgcatgctccaaaaaactgctctgtgatagctgttggaagagaaggcttaccacaatgtaatgcccgattaaggtctcggtcgttcgatgcagaaagcaacatatcctcaagctcaacatggagcagaagattcccaccacttcagaagctactcagatcaaactcaatgcgaaaaccggctcaatccagtactgaaggcgctgaggacaagagctcaccgagagcggttcttgatggtccggaggaaggggacaaccaagtcactgaagaatgctacagcacgtctagccatgaggtgagccggcgtggccacaatggcctatggaggcggttgtcagacatgaagctctggcttccattcctaaggacaatcggcgatgacagtgtgagggccagcgatgctggttcggcgtatgctgaagatcagaagcctgcctggaggtgtttcagctttcaggagatctcagtggctactaatgatttccatccagataacttggcgggaagaggaggctatgcagaagtatacaagggcgtcctatctgatggccaatatgtagctgt

SEQ ID NO: 22263 - DNA, 559 bp, Setaria italica
  Peptide Sequence Number=SeqID_88237
caggtcattccttgaacctaatccttcaacagagttgtgatgtcgaaaggagctacctccttgcctcaaatagccctctatctgggggagactcgatatacacttcaatggtagcaacaattgcctcttggtgtttcacttgagattattgccatggatcacaaaaaccagcatttgcatctgcgcagatcttgtggaccttcaaaccacctatcccaggactgattcacaggtccagtagttacaggaagtagaggatctgctttgctttccatcgctgttagaaaccttatcagttttctgaagctcttcaagttcctcctgcatgcagtcacatcggccacatcagtcttctaatgctgagaacatcactactttggtaaggatggaagactacaaaagtttgaacaataaatacatcttgccagctgtgcataattatatattacgaaaaaaattctgacagatctgacatacaatgtccagaatgaaaggtgaggaaatgtagtctatagcaatgatacagagaaatttaatatgttgtcagttggtaacttgt

SEQ ID NO: 22264 - DNA, 1185 bp, Setaria italica
  Peptide Sequence Number=SeqID_88238
tttttttttttttttttttgcagtgaagacagttgggacttttataaccaaatatagccggcaaatagcttcatcataaaccagtgccttgcgacgcggcgttatgcacacaaatacggagtgccgctctattgcgccttggggtgacacagaaaggcatttataatatatgaggaaaataataaagaataacaagtagctataatgttaacttagccctctaccgctactgtatttctcctctctctctggaaaaaaaatctcaccataaaattaaaatacatgcatgaaccagctagttttatgactaccactgtaataataaacaagatgataacaaatcaacaccggcctccaactgcagaggttctactatgtcagcttgacatcatgtatctgctcaaatgagatcctatttcctcagcagaaactgctataaaccctagaaatatcaaggaatatcactggcgaagaggtactgcagtcggaagggaactgaagtaaacatgataccatatctacatatcagcatgcccaaatggtgcacgcacgaatagctgaccatgaagcgtgacaacagctgatgtttggtggggatcaattctagatggcaagttaaccaccttcttaaacggagtgatcccccaaggattatcaggctgctctggatcacccgtgataaccagacgtccagcaggatctgactgaacatgcacctcctcacgtagaagtccaggaactagcgcatagacttcaaagcaatctttagtctgccgcacattgatcttcacccagtcggctggttctccaacgtcaatgaccatagaatcttcctgtgacttatttactttcgtgcgggacgacttgagagcatactctggactagatgctttctttctcttgagcaccccaaagcctttcaggtttttatcacgacttgaaagtggcattgaatctttatccttcaaaatgttatctccataagtgccattcgtctaggaggcggtgagcatgccaaccttgcatagcacgcgttgcagcatcccttctaactctggcggaagatgattaattcacaaccacctcgcggtcagtaccactaggctgtggtaaaccaggaggtggtatttgaagctgaccagtccgaactttgttatttttcgtattcaagaagtgcctttacta

SEQ ID NO: 22265 - DNA, 291 bp, Setaria italica
  Peptide Sequence Number=SeqID_88239
cgcccctccttcccggaacccaaaaccctagcgccatgcgccgcccgaagcgccgcggcgcggggaagcagacccgcctcagggaggaggacgagatcgccctcctcgacgaatggatcgaagccggcaaaccccgtccgggcaccaagcccccgccgccctcgaaatccgccggagcgggtccggcgcctccggcagccggggagtacccggagtacggcgcgtgcacgcggttcgacgagctgccgctgtcgcagaagaccaaggacgcgctgcggaagaagaaattca

SEQ ID NO: 22266 - DNA, 427 bp, Setaria italica
  Peptide Sequence Number=SeqID_88240
tatgtctccttgaaatctgacttcctggaggatgtgaaaatcgacgcatacacttccttattggcatgggctggcgcatggtccgcggccttgaaacgctttgccgtggcagcctcccccttcttaccattctccaacttctcagcccctgccgccgtcagagcagcagcagcagcatgcttagtgccgctcaggccattgcccaccttcttgtccttcttctccttcaccttccccctctcctcctccatcctcttcctcagcacggccacctcctcctcggtcccgttgatgggcatcttgtccgcctcctcaaactccttgtggcagaccaagcacgcggacgtcttcacctccttgagcgccttcacgctgagcacgtggccgcacccgcggagcgccaggaactggtacttccgtgaactcc

SEQ ID NO: 22267 - DNA, 347 bp, Setaria italica
  Peptide Sequence Number=SeqID_88241
cctgaacgcgtcgccgttcgcggcgtagaacctcacgagcgcgtcggcgacgccgccggcagcgaacagctgctggtccgagtgcaggacgcccctgccccgcagcagcgacgcgtagtacccgccgtcgaaccgcgcgggcgtcgggtcgagcggtgcgaggttgtcgtcgccgctgccggtggcgcgcgggcacaccgcctggagcgacgccgcgagggcgccgtccagggtgtcggtctcgttgtagaggcggtcccggaagttggtgcagcgggagaagcccagcgtgtggccgccggagagcacgacgaggtcctggagggagaggccgtgcgaggcgaagc

SEQ ID NO: 22268 - DNA, 865 bp, Setaria italica
  Peptide Sequence Number=SeqID_88242
cggtccatggaagtggtgaatgttctgcctgccggtaacaatggcacgattgagcttctctacatgcagctctatgcccccacgacactggcaccagctcgcgacttctggttgctgcggtacacctccattcttgatgacggaagtttagtggtgtgtgaaaggtcgctcagtagcaagcaaggtggcccaagcatgcctcttgtccagccttttatcaggggtgagatgcttcctagtgggttcttgatccggcctagtgatggtggaggcagtatcatacacatagttgatcatatgaacttagagccttggagtgtgcctgaagtagtgcgtccactttatgaatcctctgcaatggttgcccagaagatatctatggtggctttgtgctaccttaggcaggttgcacatgaagataaccattctgtaataactggatggggacggcaacctgctgctttacgggctctgagccaaaagctcaccagaggtttcaatgaagctctcaatgggcttgctgatgatggatggtctgtgattgaaagcgatggagttgacgatgtttgtatctcagttaactcatccccgagtaaagtgatcaactgcaatgcaactttcaataatggacttcccatagtcagtagcagtgttctctgtgcaaaggcatcgatgctgctgcaggatgtttctccgccagcgctactacgttttatgagggaacagcggtcgcagtgggctgacagtaatttagatgcattctttgcttccgcaatgaaacctaatttctgcaacttgcctatgtctcgccttggaggatttggtggtcaggtcatacttcctttagcccacacatttcgaccct

SEQ ID NO: 22269 - DNA, 449 bp, Setaria italica
  Peptide Sequence Number=SeqID_88243
gacgcccgtggggacgccgcggtcgggcggtcctggcggcgagccgctgacgccgacgtcggcgtggcgcgcggcggagcagctggccaaggtggccatcatgcgcaagtccatgaaccgggtgagcgacctgcacggcttcgagaacgcgcgcttctgatcgccgccgtgccgtgattgagtgcctgtaattgagtttggtttcgttttgtttagcctttttggatggatgttcttttgccttgtgaattgagatgagaatcaaacagaaagaggagacgagcccgccgccgccggagtgtggcggacggcggctagtagaacatgaacacttgaacagagcagtcagcagagctgctcttgttattaccaacccctttatatggattattatgatgacgattaatcaagtcaaataggatggatggtttctttactaaaaaaaaaaa

SEQ ID NO: 22270 - DNA, 475 bp, Setaria italica
  Peptide Sequence Number=SeqID_88244
tgggccgtagctagaggacccaagcgtggtgtatccgttggagaggtggcgcgccgaggggagctgcgggcggttggcgaaggtggcgtcgtgtgtggtcaggcactcctcggcggcggcggggtgcgcgacgtggaccacgcgacgggaaccgaaccggaggaggagcaccgggccgtgcgccgccgcgagcgcggccagcgaccggtgtaacggcttcttgaagaggtggagatgcccaatgattgggagcgatggcgggctgggcgggaggcgacggtgcccctgcttgctcttgaggctgcggatgtggaggagaacaaggaggccggtggccagtaagagaaacaggaaggacagtgtggtggcgctcgccatgattggatcttggagctcgaggatggaaacgaaggccgttgacagtggttatgtctttggtgcttgtcttgacatcttcggagattagaaaattgtg

SEQ ID NO: 22271 - DNA, 744 bp, Setaria italica
  Peptide Sequence Number=SeqID_88245
gctgaagcagtataaatttatttagtcacagcagcagcaggcacaacacagtggcacaggtgacattcttcctcctggatgctcaaagacgggcaatctcaagctcagagaaccttatttatctccatgcaccctcctcttgcttatactacacctactaacagttaagcaactatgttcctcatgacctgaaaagcccgccaggttggcctcgatcatgtgatctatctttttaacactgccctgaggggtgtagacaagccccatcaagtcgcgttcaaaggatggctcctcaccctcctgacaattggcattactactatcatccttatcattggcatctccagcgaagcttatcagatcctccagttgctcagtaggtgcaagaggagatttgttgtgaagaccaatgttaggggaagtactagtcttgcgtaacccaggacgacgagatggcttacggggaacatctcgctgtaacctaacactagggaacaccacggcaagataaccacaactaactctgaccactttaagcaggagcgtgtaagccatggagctagcaactgcgctttttatgtcgcagaagctgatcagagtcgccttcctctgggttctctggtattgcttctgtatcctgctgaaaaagtggttgatggagatttcctgcattgacggggtaaaagtgacgagctaagaacccaatgattgaaccaaccaatgcacacaatattgcaatgaccg

SEQ ID NO: 22272 - DNA, 467 bp, Setaria italica
  Peptide Sequence Number=SeqID_88246
ttatttcttatgtagtgatttgaaattaagctcgtctgggtaccgaaatgtgataagttccttccgatagaataattctacttgcactaacaaatgaacacagatccattggccattccgactaaaagatggagcgcatatgcctccagcagctggggaagtgcttgagttcgatttggaaggagtgtggagggaaatggaaagccttgtgaaagatggactagttaaagacataggtgtttgcaattacacagttaccaagctcaaccgtctgatgcgttcagcaactattccgccagcagtatgccagatggaaatgcaccctggttggaagaacgacaagattttcgaggcctgcaagaagcatgggattcatgttactgcttactctccactgggttcttcagagaagaacctaagacaacaatagaaccctagactagtacgaaaaaggtaagaccaaacaa

SEQ ID NO: 22273 - DNA, 339 bp, Setaria italica
  Peptide Sequence Number=SeqID_88247
aagaagtgaagttggaaagttctatactgaggttttagaatggcgagtgcacaggcgatggggcaaggagagcaggatcacttcgttctgaagagcgggcacaccatcccggctgttgggctaggcacttggagagccgcctcagatagcgctcactctgttaagacagccatcaccgaggctggatataggcatgtagacacagctgctcagtacggagtagaaaaggaggtcggtaaaggacttaaagctgcaatggaagctgggatcaacaggaaagatttgttgtaacatcaaaactatggtgcacagacttggctcctaactactcacactgag

SEQ ID NO: 22274 - DNA, 1224 bp, Setaria italica
  Peptide Sequence Number=SeqID_88248
gcgcaagttctcttcgttatctttcggagaaataatgcaatctctattcgccaaaagttgaagacttggagaagtgaagttggaaagttctatactgaggttttagaatggcgagtgcacaggcgatggggcaaggagagcaggatcacttcgttctgaagagcgggcacaccatcccggctgttgggctaggcacttggagagccgcctcagatagcgctcactctgttaagacagccatcaccgaggctggatataggcatgtagacacagctgctcagtacggagtagaaaaggaggtcggtaaaggacttaaagctgcaatggaagctgggatcaacaggaaagatttgtttgtaacatcaaaactatggtgcacagacttggctcctaacaaggttcggccagcgctacagaacacgctcaaggatttgcagttggattatcttgatctctaccttatccattggccattccgactaaaagatggagcgcatatgcctccagcagctggggaagtgcttgagttcgatttggaaggagtgtggagggaaatggaaagccttgtgaaagatggactagttaaagacataggtgtttgcaattacacagttaccaagctcaaccgtctgatgcgttcagcaactattccgccagcagtatgccagatggaaatgcaccctggttggaagaacgacaagattttcgaggcctgcaagaagcatgggattcatgttactgcttactctccactgggttcttcagagaagaacctagcacatgaccctgctgtcgaaaaggtagccaacaaactgaacaagaccccaggtcaggtgctcatcaagtgggccctccaaaggggaacaagtgttattcccaaatcaaccaaagacgaaaggatcaaggagaacattcaggtgtttggatgggagatccctgaggaggacttcaaggtcttgtgcagcatcaaagatgagaagcgagtcctgaccggggaggagctcttcgtgaacaagacccacgggccgtacaagagcgcatccgagctctgggaccacgaggactgagctgagctgccgtgccgccggatccgattccggaaccgaaaattaaggcgttgcatgctttgtcaaaaccggcttctgatgagatggaaagagtttgtgcaaaagcaaaaacccgtcatgcactgtacctaaactgaataaagataggcaccagtgg

SEQ ID NO: 22275 - DNA, 821 bp, Setaria italica
  Peptide Sequence Number=SeqID_88249
ctcctgcgcggacatcgtcgccttcgccgcccgcgacgcgtccgccttcctcggcggccgcggggtcagcttcgacatgcccgccggccgcctcgacggccgcgcctccgtcgcctcccgcgccctcgacttcctcccgccgcccgtcttcacgctccccgagctcgtcgccagcttcgccgccaaggggctcggcgtcgaggacatggtcgtgctctccggcgcccacaccgttggccgctcccactgctcctccttcgtccccgaccgcctcgccgccccctctgacatcaacccgtccttcgccgcgtccctcaggggccagtgcccggcgagcccgagcgccggcaacgaccccaccgtggtgcaggacgccgtgacgcccgacgccctcgacaaccagtactacaagaacgtgctggcgcaccgggtgctcttcacctccgacgcggcgctcctgacgtcgccggagacggcgaagatggtgtcggacaacgccaacatccccgggtggtgggaggacaggttcaagaaggccatggtgaagatggccagcgtcgaggtgaagaccggtaaccacggtgaggtcaggaggaactgccgggtggtcaactagctcctccgaacctgatcaccatcggctgcaacaagctcaatttcactcttcttatgcatgtatgtcatgatttgcatcgccattgtttcgttccatttgctatggtgaactttaatttgtgtaggtttgtatcatgattggatcgagttggtaataatgttaataaagtcgatcggtgtttcatccaacaaaaaaaaaaaaaaaa

SEQ ID NO: 22276 - DNA, 878 bp, Setaria italica
  Peptide Sequence Number=SeqID_88250
tgccgatgtaatgaagctgcaaagcacaagaccgtcaacacaaacattgacgtgtagacagaaaggcgatgaacaaactggaatgatgatccgaacacgagtgccaattgaacggatcagtgctggtcgatgaagcacttgatggtatgaacgagctccttcgtcctattcgccgtgagctggtcggtcttcacggcgaagaagttgaggtagaagacgtgcgcgacgtcccctcgactgaccaccgtcgtcaccttcttccccgcgtgctccatggccttcccgtaatccacctgcggatcatggagcaagtccttctccgcagccatcagcagcaacggcggcatccgtacatgcgccacggccttcgtcgccaactccggcgacgtgtaggggctgtccctgttgacgcccatgggcaacccaagcgcgaggagcttctcgatcatctctggcgccaggaacatgctcggtgggttctcgagttccgaccggctcttctgttccctggcgaagcccgggtggagcagcacgccgccggcgagcctcaccgggtggagaactcccggcttgtcctcgccggcgcgggctgccacgaggtgcacgaggttaccgccggagctgtcgccgatgaggaaaacacgggagaagtcagcggtacgacggaaatgtctgacaagggcggagtgtgcagcgccgtagacgttccggctgcgcgcgacgtcacggaaccagaggagcgcggcgtggccggcgtcgatggcggcggggaggcggtgctcgggcgcgagggggaggtagacggagacgatgccggcgacgtcgagctcggcggcgagcggggcgtagaagttgtggtagatcgcccacgagggccg

SEQ ID NO: 22277 - DNA, 557 bp, Setaria italica
  Peptide Sequence Number=SeqID_88251
ccgaaactctcaaacttgtggtcttctacttccaccaatggcggaaatgggattcgaacgaagctggtactccttcgtcctcctcgcttcccttgtattggcaacggctgaactggccacggcgcagaccagccctaacaggacggtggtcgaggaggtcaccggctggctccggatctactccgacggcaccgtcgagcggctgaccccgccgggagccgaggctttcaccgccatcgtcccaccctacaagaaccctcgcggcggcgtgaccgtccacgacattaccaccgaccgcggcatcgacgtccgcctctacctcccggcggccgcagctgccaaggcgccgcaccgtcggcgccgccctgtcctcctccacctccacggcggcggcttctgcgtcacccggccctcgtgggcgatctaccacaacttctacgccccgctcgccgccgagctcgacgtcgccggcatcgtctccgtctacctccccctcgcgcccgagcaccgcctcccgccgccatcgacgccggccacgccgcgctcctctggttccg

SEQ ID NO: 22278 - DNA, 606 bp, Setaria italica
  misc_feature (586)..(586): n is a, c, g, or t
  Peptide Sequence Number=SeqID_88252
aagtacaaaagtcaaagagacaatggctcaaagaattgctgaaactctttgagctttcaaacacctgcttcaagtgtctctttgaattatggtagatatgccacacgcttatgcaacggttgcttccaggccaaacctctgctgctgcaacagcacactcaggacgctcatcgatgaaaatagtttgtggctgcctagcacgcatagcatcagcaaacacctcaaaggtccatttcaatgactgaatgctttcatcatagagtagtgctgcaccaaacacaagtaactgcttgtggttgtcaacaccaacaaacaacgcaaatggccgtccatagatattcaatccatatgttgtatcaaagcaaacaacatccccaaaactcctgaagtcaattattgatttcgcatcagcccagaagaaatttacagcagatttcccatcaggcccaaacccctaccgcataatacactgaagggtttcctacctgcaactcctccaggtactgcaatgccgcgccagcatctccgagctgcacacccttcccttgcttcccttcgatgcaggtcccctgccccaactcatgtnctcgagccctcatcttatgt

SEQ ID NO: 22279 - DNA, 438 bp, Setaria italica
  misc_feature (437)..(437): n is a, c, g, or t
  Peptide Sequence Number=SeqID_88253
ttcacacctcgtttttcagcattactgaacaatgtcgatagcatcatcaaatgtatatctctctgaataagagtatgcaccattccataattttgggtatgaaggtatttgaagggggaatgattcctcatccacgatatgccaatgaagaacgttctgtgtgatgatagattgcacggatcatatgacttagcagtttactgaaggtcattgaatcaattacacttttttatcactgggacaggaagataatgccttgaagtatcaataagaagccctcggtacggaaatctgggcatgtccatgatagtccaaggagccgaatggagttcaatcagaccttagacaattagaaagttgcacaattggcgaacaaacaaaattaaggaactaaaaataagtaactaaccaaaaggaacaaataagaaaagaacaana

SEQ ID NO: 22280 - DNA, 533 bp, Setaria italica
  Peptide Sequence Number=SeqID_88254
aaatgaccaattgttgctgtttcgtgtcatcgatacctttcaagggttcgttcatgtaaaatccttcccattgtaggtctattccaagtgatccaggtaccacttatcctggttgcttactatgcatctgagccctgcagcaactacttttggtgatacatcttctccaagccagttatgcacaacggttttacgatccagtttgtctccaaagttgttaaacgtttcttcccagttaatgatatcgtagccatgtgatattgctatcttttgagatcttaatacaaaatctctgtatgcatctgatacgttcatatggttattattcaaccatccttcaatgtgtggtgttgtggtccagcagcttgtattgacttcatcaccgcctaagtgggcaaatttgaacttaaaaaccttgactaaaatctgaaagaatgccatcgatgacttcaaatgtaaagtttttactgacatcgagtggttctctgcagctatctgatggccacaatgatgggtaaccaacgcccatgaac

SEQ ID NO: 22281 - DNA, 1436 bp, Setaria italica
  misc_feature (1)..(58): n is a, c, g, or t
  Peptide Sequence Number=SeqID_88255
nnnnnnnnnnnnnnnnnnnnnnnnnnnnnnnnnnnnnnnnnnnnnnnnnnnnnnnnnntgtttcattctattcatgcttaaaattgtgtaaaataagaacacgtggacgtgcttcaattcactcaccagtcatggaaatattgttgttttacataattagtttagcaattaaaatataccgaataatgcctaattttctaacagaatgatgattattctcctctatgaaatcatatatactgctacgactacgaatgtctactgccttagacaggaaccagggtctgaaggcgctgaacgaccataaccagctagtggtgcagcagcaacccctctttggttcagcaagcacctgaagcgtgccaatcttgcagtgactgatcctgcatcctttgcaagcttctcaatgggtgtccacaaccgctctgcagctgctgcagcacgtggccaaatggtttgctgaatgtctgatgcgtctatgtgttcaccccacatgcatacctcaccaccaagaaccaatttctgctgttgagggttgtagatatttgtcaatggttcattcatgtaaaatccttcccatgtagcatccaggtgatctaggtaccacttatcctggttgctcacaatgcatctcagaccagcagcaaccactttctctgcaactccacttccaagccagttatgcaccacagttttacgatccaacttgtctccaaagttgttaaatgtctcttcccagttaatgatgtcataaccatgtgatattgctatcttttgagctctcagtacaaaatatctgtaggcatcggattcattcatgccatgtttaatcaaccatgatttaatgcgtggtgtggtagtccagcaacttgtgtttacttcatctcctcccaaatggacaaacttgaacttaaaaatcttgctgaaatctgaaagaattccattaatcacttggaatgtaaagtcgttgctgacatcgagcggttctttacatgtagctgatggccacaatgatggatatccgacaccccatgagagagcatggccaggtacatcaatctcagccaagacattcacacctcgtttttcagcatactgaacaatgtcgatagcatcatcaaatgtatatctctctgaataagagtatgcaccattccataattttgggtatgaaggtatttgaagggggaatgattcctcatccacgatatgccaatgaagaacgttcagtttactgaaggtcattgaatcaattacactttttatcactgggacaggaagataatgccttgaagtatcaataagaagccctcggtacggaaatctgggcatgtccatgatagtccaaggagccgaatggagttcaatcagccttgcattgaaatcaaagttgcacaattggctaaatgtctccaaggcatgaagcgctccaaaaa

SEQ ID NO: 22282 - DNA, 427 bp, Setaria italica
  Peptide Sequence Number=SeqID_88256
acgactttacgaagctctcccagtttgtccccaggaataattgatttgagtaatcgatggaatactgataattgctagtgctgacaatgttcaaaaggtggtttggaataatgataattagttgaagtttaccactgccgacgatgctcagaaagagaagttgcttttgtatggaagaatcaaaagaaaggaacatatctactcttagattacaaactttccataatgacgattgcagtttatgaatgtgatagcatttgatcaccggcaaagtacactagcaagaatccccaagttgggtcagtgcccaagcaatgttgagcttcatattgacacgtcaaaaagcagtgttcgatctgtatttgattatttcttccaagaagctagcagggacaaaatctgactctgtgagtatagagaaaaaatc

SEQ ID NO: 22283 - DNA, 445 bp, Setaria italica
  Peptide Sequence Number=SeqID_88257
agctgagatccgcccccgacgcggattggttccgtttttctcgctggctaaaagaaatggagagttccagctctggttcttgtgtccaaggtacagtgtatcattggattgtgctgttcgcggtttggctttgtggcagccagcatgttctgtctcagaaaactacacttgaaccaaaagacaaattccttctgtccgatccgcctatcggtctctttgatccaattgagatttcaccatctgttcttccacacaaccccaacccggtcgagccactgtcacctatgtatcccaattacacatcctatgatccagtcttgactgggaaatgccatgtaaatttctctgcactctcctatactatcgacaagacagcatctgattgctccattcctttagtctacctacttagtttgtcttgtatttgttttatttatttgttttg

SEQ ID NO: 22284 - DNA, 311 bp, Setaria italica
  Peptide Sequence Number=SeqID_88258
tagttactaattagttccttgactactatgtgttcagtgctgtcagttccaccattatcatgcatggcactaagtgaattggctgaatcttgtactgaatgatgtagtttgtccactggagtttgacgaaccatcttcagtcgttaaggcatgtgcaaaggcatcttcgtcaacgccctcatgctgtgcagcattgcactcttacattggaactggcagaagcaaatatttgtcacaaatctgcaagcaattaactgtgcgacgatgtttggatcaatgctacagaaagctggtgtagtggaggatattta

SEQ ID NO: 22285 - DNA, 1442 bp, Setaria italica
  misc_feature (1427)..(1442): n is a, c, g, or t
  Peptide Sequence Number=SeqID_88259
agcacaaagtgatccattttgagaaatcagatgctcgccttgcaaacaatggccttccagttcagctccagatgctgcgttgccgtgtaaactttgaggctttgagattcaccccacagattgaggcccttggcaggaaacttatctccaccctacagagaagtgggaaatttgttgtgcttcacttgcgctatgaaatggacatgctgtccttttcaggttgcacacatggctgttctagtaaagaaactgaggagctcactagaatgagatacgcttatccatggtggaaggaaaaggagatcgattctgaagcgaagaggcttcagggactttgccctctcacaccagaggaaattactctagttcttaaagctctaggattcacaaaggatacactgatatacattgcttctggtgaaatttatggtggggaaaggcgcttggctgcactcaagactgcataccctaaactagtaaggaaggagaaaattttatctcctgatgaactgcggccattccagaaccattcaacccagatggcagcactggattacatggtttctctagcaagcgatattttcattcccagctatgatggaaatatggcaagggttgttgaaggtcatcgcaggcacatgggttttcgcaagaccattgtattggacagaaagaagcttgttgaactcttggaccttttccaaggaggtgcgctatcttgggatgaattctcagatgcagtgaaggaggcacacaagagccgcatgggccaacctacagaacgaaagatcatgcctggccagcccaaggaagaggactatttctatgctaatcctcaagaatgcctgggctccaatggtggattaagagacatttcctgacaatgcttcctggaaacaagttcccaatgaataatggcgcctcaacccaataacacactgtttttgttcgtcgacaccatcacttcacttttgtacagctgaccaaaggcccacttcttactaagcatttacatcaggtatatgcaggttcacaaatcaaatgcttacagccagatttcctcacagaataaagcagaaaaagaagccgaatacctcaggtttcagaaagaagagatgccgctcgggcatccagtctgctccttttccaccatatgttacagttgttgtaacctttttgttagctggtcattttttttcatttcgttgtttcccactcccttttcgctgcccatattgtccttttttgttaaccttttttttcattttgaccatgccaaagtagctcagtgtcctgaaagttttttgtactagccagtcaccaaaacattgaagattctcaactgatatacgattcctaacaaaatctggagggatgaattgatggcaatcgagcaattgttttgtttgcaaaaaaaaaaaaaaaannnnnnnnnnnnnnnn

SEQ ID NO: 22286 - DNA, 109 bp, Setaria italica
  Peptide Sequence Number=SeqID_88260
acatcttcaaatctcaaaacctttgcttttggggcgtttctgagatccggctcgtgcaactggctacgcttgctgggtctcctgcgtcctcagcggctggttctcgttg

SEQ ID NO: 22287 - DNA, 778 bp, Setaria italica
  Peptide Sequence Number=SeqID_88261
gtctcagttttttttttttttttttagatcgaaataccaatccattgagtgacaaataacaaattaacagtacacatattgcgtatgcgcaattctcttgcttattcgaaaaaaaacaatattgcgaagcgccaaagtggcgggcaagttggcaaccgtgctactggacgcgcaacgacccacggcccaaccaacacgaagaggaatctcgatcgatcagaaggcggcaagcaaggctcctccgacgccgaggccgagcgccagcttcgctgcgagcccggccgcgccggtcgccgccgagttccccttgggcgtcgccgacgaagcgccgtcggtgaccgtgatggccaccttctggccctgggtgcagtgggaccccgccgcgcaggcgaagtacctcgtgccgaccttgtcgaacgtgaaggcggtgcggccgccgtcgtccgacgacagcttgccgtcgaagctgcacgccttgtagtccgcctccgacggcagctcgtccacggtgtgcggcgggccgtacgtgaacacgacggtgtcgccgacgctgaccgcgttggaggccgaccagtcgccgtagttcccgctcaccgaccactggatcgtgtggttcttggcggcggcaagctcggccacggcggctatcgccacgagggcgacgaccaaagccttcgccatcgccagcgcggacattctcgggcaagctatggaagaggcgctcaaagcagcagaggagttggcgagatgcttgcggttgcaggcgacgacgacggct

SEQ ID NO: 22288 - DNA, 364 bp, Setaria italica
  Peptide Sequence Number=SeqID_88262
cccgctgtcccagcaggtgcggttgttcgagttgaccaaggccgagatgggtccacgagtagcgagcaacctgctctccaggtccttcttcctgctcggcgccggcagcaacgatttcttcgccttcgcgacggcgcaggccaagcggaacaagacggcgacgcagagcgacgtcgccgcgttctacggcagcctgctctccaactactccgccaccatcacggagttgtacaagctgggcgcgaggaagtttggcatcatcaacgtggggccggtgggctgcgtgccccgtgtccgcgtcctcaacgccaccggcgcgtgcgccgacggcatgaaccagctcgccgccggcttcgacgccgcg

SEQ ID NO: 22289 - DNA, 341 bp, Setaria italica
  Peptide Sequence Number=SeqID_88263
ggctgttatttaaggaaaaaataaactgaatggtactgctcggtgcttcttaaatgttggggaaagtccgattggtgatgcttctttcacataatcgaaaattttcatttaatttatatactattgtagtagagtatgtacacttcaattagctgactagcaaaaagtaaatgtattcaaatcatggttaagtgctcctgatatactaagaaacaacgacttgttatgttctgttatttttgtgattgatggctgttatttaaggatatcatattgttggaccctttctttctaacttacatgtatgtgtaggtcaccttttttactgagactgccaaggc

SEQ ID NO: 22290 - DNA, 981 bp, Setaria italica
  Peptide Sequence Number=SeqID_88264
agctggacaaaggggctcgagctcatcgccgggttcaacctcgtcgacttgttcccgggctcgcggctcgccaggacgctcggcgccggctccctgcgcgccgcaagggaggtgcacgacagggtccatcgcatcgtgcaagccatcatccgggaccatgagagcaaggggctcaacggcgacggcgaggagggaggcggtcgccgggacgacatcctcggcgtcctgctacggcttcagcgagacggtgggctggagaccgtcctcaccacacaagttgtctgcggcgtgttgttcgatgttttcgctgcgggctcagagactactgcaacgacaaccatatgggcgatgtctgagcttgtgaggaacccggccgtgatgcagcgagcacagtcagaagtccggcaactccttcagggcagaacaggggtagcagaggcagacatccaagggaggctcccctacctccaaatggtgatcaaggagacactcagattgcatcctcccgtgccgctgatccttccaagatcctgttctgaaccggttgagatcatgggctaccacgtacctaagggtacaacgatcttcgtgaatgtttgggcgattggtagggacgacaagtcatggccgaatgcagacgagttcaagcctgaaagatttgaggtcgacttcaggggtgcggatgacttcagattcctccctggtggtggtggtcgaaggatgtgccccggtttaacatttgggttcgctaatattgagatagcccttgcaaatatgctttaccatttcaattggaagttgcttaatggagcggatcccagtgagctagatatgaccgaatcatatggcatcacggcacggcggaagacccaactcttgttggaagctacaccattcgttccaatagactaataaattattttgtaagattatgttctattttgaatgtgttttttactctctaattacaaaaaaaaaaaa

SEQ ID NO: 22291 - DNA, 594 bp, Setaria italica
  Peptide Sequence Number=SeqID_88265
tggggaacaattgttgttctttccacaagcaattacaaaggatgctactgaccacattggagatgttaaagctcccactgcagaaccaaatttaggggaatcacatatcaactcagcttcaggtatccaaggatatttcttgcggacataaatcttgacttagtttatcttttactccacacatatcttttttggttaactcggtttgatactttccttttatctgaactctgagctcccaagaatttttctctattgtactaatgaaccgatgtagctagagaagtttttgagtttcagaaattttccgtgacagatgtttacttctgttgtaaaattcagtaattttactcttgttgccagattagaccaagctttaatacttgttttgtgctgttcaatgctaatggtcacactaccgtgttgcattaggttttgcaaaggcaaaggccaaacataagtagctaactgtcaaccttgaccatatttcacagccagcacatttaattggtttagtggctagtgtaagtgttatccatcaattattagttttatagatgatttctaatttagttgtcagctgcccacactttg

SEQ ID NO: 22292 - DNA, 2004 bp, Setaria italica
  Peptide Sequence Number=SeqID_88266
ctggcttcgtctccggcgcgaagagggtaatttcgtctgttttactgttctcctcgcccgaggagacgggctcgggggaggaggaggaagacgacgaagacggcaacggcttaaactcggatgagaatgaagatgttcctgacactcatggagcaatagttccttacagcgaatcaaagttagctattgaacaaatggttatgaaggaaacatttacaagggatgagtgtgataagatggtagagctaataaaatcacgagttacagattctacatttcctgaagcccgtgaatatggatcgccagaagaaatcccaagtaggattgcaggcattggccatgatttcacaggagcttggcgctccttgagccgtgatcggaatttcactaaatcagttccattctctagcatgagacctggtagtttttctcctggctctccgctccaagcatcacctgagctatgcactgtagcagttacggaagcaaagaaatggttggaagagagaaggcagggactaggcttaaagcctgaagacaatggaacatgcacattgaacactgatatgttaagttccggcattgactctgacatgggttctccagttgacttagcaaaatcatacatgcaatcattacctccttggcagtccccattcttaggcagtcagaagtttaacacatcatcctccaaatactctagctccttatcaaaggtaaccacaaaggaggattacctttccaacttttggggaaaattggaggaatcacgaagagctcacattggatcatctggaggttctgtggatgctccaaaattctggaattatggttctacatccagattatttgagaatgataccgctatattctcattgggtactgatgagaaagttggcgagcctaccaaaaccaataatgggtctgaaaaggttgcagcaacagaaccaatcagtgggtactccatacctatcacaccagccgaagatagaattgatggtattggtgaacctgtggaacttgcaaaggacaatgggaatgcatctgaaattcaacccgataaagtagcagaggggaacaatgtgtcttccacaagcaatacaaaggatgctactgaccacattggagatgttaaagctcccactgcagaaccaaatttaggggaatcacatatcaactcagcttcagaattcagaccaaaggatgcaggtcccccaatccaggccagagtgaatgggtcaagcaagaaaacatctgtgaatggccttgtggatcaatcaaaggccaactccgggttagaatcttcagcaaacgataatccaagctgcactaactcaagcagtgctgtgccacccaccagtaacgacttaactgagtctgcagctggtgctgcagatgttcattctgttgagaattgcactggaattaatccagaagaaccggttaagggggcctcgagacagaatgttcggcgaggaggacggaaaagggtggtgcgagggcctaaaggaagagggaagtagaagacttgctgcacgatattgttgtatactaatattaacggcccaaaagggcaacgtgatacctaggttaattagagttagcctcgtacaaggcattgtgcttcaccatttgtatccatgttgtattattgtaggctttataatgaccacgtttagaattgattattatttaggactggtagtcgcttgatttgtgttccagtgtctctagtgtttcataagtttagtttgtgcagatggaagaacaatgggttgattgtactgtagcagtgacgtagcagatgttctagccatctaggtgtgtgcagtgaatcaagtgaggcagtgagttgttcctttgtatggtggacatccacattctggcgatgtaacccttgtttgtgctttatgcttccttagaacctgttcaaaacgaataaataccaaagactagacaactaaactacaaagacaagtagactagtagaccaacccaaccaaa

SEQ ID NO: 22293 - DNA, 455 bp, Setaria italica
  Peptide Sequence Number=SeqID_88267
ctaacaaggattcctcttctgacttgaaaacaaagaaagcaatgcataaagcagattaattgtagcagtatcacagaaggcaccagttcaagcagatgctcttccagtggccccccagatgtctctaatagtgttggagatggataagttgctgacattattggcagtacaaaacgtagataagtataggttgagaaaagatctcttctaacctcctattagtcagctgtcatcatatatatgtgatgtaatttgctgttgtcgctagctcatctacatagaaatgcccaattcctaatgtcaggactggacagactattgatcaattggaattgtagttccagttaggagcgctatcctcatgtttgttagtggacaaagcttgctggaagaaaaaaaataaagagaacaaaagcatatagaaaactactcacactgagtaatttactaaaaaa

SEQ ID NO: 22294 - DNA, 333 bp, Setaria italica
  Peptide Sequence Number=SeqID_88268
aggaaattacacttgataaataatttagaaaaagaaaagaataacaacaaatacagcacaacaccattacaggccaacacttcttcctggcgtcaagatatgggaatagatacaaatgaaatacagtgatgggaatggacttctgatggtggcatagcacatgatttgcagaatgttctgataaattcttgcactgatgcacgcatcagctacgttcttcctgaacagcgtggcatcttgcatttagagaagcctgagatgagcggtatcattcaacctttttatttgccaccccgttctcgacgaatgctgacttaccgtactagaggagtc

SEQ ID NO: 22295 - DNA, 318 bp, Setaria italica
  Peptide Sequence Number=SeqID_88269
cgaacacggcggcgctgagctcgtcgcaaggaaggcgctgctgctcgtgcggggatgtgctaccaggtgatgtgcgaccagcagaacagccagtggtgccggccgggcgtgacggtgaccgtgacggcgaccaacctgtgcccgccggactggtccaaggccagcaacaacggcggctggtgcaacccgccgcggcagcacttcgacatggcgcagccggcctgggagaagatcggcgtctaccgcggcgggtacgtcccggtcatgtaccagagggtgtcatgctcccggagcggcggggtgcggttcaccatcaac

SEQ ID NO: 22296 - DNA, 406 bp, Setaria italica
  Peptide Sequence Number=SeqID_88270
gaagctgttaggcagtcactgcaattctcctgtagtgtactgaaaccgacgagtattccaagtctcctgtggtgttctgtaccggtctctgagcagagatggacagagtcctcacattgttcatcgccgtcctaacggcgacgttcttcgcgccggcgaagggctggaactacgggacggcgacgttctacggcggccccgacgcctccggcacaatgggtggcgcgtgcgggtacgggaacctgtaccaggcggggtacgggacgaacacggcggcgctgagctcggtgctgttcaatgacggcgcggcgtgcgggcagtgctacctgatcatgtgcgacagcaacgcgtccccctggtgaaagggcggcgccgccgtgaccgtcacggccaccaacttctgccc

SEQ ID NO: 22297 - DNA, 907 bp, Setaria italica
  Peptide Sequence Number=SeqID_88271
cgagcttgcccacctgtgagtctgtgactgccccaagggcctaggtagattgccaatcgacatggcgcgcaaggtctcgtgtcacttgctggtgatcgccgtcgtcgccgcgagcctcgccgcgacggcccgggcgggatggatcaggggctcggcgacgttctacggcggcgccgacgcctccggcacaatgggtggcgcttgcgggtacggcaacctttactcgacggggtacgggacgaacacggcggcgctgagctcgtcgctgttcaacgacggggcggcgtgcggggagtgctacaagctggtgtgcgaccgcaagacggaccggacgtggtgcaagcccggggtgtcggtcaccgtcacggccaccaacttctgcccgcccaattggagcatccccagcgaccggggcggctggtgcaacccgccccggccccacttcgacatggcgcagccggcgtgggagaagatcggcgtctaccgcggcggcatcatcccggtgatctacaagcgggtgtcatgcgtgaagaagggcggggtgcgcttcgccgtcaacgggcacgactacttcgagctggtcctcatcaccaacgtcgccggcccggggtcgctcaagtcggtgcagatccggggcacccggaccgggtggatcaccatgtccaggaactggggcgccaactggcaggccaacaactacctcaacggccagagcatctccttccgtgtcaccgccaccaacggccagaccatcgagttctgggaggtcgcggggtccggatggcggttcggccagaccttcaccaacggccagaatttctactagcggcggcgatccggccggcgagccatgcatgccgcccgccgccggctctcgcccttgtttttcccttcatttttgcatctg

SEQ ID NO: 22298 - DNA, 461 bp, Setaria italica
  misc_feature (1)..(86): n is a, c, g, or t
  Peptide Sequence Number=SeqID_88272
nnnnnnnnnnnnnnnnnnnnnnnnnnnnnnnnnnnnnnnnnnnnnnnnnnnnnnnnnnnnnnnnnnnnnnnnnnnnnnnnnnnnnnctttttgtcaaaggtgttcagtgttcacacattttaatcttgatgctagaacaacttttcttacacagcagaatagtttgaccctatcgcctgaataaatgttaaatttcagtcacccaagacgtagcatctctcttattccaaacaattacgataccaactctattccaaagaaaaagaagaaaatgaaatataacaacttatatagagaatgcacaacagaagcagctttgatcagcgtgtgatggatggagaactatgcacgcgtagttcgccgttcgccacggaaacaacacgcactcctctgttcctgcaactgcaacacacacagtcacatacacgcactcactgtgacaaccaaaccaatacctacca

SEQ ID NO: 22299 - DNA, 420 bp, Setaria italica
  Peptide Sequence Number=SeqID_88273
cacggcgtcagcaagacgaagctccggcacgcggagaagatgatcaggggcgggcttcgtcgagctctacaagggcctcggctacctcgccacctaccggaacctgaacatgatggcgttcgtgaagatcctgaagaagttcgagaagatcagcgggaagcaggtgctctccgtgtacctcaaggtggtggagagctcctacttcaacagctctgacgaggcgctgaagctgatggacgaggtggaggagatcttcgtccggcacttcgccggcggcaaccggcgcaaggccatgaggtacctcaagccggcgcagcggaaggagtcccactccgtcaccttcttcacgggcctcgccaccggctgcttcgccgcgctcttcgtgggctactgcgtcatggcgcacatggccgggctcta

SEQ ID NO: 22300 - DNA, 479 bp, Setaria italica
  Peptide Sequence Number=SeqID_88274
gtcggaattttctctgaactgaatggtgtatacagtcaattttcatctgggcttaaccctggcacgttgtatgacttgtttctgatagagttttgtcttacaaggtacctaatgtatgttagctgggctgctacctacaggtttccgccattgatacatgctccttagctattgctgtttttccggttcaacgataggcaattaagatcaccttgcggcctgcaagttcatcaaatatgagaggagttatctagcttaaagatgatcaaggggaaaaaaacaccaacaactaaaaagcctgagaaggaggttctgcatattcatgcacgaatgcaccgagtgtgttaggttcttataaacaagaacaagtagaaacatagataaaactcaaagaaaagtaaagaaaaagaaaccttaattgttaccttgggtacttcacatggatcagagcaaagagaattgaacatgaagatgctcaa

SEQ ID NO: 22301 - DNA, 1440 bp, Setaria italica
  Peptide Sequence Number=SeqID_88275
ccccattgctaccatgctaccaaatgtgttcaaccaactggctctagcaaaccccatcaccgcatgcatactcatagcaacacgggaaacctgctgttgttctagaagcacagcagatgcgtcggaattttctctgaactgaatggtgtatacagtcaattttcatctgggcttaaccctggcacgttgtatgacttgtttctgatagagttttgtcttacaaggtacctaatgtatgttagctgggctgctacctacaggtttccgccattgatacatgctccttagctattgctgtttttccggttcaacgataggcaattaagatcaccttgcggccttgggtacttcacatggatcagagcaaagagaattgacatgaagatgctcaatgaaccggtgacaatgtaagcatatccaaggaagtcattcttgccacctagccaggttgctgtcgaaagaactatgcttttctttccaccaaaagtgtaggtgttgtaattatttctgatgagtatggatatggtctcatcaacttgcaggtcctcttcaattacaccatagagctttcgaaatttcggaagagcagcagtacgcatccacacaataagatcttcctgctcacgcagtgggacagtagggtcgagttttcctcctccaataaagcttccattctgaaagttggaaggaaatacatttttgccaaacttatgctcccgatcactcttccatgaaatatttttcctgttgatctttatttccttggacccatgagtaaaatcataagtatcattgaataagctccaggcaatcaagccgcagggaacaattggaaaaccattatcatccaattgaacaggactgcatgattcagcagtgtatttcgccccaaaacgcagctgtttatcacttctacttttgacatacctgcgatgattctggtagaagttctcaagttcataataaacataaattggtgctcttatatgatccagaaccttcacttccagagaacagttctttgaaattgagctgtccttaatataagcttgcttatttcctctgtaagcattaggcacacagtcaacatcatagcggcgaattatttctgcaacatgatttgaagtctggagacaaaacagcccaaaaggaacgaaaatgattccaataaccaagaatgtggctataagacatccaggtgtcattgctggtttccaagctgggagattctgctgggtgaacctatagtaaactcccgatctcgccggcgggaaggcgcgcctcgtcgcgccaccggacgcggaggtgctagcttcgtccatcccctccccggcgagctcgctcgccgcacaagccctcgtcagaagctcgccggagcccgtgctccgcagcccgacccgccgcgggatccgaccagagaagaagaagagtggggaaggg

SEQ ID NO: 22302 - DNA, 495 bp, Setaria italica
  Peptide Sequence Number=SeqID_88276
ttctcctgcgtcaccggcaactgcggatccggccagctggactgcgcgggccacggagccaagccgcccgccaccctggccgagttcacgttcgacggccacggcggcctggacttctacgacgtgagcctcgtcgacgggtacaacctgccgatgcttgtggagccgcgccacacgcacggtgcggccgcggggcccaactgcgtggtgacggggtgcgtgatggacctgaacggcgcgtgcccttccgagctgcgggtgggatcgtcggacggccgcgccgtggcgtgcaggagcgcatgcgaggcgttcgggtcggcggagcactgctgccatggggagcacgggaaccccaacacgtgctggccgacggtgtactcgcagttcttcaagaagtcgtgcccgcgggcctacagctacgcgtacgacgacgccacctccaccttcacctgcggcggcggcggcacgtcgtacgccatcaccttctgcccaagc

SEQ ID NO: 22303 - DNA, 563 bp, Setaria italica
  Peptide Sequence Number=SeqID_88277
gccttcggttctcgagcctcgaccgaccgacccgactgactcgtttcaatcccgggcgtcgcagagaagcgtaagaagcgggagaaggcgcggcgcgggggcgagaagcgggttcgcttcgcggacgacgtcgtcgacaatggcgccgcctccgcgtcctccccccgcgcggcggcggcggccatgccagcgaaccgggaggcgctgtaccgcggcatgctccgcggccgctccatgctcagggtctcctgctcctactagccagctttagctaactgctccattaatctactagaccttcctccatcctcctcgcttctctttgtgtgtgctgccggctaatgcccggcgctagctgctaatcgcctcccgattaatcgctccctcgcgcattgttgggaagttttgtatttagtggccgtccactacgccgcgagggagctaacgatcccgtgtgtgtgtgtgtgttggtgctctgtgtactactacctgcttccttgtacattactcctggattctgagtgatcagtgaatgattcttcgctgctccaaaaaaaaaaaaa

SEQ ID NO: 22304 - DNA, 171 bp, Setaria italica
  Peptide Sequence Number=SeqID_88278
ccggggcgcggctgggggaccgtgaggtccaggccatcgggctgttggtctcggggaagaagaaatcgaggaagaacaggcccgccggcggcaagagggtcttcccgatggtggtcaacggcgaggaggacgcggtcgaaggaaaagaggctgcgtgtgccggtaaacggg

SEQ ID NO: 22305 - DNA, 284 bp, Setaria italica
  Peptide Sequence Number=SeqID_88279
gccggggtcggggcggagtcggaggagctggacgagcgggagaggtcggcgatggagtggggcgcgcggaggcggaggtgggaggggcggagcaggaggtgccgccgcagccgcagccggcacgcggcggacgagggcggcgccgccgcgccggagatggacgccatctccgcccggagtcgtcgcagcaggtagcggtggcggcgtgggcccctcgcttggtccacctcacgggctcacgcgcctcctatgcgagggtttagttttgggggaaggagtccacg

SEQ ID NO: 22306 - DNA, 414 bp, Setaria italica
  Peptide Sequence Number=SeqID_88280
ccccgccgccgccctcctagctaccgcacggacatctgcgcgggccagctccggcgacagcgagatgggaaggaggagggggaaggggtggcggcgctagggtttccgatggggaacgatggctccgagagaggaaggatgtgcggaaaggaggcctcaccgccgccgtccttgcacccatgcgagtttccgacggcacactcctacggtggcaaggtggcgagcacaggggctatagggcgcgcggcggtgttccgctcaggtcgccccgcactctccctctccctcttccgcaagtcttggccgttctcatatccctgtggcgcgaatgtaattgctggtgtttgtgtttggtcgtgctcatattcatgtggtgcgaatgtaacttgagaaggctgtttagcggtgtgttgg

SEQ ID NO: 22307 - DNA, 1006 bp, Setaria italica
  Peptide Sequence Number=SeqID_88281
tattaaatagtttctggaggttgtgacagtatagcaagatgaagtcatcgagcaatcctttggagaggagcatttgtgctttagaaccctgcaacgttttacagctgctagtcttgaacatggcatgcatcctccaatttcaccaaaaccagaatggcgtgctttaatggatgaaatggctattgttgccacaaaggagtatcgatcaattgtatttgaagagccacgctttgttgaatattttcgccttgcaacaccagagatggaatatggaaggatgaacattgtaagtagaccatcaaaaagaagccaagcggaggcattgaatcgctgcgtgccattccttggatctttgcttggacgcagactcggtttcacctaccagtgtggcttggttttggtgcagcattcaagcatgtcttggataaggacatacggaatcttcaaacccttcaagagatgtacaaccagtggccctttttcagggtcacaatagacttggttgagatggtgtttgccaaaggtgatcctggtatagcttctctgtatgacaagcttctagtttctgaggatttgtggccatttggtgagcgccttagagccaattatgaagaaacaaagcaacttcttctacaggtcgctgggcacaaagaccttctggagggtgacccttacctgaagcagaggctgcgcatccgtgattcctacatctctgccctgaacgtttgccaggcctacacgctgaagcgcatcagggaccccggcttcgaggtgaagccgcggcctcacctgtcgaaggacatcatggacgccgggaagccagctgcggagctggtgaagctcaacaccacgagcgagtacgccccggggctggaggacaccctcatcctcaccatgaagggcatcgccgccggcatgcagaacaccggctgaagcagacgaattttcagtgcttcttattgtactggtgtatctatggtaggggatcatgaaagtcttggtgcac

SEQ ID NO: 22308 - DNA, 687 bp, Setaria italica
  Peptide Sequence Number=SeqID_88282
caaacccaaggcgtccaatcagctcacaagtgttgcagctaactgagtgcgcgcttggactcggagtacgtgtggtgtgacaggctagagctttgatctcttggttgaggtgagatcgatggcggaggcaaggagcggcgccgcgctcgtggccgcggcggccgtcgtcgcgctgctggtgctggcgctggcgcccgaggggtcccgggcggagcggttcatcgtcggggacgcggcgcggtggacgtgggggtacaactacaccgactgggtcatcaagaagggccccttcttccagaacgacaccctggtgttcatgtacgacccgccgaacgcgacggtgcacgcgcacagcgtgtacatgatgcgcaacgccgccgactaccagtcgtgcaacctcaaggcggccaagctggtggccggcgtcacgcagggcgccggctcgggcttcgagttcgtgctcacgaagcgcaagaagcactacttcgtctgcggggagcgcggcgggatccactgcaccatggggcagatgaagttcatcgtcaagcccaagagctccgcctgccgcgacgactgacctggacaactggtgaccggccgtcgtcgtcgcagccttcttctgcatgccgccttctgattcctcttttattcagccaaccattcatgcataataccaaacactacaag

SEQ ID NO: 22309 - DNA, 579 bp, Setaria italica
  Peptide Sequence Number=SeqID_88283
gccgtcgcggacggcgttgcagaggtcgagcgccttgacggcgcggtcgaagaagtcggcgacgaggcggtcgagcggggggcgggaggcggcgtcggccccggggccgaagaggagggcgcggaactccacgaggcagaggaggaaggcgtcgaggaggcgggtcgtccaggcgagggagaggaggtcgccatcgggggcgaggaggtcgctgaggagtttggcggcgcggcgctggaaggcatcggcggcgtcgaggtcggagtgcgggtgcggggtggggaaggagtggatctggttgtgatcgcggcggagggagcggatggagcggccgatggaggcgagcggcgtggccggggaggaggaggaatcggtggccggcattgtgtgcgggagcttggtagggttggatggaggaatcgaatgggggtttgggatggattggttgctcggctttcttcttcccctcgctctccgctccggccttctactaggcttctcctgggtctgggtggggtgggggacgcgtagcaaaatggcaggagcggaggtttgtctgtccgcctgtctcctcccatc

SEQ ID NO: 22310 - DNA, 672 bp, Setaria italica
  Peptide Sequence Number=SeqID_88284
ataggtaactaaccctttagactaaagttttaagaaattttagaagcacttttcatccatgaatattgaacgatcgtttgaaatgagtgggtcttttcctaaaaatgaatgatcgtctgtactgaaattctcctgcagtgttcatgtacgacccgccgaacgcgacggtgcacgcgcacagcgtgtacatgatgcgcaacgccgccgactaccagtcgtgcaacctcaaggcggccaagctggtggccggcgtcacgcagggcgccggctcgggcttcgagttcgtgctcacgaagcgcaagaagcactacttcgtctgcggggagcgcggcgggatccactgcaccatggggcagatgaagttcatcgtcaagcccaagagctccgcctgccgcgacgactgacctggacaactggtgaccggccgtcgtcgtcgcagccttcttctgcatgccgccttctgattcctctcctgttcaatcgttgttcgtgcttgtattaagttattaattgctgtacttacacggtgtcgtgtggtgtacttgtagtgtttggtatttatgcatgaatggttggctgaataaaagagtgtcttagtgagttgtaagttgtcgttaatttgtttcaggggagaatgtaatgagaattgaggaactacacgtagttgttgac

SEQ ID NO: 22311 - DNA, 355 bp, Setaria italica
  Peptide Sequence Number=SeqID_88285
aggcaagaagtaagacgtagaggaatccggccgggtagaccaatggtcccgtgtctccctcgatcttggtgtagtccctctccccttccagaaaggtatccacctgagacatgtaggcgtcccagtcgatcttggtatacgggacgaaggcgatgatgagggcgacgagcgcggcgtcggcgagcaccaggaaggcggcgaagtagagcggcctccggtcagccgacctggctggcttctctgtcgccaccgacgccgtgctcgcggcgcgactcttctccgcccgcgccatgcttgccgccggcgaggtaccacccggcggccaggatcccaggaggaagacgagccgagcccg

SEQ ID NO: 22312 - DNA, 278 bp, Setaria italica
  Peptide Sequence Number=SeqID_88286
ccttgttttctttcagctaaaagttatgctgctccagtcaattacatgaaaactgatttataggttttacttgaggttgcctgtacctgccttcattctcaatgacagtgtaaaaaacatatttggcggaaagattctaagttacattaaaatcctatattaagaacaaaatagaatggcttgatcatttctgcttgatcttgtagctgtgcttgatgagaacgggaagttcctactcgctgccaaaaggagccggaggacgacgcacacggactatg

SEQ ID NO: 22313 - DNA, 502 bp, Setaria italica
  Peptide Sequence Number=SeqID_88287
cccaccttcacgcgcactcccaaccactaatagagcccatcatcaccacacgcgcatgcgcacgcagagggatagatcaaccaacttcccttcttgcgacccagcaattgcaagtgttcttccttctcgttttcggttcaaagactgcatcttttgagggttcttgtttggggagcagccggatttatttcaggaggtttcgatttgcggtgctgccattggccgttcgattttgcgtgtcggtgacgtgcacctaacctggagatgtcattccggagtatggttcgtgatttaagagaaagctttgggaatatatcgaggcggaactttgaggtgagaattcatcacagagggaagtctcttggatcttcaagtgacctgcaagacaggcctgtggtaattcagcaaagcagatgggctagcctacctcctgagttactccgcgatgtgatgaaaaggttggaggaagatgagagtagctggccatcccgcaaggatgttg

SEQ ID NO: 22314 - DNA, 1601 bp, Setaria italica
  misc_feature (1548)..(1548): n is a, c, g, or t
  Peptide Sequence Number=SeqID_88288
taagtaaggtaaaattaactaaaagaacaaaaagaacaagaatagggactaagcctacctcctgagttactccgcgatgtgatgaaaaggttggaggaagatgagagtagctggccatcccgcaaggatgttgtttcttgtgcctctgtttgtacaacatggagggatatgtgtaaagatatagtgagaagtccagaaatttgtgcgaagctcacatttccagtatctcttaagcagcctggaccccgggatggagtaatccaatgtttcataaaaagggacaaatcaaaactaacgtaccgtctctacttgtgccttagctctgctgtgcttgatgagaacgggaagttcctactcgctgccaaaaggagccggaggacgacgcacacggactatgccatttctatggattcaaaaaatttctctcgatcgagtactggctacattgggaagctgaggtcaaatttccttggaaccaaatttatcatttacgacacgcagcctccatacaacgctgggagactttgctctcaggaacggccccccagccgtcggttctcttccaggaaagtctcaccgaaagttccaatcggtagctaccccattgcacaggtgaactatgagctgaatgtgctcggcacccgggggccaaggcggatgcagtgcactatgcaatccatcccagaatcagcagtagagcctggcggtgttgtgcctgggcaaccgaaagagctcctcccgaggttattcgacgagtccttccgcagcacagcaacttctctctccaagtactccatcgcagatagctccatggacttgagcagttgtcggtactcggagtttggcggaggaaatcagcaaggcgacgacaacgatgcagacaaggagaggcccctggttctgcgcaacaaggcgccgaggtggcacgagcagctgcaatgctggtgcctcaacttccgtgggcgtgtgacggtggcatcagtcaagaacttccagctgatagcttgtgtggcacaggcagccgcagcaagggcttcggcacctcctggacagacgcagccccaggcgtcgtcaagccacgacacggtgatcttgcaattcggcaaagttgcaagggatatgttcaccatggactaccggtacccgctgtcggccttccaggccttcgccatatgtttgaccagctttgacacgaagctggcctgtgaatagatgaatagacggggttagcatagcagcgattagagcaggtagatgtctggatgtgataagcagggcgttcaagtctgagcacaggtagtagctgttgattcaagtcttgttttgtgaggtgtgcttctgaaacctgaaaatgaaatggctttaaagtccaaatgggaagcgatcaacatgagaagaagtgttagagttgtaatggtaagcttgttgaccttttcatttggtgctgcctgctgggtatgcagtgtcgcgagatcgattgcgctgaaaagtcaggaaatccggttggggtttctgctagtagtagatgaagattggtaggggttttcncatcatgatgtagactagtgctggtccataccattaataacaacttgatacag

SEQ ID NO: 22315 - DNA, 353 bp, Setaria italica
  Peptide Sequence Number=SeqID_88289
ttttacaagtatttccgttttgatctctccaatcttgtttgactgggtaggacaattgcttatatacgaaaccatctgttcacattcaacccaatcaccatctcttaatatgacaacactaggaggggatttccctggtagcaactgactataagtctgaacagcaacagtttctgggatagcagacaaaacacgtaaaatgtctgaagagatagtgtacggatgacgtttgaagataagatttaaagccccaatttttccactttcagctaaagctgtggcagtttccaccagtgccatcgaacggaatttgctatattcttctgctgagtaccttcccatattaattccct

SEQ ID NO: 22316 - DNA, 408 bp, Setaria italica
  Peptide Sequence Number=SeqID_88290
cttgcaacaccccctaacccgcgcgaggcccctcgcgatctcctgctcatcctgttcatactttggcaacatgatgaccctggtaatcacacatcgaccctggtaatcacacatcctcatcgaacccgccggaccacactaacaatagcagcggaacacaacatcaaaacaacattgcagtggaaagtggatagaagcacaagaccaaatctaacatgagtgttaagggaaaagtaccgtgcaatcccatctacatgagttaactgattgaagcaatggtatccacgtagattaacagggaactaattaataccacaccaatcggtgattaacattggccagatggacaacagtcaccaatctggataaacctacgaaaaactaactgtatccatcggaactgcacta

SEQ ID NO: 22317 - DNA, 286 bp, Setaria italica
  Peptide Sequence Number=SeqID_88291
ttcactagtcgcaagctactgttccatcgtcgatcttgctcgctctggatgcaagaatggcagcgaccagcacgccgacgatgccggcgacggtcacgcccctgccgggctacggctaccagggctccgccgcgggcggcgccgagcctccgcagcacagctcatcgggctccatcggcacgttcttcggggtgttcgcggcggtcctggtgctcaccttgctctcctgcgtctttgggcgggtgtgcgcggcgcaggccgagggccccgacgaggtgtacgactg

SEQ ID NO: 22318 - DNA, 470 bp, Setaria italica
  Peptide Sequence Number=SeqID_88292
ccatctgcggcctcgagttcgccatcggccaggccctcggcggccacatgaggcgccaccgcgccatgacgggcggcatgccgccggcggcgacgacgacgatcgtcgtcgacaagaagcccgacgtcgccatcatccacgacgacgacggcgtcaagcgcgggctgtggctcgacctcaaccacccgccctgcgacgacggctgcgacgcggaggcggagtgcggccacaatgccgccgccgggatcacgttccatcagttcctggacactggcaccatggccgtggactgccttggctactagctagatgccccaaagctccatgattcttctgccacttctggtgcagtctttttttttctttttctttttttgggaatctttcctttttttctttttcttttctgtggagagatccactattttgtagcagtagtacaggtgcctaatgcatgcaaggatcatgca

SEQ ID NO: 22319 - DNA, 378 bp, Setaria italica
  Peptide Sequence Number=SeqID_88293
ggtgcgtgtcgtcgtcggacgaggcgcggctggggggcggcgtggtccgctgtcaggtggacatggtggccgtcgtcctccgtatcggaaggcggcttgctttgggcctgccttttcgatgacgacgacgacgacgcgcgcttgaagcgggtgcggccgggcttggcgaccttgtggaggaggctgctgccgccgccggctttgctgctctgggcgtcgtccgccggaggacacgacgaggctggcgccgccgcagcatcagccgcccccgccgcaggagaagaagcagcgggagcgggcttggccttggcggcgacgtgtcggatgtcgtagcaggcggcggccttgtgtaggtgcgcggggctggcggcggcggcg

SEQ ID NO: 22320 - DNA, 2279 bp, Setaria italica
  misc_feature (1)..(57): n is a, c, g, or t
  Peptide Sequence Number=SeqID_88294
nnnnnnnnnnnnnnnnnnnnnnnnnnnnnnnnnnnnnnnnnnnnnnnnnnnnnnnnnggttaaacgaactttcatagtttcattcaccgtagatagtgttattcaacttcaagggggggcaatagtctcactattcatatctgagttgagctatgctacaaaagggctacaatatataggattgtgggaatgtgctgtacaagaggtgttgcattttttgttactgtaaaaagattgttgtgcggcatacagagacgccttcttttgatcttatagggcatgtagaagagaatgtaggctttacagattcatcgatcaccgccgctcggaccatacttctcttaggagcgtgtatcttgcgttctccatggaagctcctctctgggcactgaaatgtgcaataccgtttgatggtgaaggtggagcgctcctgtcaattagggatgcaaggggagaatccaggtcatccaggtcgtcgtcgctcgtgtatcctctcctctgcaccaatgaggctttcctgtcgagctttgcaccacctcctatgtctgccactttctctgccgcatccaatgttgaaggcgcgcagtacacaacaggagcggcgatgcatggaaaagcgctgatcacatctttgtcagtgcagcgctccagcaagctctctgaattcagctcctctaagactgtgcttggaacaggatcaggacagaactcatcaggcgtaaagttgcacaggattcttgtcactaattgaagaccaattgaagggcagacctctttcctgatagatttttcaagaagcatgtcctttgggagcatcaggagatcactcaattcattaagcagttgaaaagattttgattcagctgcacctcttctttcatcatcatcgtttcctatgtccgaatcatcatcgtcaatgccaaatttatctgtcagccatcttgaccagtttccaatagagttcttcagctgcgcgcctgaaccaaagcttagatcaccagctggaattggcaggacttttgggtcaacgattgggtcagatataggatccgttggtatctcacttgctgattcacgaaggatggcattaaacattgcaacatccaaacgggctacacattgctccatcaccaattttgctaatactggtaaacagccgcactcatgtccaccagaacgaagggggcacattctgctgaatgcatcatgaaatgcagccttccacaggttaacagaaaaggtgccctgccgctgatcacccaaagcaggacctaacactctaccagcccttggagtagatgaaccttccgcaggggtttgcatgtgaggagtaagtgcctgccaccacactgtgtcaacaatccgagaaaatatccaagattcaatcttctctagtgaagccaaaagtgtacttgtttcctgccaatcatctggcatctgcattgcagcaagtttggcttgcttgccattggagctgtttctccatagcattgtcataggtttcccatcaagctttttggcaccaccatccatgctcatggtcgccgttgttggagtcacacatgagatgccaaaagtttgtgcaattatctccctgaggacgactgtgttggacagccagaatgtcaaccttgaagcatcattactactggactttgcaacaagcacaaggccagaagcaatgttttttgctactgaagctctcttgtctgctgaccaaaacttggatgcatgaatatatagcctagagagacgccgagctggggtatgcaacttatgtgctgaacttccatgctcaggcactacagagtaaagagaaacttcgagagctgcaacttcacgaagttcctgttccaacttgtcaattcttgactccgattcctcattcccttgacctacaactgatttgtcatgatgaactatcttctcttcaatatcaggaatatcatcatcagtgccagtactctgatcacagtgtggagcttcatctaacacatcgatctccttggcctcctcattgcctttatcatcgatggttccagcgtcactgattacatcatctgtttcctcagaaaattctgatggagggcgagaaggaactctggcaatgtctggttttctaacttcaacagctttagtagcgctaactgttttcttttgcttctgagatttgttctgaacattgtttaatcctttatgttgcagcttgttttgagcttgacggctagcactgcttttggtcgtgcgggggctatattctttagtctcctttttactaa

SEQ ID NO: 22321 - DNA, 291 bp, Setaria italica
  Peptide Sequence Number=SeqID_88295
atcctatatgttaatgtgatgattaattagatgcttataccgaagattgtgtcaatgtcaaataagaaataaaaatcaagtactagacatcagccagatgcatgtagagtagtgtataccatgctgagccctgtcatgaccatgacaacgctttggcctcctatggttccgaaccaaaaccttcgtcctgatattagttcacagcagggaaattaaacttaataatcttcagaacgagaaggaatgatgccatgatcttcgtcataaacattatcctgcacacgtgcatga

SEQ ID NO: 22322 - DNA, 314 bp, Setaria italica
  Peptide Sequence Number=SeqID_88296
ccggtgtagtcggagaagttgaggaagccgaactccctcgtgtagtcgccggcggcctccagcgggagctcgttcgccggcccgtcgccgtacctctgctagttccagagggacaggtgggcccagtactcggggatggtgacgtcgccgatctggaggtcctcgttggcgttgccggcgatgccccagtgcacgatgcccttcaccttgaacaggctcagcagcagctgggtcgtaagcccggcattgagctgcatgcgtatgcacgacaaattgtactatttttcaggtctcgttattttttccagtgtatt

SEQ ID NO: 22323 - DNA, 736 bp, Setaria italica
  misc_feature (17)..(17): n is a, c, g, or t
  Peptide Sequence Number=SeqID_88297
cgtagtagcgcttgctnacggggacccagaacgcgtgctgccgctgctccggcgtgccggagaccgggaagatctcctccggctggcaccagatgctgttgagcgtgttcgccgacagctccgggttggccttcccgacggtgtagtcggagaagttgaggaagccgaactccctcgtgtagtcgccggcggcctccagcgggagctcgttcgccggcccgtcgccgtacctctgctagttccagagggacaggtgggcccagtactcggggatggtgacgtcgccgatctggaggtcctcgttggcgttgccggcgatgccccagtgcacgatgcccttcaccttgaacaggctcagcagcagctgggtcgtaagcccggcattgagcatgctgagccctgtcatgaccatgacaacgctttggcctcctatggttccgaaccaaaaccttcgtccttggacgtccaagatgggtatgtcctgctgggcttgtagctgggggatttgagtacgggctccatttcgtaggcgttgggaacgacgagccccacgaagggcgcgccggcccggttcgcccggcgcacggctcgccacgtcttggtcgagatgaaccccgccgccggcgtcgccgccgccgtggccatgatgagcaccaccaccgccgccacggcctgcggcggcgtaactgcaccggctgccatcgcgtacgtgattcttcctcaacactttaattaa

SEQ ID NO: 22324 - DNA, 316 bp, Setaria italica
  Peptide Sequence Number=SeqID_88298
gagacatttatgcggcgtcctcctatccgcgtccgtcagtttagtcgatttgttgcgaattcgttgccatggcgcctccccagagcggcgacggcggcgcagcagcagcgggcgacgacctcctggagaccgggctgctggctgcggccgtctcaaaggaggaggaggcgcttgccccgaagacagtgtcgacgtcggggcgcctggcggatgagcagggtacggcggcgacgtcgtcgtcgcgggtgcggcggggcgcgcggctcgcggcggcgcagctgcaggaggtattcctgggcacgaggctgttcccgct

SEQ ID NO: 22325 - DNA, 340 bp, Setaria italica
  Peptide Sequence Number=SeqID_88299
cggtgttgcccgcgaagagtggtggccggagcaggaggaccatgtggatcgccatcgcggctgcggcggccggtttcctcgtgctcctcgtggcattgcagctcgcgctgctcctctggtgtcgccgccgccgccgccgccgtatgaatgagcaggatgccgccggtgatgtgcagcagtcgctgatgccgccgcgtctggggtccagcaagagcaaggggccaggcagcgtggtggagcacttcacgctggagatgctccacgccgccacggacgggttctccgacgactgccggatcggaacggggagcttcggatccgtataccgcggcacgctctc

SEQ ID NO: 22326 - DNA, 473 bp, Setaria italica
  Peptide Sequence Number=SeqID_88300
cacctttcataaactggggaaaagaaacaatggtacacccagttgagtttttcactgaaaatcatggaaccaatgaaattcttagtgacactgccagtatagttttctttgccaaagattttcattagagttctaacctaactggtgcacaactgtaagcaagggtaatgatcgttgtcctatatttgggatggccagaacattgcaccccatttcttcaactgcctgtggaatacacaaccaagcagattgcagaaacacagtatgcttcagttgctcacggatgaccactcccaccatagatgcgacggctggacaggagatcaatctctatccttccttttaccagttattgactcagccttgtcttcttgtagactctgttgcaccccgttagattcctcgtttggaggcacttcctggacaactccattagttgtaggaacttcgtcaggttctttgcaggtccctgt

SEQ ID NO: 22327 - DNA, 185 bp, Setaria italica
  Peptide Sequence Number=SeqID_88301
atcatccactgaatcaaaggctggagatgtatcaacatgaatggaagattcaggtgcatctctatttgaactctcaggttttgcagctttcccgataagatcattatccacattgcagcgcaagtgatgaaattcagaaccaaacatgtcaaacaaatcactttctgcagtaggatccataagga

SEQ ID NO: 22328 - DNA, 301 bp, Setaria italica
  Peptide Sequence Number=SeqID_88302
tcccggcgtcgtcggtgccgccggagaagaagcagaagggcaccaagagcctctccgccggctcgcacagcgaccagctggtcaagaaggagagctaccatggcaaggccggcggccaccccaagagcaatggccgccgtgacttgggtgacgccttgtcgcagaagaggtcgtcgtcacaccggcggcgcataagcgccggccggacggcagtgtggaagccacacctcgagtgcattgttgaggacagttgagcagaggttgatccattttttttctttttttggtttctgaatcaagg

SEQ ID NO: 22329 - DNA, 379 bp, Setaria italica
  Peptide Sequence Number=SeqID_88303
ctttcgtgcatgttggtgcgaaagcctgggaatccaacggctcctggacagcaataagactcactagtcactagtgtctagcactcgaataattttagtgcttctagatcgtatatgcgattttgtggtgacgttgtattgtatcagcagatcactgaccccgttaaattgacagggcgggaagagcacattggagaattgccaggttttgcaggctacagtgaatcgatctaaaggcaacaagactgagatatccaaatccgagctcatacagaagagtgcatattgtagggtttcaggacgggatatggatcttgttgaactctccgcctatggaaatgttcggcgagggccagattcagggggctgtaaaatacaa

SEQ ID NO: 22330 - DNA, 595 bp, Setaria italica
  Peptide Sequence Number=SeqID_88304
atcgacgagggcacgaggcagcgatggtggggcgaaagccgatgcgccgccgccgagatcggcagccgccgcctccgccgcagtccttcggcgcgacggctcgcccgacctccccgcgctcgtccgcctccgccgccgcggtcgccgccgacctggacgagctgctgctcacggcgccgccgtcgtcggcgtcggagccccggagcttcccgtacgcggtgaagcagcagtgctgggagaaggcggagcgggtgcccgggcgcgacccggagaggtggcgccgcgacgcgctcggcaacatcgtcttccgcaagctcgtcggctgccccggctgcctctgccacgactacgaccacatcgtcccctactccaagggcgggaagagcacattggagaattgccaggttttgcaggctacagtgaatcgatctaaaggcaacaagactgagatatccaaatccgagctcatacagaagagtgcatattgtagggtttcaggacgggatatggatcttgttgaactctccgcctatggaaatgttcggcgagggccagattcagggggctgtaaaatacaatgaagtacagaagtaga

SEQ ID NO: 22331 - DNA, 536 bp, Setaria italica
  misc_feature (522)..(536): n is a, c, g, or t
  Peptide Sequence Number=SeqID_88305
aaaaaatttactaaaaattaaaattaatagacgtgattgaaacaattcgcctgtgtgatatcttgttggaaaagctgtatggcaatgacaattggcaagtaacattactagtgtgacggatctgtttcctttttgagggcagaaacccacaactgatgactgatgtagggattcatgcaggctacagtgaatcgatctaaaggcaacaagactgagatatccaaatccgagctcatacagaagagtgcatattgtagggtttcaggacgggatatggatcttgttgaactctccgcctatggaaatgttcggcgagggccagattcagggggctgtaaaatacaatgaagtacagaagtagatatatctgaggagttctgttaattagattgaattaggtgcatgaatctgaatggagaaatcttgattaattgttctctcaaacacgtccaattatgtctgtactatgtatcttgatgcttcaagtgattcatctgagaacagcaaaagtgaaaaaaaaannnnnnnnnnnnnnn

SEQ ID NO: 22332 - DNA, 262 bp, Setaria italica
  Peptide Sequence Number=SeqID_88306
tcaccaccggcaccgccgcaccgccatgagctcccgcgtccgcgttctcagcgtcacccatgtccgtcccgccgaaacacccaacccgccgccgcacgacgccgaccactccatcaagctctcgctcttcgacaccttgttcatcgccctgacgccaatccggcgcctcttcttctacgagggcgacgacctccctcccttccctgccctggtccgcacgctgcggtcctccctcgccgcaacgctcgctgtcttcaccccg

SEQ ID NO: 22333 - DNA, 153 bp, Setaria italica
  Peptide Sequence Number=SeqID_88307
tggaacagattagctgctgacatgggaagctatcttgtggatggaaattcagctctagacgaagctgctgatcaggttgcctttatctccaaatccttttctcaaagaaaatgggttgaggaacaagtccagaagatgtgttttggtatatct

SEQ ID NO: 22334 - DNA, 1625 bp, Setaria italica
  Peptide Sequence Number=SeqID_88308
tcaaggaactcgcagatttcatcggtctgccatgccggattgcgcaaggttgcaagtactgctctgcgcctcatcgatcatcttgccttgtcaaaatcgacagtgagaggagatatgtaagggaatacgtggtggaccttgtagttgaaccgggaagcatcagctgcccagattcatctatcaacggccagttgctctccacagtgccttcacctttcaagacttcgtgtaaagtaggctcagggaactacacgacaccagtcgctgcctggaatcaagcgatagcagatgatcgtcgcaacatggtactatcgaattcccagtattcagttgctaggtgttgtgtcgtggaggagaactctgttcaggtagctagcaaagaaggcttactgccaaagtgcggtcagatcacagagaatggaaactgcaatggcatatcagtgttagatgtgtcggcgcaattgaaggcgatggacatcagtgctgagaatggcaacaaggagaacgtcccaggtgccacccttctgacacgcttgaccattgagccgtcttttgctgtagattggctcgagatatcatgggaggagctcgagctcaaggaacgcgtaggcgccggctctttcggtacggtgtatcgtgcagactggcatggttcagatgttgcggtaaaggtgcttatggatcaggatgttggtgaagctcagctgaaggaattcctcagagagatagctattatgaaacgagtccgccatccgaatgtggtattgttcatgggtgcggtgacaaaatgcccacatttgtcaatagtgacagagtatttgcccagaggaagcctcttccgcctcatcaacaaggcagctaatggagaaatgctggacctaaagcgtcgtttgcgcatggcactagatgttgcaaaaggcatcaactatctccactgcctgaatcctcctattgtgcattgggatctgaagacaccaaacatgctggtagacaagaactggtccgtgaaggtaggtgactttggcttgtccagatttaaggcgaacaccttcatatcatccaaatcagttgctggaacaccagaatggatggcaccagaatttctccgcggcgaaccatccaacgagaagtgtgatgtttacagctttggtgtgatcttgtgggagctcctgacaatgcagcaaccatggaatggcctaggccctgctcaggtagtaggtgccgttgcatttcagaacagaaggctcccgattccgaaacataccagtccagaacttgctgctcttgtggaatcctgctgggatgatgatccaaggcagcggccttcgttttcaagcattgtggatacgctgaagaagttactcaaggctcttcttggaggctcatgaggacccttgcaagctgccttggctgccacttgtctccacctctgtttcgcgttccttttctgtctctgtcaatgcgatgatagcagaagcagcacaaatgcaatgctgcctcgagttcgataggtcactctctctttttctcctcatgcaaaaccaataaaatcattgctttttgtcttcttaccctattgttacgttacccttaggggtttaagttaaccttaaaaaaaaaaaaaa

SEQ ID NO: 22335 - DNA, 868 bp, Setaria italica
  Peptide Sequence Number=SeqID_88309
atggacgagaagcgtaaacttagcgagaacctccagaacttgcctccagagaagcttgacgcagttgttcagctcattaagaacaagaatttgacagttaggcagcatgatgatgagattgaggttgaaattgatagcatggatgctgaaactctttgggagcttgataggtttgtgtctaactacaagaaaaaccttagcaagcaaaagcgaagggctgagcgtgcaatgcttgcaagacaagatgcagagttgcgtgcacagcattctgtacagcaactactggctgaagagcgtaacactggtgaaaaatctccaaagcaaaatgtgatggtgggtgggcaattagcatcttctgcgccaaatcaaaatgataacaatggacatgtggcaagtaggtcaaacagttctagcggctccagcagtgattcaggctcgtcttctagtgactcagacagtgatagttcttcttcagatggatcggatgctgccaatttgtcttgaaatataggttcaggtgcttgctgcgtagaccataactcaagaattttattggcttgccaatggcagttaggttgtacatgtttatccccctcttttaggaaaaactcctaggtagctgctaatgtgaggttgccattggaagccagaaaaggggcaatgcttctgatgttgacgcttccataatgagtgtgaagcatatgtgctggtgtatgatgggtgtagtccctccctccctcccctcctccaagcttttctttggctgattgtgcaacactaggtaattttttctgacttgtagtggctagaatttggttagccgacaccaatctggttggcagttggcacacttcctttcaaaaaaaaa

SEQ ID NO: 22336 - DNA, 305 bp, Setaria italica
  Peptide Sequence Number=SeqID_88310
ggtgcggcgggtgtgggtggtggtgcggcgggtggggatggggatggtgcggagggtgcgggtggtggtggggcggatgggggtgatggtggtggtgaggggggtggcggaggtggggaggcggcggtgcgaagatgtgggtgaggtccgagaagaagagcagggccgggaggccgacgaggaggagctgcgcgcggtccatagcgccggcgccggggtggacggcttcggccttcggttgcttgctcgctgccttcgcgtctccggtctccggccctttccaagacgcggggttgtgtggggac

SEQ ID NO: 22337 - DNA, 622 bp, Setaria italica
  Peptide Sequence Number=SeqID_88311
aacagttcttctctgcttctgattctgagggcttctgatgatctctggcttgtatcggatgatagcagaatcataacatcatctagtgagtcaaggtttgcataagcttccttgttggcgacaagtagatttgcataatttccacgccaaccaaggggacggcatcgcaatctatcctcatttctcaatactaggtccagtactaagaccctacctaatgctgcagcagttttctcagcagcttcccgtgactcgaatggtactgtattctcaagcagaggggagccatgtacataattcatcaggaataggcagcggctcaattcaagagcttctagcatctcagcgcagatcatctcctcaagttcatcaccagcagttattgacacatgtcgagcattttcgactgcatccttgatttgttgccattcaggtgacgagttatgaatgactctgccttgaggcgttcagactgtgtggccatccttgaaggtgctattttgatgactgcagctgcttccttggatggaaggtccacattttcagcagttctgaataatgcaataaaaacaacacccccagaatttactgtcacctatgcaaaatgttatagttgttaaaa

SEQ ID NO: 22338 - DNA, 507 bp, Setaria italica
  Peptide Sequence Number=SeqID_88312
accgcggcgtggacctccgcccgctgcaggcgcgcctcctccttccgcttctgcttccgctccttgacccacttcttgagcgagatgccgttccatggcgccatcttgcgcgggagccatttcttcttgaggcagagatcataatccagttcgggatgaattgccttctgcagccatatccatgacttcagatcgtcatatttccattgggccgtgctgaaactgctgttgtcaaccaccaagctacgattactttttgacaacaggtctttccggtcaagcgacatgaccggatgctccaccaacgccatcgagcactccttgggtcctgtctgaagaacttggatagccgagctgcaccacgcgctcgagagcaggtccgtcgactctggaggcggctcctcgtaggcaactaggcctctgtccggctccatggccaaggcagggcagaagccaagctaattccctcagaagcagctcaggaaaggcaagggtcagagatttata

SEQ ID NO: 22339 - DNA, 365 bp, Setaria italica
  misc_feature (1)..(1): n is a, c, g, or t
  Peptide Sequence Number=SeqID_88313
ngttggcagcgtatgcaactgagcaagtccttcctctagacgtaaatttccagagagcattggtgctctatcttttggtatctgcccaattgtccagagacaagtcttgttggcaaggatgtcaactgtgccatagtttgcagtcaaatccgcagaaataataagagggggcaactgaaactgcactgttatagaatcgatgggtttcccaggatcatttcggatccccaccatcacactaacacggcaattcccagaatcagacgtcagctgtggtttcacataaattggtgtcttcttcaatttcttaaccctgtaactcatgagcttgaattgtccatcgggaggaacaaatgataggacct

SEQ ID NO: 22340 - DNA, 460 bp, Setaria italica
  Peptide Sequence Number=SeqID_88314
ttgttgtcgtttctgtgttcattttttgttaaggacaacataactgctggctctcatttgtactctgtaatgagtatgctttcgctggctggacttgtggcatttgtgatttcattcaatcttggcttgggagccattccctggatcattatgtctgaggtatagtttgctcatcctagattcttatattaaacagagcttttttgtaattattatgactgtggcttgacacttctgtcacagtcgtgaatttctatatttctatctgcttaccatgagatactgaaaccccaaatccccaacttcttcccaaacatagttccttttaaaatggatttaaatagtgcaatcccactgttatttgttaacttaagctcctacaaaactgccttattttctctagccagatggcatcaatcatattcatagcagcaattactgcaaccacctcatctagtaa

SEQ ID NO: 22341 - DNA, 2217 bp, Setaria italica
  Peptide Sequence Number=SeqID_88315
gaccagcgtcaccacgctcatgcccttcgctcggcggcttcctcgccgacggatacctcggcaggttctcctgcagcaccttggtgaggtagagcatcaggctcgtcgcgatcccgaaatagctgagcctctccaagaactagatagatcatagatagatcaaacaaaacaaccctctcctctctttctctcttgacgactggcaaatataggaatcgagattgacttcatggagaaaagcttgagggttggttccatggaggaccgccgggaatgggtacacgactcctccgtcgatcaccgcgggaggccgccctcccgtgacgccaccggctcgtggaaggccgccatgttcatcatcatgatcgagttcagcgagaggctcagctatttcgggatcgcgacgagcctgatgctctacctcaccaaggtgctgcaggaggagatgaaggtcgctgccaagaacgtcaactactggaccagcgtcaccacgctcatgcccttgctcggcggcttcctcgccgacggatacctcggcaggttctccaccgtcgtctgctccaccgtcgtctacctcctgggcctgatggtcctggccacggcgcagctgtcgccgaggctgacgcccaaccactcgctgcggctccacgagacgctcttcttcgtcgggatatacctggtgtccgtcggcaccggcgggcacaagccggcgctagagagcttcggcgccgaccagttcgacgagagccacgcggcggagcgggtccagaagatgtccttcttcaactggtggaactgcgcgctctgctccggcgtcctgctcggcgtcaccgtcatcgtctacgcgcaggaccgcatcggctggggcgccgccagcgtcgtgctcgccgccgtcatggccgcctcgctcgtcgtcttcctcgccggctggaggttctaccgctacagggtgccggagggcagcccgctgacgccgctgctccaggtcgtcgtcgccgccgtcaggaagaggcgcctcgcgctgccggccgacgccggcgagctgtacgaggtcaagccgcagaatatcaagaagaggctgctttgccacacccaccagctccggttcctggacaaggcggccatagtggagcacgacggcggcgaggacgcggccgggccgtggcggctcgcgacggtgacgcaggtggaggagacgaagctggtgcttgccatggtgcccatctgggtggcgacgctgcccttcggcatggcggcggcgcaggtgtccaccttcttcatcaagcagggcagcatgatggaccggcgcatgggcccgcacttcgttctcccgccggcgtccatcttcgcgctgtccgccatcagcatgatcgccaccgtcgcggtctacgacaaggtgctggtgccgttcctgcggcgcgccacgggcggcgagcgcgggatcagcatcctgcggcgcgtgggcatcggcatggtgctcgccgtggtggcgctcgccgtggcggccgtggtcgagcgtcggcgcctgctgtccccctcgccggcgtccatgtcggtgttctggctgctgccgcagttcgtgctgatcggtgtaggcgacgggttcgcgctggtggggctccaggagtacttctacgaccaggtccccgacaacatgcgcagcctgggcatcgggctgtacctgagcgtgatcggcgccgggagcttcctgagcagcctggtgatcacggcggcggacagggcgagctcccgcggcggccacgccagctggttcgccaaggacctcaaccgtagcaggctcgacctcttctactggctactggcatgcatcggcgctgccaacctggtgttctacgcgttggtctccaccaagtactcgtacaagaccgtcagcggggccggcaaggtcggcgtcgacaagtccggcgacatcgagtgcgccgccgccgcctagctgatcgatcgatagctagctggagatcattagcggctggtaattcgatttataagatgtgtatgataatgtgtactatgtcatcagttatcgtgtgcgtcactctagctagggtacatgtcgtctcagtgtcacaaggatttaattagctgggatggatcgttcgtgaactcgcgtgtcgtggaatgtacttgtacaagtgcggtttggttcgttgtagcggcgatttaccatgtgcgtgagctcggttaattcgtagaaaa

SEQ ID NO: 22342 - DNA, 918 bp, Setaria italica
  Peptide Sequence Number=SeqID_88316
ggggggttgggggggatgagattctaaaagaccttgtagtgtttaaccttacttctatgtttctagcccactgtacctgttggtattcctagtactttagaaccacggccaaatcctttgatcacaggtccactgataaaccatggttctattggtaaggtaccttcaatccaatcattaaatggtggcaaaccccagttttcaggccttacatcaaggagggaattgatcacctcatcagcagtactgaactcagcagtctttttgggcactgaaggtacagctatgacatgcattcccgcagcttttccagctgtaacacctggcctagtacaacaattattttacaatgttaaagggatttttttgctaaagtacttaatgctacagcaaattttgaaccagtaaaaggaatggttatcaggaaaagatacatatggtgtatctgatgtcagcccagaagaactaaacatgtacagggaagagaatatcatttcttcggtcaaaattctaggtgtcatgcgtgactgtgtattactaaacaaggtcatcaggattgtaccattgtatcttattgtgatgctaatattatccgtcaaaaatggatcataacactgctctcttcttaaattgcatcaaggaaagcatttccattactagttaaaatctgtgtttccacaagcgcgtccactgcatggtctttactagccttcctgtgttgaggaggtaggaggtgttttaatgaagagtataccatacacgcaaaattaaataagggaaatcttacaaggaatcctcgattactaggcaatttgaaggagtggtgttcattctttttgcagcttccaaaaatcttgaataccatcgcagcagcttacctaaaacatctccaccaacaattgcagagaaagactcttt

SEQ ID NO: 22343 - DNA, 1122 bp, Setaria italica
  Peptide Sequence Number=SeqID_88317
caccaaaatcatgaagcaaccaaggctcctgtaatgaatagtgttaacaacaaaagtaatagaactgaacatagaaacaactgcgtaaagaaaactcactactgtcttctcagtgttgtcgaaatatgggttccagccaatgctcataaccatcttatatataccacgtgttgaaagtccagcccagccaaagtatacccctgatgtgtgctctgacactacatcagaaaagttctctgcgggcaaattagctgttggtattcctagtactttagaaccacggccaaatcctttgatcacaggtccactgataaaccatggttctattggtaaggtaccttcaatccaatcattaaatggtggcaaaccccagttttcaggccttacatcaaggagggaattgatcacctcatcagcagtactgaactcagcagtctttttgggcactgaaggtacagctatgacatgcattcccgcagcttttccagctgtaacacctggccattgtatcttattgtgatgctaatattatccgtcaaaaatggatcataacactgctctcttcttaaattgcatcaaggaaagcatttccattactagttaaaatctgtgtttccacaagcgcgtccactgcatggtctttactagccttcaaggaatcctcgattactaggcaatttgaaggagtggtgttcattctttttgcagcttccaaaaatatatctgggtatggcttccccttctctatttcatctccaccaacaattgcagagaaagactctttccaaccctgatggcaggaaattttggcttctatattaggtcttggcgagtttgaagccaaagcagtaggcaccccattactccttaaatgatttatcagccgattagctcctggaagggggttttatgttgcaccacctgcaatatgaggtgtattcaatcaaggatgttcagtaactcaaagaaaaaaaaggtcagaactgactggcaagaaaacatacacccacgtctaggaataatgaaacaacaatggacttatcaagcaaatgcagcccatagaagtaaaaaaacctacactcctgcgcccctgccccacctactcaaacacaccaataaagt

SEQ ID NO: 22344 - DNA, 2046 bp, Setaria italica
  misc_feature (32)..(32): n is a, c, g, or t
  Peptide Sequence Number=SeqID_88318
gggggggtggggggggagtgagattctaaaanaccttgtagtgtttaaccttacttctatgtttctagcctactgttttcatttataaaaacagtataaatcatatctttccatagtagaaggcatcaattcattaatcaaaacaagtgagcagctgcagaccagctatcggaattgaactttcaacatgacacctttttctttagagggtatcagcacccctctttgaggaacagccatatagtgcaactaccactgcttccaaaaagtggaaaagaactaagtataaactcaacaagagtccaatcgtttctgctcaacaccaatgtatttccctccatcacaaacagaacaataagaggcaacttatttagtgccctcctgcaggggtttattacttggaattcagctcagcctggttccatcagtattacttccctgctgcaaagggtctctcagataccgcgagtctttgtacttggcatacataggtaagtctagtgccttctctgctattcttccatcctcatgaatcctctctatcaagctttcaagcgaaggaaagttggcctcaggtcttatgtagccaacaatggcaaggcgcagctcctcaccatagaagtcctcaccaaaatcatgaagcaaccaaggctctactgtcttctcagtgttgtcgaaatatgggttccagccaatgctcataaccatcttatatataccacgtgttgaaagtccagcccagccaaagtatacccctgatgtgtgctctgacactacatcagaaaagttctctgcgggcaaattagctgttggtattcctagtactttagaaccacggccaaatcctttgatcacaggtccactgataaaccatggttctattggtaaggtaccttcaatccaatcattaaatggtggcaaaccccagttttcaggccttacatcaaggagggaattgatcacctcatcagcagtactgaactcagcagtctttttgggcactgaaggtacagctatgacatgcattcccgcagcttttccagctgtaacacctggcaaggaatcctcgattactaggcaatttgaaggagtggtgttcattctttttgcagcttccaaaaatatatctgggtatggcttccccttctctatttcatctccaccaacaattgcagagaaagactctttccaaccctgatggcaggaaattttggcttctatattaggtcttggcgagtttgaagccaaagcagtaggcaccccattactccttaaatgatttatcagccgattagctcctggaaggggttttatgttgcaccactgctcactgaacattggagtaagcattgagaggaactcttctgtagagtaagggagtccatagtcttccaaaacaacagctgcagcttcataaggtgtcttcccgactagcttgtgagctttcttgctatcccacgttttcccatttttgacaagaaatggttttaccaccttgctcacaacagaatctgtgtttaagagggtgccatccaaatctagaatcacatgggaaataagccgagaaatgggcttgggtgctgccattccaagcacagacaagttcaatgcagcaagacacaagttatttgggaggcacaacctgcaagcggagccgcgcgccggaggaggaagaggaggccgatctctgcttgctgcggcagtttgccggctggggtcgcacgcgcacctcgcggcggagtagctggagagaggcgaggagagggataatcgcggtgaccgcgcggtgcggcggggcaccgcgaataatcccgccgaacgggtcgcggtcaccgcgcggtaccgccccgcgaggccccgtcccgcaccgcgagatgccttgagtcgaaacgcgcctcgcccctcgcggtacgcgattaatcgacgcggtttccacctgtgccctcccgttccccttcctctcgcaccttcggcggccggtgccggtggcggaggtcgcgccgccgccgcctcccagctgaagcttcttcaactccggtgggttgt

SEQ ID NO: 22345 - DNA, 254 bp, Setaria italica
  Peptide Sequence Number=SeqID_88319
cgcgtagagtcaataaagaaaatcatccaagaggagggattcacaccacacacaataccaccaccaagatttttgcgcttgtttcatgcagtctgcttttaaaagaaatctcagagaataagctgtcccagtgatagttgcacctgccaaatgtacaaatgtaagtatttcacagttccactgaaacttttgggttgagtgactttggaatatacaatacaagcatttgtacatttggcattggccaaaaaaaa

SEQ ID NO: 22346 - DNA, 922 bp, Setaria italica
  misc_feature (1)..(55): n is a, c, g, or t
  Peptide Sequence Number=SeqID_88320
nnnnnnnnnnnnnnnnnnnnnnnnnnnnnnnnnnnnnnnnnnnnnnnnnnnnnnnttttttttttttttttctagggaagaaacagagcagcctgagcatatattctgctgatttacaacagcagatggcaccaggagcatgctgaagtgtgaatcgacaggtttgcaactgaacacacggtacattctgctcataattaagatacaagttgcaaaactacgcatgtttaggattacatcttacggactattatctaatcacacacatgtaaagctctttgcttggcatctactggtggacccgcttaattgttcatgatcgatggtccgtctttgcagaagcaggaaagctcaaatcttgattaccatttcaggctgcttgtcatcgtgctgacctcccgaagctccattcctccagggagccgggtgcttcttgcttcctttcttcgagttgtggtcctcctcgtcatcagaatctgagtcagagtcagaatcagagtctgaatcggaacctgaatcgtcatcagagtctgaatcggagtcgttcttgtcgtcccgcttctttggctctccccagtcggatccaacctccttgtcttcctcgccagcggtggccaagcttgccacgtcgccggccgaggcggcccgacgccccccagccttgatgtcctcctccacctccttgtcaccgtcgtggtgcaccggcagcaggctgcgtgtttcctccacgccggcggcgaggtcaggcgcctgcacggccgtccgcggacccgtggtgtcgccggcggcgtagacggacacggctaggaggaggacggcggccgagcaggcggcggcggcggcgttgcgggccatctttgttgtgatcgcactatgagatcgaggcggcgtcagctatggtaacaagtggtaggtgagtggc

SEQ ID NO: 22347 - DNA, 236 bp, Setaria italica
  Peptide Sequence Number=SeqID_88321
gtggtgatggtgctggtgctagtgctgctagttgcagcggctgtggcgattgcgtcatggccagcacggtggtaagctgcggggaagaaggtgacggtaggcaaggctgtgttcttcttcagcttcttgtggttgaggatgccgcggatcctcgccgcaagcagcgagtccggcggcgaggcgtgtgcgccggcggcgaagttggtgcgcgtgttcgcgccctgaggaggcaggca

SEQ ID NO: 22348 - DNA, 823 bp, Setaria italica
  Peptide Sequence Number=SeqID_88322
gaattgttgatgtgtgccatgacttgaagattctatctgctgtccttgattctactccatttgcattttccattaaattggctgctgctgcctcgaggaaagactacagctatcttgagaaatggctgacagaaaagttatatgtataggggaaacgttgtaggtaattgttgtttaatttcctgaaaggaactatgagcaacacagattatatcttagtggctacgacacaacaacctcgagctattgttacaaacttatattgggagtcttgtcctgtcttcataaaggttcttcagtctcactctgggcatctcttatccgccgaactattggatgaactaaggaaactttatgctctatacgaatcgaggaatcctggttctgttgtaagagagctcgctaattcacagggaggatcagatgacattgaagtagaggctaatacgtactttcaccagatgttctctggacagataagcactgattctatgatacaaatgcttgttcgcttcaaagaatcttcagataagagggaggtatcaattttcaattgtatgatctcgaatctttttgaagaatataaattttttcccaagtatcctgataagcagcttaagatagcagctgttctgtttggatctcttatcaaacatcaacttgtggctcacgttgcacttggaattgctctgcgtggtgtccttgatgccttgcgcaaatctgttgattcaaagatgtttatgtttggtacagcagcactggagcagtttatggaccgcgtcatagagtggccacaatactgtaatcatatattgcagatttc

SEQ ID NO: 22349 - DNA, 458 bp, Setaria italica
  Peptide Sequence Number=SeqID_88323
attgacttgcacctatttcaactatgaactgcttgttgaagtttggaatggccaacaccagagcttgaactaaggcttgcttcagaagttcaaaagcattttgagccaaactggtccaccgaaaatgaacccctttcttcaacatgttggttagaggtttacttgacatgttgtagtgcttaatgaatcatctgtaataacctgttaaccccaagaatcctctttagttatttgattgatttgggaactggccaataggtgacagcttgtatctttgatggttcagttgatacaccatcagcagaaatcagatggcctaaatattcaagttgttgttgagtaaacacacactttgatttcttaatgcaaaattgatgttcttgaataatttgcagaacttggtctaggtgttggacatgctcttctagagatgaactatacactaatatgtcatccat

SEQ ID NO: 22350 - DNA, 385 bp, Setaria italica
  Peptide Sequence Number=SeqID_88324
tttaaggaaggaacaacttacctaggacaactccattagttgtaggaacttcgtcaggttctttgcaggtccctgtcctgccaatacaaagccaaatcctgactctctcatccccagacttctcttccaacggaacatgccaagatcccacctctgactcttgaatctctgaagaataagggggtggcatcacaagcaccgcttttcctttattgaaggtatactttacccggtggcggtgcttccactttgggaaaaaggatgatcctagaagctcgaatatgtgatctctcatttcatcattggtcacaagcaaacaatttagtttgattgctgcatatagccagtaccagtcatcatttgacccacttggtgtagtgtacaa

SEQ ID NO: 22351 - DNA, 314 bp, Setaria italica
  Peptide Sequence Number=SeqID_88325
atctcgacgagcgcttagccttcacacgccgagacttgtgttcttgttaataatagaacagaatacaaggccaaccggggcccgagatcggcgacgaggccgtccggccgcgcgtccgccattaattctaccttcttcttcttcttcttcttccattaatccatctagaggtcgacagagagagctaggtagacaatggagacccgggacagtgctccctccacgacgccgctcccctactcctactcgccgctgccggccgcggacgccgcgtccggcgaggtctccggcaccggccgcgcccgcggcggccg

SEQ ID NO: 22352 - DNA, 439 bp, Setaria italica
  misc_feature (28)..(28): n is a, c, g, or t
  Peptide Sequence Number=SeqID_88326
cagtcaagcgacaaacaaagcttcttcncaaactcaagcaacctacggtactggatgctttcaaaagagcaggagtaacagtcagtcaagcgacaaacaaagcttcttctcaaccatcgtcaagtggaatgatgtcaaagaatattgaacaagaggctaatgatcctggtgagctagggtttgtagatttaatggcagcaccagttcagctggatatgcaaagattcaaattcagaactctccatacaagatgcttgtctttgttgaactactcagagtgtcaagattcatcttgttcttaccttgaaactgagctacctatatatctatatcttctccgtgatctgcacaacaaattagataatctaaatcccacaaccaagcctttccttagtacttatcaagcaaaatgttcgcaagtttattgccataagagcac

SEQ ID NO: 22353 - DNA, 893 bp, Setaria italica
  Peptide Sequence Number=SeqID_88327
cggagtctttcaacctctttgatttaacatctcgttagttttgcaagactgtcagcagcagttttagcaatagaaaggccatgagttgttgggactggtgtggttgaacgtggtggactaggcttgcgagagaaaggggaaacggccctagatgagttcaaagatcgaactgctgatgtgcgaactgctcttggaactgatttgttcagatcaattccaccagataaagcaatatctcttagctgaagaagtgaagtcatttgaggattccgaagaaatgacagtgcatcagttttcttcccttgttttgctgccttgctatccaaacttctaatcatatccaaattgctgggtacaattgctttagccaatttagtatcagggttgctttcaccagagtggcgaggaacagcctctttcctcttattttgattaattgcactggagtatgccgcactgttcaatttcatgaaacaggaatcacaaacacggtatggtttcgcaggattaggagccaatgcagctctcagagctttacgcgaggtgcatgcattacaatggacaagtccacaattatggcagttatgcctctttcgggtgaatccaaacggctgccggcatgaagcacactgcgactgctcagctcctgagacccacttatgctggcatatagctgcagtgaagtttgagccacaagctatgtgcctaacagccctgtctctcaacgcctcgaccagtgtaggtattttcctatcctctatatctccatggcccaatcttccattggcccctttcccccatgtaaagacctcactcttatttgttaagactgcaacatggtaggaaccacaggcaacttggacaacatgttcactcattaattattctttcta

SEQ ID NO: 22354 - DNA, 268 bp, Setaria italica
  Peptide Sequence Number=SeqID_88328
tgtaaccacaccagcacccaagcaccactgtcagcaatgttgctactcggcgagtcgttcttgctcgccttcatgttcctcacatcttctgcaggtttcgtggtgccagcgttgtcaatctccacgagcagcatcaccgaccggctcgcgctcatctccttcaaatcactcataacgagtgacccttcgcaagcccttgcgtcatggggcaacctgtccattccgatgtgccagtggcacggcgtggcgtgcggcttgaggggacgcc

SEQ ID NO: 22355 - DNA, 293 bp, Setaria italica
  Peptide Sequence Number=SeqID_88329
ttctggcctgacgactccgaagccgacgccgaggactcccacgccccacgcgcctccgacgagagagcgccgcgcgccaagcgggggcgcaagaaccagtaccgcggcatccggcagcggccgtggggcaagtgggcggcggagatccgcgaccccgtgaagggcgtccgcgtctggctcggcacctaccccacagctgaggccgccgcgcgcgcctacgaccgcgccgccaggcgcatcaggggcgccaaggccaaggtcaacttccccaacgacacctcgtcatccccggt

SEQ ID NO: 22356 - DNA, 425 bp, Setaria italica
  Peptide Sequence Number=SeqID_88330
acgaatttgacgaggaggtggaggatcaccacttcggtgtaatctcaagggaaagaactcttgtagcccacggcgggcgcgcggcgagccagaagaagcgcggccgccgccacttccgcggcatccggcagcggccctggggcaagtgggcggcggagatccgcgatccgcacaagggcacccgcgtctggctcggcaccttcgacaccgccgaggacgccgcccgagcctacgacgtcgaggcacgccgcctccgcggcagcaaggccaaggtcaacttcccggcggccggcgcgcgcccacgccgccgcggcaacccgagagccgcgccgaaaccgcagcaccaccatgctgcagcggcggagcagcccgcgttgctcgcaggagagaagaagcaggaggagatcgccgtgaagcctgaaatt

SEQ ID NO: 22357 - DNA, 297 bp, Setaria italica
  Peptide Sequence Number=SeqID_88331
cattgggctcaaacaattttaacggcacacttcctgatgagctgggcaaattgacaaaacttcgacaaatatacattgatagtaatgacttcagtggtcctctaccatcgacattgtcacaactgaagaacctctcagtcttgtgggcatcagacaataatttcactgggcagatacctgattatctcgggagcttgactaacttgactgaactgaagctccaagggaattcttttcaaggtcccattccgaaaagcctttctaatcttgtcaagttatcaaaattaagaataggcg

SEQ ID NO: 22358 - DNA, 499 bp, Setaria italica
  Peptide Sequence Number=SeqID_88332
attatctggacctatcccaaaggagcttggaaatcttgtcaatctcgtatcactggcattgggctcaaacaattttaacggcacacttcctgatgagctgggcaaattgacaaaacttcgacaaatatacattgatagtaatgacttcagtggtcctctaccatcgacattgtcacaactgaagaacctctcagtcttgtaattttgtaaaatgagatatcaactcgtaaatttcttctttcctctgaggtagaaaccaataatcttacacacccttgtcatcatgcatccaggtgggcatcagacaataatttcactgggcagatacctgattatctcgggagcttgactaacttgactgaactgaagctccaagggaattcttttcaaggtcccattccgaaaaagcctttctaatcttgtcaagttatcaaaaattagaataggcgaaatagtaaatggaagctctccactggcattcattggcaacatgacatct

SEQ ID NO: 22359 - DNA, 446 bp, Setaria italica
  misc_feature (1)..(33): n is a, c, g, or t
  Peptide Sequence Number=SeqID_88333
nnnnnnnnnnnnnnnnnnnnnnnnnnnnnnnnnggtcggtttctccttccattttttattgaaataaaaacagaaaacacataaaatagttctaaagccatagcaaattgcaacacgatataaacttcaagcatccagtttatttacattcaagcatcaccaagaatgttcatgaaaaaaaatactcaaaacgaatgctctagaacagaaacaattttgacatatctgttgaaagtttccacaaatcacaacaagaaggattttgtttacaccatgaacaaaaatattgcacaatgcggcaacaaaatcaaattgacgaaggaagcctgtgaagaacatcatcgcgaaaagtgccggtggatcatgccgctgccggtcttcacggattcatgcgcttccacgatggatctggccacctctcctccatgcgaaggacaccaagttgt

SEQ ID NO: 22360 - DNA, 124 bp, Setaria italica
  Peptide Sequence Number=SeqID_88334
aacttgccccacggccgcttgcgcacgccgatgaaggcctgccgcttgtcgcccggcgaggccgccggtccagttccggcgtccggccgctggtgcacatccggcgtgctcggcgacacattcg

SEQ ID NO: 22361 - DNA, 276 bp, Setaria italica
  Peptide Sequence Number=SeqID_88335
tcccggcttgagcttgcttcctccactcacctgtcagagtattccttcctttatggtcctcaacctctcattgcattgcgcttgcgccggcatgatctgagtcaagtgcgcgaggactgagcaagctcgctgctggtggtggtcaaagatcggcgatggcgggcggcagcggcagctcgctgctgcgtggcttcctgtcgctcttcttcctcctcttcatccacattggccacgccggctgctgcttctcctctgggtctgccgcgcgggcacggg

SEQ ID NO: 22362 - DNA, 408 bp, Setaria italica
  Peptide Sequence Number=SeqID_88336
tggaaacaccaactgggataaaagaacctccttttatcccggttggtattataaatcgggataagagggttcgagggatttactcctctttcagtcccctcttttattcgggttggtattacaaaccgggataaaagaccctcgatccttttatcctggttggtgtggggtagaaggagggatcttttatcccagttactgtttcaaatcaagataaaagacctctcagggtcatttttttcactagcctttgcaactgggataaaaagtcccggttggtgagcccctaccagtgatcgagctttagtcccagttggttaaccttttgtccaagctaactttaaatcggaacaaaggaggcgcatggaaggtgtgaaacaggtcagatccgtgcaacagggatcggag

SEQ ID NO: 22363 - DNA, 628 bp, Setaria italica
  Peptide Sequence Number=SeqID_88337
gcatcatcacgtccctgcacaaggtggaaggccctcccggcgcgccggcccgcgccatcctggagacgccggcgatggggctggccgcggcggggacgcagttcccctgggtgtcagggccggacatgaaggagcggatgctcaggtacggccgcacggtgcacctcttctccctggtcagggaccgcggctccggcaccgtgcacggcgagcgccgggtcgcgtaccacctcgacgccgcggaccgggaggacatgcgcgagggcctgcgccgcgcgctgcgggtcctggcggcggcgggcgcggcggagatcgggacccaccgcagcgacgggcagcggttcgtgtgccggggcgccacggaggccgcgctggaggagttccttgacggcgtggacgtggtgcgcgggcccaagtcgaaggccgaggcgtggagcctcttctgcacggcgcaccagatgggcagctgccggatgggcgccacggccgcagacggcgccgtggacgcgcgtggtgagagctgggaggcccagcgcctgtacgtgtgcgacggcagcgtcctgccgagcgccgtaggtgtcaaccccatggtcaccatccagtccgtagcctactgcctcgccaccgg

SEQ ID NO: 22364 - DNA, 226 bp, Setaria italica
  Peptide Sequence Number=SeqID_88338
tgatgacaatccgggagaaagcatcgatttatcacaaggaaagccttcccaaacttctggatctgttggaactgcaagagaaacgggaaatgaacaaacccaacccaatacatcagataaatctaactcaggaaccaacgatagcagtgaagaacagcataggacagagcagggcagtgaaacgactccaaaaaagccttcccaaacttctggacctgttgaaact

SEQ ID NO: 22365 - DNA, 506 bp, Setaria italica
  Peptide Sequence Number=SeqID_88339
tatttctactttagttctttctttctttcttacttttctttgttatttgggttacttaacttaaaggttcgtttggttacccttactttgtattgtttagtctattctactagtcttccggtatttattgtttagtttagctgaagaatcctgtactgttaacattatgaccatgttgaagcaaatggtcataatgagacacaggtcagggtttccatcagtgatgctgcaaacagcacggccataatcctcaaagttgcaggagaatcctgtactgttaacattcacagtgcaatcacaagggagactggcagagtcatacggatgccgtttacctcaacatacgcgctggtacctgtctttcttctccttgctgtggtgggagtgtgcatcaaacttcggaggatgcgcaagcaagatggtggccctgcatcccagtcatctccccaattgtcgtcccacttatcagattgtttgtgttctttcttacctccagtacgtaaacc

SEQ ID NO: 22366 - DNA, 1319 bp, Setaria italica
  Peptide Sequence Number=SeqID_88340
ctcgctcccctccagatccccggccgccggcgcgcgggccggctcggttggactcggtcttccgcgccgcgcgccgcgcgcggctgtcgttcgcggggatgcggtggggcggtgcgctgctcctggtggccgtcttcgccgtggtcgccgtagcaaaggatagtgcggatacgctaccagtcgaaacaaatggtgatggctctagtgcacagtcaggtgttgagaatttagaacaccatgatgaaccagatcctaataaagagcatgtggcccacgagaatggaggagtcaagaatgataacagtgggaacaataagaaggataactcaacagaaggaaccaacatcagaagagatgactcaataccgcagccaaagaacaaagataacagcggaacaaaatcttcacaagcaaaagatttcttgcaagatcctcttattatggggtgtgatccgtcacatagatgtattattgaaaataagaaattcatcggctgcttaaaagttccgggagaagattcactagctctctcacttctgatggacaacaaaggcgtggacccacttgatgttagcatcacagctccggattatgttagtttagctgaagatactgtccatgttgaagcaaatggtcataatgagacacaggtcagggtttccatcagtgatgctgcaaacagcacggccataatcctcaaagttgcaggagaatcctgtactgttaacattcacagtgcaatcacaagggagactggcagagtcatacggatgccgtttacctcaacatacgcgctggtacctgtctttcttctccttgctgtggtgggagtgtgcatcaaacttcggaggatgcgcaagcaagatggtggccctgcataccagaagctcgacacagctgatctaccggtttcgactggaggtaagaaagaacacaaacaatctgataagtgggacgacaattggggagatgactgggatgatgaggaagcgccgatgacaccatccaaacctatgcccaacccatcctccaaaggtctcgctccaaggagatcgacaaaagatggctggaaagattagttaacaaaatgatgtcatttaaaggagcattgtggaaatagttccaatgcatagaccatctttttgtcttcctttttaaggaaaatcttgtgctgttctccttctggttagatttatggaggatgctatatcagagagacagaccgcgatacattgataccatgcagaaaattttgtatgctcttgtgccattttaagttacttgtgaatatagtttttctcaggtgcatttctatctaa

SEQ ID NO: 22367 - DNA, 353 bp, Setaria italica
  Peptide Sequence Number=SeqID_88341
cgtgtctcagtttccccactatagaaagacgccccacgagcttttacgggttcatcagctgtggcgccggcagctgcagagtggatgtacggtagcagttgtcccgtccttatccaccagcaccaacaccccctacacgacgagatgatcagctcgatcgatctctcgctctagtcgaagggcatgcggcaacgggttagcgagaatctctctaccacagcgtgcatggcccgccgccggcggcgtcgtcgaccacgccgtcaaggttccacaggctgccccacgtggcgccgtcctcctcgctggacccgtactcgtcgctggcggtggagccgcagcagctgccggtgccg

SEQ ID NO: 22368 - DNA, 260 bp, Setaria italica
  Peptide Sequence Number=SeqID_88342
ctagtgtgtaggaaaaatttacgcctgaagttgttgcattttgtttgagactactaatgcagttggcccttgcaggttggtgagtctgttgaggaaatcgaccgccgcgtccctccagtggtgaaggaagcccccaccctcgcccgctctgctgccaaggaggtccgccaggccggtctggtgggcacagccactggcctcgccaagtctgccatcgctcgtgctgagcccaaggccagggagctctacacccgctacga

SEQ ID NO: 22369 - DNA, 476 bp, Setaria italica
  misc_feature (282)..(282): n is a, c, g, or t
  Peptide Sequence Number=SeqID_88343
aggaggtgagggttgagagggcggcgactacccaggaggaggaggagaggctgcgctacctcgagttcgtgcagcaggcggcggcgcaggcgctggtgctggcggccgcggcgtacgcgtacgccaagcagggcgcggggccgctccgccccggggtcgaccacgtcgagggaaccgtcaaggccgtcgtcgggcccgtctacgaccgcttccacgccgtcccgctcgacctcctcaagttcctcgaccgcaaggtaaggaggagggcattctttgttgtcngttttaattcatcttggtcaaatttgatcgcctgacgtgattgggagcgagaaattggttgttgagtttcattctgcgtggtgtactggtgtgtgaccccaaatttgtaggtttcaggatgaaatttgtacaattaacatgttagaacgttttggatgcatggtttgcagtttcttcagagacttagtttcagg

SEQ ID NO: 22370 - DNA, 337 bp, Setaria italica
  Peptide Sequence Number=SeqID_88344
gccgcataatttgcggagagagctgtaccgtaccaatgatcttggtgacattgagatggaaacaattcttagacattgttctgtaatgtgccccaaagactttagggatgccaacgatggaggggatgatgtattttattgtgaatatgaatatgatatacactggcataattttaagcgtttggcggatattgatgatgagcctgagacaaaggaagatcccaatgatgagccttacaatgccggtaatgattataacagtggcactgatgaagattcagaatatgacgaggaggaagaacctaaatcatgtttctctgccagaaggaatcaatca

SEQ ID NO: 22371 - DNA, 822 bp, Setaria italica
  Peptide Sequence Number=SeqID_88345
tcaaaaacatcaacaggcagttttgctagatgatacccaagaggcgacaactcttcatgtccttcaaatgctccaaccttgtataacaagtcaactgcagaggaaatagcttcttcgttagggggctctactgcctttagcaggaagcatttgatgtctcccagatgaagtgattttatttgcaggcacagctcagtcaaaggcatccgtagcatctcaggcacctgaaatggacgcatagtattttcaaaccgatgcctggtatacaaacagaaacataaaccaggcttcacacgaccagcccttccgcgtctctgctttgcatttgcacgagaaatccaatcttctactatgcttgacattttcttccgtgggttataacggttctgcttgtgctttccagcatcaacgacatatattacatcatcaattgtaatactggtctctgctatgtctgtggcaacaataaccttgcgaaagttatctggaggagactggaacacttttctttgatcagtgggtccaagtagtgaatgtaaaggaaggatccaatcagatgatgcccctccaaatctaactgaagcagataatctatcaatcaacatgtcaatctctgcaactccaggaagaaaaactagaagagcaccaggagggaaattctcatcaatatagcatatcaagtcttccaatagatcaaaatcaatcacatcttcattcaagcattttagattttggttggttctctcactgtatgacttataggtaatcagaaacataatgagggttaacatagccttcagaaagagttgactcatcacccca

SEQ ID NO: 22372 - DNA, 305 bp, Setaria italica
  Peptide Sequence Number=SeqID_88346
acacaagaatagggataaaatgaagccatcacaaggaaaacaccaactgacaacagaacacagacatctgtttgaaaaactgcagagtgcgacgtatgcggcatacgtggctttcttaattaggccttgggaggtggcgccaggaagggggttgttggcatgccggggatggacacggacggcatcggcggcagcgtcaccttcggcatgccagggatcggcggcagggtgaccttgggcacggcaggcacgacggcggcgggaagcggcgggagcgcggcgcccggcacggctggcatcgcggg

SEQ ID NO: 22373 - DNA, 280 bp, Setaria italica
  Peptide Sequence Number=SeqID_88347
tatatagttgtataatccagaaccataatatttcccaattcctgcccatattatggtctgctcatattattgcctacttcagaatcataactttgcctaaccaagaatattgttttgcttatttataacaataaagttgcataattagaaccctattattgcctatggtactaaactgtttttttaatattggactacttggctcgaggacagagacatagcaaaagccggcttgttgtccacgccaatacaatttcaccaagatcaaacataccaacaa

SEQ ID NO: 22374 - DNA, 910 bp, Setaria italica
  Peptide Sequence Number=SeqID_88348
ctttccagtgttttcaaatgcttacaaacaatctctatgagaggtaccactgctcagaacttttcgttggaacctgcataattatgtgtggttgctatgacgtgttttacgctaagaagggatactacatattcctcttccttcaaggcatagctttccttgttgctggctttgggtatgtgggtacactacctccttccactccataatctgtcttcgatgaaacggacataactgcttacgagaattgagtgcaagcaaagcccctctcccctgcacataatgacttcagaatacaatggtaattaagcattcttcccatcagtcttggccagatatgatccaaccattcttttactgtcaaggtcatagatagcactggcattcttcccatcagtcttggtcagattttatccaaccattctttactgccaagaagaccattcagatagattgtcatccttcaattcccttcggactccggtcttgttcagatttgattcaaccattctttactgccaagaaggccattcagatagtgtcatcattctaaatttataataacagtgcttactgaagcaccatgacaaaataaaaatgattggtgcagcagcatttttgttcagatcctgtagagatgcatttcacagttggaagaattgcagcagttgtaaatgtaatagcaccagctaccaatttctctagatcttcgaagttgtagctttttttttggcaatttagtgatatagctttgtcagagttcagattcataagggaagattgttagcttcctcagtttataacccgctcagtttataacccgtgtaggcttaaaacttgtaaatgtacaccgtttcttaacgctcataattctgtccaattctggcagagcttgaaatgcattataagt

SEQ ID NO: 22375 - DNA, 644 bp, Setaria italica
  Peptide Sequence Number=SeqID_88349
gtccagcacgctctataatgggggaaggtgacttcagagatgagtgcagcaatgggagatcttcagcgtctaggcaggtcacttctccaactgggaacttagacccatatctcccagccctgccagcaatttgtttgattcagcaacagttagttccctgaagctgaagccgtcaaacttcatcattgtagaaaaaataattctggaaatgttcagattaagtcccattccaatagcatcactagctactagcacattaaggtcactggtatcatcattgaacattgttgcctgctttgttcgagtttctggtggtaatgagccatagaccacagagcaaagatgttttccctccatttcaattcttttcttgagactataaatcccacgtctcgagaatgttactaaacaatctcctgctttgatgttagagaaagatccaagtggggatttcagaggaaccaaaggagatagtctctcataatattgaacctgctcgtgactaaatcaccagtagcttcaagaattcgctgaataaggggaacagcagctgggtcaccgacaaacatgaagttcatctgaacaaagccccagaagtgcacgtgtgaatgaaaaccccctggatttacagccaaccatctgga

SEQ ID NO: 22376 - DNA, 293 bp, Setaria italica
  Peptide Sequence Number=SeqID_88350
agactggaagccgttctgcctccttccccattgctttcttctccgacgcgccctctatttctctcacccaccaagcgttgacctgccgggcaatgaaaggagaatagaggcttgcttcctcgcaggtcgggagctggatctcatgtcgtctgatctcttgcaattgttagtcaaccctctgcggcacatcggttgtgaacttgtgagccatcagtactaagctcactagtgtcttttaatggcggagcttactgaaaacatgcttaccgacttcatcaatatcagtgaaaagg

SEQ ID NO: 22377 - DNA, 1083 bp, Setaria italica
  Peptide Sequence Number=SeqID_88351
tttctccaagcaatagttcctaactttcacagagctccagcccccactacttatcatgaaaatctaaggaaacaaacaacaaagctccaccacctaaacctaatgatgttttggtgactgcaacagctaagagtacccaccattactgaacaccactccagcgagcccagtccacaaactgcattccaccatagatattgttggcaaaacgaacaccaatggtgaaagccatagcaacaggtggaacgcgctttgcgacaggcgatgcttccactacccgctccagaccattgataatctggtagcgcgtgttagatgatacagcaaggaacacaccccaaagtgcagcacttttaacgagaggtggaacaggaatatcttcatctgatttttttacactcctcttggcagtcattatcatgttagcaatcccttgaccaattataccacagacaaatccaactgagccatacaggacacccttgtaaaaatacgttccaattctttgctgaactgtaaacctgctgcctggcctttcagcttcaaaaacgctgcttggcaaagacacagccatcctgttgaaccttcccaagagccctgtcgaagcagatggcttcccgaatctcacataaggagccaatagccccacgagcgcaatatcaacagccaccccgaccaaaagatcagcagcatacagctcaaactctgcccagaaatcctttcccctcttctgcacctccgcgaatgtggcgcagcaagagtcaattacaatctctgttccaactttgaagaggaacgacgggtccgcaagcatccggttgcggagcatcgagaaggcccggatcatcgcgcccagcggccacggcgcagcctgcagatcgaagtagcggagcaacaagacttcgcggatcgcggcgtccttagccgcctccatcatgtcgcccgggagcgcaacgccgcgcgccgcggcgaggcgcagcacctcgtcgaagccgagcagcgggccgaactcggcctcctcgtagtcgtcgtcatcctcgccggccccgccgcctcctccatcctttgtccgtccgtttcctt

SEQ ID NO: 22378 - DNA, 955 bp, Setaria italica
  Peptide Sequence Number=SeqID_88352
gacctagaaaaaaaaaattattcaattcgataaattcatttacaattcgataaattcaaagattaagctagaaacaataacaaatcacaatataaatagttcaaaatataagcataaaataaacttacaataaacttacgaactgaaataaaaaaatactcatacataaataaataaaaatatttaagaatataagtttttccaaataagaaataaaatagaagatagattcatctttaaccttcttgtgaagtttttcttgtggatgatcagaagttttcgtgcaacagcacaatgtcccacgcacagtcgcgcaaacgcgctgccggcccgggtggcctagtgcggcagctggtggcgttgccgtggagaacgggaggagccgtggcgatctgacgtcgtcgtggcggcgctgcagcggaggaatcgtcgcgtcgaatcgatctgctgggctggatgtcgtggcagagccgcataggactagggtccggagggatggatcacgctcatggagtcacgggaggaatcatcaagttgtggcctcgtgggctcctgcctcttgggctgcaagttggtttccacgtcgggcagcaaaggaagcaccgaactaggcatcaggcgtgacgattcaggaaccaggcgggctgcacgcgacggatgtactccgttactccataccaggtaattaagatgctgggaccagggtatgcctcggaccacccggcataccctgtagctccgccagtgtcttggcgaggcagtgatgagttctgagtggatctgcagaattcgacgtcagaccaggaagcttcatccatgacctcgctctgcggccaggcagggttcaccatcacggcggagagagacgacaccacgacgaccctcttgaccttggcctcggagcacgccttcaggacgttcatggtgcccgtcacggcgggggcgagcagctcga

SEQ ID NO: 22379 - DNA, 766 bp, Setaria italica
  Peptide Sequence Number=SeqID_88353
gacggcgtggcgtcgtcgtcgtcgtcggcgccggccgcgtcgctctcgatcctgaggatgctgaactcgagcacggcccgcggcgggggcgtcgagctggagccctccgccgccggcgcggccccgccgccggacgcctccgcgttcagcaccgacgactccgatgagccggagtcgctcgcggccatcgccgccggcttctccggcgccacctcggccacgttcagatccagctccatctcttcccagcacctcgcgattctcgccggagcaaacaacaaggggaggaccacctcagtagcttcacacacggaccaggcagcgagatagcgatcgatcccaatcgcagctcgcgagttgctctccgctgggccgggctggtctatttcaagaagaagaaccagaggaggaagaggtagaagcaggagagtgccgagtcgttcttgcggtacatttaggctccacgaccggtcgagctgcgcctcctcactcccaatctttgacgaccatcctgcacgcaacccggagacggcgggagcacgatcctactgtacggtcgcttcacgaatcaagaacgccccaccaatcaactacggctagctagtacggagcaggcgaggtcagcagcagcggctagctagcagtggaaggaaggtgggatcttggcgggaaaaggcgggatctttcggagctccggcagcgccggcgagcggtggcggtggccgacggagtcgaggaagaagggtgggatgggatcagaggcgag

SEQ ID NO: 22380 - DNA, 339 bp, Setaria italica
  Peptide Sequence Number=SeqID_88354
cctggtaaaaaaaattgtgcattttggagttataatgagcagtatagatgtgcaaggccctgctgcatcttggacacgtctcaaagttgagaagaggtccagtgatctggagtcatgtagttcttgatacacgttgctgctgcaagaaggaaagaaaagaaaggagattttgtagtgcagaaattcacaatcgttttgtgcattgctttgctcagctcattttttagcagcttactgcagtaggaaatgaaaaggaagcataagtttacagtctgcaggtgatgatactatataggaaactagatttatgattcagctcctgaaggcaatgtatgacaa

SEQ ID NO: 22381 - DNA, 1373 bp, Setaria italica
  Peptide Sequence Number=SeqID_88355
cttccgccgggttttcagcttcggggactcgctcacggacaccggcaacttcctgctctccgtgcccgacgacttcccggaccccgcgcggaacctcccctacggccagaccttcttcggccgcccctccggccgctactccgacggccgcaacctgctcgacttcttcgcggaagcgtttgggcttccatttgtgccgccgtaccttggcggcggggacttccaatatggcgcaaactttgcggtcgggggggctactgccctcaatggttcgttcttccgggaacgtggtgtggagcctacgtggacgccacactccctttatgagcagatacagtggttcaagaagcttctcccatcaattgcaccgtcagagacagaacgcagtgatataatgtccaattcacttttctttgtcggagaggtcggtggaaatgattacaaccatctaattgtgagggataagtctcttgatgagctacatgagcttgttcctaatgttgttggtgccataagctcggccatcacggatcttacaagtcttggagcaaacaaattagttgttccagggaactttcccatagggtgtgtcccattatatctttcaatctttccaagccaaaaggaggattactatgatgaacaaacaggctgcattaagtggctcaatgaatttgccgagtaccataatagtatgcttcaggaggaattggaaaggctcaggaatctttaccctgatgtgaccatcatttatgctgactattatggtgcttcattgaacatattccgggccccactccagtttggcttcacagtcccactgaatgcatgctgtggaagtgatgctccatataattgttccccatcaatattgtgtggacggcctggatctacagtgtgctctgacccatcaaagtacatctcatgggatggtctacacttcactgaggcgagttacagagtcgtcattcaaggagtactagggggttatgccattcctcctctttcagaaacttgcaagggtggagaattcaaagtatcccaacttcaccaatgtacagataatccaacaaacactgtaacatatgatactttgagctcttttatttaatctgctgagctcaagtgcgtttagagtcctggtaaaaaaaattgtgcatttggagttataatgagcagtatagatgttgcaaggccctgctgcatcttggacacgtctcaaagttgagaagaggtccagtgatctggagtcatgtagttcttgatacacgttgctgctgcaagaaggaaagaaaagaaaggagattttgtagtgcagaaattcacaatctcctttcttttctttccttcttgatacacgttgctgctgcaag

SEQ ID NO: 22382 - DNA, 381 bp, Setaria italica
  Peptide Sequence Number=SeqID_88356
cctggtgagtttggagctaacttgccaagactgtaagaacagatggacccatcttgccgaccaatcactatacatcctggctttgctgttactgctgtaacctttgcactctgagcatgagtttggagactaaactcaactatatcatcctgatgcagtactgaaccagatacgtaagaaaatgggctgcgtaagtggcacaagatagcaaccccagaaacagtaagcgcatataacatatatacaagctcccctcgcctgtgaccctctcgttcacataaaaaggcaaatggacatagcgcctcctggaagaccaaccgcagtccagagctagggaactccttggaagcgccaagttcaatgacctctagcacatttagg

SEQ ID NO: 22383 - DNA, 282 bp, Setaria italica
  Peptide Sequence Number=SeqID_88357
ctcgtagaatccggcgatgagggagacgtggccgggcctggactcggtgggcgggcgcgcgtggctgacaccccaccggcccttctcctcgatcacgctgcgcaggaacggtgcccggtaccttccccgctcgtccggctcgaagaacttgtccgccctgagcccgtccgcgacgaggaggacgaggcgcttggcgggggccgcggagaggcggggcggcacggggtccatgccgtgcacgatgggggacttgaagtagatgtcgaagatgctcagcatgta

SEQ ID NO: 22384 - DNA, 495 bp, Setaria italica
  Peptide Sequence Number=SeqID_88358
cggcaccagcgcgtacagccgagcaacgtccctcgggccgcagccggagagctcgtcgaagtcgtcggagctctcggcgaaggtgagctcgacgccctctcccgcgtccccgcccgcggagcagaattcgtacccgccgcccccgtccgggcacgggcggacgcggccaaccagcgggtagaaccggtgcagcgctgcggagagggaggatacgaggtgcggcaggaggtgggcggtgaagtgctccgccgtgtgcgggtatgggtagaagaagacgcgctccacggggccggtgaagagccagggcacgtcgaagaaggtgagcgggagcacgccgccgggcgccggggcgaggccgccaccgtgagcctgtcaagaatcttggtggccatggggaattggagacctcccgcctctgccttggcagcacgggggagaggaggaggaggaggaggaggaggagggagtggagaacagatcagaggaatggtggtg

SEQ ID NO: 22385 - DNA, 501 bp, Setaria italica
  Peptide Sequence Number=SeqID_88359
tactacgcggtgatgcagtgccttggcgctgcctgcggcgccggcgtcgtgaaggcgctcgtcggtggcgcgctatacgaggccgcgggcggcggcgccaacgccgtgaacccgggttacaccaagggcgacggcctcggcgccgagatcgtgggcacgttcgtgctcgtctacaccgtgttctccgccaccgacgccaagcgcagcgccagggactcccacgtcccggtgctcgcgccgctgcccatcgggctcgccgtgttcctggtgcacctcgccaccatccccatcaccggcaccggcatcaaccccgccaggagcctcggcgccgccatcatctacgacaggccgcacggctggcacgggcactggatcttctgggtggggccgttcaccggagcggcgcttgctgcggtgtaccaccaggttgtgatcagggccatccccttcaaatccagcgctcactactagctgacatgatcctactgtacgtcgtgccga

SEQ ID NO: 22386 - DNA, 867 bp, Setaria italica
  Peptide Sequence Number=SeqID_88360
ttttttttcaacagctgaaagaataataggattaataatatacaaatcactgagtacaatagggcgggtagaatcgagtggcattcaccccccaacagatcttttcgaggcgaaccaacacacgtcggcttgggtttcacatgatacaacgacatcaggcatcagacttttaccgaccaaaatgaagtacctgacagcgagctacaagcacggcactcaccgtgcaatccagatgctgacactgaacgaattagcacaacttggtatcagaagttacacgggggcccaggccaggctacctatttctcagagacgcggtgctggatttccttgatgagcagtgagcaagacgctccttcacaggagatggtgggaaaggggaagatgacggcagctgtctgtgactcgagattgaagagaaacagctaaatgggttcctcagccgccttttctctgaatcttcggactgactattcggatcatggccgactggagagatcttgagcgactctgggagaaggcagttgcaaatggcacctattctggcgagccggttcacccatttggggattttgttaccggtcaacttgtaacacatatccttgcaaaaatggttgcagttcttcgtgataagatggtaagtatctccattgtagtttactgactgtagctccatgaactgcctaacttggattggatccaagcatgttgtaccgagaaatattgatttcctgaatctgaaaccagggcactgacgaggctctacctcaaatactccacttgtaggaaagtcatgcgctccaaatgcatattcaacaccatgaacttcaattgctgagtgaaatatgccaaggcctgacccaaata

SEQ ID NO: 22387 - DNA, 1445 bp, Setaria italica
  Peptide Sequence Number=SeqID_88361
ctaactgcttatgggatatgtacctgctgaacttacatgtaccctgattaaggaaaacaggcttaagaaacttcttgtttgctgagcaataacatgtcttttttaacataatgtctagaatatgtttgttactaacatatttttttaaaggctgtgaatctattgctctgtactatgaattgtctatggtgttaagtttttgtactatctattttcacgcaggttctggtactctgatatatattgaatatcagtggtgtttaccgaggaaggcagttcaagcttcactgttgtttcagcgtttttactgaaataatattgttttccgtatcatgggatttgaatccgtatcacccctaccagaagaccatgcagtggattaagagtgaggttgagacctcacaagctatgagctgtgattcaacagtcacagaaaaggtggaaaagagcccgagtgagaaaccatttctgctagttcttttggaaaagaaggaagacatagaatcctttagtacaacttgtgatcttgaaaatatcgctgaggccatcactcctaggggagatacacttgaactgtgcatctctagtgaggctccagatgacagtctctcattgggctgtgagacaccacgtgaaagcatctttgatccttttgctccaggaccagatgtggctgcgtgggcaccaaagaagcaagtgattagaggtgcagaagttccttcgcgccggaagctaaattttgattcaggtgactttccagttaaaaggttaagttttgattggagtgattctgaagaggaggatgaatatctccaagtgattcagaagatgatccttgatctaattatttcagatagtcctcttgatcaacaggaagaatctgaaaagattttgatagattcaagtctatatgaaagctgcaagacacctgattcaaagcctcttcttactggcatagcatccacatgcccagatgcacctttgaggccatcccataaattgttaaaactcagcccaagcatttgccgaaagattgactttgatgcagtcagcaattcagtcagtccaagatcttcagtcgctaaagaaaataattgatgagcctgcccctctcggttgacaagtgacgagctgtgcattttgggactgaataatgcatcctgatgatgtgccccgggaacagcatttggtacagtttttggctgcctatctcacaatctcatgtaacagtaccctgtgccattgtggcaacttagctaaccctggacctctagggatgattgctgatgttagagaagtagcaagcagtttgagttatacatgtaatttatctttcaatttttttctttccttttgttactggcctagtggtacctcctagatttatatgagttcatgtggtctctgaccatgtgttttgtaaatcttaatcttaaatgactagt

SEQ ID NO: 22388 - DNA, 303 bp, Setaria italica
  Peptide Sequence Number=SeqID_88362
ggacaatgacaattaacatgccttgccaactctacatgacctaggtagagaacctttataaacgagtctttgtaagatatggataacattgctttttacagccaatatatgcatactggtgcttctaaagcacagcataaatcccaacttgaattcatatgtagagaaggttatccagtaagataatgatatcttagaaattgagattgtctagtacagaaatacatattaaatgctctatggcggctggaccaatgaaccatgtatacctggtgaacaagggaacatggaacaatcatttta

SEQ ID NO: 22389 - DNA, 224 bp, Setaria italica
  Peptide Sequence Number=SeqID_88363
tctactttatcccaggttcttctcagcaggttgcgactcttcctaagtccagggtacccttatgaagaaatactgaggacattccacaaccaaactgacaacgttatgtgctcatatttacctttattcaattcattcaacttcactaaaggttggtggtgcccctctttgtttctctctttgtttcttgttccacagaagaaagctaagcaacggatattttg

SEQ ID NO: 22390 - DNA, 527 bp, Setaria italica
  Peptide Sequence Number=SeqID_88364
ccatgctgatggtggcggtggggtgttgggaacataggaggaattgcagagaagattgtgttcttatcaatgctgtaccttccagttggtatatcagctatagaaatcagtgctgcgaccaaaccagcatttgctgcaagagtaggctcagtgtaattgtagttcgtgcgcagcactgatttctatagctgatataccaactggaaggtacagcattgataagaacacaatcttctctgcaattcctcctatgttcccaacacccccaccgccaccatcagcatggaaaccgtaaagagacagacctctgaatattttcccaagcatcaaacagggaagtggagcaacatatgatcgtttggtacagcaaaggccagaaacagaaaagcagacaacataagcttatagagcttctatttctgtaccagtatgacagatcagtataaaatcttctgtcaaacatagatcggaagttgtgtgcatcgcgtgaagctaatttttggggtccttgttgctattggcattcc

SEQ ID NO: 22391 - DNA, 1816 bp, Setaria italica
  Peptide Sequence Number=SeqID_88365
acacaaactcatcccagtagctggtggaattgtagaaaattgcctggtcggatccattgggactgtatcgccctcgctgcgtcctgccgaatttgtacagggcttttgcacctttgacgagcttgtcagagtaggtcttgctgtccttgaacactatggaagctgcagccagggcggcagccatttcagatgctagatctgagcaagagtggcactcagtgacaggccttttgtaatcgatatcctctggtctcatccagcagtagtggtcattaggctgggagccacctttggaggtgtcacctatacccacctgggcaacaatcctgtcgattgtgtcggctgacgaattgaaggtcttgaggatgtaatctgttccccaccatatcaaggagctgatcaagtggggaacagattacatcctcaagaccttcaattcgtcagccgacacaatcgacaggattgttgcccaggtgggtataggtgacacctccaaaggtggctcccagcctaatgaccactactgctggatgagaccagaggatatcgattacaaaaggcctgtcactgagtgccactcttgctcagatctagcatctgaaatggctgccgccctggctgcagcttccatagtgttcaaggacagcaagacctactctgacaagctcgtcaaaggtgcaaaagccctgtacaaattcggcaggacgcagcgagggcgatacagtcccaatggatccgaccaggcaattttcacaattccaccagctactgggatgagtttgtgtggggtggtgcgtggatgtactttgccacagggaacaattcatatctcacagttgccacagccccaggaatggcaaagcatgctggagcctactggtttggcagtccaaactatggagtatttacctgggatgacaaacttccaggagctcaggttcttctcagcaggttgcgactcttcctaagtccagggtacccttatgaagaaatactgaggacattccacaaccaaactgacaacgttatgtgctcatattacctttattcaattcattcaacttcactaaaggaggattaatacaactcaaccatggagggcctcagccacttcagtatgctgtcaacgcagcttccttgcttctttgtatagtgactatcttgaatctgcagatacacctgggtggtactgtgggcctaatttctacaccacagaagtcctccgcaagtttgccaggtcacaggtaaagtattgttcttaatgctcttgaagtgtgtaatacacattagcaggaaatgtgaattaacagttaaatattttcaatttgcagcttgattacatccttggaaagaacccgctaaagatgagctacgttgtgggttttggaaataagtacccaaagcgtccccatcacagaggtgcatcgatacctcataatggcgtcaagtatggatgcaaaggaggtttcgatgcacctctgtgatggggacgctttgggtacttatttccaaaacccacaacgtagctcatctttagcgggttctttccaaggatgtaatcaagctgtgacctggcaaacttgcggaggacttctgtggtgtagaaattaggccccacaggttacccaccccaggtgtatctgcagattcaagatagtcactatacaaagaagcaaggaaagctgcgttgacagcatactgaagtggctgaggccctccatggttgagttgtattaatcctcctttagtgaagttgaatgaattgaataaggtaatatgagcacataacgttgtcagtttggttgtggaatgtcct

SEQ ID NO: 22392 - DNA, 999 bp, Setaria italica
  Peptide Sequence Number=SeqID_88366
cctcaccctctgctccgcacactcgtgcagtgcaggtgcagcctctctcactcccttcccgggtgcccgcattgccgccggtgagcagaggcggagcggccgcgggggcgcggaagcagcagcaggaggaggaggagcagcagcaagagagccggcaggatgttcgggcgggacccgtggggcgggccgctggagatctccaacgccgactcggcgacggacgacgaccggagccgggacctggaccgggcggcgctaatgcggcagctggacgagacgcagcagagctggctcctcgccggccccggggaccaggcgggcaagaagaagaagaagtacgtcgacctcggctgcgtcgtcctcgaccgcaagatcttcatgtggaccgtcggcaccatcctcggcctcggcgtcttcatcggcttcatcatgatgatcgtcaagctcgtcccgcacaagcgccccgccgccgccgccgcccgaccagtacacgcaggcggtccacaaggcgctcatgttcttcaacgcccagcgatctggtccgctgccgaagcacaacggcgtcagctggaggggcaattcctgcatgaaggatggcctttctgacagcaccacccggcggagcttggtcggaggcttctacgatgcaggggacgccatcaagttcaactaccccatggcctggtccatgaccatgctcagctggagtgtgatcgagtacaaggccaagtatgaggctatcggcgagctcgaccatatcaaggagctgatcaagtggggaacagattacatcctcaagaccttcaattcgtcagccgacacaatcgacaggattgttgcccaggttcgtagctactgatcatcttgaggtgctgatttgctctgtcccaaaaatggctggtcatcagatccacccaaattgagtgaacttcccgtgtcttttccataaacatctccagatatcagactgagttacagcaaatcagtgactcccatagg

SEQ ID NO: 22393 - DNA, 2005 bp, Setaria italica
  Peptide Sequence Number=SeqID_88367
tgatgatcgtcaagctcgtcccgcacaagcgcccgccgccgccgccgcccgaccagtacacgcaggcggtccacaaggcgctcatgttcttcaacgcccagcgatctggtccgctgccgaagcacaacggcgtcagctggaggggcaattcctgcatgaaggatggcctttctgacagcaccacccggcggagcttggtcggaggcttctacgatgcaggggacgccatcaagttcaactaccccatggcctggtccatgaccatgctcagctggagtgtgatcgagtacaaggccaagtatgaggctatcggcgagctcgaccatatcaaggagctgatcaagtggggaacagattacatcctcaagaccttcaattcgtcagccgacacaatcgacaggattgttgcccaggtgggtataggtgacacctccaaaggtggctcccagcctaatgaccactactgctggatgagaccagaggatatcgattacaaaaggcctgtcactgagtgccactcttgctcagatctagcatctgaaatggctgccgccctggctgcagcttccatagtgttcaaggacagcaagacctactctgacaagctcgtcaaaggtgcaaaagccctgtacaaattcggcaggacgcagcgagggcgatacagtcccaatggatccgaccaggcaattttctacaattccaccagctactgggatgagtttgtgtggggtggtgcgtggatgtactttgccacagggaacaattcatatctcacagttgccacagcccccaggaatggcaaagcatgctggagcctactggtttggcagtccaaactatggagtatttacctgggatgacaaacttccaggagctcaggttcttctcagcaggttgcgactcttcctaagtccaggttacccttatgaagaaatactgaggacattccacaaccaaactgacaacgtcatgtgctcatatttacctttattcaattcattcaacttcactaaaggaggattaatacaactcaaccatggagggcctcagccacttcagtatgctgtcaacgcagctttccttgcttctttgtatagtgactatcttgaatctgcagatacacctgggtggtactgtgggcctaatttctacaccacagaagtcctccgcaagtttgccaggtcacagcttgattacatccttggaaagaacccgctaaagatgagctacgttgtgggttttggaaataagtacccaaagcgtccccatcacagaggtgcatcgatacctcataatggcgtcaagtatggatgcaaaggaggtttcaaatggagggagagtaaaaaggcaaaccctaatattctcgttggagcaatggtggctggccctgacaagcatgatcgcttcaaagatatccgcacgaactacaattacactgagcctactcttgcagcaaatgctggtttggtcgcagcactgatttctatagctgatataccaactggaaggtacagcattgataagaacacaatcttctctgcaattcctcctatgttcccaacacccccaccgccaccatcagcatggaaaccgtaaagagacagacctctgaatattttcccaagcatcaaacagggaagtggagcaacatatgatcgtttggtacagcaaaggccagaaacagaaaagcagacaacataagcttatagagcttctatttctgtaccagtatgacagatcagtataaaatcttctgtcaaacatagatcggaagttgtgtgcatcgcgtgaagctaatttttggggtccttgttgctattggcattccagctcatgtgtgaagttctttttgtagaaatggcacctttacaaattattttataggagtgacttttcatcatagtaaagaatttgtgtgacctctatgcttgcttcattttgatcctgttatttatatttaaaagtccctatttcaggggtggcatgttcattgagttctcaggtt

SEQ ID NO: 22394 - DNA, 385 bp, Setaria italica
  Peptide Sequence Number=SeqID_88368
tcttcaggggcgtgccgggcgtgtactccgaggacttcccgaggtcgccgccggcggtggcggcggccaggagggccacgtcggtgaggaaggtgaacttcaacgacgtggtggaggtggtgctgcagaacgaggcgtacagcagcgtgctcggcgccgagaaccacccgatccacctgcacgggttcaacttcttcgtgctggcgcaggggctcgggcgcttcgaccgcgggatgaagagcacgtacaacctcgtgaacccgcaggtgcgcaacaccgtcgccgtgccggccggcggctgggccgtcatccgcttcacggcgaacaatccaggtatgtggttcatgcactgtcacctggacgcgcacctgccatttgggggttg

SEQ ID NO: 22395 - DNA, 474 bp, Setaria italica
  Peptide Sequence Number=SeqID_88369
atcaagtcatataagaggaatgtattttacatcacgccttaaatatttggacactaattgtaggatttttaggttaaccatgtgattatctgggtttcggtgaaacatggaaattatctaggtttaactttgtaagatgtattgttgtgaaccccacaaattataactagatgacagtggatgcctagatattcagcttttatcatgttcttggtttcggatgctaaggagtatatgaatattgatgtatctgtacaactattatgtcatcatgttaatgaaagtaaatatggtaacattgtcctgtgcaatttctctactcaaaagggcaaatttattgtgtaacatagttttttatgtgagggctggtgcgcggagggactcgggtacataataagctattctgtaccctgggtaccgaatagcggaggcctatactatataacaccctaggtacatgcatatatataacta

SEQ ID NO: 22396 - DNA, 218 bp, Setaria italica
  Peptide Sequence Number=SeqID_88370
tctatcagcagcgaggtgacggtgaacagctgcgccgcgtccaccagcagcgccgtagacgccgccgaccccgccccggccagcagcagcccggacgggagcgccctcaggtcgtcccgcaggtcctgcacggcggcgttcatgtccgcgacggcgaagtccaggatcccagacgccgtcatcgaggtgacggaggctgacgcctccctgagcaccct

SEQ ID NO: 22397 - DNA, 290 bp, Setaria italica
  Peptide Sequence Number=SeqID_88371
ggggctggatgaccttgccgaagagcttgaaccccgcggcgtccgcgtcggggaggttggccatggggggtggtggatgggttgagctcgagcagctagcggggccgcgggtgggtaggggacggcgccgccgccttttatacacggggagcgggggtggagacggtcatcgcctctccgcgccctctcactttgcttcacacgcctgacttctttgcgtgaccgcccgctggccgctcgctactactaatacggcatgtgggcggatggatcatgcgcggatatgggct

SEQ ID NO: 22398 - DNA, 289 bp, Setaria italica
  Peptide Sequence Number=SeqID_88372
cggacggctgtagatccgggattgctgggcaaacccgagtcagcgtccccgcgcccacctgccgggttcaccgccgacgaccccaatgggcaccgtgaagatcctcgccaccgggatcagggtttcaagtccatggcgacctttctccctggcccggtcaagggtacggccgatcctcctctgcttacacctccccttaagtttcatgggcccttgtttgagtcctcggtggcgcggacacgttctgttgatcagggtcctcgctatgtgggaaaattgcctaagattt

SEQ ID NO: 22399 - DNA, 261 bp, Setaria italica
  Peptide Sequence Number=SeqID_88373
cagggatcacgaaagattttagaaggataatactaaattagcagccaagtagcaccccgtcccctgctccaggtgctggatcggccgatgcaaatgcctttctgttggcaccggagcccggcgcaggcgccggagaaccacatcgccatcaatggcacggtggtcgtctcctgccacttcggcctgttggtgccggggaagaccaccacgcttcgcctgttcagcagcacgcagatcgaccacaacacggggaagggaagg

SEQ ID NO: 22400 - DNA, 322 bp, Setaria italica
  Peptide Sequence Number=SeqID_88374
aagtggggcctgctccggtggctctacgacggcggcttcaccccgctcatcgacatcttctgccatgccagcgccgacatggtcgacatccacgccaaagtgctcttcgaggcacttggatgcgagaagaactacctccgtatccaggatgattcactagtaggacacccatcatcggtggacatcgcgacgaaggagaacatggaggcgttgatcgggatcggaagggagcttctcaagaagccggtggcgagggtgaacatcgacacggggatgtacgagcccgtcgccggcgagggcaacaacgagcaggctctcgagc

SEQ ID NO: 22401 - DNA, 249 bp, Setaria italica
  Peptide Sequence Number=SeqID_88375
acctggtgaacgacacgtcacgctcgtgatcgtgccgacgtcgtgcgctagctccgacgatggctcagcaccggcagctcggcttcttcccttcgtcggtcaccaggccgtgcctggccctcgccgtgacggccctgatgtgcgccgtgacggcgcagccgcagccactgccggtgccgcagccgacgacgacgacaccgatggcggcgccgcccgcggtgccgagcttgccggctgcgtgcccgccgg

SEQ ID NO: 22402 - DNA, 265 bp, Setaria italica
  Peptide Sequence Number=SeqID_88376
cagaacctctgttcacatgatgtggctgtatatattgctgttattacataaattttcagaacctctgttcataaattttgatttaactacaaacatatatattgttgttattacatagaggctaaaatggaaaagaaatagttaggaagttaggactgcttcccttttaactttaacaccttactctctattgggttctcatcttcttcttctttgttttttagccttgcgtcggagcttgagacaagatctggatgaattactt

SEQ ID NO: 22403 - DNA, 1145 bp, Setaria italica
  Peptide Sequence Number=SeqID_88377
ttttttttttttttttgttattcttggaaggtcatttcttgatcagttgatcattagacatcgggacgactccttccccccggagaacacgtgcaaacatacagcaacagttttttttacgagcaaaagacggtaaatttctcattaatcagcgattaatatgttacaacgaacgacaaaacacctttgtttggtttttttgcaacaccggcagtagttttttccttatacctatctgccgatgcaaaaagaacatctatgtacacctagtaacccatcgcgacaattaaacgatcgattaaccaacctcttacgtactaatacaagttctaatcttctatgcgagctctgggggagtcgtcgtgtcatcgggcgctgcgccaaagtccgcctacgccacctcggccggcggcggcatgttgaggtcgaacccaacgtcgaccgccggggaggcgtccaccacggatgacgacgacccggtgtcgctctgctcgtcttcacggcaggttgccttgttggcgccggcgacgacggccggccggcagggcaccggcgccggcacggccacggtcaccgcgagcctcgggtcgaggaacaggaacggctgggcggccaccatgggcggcatgccgaggctcaggtccagcgacggcgcgggcagcgccgccgcgggggacgcggccggcgagtcccgggaggatgactccacggtgctgctgctggggctgacggccagcatcttgggcggtggcgcggggtgcgcgaacgcgacggggaaattggtcttggccttgggcccgcggaagtggagcgcggcggcgtcgtaggcgcgcgccgcggcctcggcggtgtcgaaggtgccgagccacacgcgggccttcctggcggggtcccggatctccgccgcgtaccgtccccagggacgcttccggacgccgcggaacctcggctccaccatgccgtcggtcgccgcgctgaccggggggggagcgctgttcttgggcgccatggagagagcgggcgggcgggcgggcgggcgagcgacgacggcggacgaagcttgcgtgcggcgggcgagtgggcgccaagtgttcgggcgcggtggcggtggaggttgttgttgcgttggtgcgctgggcggatgc

SEQ ID NO: 22404 - DNA, 2591 bp, Setaria italica
  Peptide Sequence Number=SeqID_88378
ttttactaaagtttaacacctttatttgagggtgttaaagtttaacaccctgttaaattttaacacgcccttcccaaacagggcctatgttgtcagttgttacatgctatataaacctcatagccactaaattaatgggatgatacagatcaaacactacatagcttcaaggtactttcccctctttccatcagcctatcctctattctaatgattctgctcccagtaacatggggccaaaaagaaaagaaaaactaagaagaaaattaaacatttcttgatacagaggcggtatttgcaaaaccgttagctacttttggcggcggtggcttcttcttgtagtttgctagactacagtgggggcagatgtattccagtccatctgtcttcgcgtaatccttgaaagtgcctagtccttgtcgtctgtcacaaccgaagtgggcccattcaccgcacaaaccacagttcacccaatctccaggtgcgctactgtgacaaagtaagcagcattcgccatccacatcatcatgcgctaactcatattccaacaagtatgtttcatagtgccttttcagtgtgttccctacaccagtcattctatttgttgcagtatggttgcgcatctttgagaatacttgacccttccaatttatgccattgcccacataaaatccacctctagataccacctctttgtacaagttatagagatcaaggcgcttggcattaaggattgcatcaggaaattcagcaagtcctccatgaggtacaagtcgattgtgaccccgctgaattaaaaactgcatgacatccttcaagaagtcctcctcagagcatacttggataggcaacctatcacatccatgtttcttcattggcagaggattcagttgaatcactgatggagtatgagatggccccgatgttgattttctgtgtgtagttggagcagaggatactaaactatgcttcacaggtggcgcagctggcaagcttggcttaaccagactagtatcatgaaggccagtttcaggtaaacccatgaatggatgcatttgttgctttcgagagtgaggaatgggcctcatagttgcaggcttcaatttagcctgggaggatgggaacgaggaaggcccttccgtcagatgtttcttgtcttccaaaactccattcgcacccaaaagatttggtcttgattctgaagccaccttagttctgtccttggtaagggaggctgaccatcttggcagatgaaaatatggaccattttcattagccaaatctttgctctgacttgagcagaagaaaagaaggcggtctgcatctcgcctctcaaatgaagcaacaggagtaccatttatacaaccaattccaagcgcaaccaagcttctgtatgatatttctggtgctaaatgcttcagaacctgcgctgcccacttaggtagggtcatccaaacttcaaaagtagaagccccacaagccgtggacatggaagttaaaggctcacttgatgataacttatcctcattatttgagagagcacggactagctggctcttctcaatgatttcattcttgatgtggctctctagaagctggtcatcaaaacaagtttgtgcactaccagaaacgagaagtgacacatgggaagaactgcaggtactgatatcacagcgcatagtaaccatcccacgtggtaatgatgcggcttcaagaggtggcggagaggcactgattcggttctgcagtttgctcccacgaatttcaatattcagaagtgcattcagaccgtcttctaaagagcccaataaacaaggatccaaggtgcatggcactccacagagaagtaatttcatggtgatttcttcatcatatatttttatagccggggtcacttcagaagaaccttcttcatcaacagtctcagtctcaggtgcacttatatttatttttggagcatcccccaggagacgaggaccaagtttaacactttgcacatgattgtttcttacacaatataaacggaatgatgcatgagcaagctgaaaagcatcccatgtatggctcaccgaactttgaattactgacatcagtgcatggcgaaaatgagatgctgcataagatgagaatgaatttctccagtatattacatacgggatccccttcgaatgaactgcttgggcaagtttttcaccaataggaacttccagataaactatcgtggggaatggtgggctaatgagagtgctaaacgcctgtggatcggagacgtcggcgtccccccacacaagcgagccaatctccttctcatcctcgagctgctccccctggatgtacaagaagttgggctgcaccactcgctgcgcctcaaggaactgctcgggagtaggattgaacagagtgtgcacctccaatctcccgaccgagctaagctcagggaacgggtacgacggccgcagccgcttcgcctccggcccggacttcgctgccgtcacacgcttctcggcgtgcttcccacacagcacggcgaggagcacgcagttgctccgcgagaagctctggatttgagacatggctggctggtcggagcc

SEQ ID NO: 22405 - DNA, 298 bp, Setaria italica
  Peptide Sequence Number=SeqID_88379
cgttgtacctcttgccgtcggcgcagtagtcgtagatggtgtagccgagctgcacggcgcgcatctgccgcagctgcgcctcgctcagctggcacaggtccggcgcggcgtaccagttggacggcgacgcgcagctctccgggcaccctgcggcggcgccgccgtagtcgcaatcgcacacgcggaggctgatgtcacggtactcggcgacgaagggcgccttgttccagtccgtcttgacgcggccgccctgcgtggcccagtcctcccccgcccagatgctggagaaggcgtacat

SEQ ID NO: 22406 - DNA, 388 bp, Setaria italica
  Peptide Sequence Number=SeqID_88380
cttgaagtagatgacttagtgcgggctaatattgtattacccaaaagtttgtccgtaaattccaaatctggagatgtagaaccatcacaagcaaacatttttcctttgcaacttcatgtgccaagaaccatccaaatgttgagacaatatgtgaaagaatttgataggaaatatctgagtttgtcatctggcatggaaacagatgctgacaaacctaacttaacttctgatgacaccatcaaaatgacatgttcagtatgccttacaagagttctgatccgagctttcaaggaaggttcttttgaagagggtgctgttgtttgtgccccattaccttcagatcttccagcttggaaaatcagaggaagaagaggaagaatgtgtagaa

SEQ ID NO: 22407 - DNA, 538 bp, Setaria italica
  Peptide Sequence Number=SeqID_88381
ggaaaggccgtgctcctatcaattcagatgcagtggtcgttgtaggacttctttgcacttgcctcatggggatatttgtgtacatcaacagagtgaagcatggcaagtctgcagcagaaaaatcaaaccaatctttctttctcatcctggtgatagccaccctgtactgtatgtggtgtgccagtcagatatacctgcggcaaccctctcaacctgccataggtgaagaagctgatctcggagtgataattttccttgccatatatctctttctccctcatggcttgtgcgtcctttcgatgaacaaaaaggactatactgatgcactcaatgaactgccacttcgataatgtgtatttttgttgtgcaatttcttccatatttgcagaagatcagttcggtaacagtctggtttctgcattatgttgtaattagattagttactaactggatgattgctagtgcacctatacctatctacagccctgtaattctttaggctgcaaacatatattgttatagaataaagttgtaccaa

SEQ ID NO: 22408 - DNA, 623 bp, Setaria italica
  Peptide Sequence Number=SeqID_88382
ttaaagggaaaccgctctgtagtaggattcttgctccagtagtagtctgtagtagtctgtaacagcaatctcagttcatgacataaaaaataaagtatgaaaaaggtatcgcaaaaaagcctagctagacaagacctcacgttgcacttggaggaatctcattgctccctgttgcttcttgcaatagcagcaaaggctggaacaccaccagtccagccatgagctatctgctatcccttacatgaacagccaaagaacaccatgactgttggatctatcacattgctttatgatgctcatgaaagaggtcatttaagaatcaatcactacagaattggaggtcaagagaaatatatgtatctcatcgtcccttgtcacccatcctcttcagtaacttcccgatgtcgtagcagatctcgatcttatcatctttgatctgttgacggagagaactgcttttcttaccggctgccaagtatgtgcgcaggagggactcgtacgctttcccatcaatgcacccttgcattctcaggcagttgcagaacctctcagcaccgtcagcgtccttgtgctcctcaaaatatttctggaacttgtggatcttatcctgatcgagcttccct

SEQ ID NO: 22409 - DNA, 263 bp, Setaria italica
  Peptide Sequence Number=SeqID_88383
aaacctttgcttggcatagatcattatgcacggggagaggggtgggatctaagctttgatggtgctcatcgtggctgcctggtgatgtagtccggggctgaatgagccagcggcgaggaggatccggccatggcaacgaggggacgacggaggccggaggcagcttccggcggcggcggcccgatctgggaggccggggcaccttctgacggcggcgacctcgaactggtggctgcggaggaggcaggaccgcgaggagagcg

SEQ ID NO: 22410 - DNA, 523 bp, Setaria italica
  Peptide Sequence Number=SeqID_88384
taccttttcacataggaaaatatatctttttctccaaggagtggagcagatcaggatcctctgcagttctactatcaatagagagtgaatagtgatgtgcattaggaggtcttctcaaccatcagatcagatttagatggtgtagatccactgccacacaagctgaagcgctgcctcaacaaacaacattccatgctaaactactacagcaggctgtagcacaaggaacaaatcactgtgcatctgtacattattgcagagggtctgtctggaggggaaaaagtatgcaatgcatcataacacatcatacctagttgccaaacagttgagtagaataagctatttcatggtacagtacacaatattggtgaggtttatctttccgaatggaagccaaattttcactgtcaacaactcagaaataacagatttaaggtaccagaaaacatacctaacatcaccttgttgtcgtcttccaagattaagaagtatgatcaagaaaccggtaccaagtatctgggta

SEQ ID NO: 22411 - DNA, 1175 bp, Setaria italica
  Peptide Sequence Number=SeqID_88385
tttggtgtcaacttattaaaactctcatacatataagtaaagtatgtaagggtttataagagcagggctgccagtcttacgacgactcagctcttttgggttggcaaattcagacatctccaaagtgtgctagtaatttctcttcgtcaacatgcaacgctcattcactttacaggtaagaaacacattggaccttagaagggcactatcttgatccagaaaatgttttcttccaggcattaacaaagacaatgcccactatgcttctgtacaaagttcagcataccatggttgctattcacccatataaggcctcaaaattgacctgctcggatatctctatctatgcgatctgcattaagtgttcctggtagctccctgaagtcttcattgaatatagagtatgcactaacatcaccttgttgtcgtcttccaagattaagaagtatgatcaagaaaccggtaccaagtatatatagaggtccaaggctatagtgttgagctataggtgcaaataggaaccacattgcaataataatccatgccttcatactgagcgaaaacagccccatcaaaatgatatcaggtaatctcaatttgtctcgtaggaacatgaagattttcctcttccacaaggttgtcgtttgtggtattttgaacttcagttcttcctcttcctcctcatcatcgtcattgtcaaggagatgcttagcaggcggcttaggggccacggctactattagtgtatccccatcgcggaggttgacatgggcgtcgtcttggtgcgggagcggcctcccccgcaggaccaggcggaggcggccctcttctgtggcttcgagacggcggtcgcgcgcgacgcggcggcgaagctcggagaccgagagaagaggagggaggcggatggtggtggggcgggacggaccgacggcgcgcagcgtcacctccactgtctccggctcgtcgccggcggcagccatcgccgggctctcgtcactcgtcaggaagagagaggactgcgactctgcgagattcgttttctttttttttgagggggggctctccgagattcgtggtcgattcttgtgcggctctgggccttggaccattggacaactagtctcggtcgcacacggcaaggccacgactgattaggcccatcccatttggcaggt

SEQ ID NO: 22412 - DNA, 494 bp, Setaria italica
  Peptide Sequence Number=SeqID_88386
aggaggttaccgataggcgagaaaggtacaaatttgaagctaatgcagcgcaacctgacacgaacctcattgactctcgcgtcctggcaagctttgagcatgcagcgaagcttgttggcactgatggccctacagagaagatctccaacttgctaacacaagggaagggtccgcaacaacagaagctaatgattgtctctatcgttggagttggaggcctgggcaaaacgacaattgccaatatggtgtacgaaaggcttgggggccaatttgactgtaaagcttttgtttcggtgtcactcaagccgaacgtgaagcagattttcagcagcatactacggcaaattagtaaagatatatgcaccaatattggagaaaaggatcctgaagaacttataaggagtatcaggcaattcctcatggacaagaagtatctaattgtaattgattaccccttcattctgttcagtttctcttctattttttccatttag

SEQ ID NO: 22413 - DNA, 645 bp, Setaria italica
  Peptide Sequence Number=SeqID_88387
caaaacaatgtgcctttgttttaatttatttaagtacctttccgaccaattagttgttaaatgtctcgttgctttatgtttcctgcagggaaaaccacatttgtgaaaaggcatcttactggggagtttgagaagaaatatgagcccaccattggtgttgaagttcacccactggattttagcaccaactgtggtaaaatccgcttctattgctgggacactgctgggcaagaaaagtttggtggtctcagagatggctactagtcctgcagtatccatggccagtgtgccatcatcatgtttgatgtcacttcaaggctgacatacaagaatgtaccaacatggcacagggacttgtgcagggtgtgtgagaacattcccatcgtcctctgtggtaacaaggttgacgtgaagaacaggcaagtcaaagccaagcaagttacattccacaggaagaagaacttgcagtactatgagatttctgccaagagcaattacaacttttgagaagcccttcctttacctcgctaggaagctggcaggggaccagaaccttcactttgtcgaggctgttgctctgaagccaccagaagtgcagatttgattattggccattgtctaactaacttagttcttatttgttaa

SEQ ID NO: 22414 - DNA, 346 bp, Setaria italica
  Peptide Sequence Number=SeqID_88388
gcaggttagtttatcagtataatttatttgaatgagtttatttttcagtataaaattcagtaaggttatgcattgattatgttgggagctttgctaaatatttgatttttgattgcagggtgtgtgagaacattcccatcgtcctctgtggtaacaaggttgacgtgaagaacaggcaagtcaaagccaagcaagttacattccacaggaagaagaacttgcagtactatgagatttctgccaagagcaattacaactttgagaagcccttcctttacctcgctagcaagctcagcttcatgctgttgttgcatggccatatcaatctgcacttctggtggcttca

SEQ ID NO: 22415 - DNA, 1312 bp, Setaria italica
  Peptide Sequence Number=SeqID_88389
aattttgtagtagtttcagcatgccaatactcattgttgattgaaaatgagatagtgttcatacatataaagcatgtgaatctttgtgtgactccattccttgttttatgagattatctttacataatatatttgtagctgttccagcctgcaaatactcattatgaagactagagcattcaaccacatgtagtcagacattcttctgttttggtcgcagttttggcatataatgcatttttctcatattcttctgcaaatatggcaagattggaatgctgatttatggatggttttctagtttgtatatttgtgtgtacagttgcacattagtgtcccgcacattgagatccacagctcgtgggttaggattcaggtagccaatagcatgtgctgatttctttgtcgaatacaaaatttccgaaatgtcttaatggtatattatgttttgattttttcctgttggtaattttcgaatcttaacaaatcttctgttattagtgtgatctttattgagttttggttcatgtttcgttgggcttgtctaacattaattaaatttcaacggtcctgcagtatccatggccagtgtgccatcatcatgtttgatgtcacttcaaggctgacatacaagaatgtaccaacatggcacagggacttgtgcagggtgtgtgagaacattcccatcgtcctctgtggtaacaaggttgacgtgaagaacaggcaagtcaaagccaagcaagttacattccacaggaagaagaacttgcagtactatgagatttctgccaagagcaattacaactttgagaagcccttcctttacctcgctaggaagctggcagggtaattagatacttgatcacctctccacttgctttattttgttgtcttcctcatatatgtaataaccagctctttggccttgctaacttgttactggtgaatatatatttagggaccagaaccttcactttgtcgaggctgttgctctgaagccaccagaagtgcagattgatatggccatgcaacaacagtgagtgctttgatctctttatttgatatccagcaacagcagaaaattcactagattttcaaatgttgtcctgaaactagtatacaaatcctaatggtaggatttggaggagacatagttttatgtggaaaaacacaactcgcaccataaccatcatttgttcaacttggcaagaactattctgtgatagcaattttggcctgcatttctaatgtcatttccccgcatgatcgcaggcatgaagctgagcttgctgcggccgcggcgcaacccctg

SEQ ID NO: 22416 - DNA, 1169 bp, Setaria italica
  misc_feature (1074)..(1119): n is a, c, g, or t
  misc_feature (1145)..(1145): n is a, c, g, or t
  Peptide Sequence Number=SeqID_88390
acgacgtttacccccgttaataaaaagacctccgccgcggcccctctccatccaggtccatcgaagacgctccccgacttcacaagtccgtttcgaactctctagacgcctctctcgtcttcgtcgccgccccgttcggccgttccccatccccaaacccgcgttcccctctcgcgcgtcgcggaaatggcgttgccgaatcagcaggttgtggattaccccagcttcaagctcgtcatcgttggcgacggtggaactgggaaaaccacatttgtgaaaaggcatcttactggggagtttgagaagaaatatgagcccaccattggtgttgaagttcacccactggattttagcaccaactgtggtaaaatccgcttctattgctgggacactgctgggcaagaaaagtttggtggtctcagagatggctactatatccatggccagtgtgccatcatcatgtttgatgtcacttcaaggctgacatacaagaatgtaccaacatggcacagggacttgtgcagggtgtgtgagaacattcccatcgtcctctgtggtaacaaggttgacgtgaagaacaggcaagtcaaagccaagcaagttacattccacaggaagaagaacttgcagtactatgagatttctgccaagagcaattacaactttgagaagcccttcctttacctcgctaggaagctggcaggggaccagaaccttcactttgtcgaggctgttgctctgaagccaccagaagtgcagattgatatggccatgcaacaacagcatgaagctgagcttgctgcggccgcggcgcaacccctgccagatgacgatgatgacctgatcgagtagataatatcatggcccttgtcgatgatgtgcgagtgaactttttataagaacccatagtggttcatccttagattttaggaagctggatgttctcttgatgtatctgatgagaatgagttatgaaatttctatccgatgttgccgaggtttgttggtgactgaaccagctcctttcgagtaatacagttctgtcgtcacatatttctgcgtgcgaaaaaaaannnnnnnnnnnnnnnnnnnnnnnnnnnnnnnnnnnnnnnnnnnnnngcatgaagctgagcttgctgcggccnggcgcaaccctgccagatgacgat

SEQ ID NO: 22417 - DNA, 1332 bp, Setaria italica
  misc_feature (1)..(90): n is a, c, g, or t
  Peptide Sequence Number=SeqID_88391
nnnnnnnnnnnnnnnnnnnnnnnnnnnnnnnnnnnnnnnnnnnnnnnnnnnnnnnnnnnnnnnnnnnnnnnnnnnnnnnnnnnnnnnnnnaagttagcattacctgacacaagcaagcaggaaaaagcctcaatcactcataatacaagttccggtccaactaatcatatattcccgactgtaaatacagatgcacacccaactatttattaacttatgcgacatatggacagcactttgggtaactttaatacataattgactctatcagcacattttggatacaaaaatttacaccggtcacaacctggagtcacattagcaacggctcaggcacgaactcgaaacggatcggcattgtcaagaggcgggcattcatacttcttcacttccactgctgctgctgcttttccgaatgttgtacttgcacagggggcatgttgcattgatgtgcagccacttatcaatgcaggtgcagtggaaatggtgcccacaagggagttcgcgcagctctgcaccgtcgtcatatgctgaaaggcagatacaacactctgcatcttcagctgcaagcactttctcaataggttgattagtgccgcactctgtcattattccaccaaaaggccccatggggtcaacatcttgcttttcaggctcatcagtccgccgaaatttgtatcttgggatttgacgaatatcatcttcagatgccccttcctgatcagacactgcatagagaattgcgatgatgcaagggaggcaacaacaaacagcaataccaatgatacaagccagagcaacgcagaatacaacaaagaacacatcaaatgccagaaagactatgcaaagccagtaaagttgaggtgcatcccggataacctcttcacctccagcagatatccagtaaaatccaattatccaccatatgaaggagaacatcgtattagcagactccaagtgctttgcaatactggcgtaatcggtgcggcgaccacggtgatcaagctccctgtcatcctcatcgctggacgaggacgatccatcgctacccctttcctcatcggcgggcgctggccccccaccgcgctggccgtggcgcatccggtactcgatggcgacgcagaccatgtggacgacgcactgcagggcgtagccggcgacccaggtccggagcggcatgggcgagtcctcgtcgcggctgagcacgaggacgaccgcggcgacggtgatgaaggcgaggttccagagcaggtcgagcgccacgacggggcgggagtaggcccagtccgcctgccgctcctcgaggtgctccgccgcggcctcccgcaccag

SEQ ID NO: 22418 - DNA, 210 bp, Setaria italica
  Peptide Sequence Number=SeqID_88392
ccacgctctgcagctcgggctgcccgaactcgaggccctgcgggccaaccgcatgccgcatcggtggatcgcgacggagcatgccgaagccgtgccggcaccgcaagcaggagaggccgcggcgagcgaatctttacaagccgctgcggccaagccggtgcgcgccgccatcgcgttgcactgcgatttcgacgccttgcctttcgacag

SEQ ID NO: 22419 - DNA, 268 bp, Setaria italica
  Peptide Sequence Number=SeqID_88393
caaagctacaagcaagggcgcaaacaccaataatagcaagtgcgatcatcgctgatcaagcttgctaattaataagcccttcgtcgatcttcctcgcctccgacgataatcctcggcaagtcgtgatggagatgaagaagatcgcctgcgccgtccttgtggccgcctcggccgccaccgtggccctcgccgccgaggccccggcgcccgcccccaccagcgcctcctcggccgccttcccggccgtcggcgcggtgctcggcgcttc

SEQ ID NO: 22420 - DNA, 651 bp, Setaria italica
  Peptide Sequence Number=SeqID_88394
gaagaaaaattaacaaaaaaagagagagtgaattggagcagcagaagagaagggtgaagtggagtggatggatggatggatggatctatgcattcaccagatccaatgcaggtagccatccctgtcctcctcataattagtgcctcacctaccaataatactccaccaccgcacactcactgacacctctctctcttctttctctctcctcctcctcctcttcccccatttcatttctcccaagaaagctagctatgcttggatccatggatggacgtacgacagggggcatcagctaggtaggtaggtaggtaggtaggtagctatggacaccgagctcgttaagttactgacctggctctcaaccgggctgggtgggcttcggttcttggttggacggacgtgcgctctcagaaggagaaggacgacgaggaggagaaggcgtcggcgagctcgccggcgccggcgtcgggcgcgccggggaggaggagggcgcggcagagcgggcaggtggcctggcccttgtcgacccacttgtcgatgcaggccttgtggaaggcgtgggcgcagttgccgagctcgcggacgcggtggcgcgcctcgagcgcgcccaggcacacggcgcacgacgcggcccacgccggccgccat

SEQ ID NO: 22421 - DNA, 311 bp, Setaria italica
  Peptide Sequence Number=SeqID_88395
ggcagcggggactggatagcagcaccgcggacaggcgagccttgagagcaggctgcggtagggtagtaaaggtgagaaaagggaagaggtgaggagttagattcttacttcactaacaatggtaaccgatcaatacctattccatcccgatccctccaaatttcattcgaacaaagaacggaactactccatcccaccaatcatagagtatggaaccataccagaaattagggatggaaccactgcatatcctatctcactcttcgtcgaaaacactacctaaaagttcctcctttaagcttgtgatcaaa

SEQ ID NO: 22422 - DNA, 231 bp, Setaria italica
  Peptide Sequence Number=SeqID_88396
accgttgctcagtggaccatgatcccagcaacatgcaacatgcaggagaatctcagtgggacagagataacaggagttgcagtgcagcatcagcaccatcccggcggctccggctattcggcgtgaacctcgactgcggcccaggaccggagccagagccggagacaccaacgacaatgtacagctacatgcatcaaagcccctacgctcccgataactggggcagtccat

SEQ ID NO: 22423 - DNA, 211 bp, Setaria italica
  Peptide Sequence Number=SeqID_88397
tagcaatgccgctttgaactttcaagagctgttggcaaaggaatgaatgtaatgttgagtcatcagcaatgctatggaattgcatcgctggtgaggttccattagcagcagcgtccatggggcactgcatgattcttgcagtgtcggatttatccgatgagtcagttcatccgatcctcgcaggccgcagcgtcggcaccctcggggactg

SEQ ID NO: 22424 - DNA, 325 bp, Setaria italica
  Peptide Sequence Number=SeqID_88398
ctgggcttggatggatgttaacaaaagtccaggaaagaaatccgagcggtaaagtgcttttgggtcggatttctttcctggactttgttaacatccatccaagcccaggaaagaaatccgagcggtaaagtgcttttgggtcgttgacaatctgcttttgcagattgtcgttccaagaagaaacagccataatcgtcttgtcattatcaagtaatttagctgcagcctcaaagtagtcaaattacttgataatgacaagacgattttgcccattgtcgttccaagaagaaacagccataatcgtcttgtcacatacgtcactgag

SEQ ID NO: 22425 - DNA, 370 bp, Setaria italica
  Peptide Sequence Number=SeqID_88399
cttggattgaactgtcaccaaagtggactttgttaacatccatccaagcccaggaaagaaatccgagcggtaaagtgcttttggactttgttaacatccatccaagcccaggaaagaaatccgagcggtaaagtgcttttgggtcgttgacaaactgcttttgcccattgtcgttccaagaagaaacagtcgtctattctcgtgcacagaagaatacagtgaaatgtttttactgttctaaaaaaaattcgatcattccaagaaggcggagatggctcgaagcccctgcgacctccgccttctcctccttgctgccgctgcagctttcatctacattcaagtgcgcctctttgcaacaacaaatacccaa

SEQ ID NO: 22426 - DNA, 792 bp, Setaria italica
  Peptide Sequence Number=SeqID_88400
ggaagggaagcacagggacgggaggagcttctcgccggcgaccacacgccacgcgaggctgtagacagatctgagggaagggaagcacagggacgggaggaggaggaggaggaggagctcggccgaccatccgttttactcacgggaagatcgacgtgcaccaccaatactcctgccttgaagaatacagtgaaatgtttttacggttctaaaaaaaattcgatcattccaagaaggcggaggtcgcaggggcttccgacgccttctcctccttgctgccgctgcagctttcatctacattcaagtgcgcctctttgcaacacaatcccattatgctgaccgtcttgcagaagcagaaagatctgaaaatcaatgcaccagccaattaaagtccttgattgatcaagtcagcatgcagcaggagaagattgtagcgttggaagagatgaagatacggcaagatgaagaacgtgcacagctgaagattctgatacaggatcttgaaaaaaggagtgtgcaaaagttactaaacaagaatgtggttcctgttgctgctgttgtcataatggcttgcaatcgaccggactatttggagagaacagttgaatctatcctgaagtatcagacatcagttgcttcaaagtttccgctttttatctctcaggtacttgaaacagcaatttctgttcttggatccattaagtgtgtgggactcccattttttcattggttcttttcttgtcaactaatggaacaaatggagctgtgaaaaagaagctttggattataaac

SEQ ID NO: 22427 - DNA, 960 bp, Setaria italica
  Peptide Sequence Number=SeqID_88401
aaacaacaagacaatccgatccatggagaggcatggcactagccacctcttttccaaatttggttaaaaacttatcctccctaaggtaactcagatcctccgaattccagtcaatatgaacatcatttaacttgatgggctccaaatattgctcaaagaattgtcccaagcttgatccatgtttgccaaaattgtatgttctacagatttccgggtgtatgaattgccggtttccatgtacctcctttagcctcacccaatcatcccaataagctttaggccactttggtgacagttcaatccaagtggactttgttaacatccatccaagcccaggaaagaaatccgagcggtaaagtgcttttgggtcgttgacaaactgcttttgcccattgtcgttccaagaagaaacagccataatcgtcttgtcattatcaagtaatttagctgcagcctcaaagtagtcaaaaaaatcaggggcaatctccatgtcatcttctagaatgattacacgagcaaagttatgcttaatgaatagctgatccaatgcccacttataatgtttagcaatcttgtaatatgctgtcaattctcctggcctttcagctcgcacaggttcaaggtccatatgctgcatatatgttatttgtttataatccaaagctttctttttcacagctccatttgttccatcctgagagataaaaagcggaaactttgaagcaactgatgtctgatacttcaggatagattcaactgttctctccaaatagtccggtcgattgcaagccattatgacaacagcagcaacaggaaccacattcttagatagggagttctgcacaccctttttcaagatcctgtatcagaatcttcagctgtgcacgttcttcatcttgccgtattctttctattcttctttcctaacgtcttactaattcttctcctgctgcatgtctg

SEQ ID NO: 22428 - DNA, 1020 bp, Setaria italica
  Peptide Sequence Number=SeqID_88402
atccacgtttattagggcatttgtatctagcgatttgctggatgttaccaaaaatgaaatcacctttcttttaccataaagatcgagagtgtcaggtcaactagtaccctgctgttacattcaaacgtgtgtattccacagcatcgtgtaaaccctaaatacagtctaggattaaagtcccttgctaactaaatatttagggactcatggaaaaaaatataatgttgatgactaatcttgcaaatgttccaataaaccaagcccatgcctccattactcagtgccttggcccttgggccaagacaatcacttctcaaaatttccttcgccatgcatcccggttgctccattccagaaatcaataaacggatccgccgacatttgccatttgataaaagaagggttcaccacgggctccatgatgaaatttatcttctcaacaccactacaccccaagctgacgaagagaatctgggctcacaagaaatatccgcctcggactactcttgtatcggaagaccactactcctttgtaagctgttcttgggatgccatccttccattcttcgaatattccaaattgacgagctatctgctcaaaatcttcctggtcgttgtattggatccttacatctgcagccatgttttgggctttcaacacagcatccgatccatggagaggcatggcactagccacctcttttccaaatttggttaaaaacttatcctccctaaggtaactcagatcctccgaattccagtcaatatgaacatcatttaacttgatgggctccaaatattgctcaaagaattgtcccaagcttgatccatgtttgccaaaattgtatgttctacagatttccgggtgtatgaattgccggtttccatgtacctcctttagcctcacccaatcatcccaataagctttaggccttaaaatctcgtcaaggaagaattagatgataaaaggtgggaaatagacatatgcagtaataaaaaatatactaggcagcagtaagg

SEQ ID NO: 22429 - DNA, 1029 bp, Setaria italica
  Peptide Sequence Number=SeqID_88403
cggcgggcagcggccagctcgtgccgccgccgttgccccagccgtgcaacagcctctgctgctgctgcagcagctggggaggccagtgcccgccaacggcgcccgcgccgccgatcgccagggacaggccccccgctgtccccggatcgccctcgttgctcaggaattgctgatgcctggggctgaacggcaggtggtgagcgccttgcaaggggggaggcatctggggttgcttggagctcgcgtcgaactttgctttcgtgctccgggccgcggccgtctgccagtcgaggtcgaacgccatgggcacgcgctggtccgaggtctcgtcgtcgccggcgccaccgccatcaaggctgcccctcttgctcccggccgagcttcccagcgacaggtccaggttgtgctcgtcgccgccgccagtcgtcgccgccgccggctcgagctcctcggcgtaaatgctgggatcgaagtttgtcaccgcgtccttgccgttgcacttgatggccgcgcggtcgtacgccctggcggcttcctcctcggtgtcgaacaggcccaagtagacgtacttcttgccgaggaactggcccatgcgcgcctcccacctcccgcacttgtggagcgtgacgcccctgtacttggagctgccccgggggaaccccgtgctctgccgccggagcacgtggacgaactcctccttgctcaggttgcccatctgctgcttcatgtcgtcttcgtaatcctccaggttgaaattgatgtcggcctccacgccgcggaacttgatcgccgcccgatcgtacgcccgagccgccgcgtgagcggtgtcaaatccgcccagatagacctgcttgccgcaatcccatatgtgcgactcccaccgtcccgtccggcggtagaacgtgacgccgcggtactgcgagctgcgcgaccgcggcccgcgccggctcttcttggacgccgccgcccctgcagcgccggaggccgtcgcgccgttggaggtaacgtaaccgttttaaggtaaagtaa

SEQ ID NO: 22430 - DNA, 436 bp, Setaria italica
  Peptide Sequence Number=SeqID_88404
atcaagtcgatgctccgcgcagatggccttggccttgtcgaggagcgcctgcgtgagctccctctgctgctcctgcatcgacttgatgagctccggagaggaacatgcccagaggggcgccgaaggaggcggcggagacgtatccgagtggggcgagcggctgcacggtgagcagcagcagcgggggcgccagcgtgggcgctaggttccggagcgcccactcgagcgcgtggcggctgcactcgctctcgtccaccgcgaccatcaccttctgcccctgcccctgctgcggcgccggcgcggccatcttcgtgtatccctcttccacctaccagaatgctcgatcgatctagcttctcaccggtctcgggctgccttaaatctgctgctgcaaggctgtcggtgcctcgatcggtgacgtactgcggtactggcg

SEQ ID NO: 22431 - DNA, 884 bp, Setaria italica
  misc_feature (1)..(68): n is a, c, g, or t
  misc_feature (882)..(882): n is a, c, g, or t
  Peptide Sequence Number=SeqID_88405
nnnnnnnnnnnnnnnnnnnnnnnnnnnnnnnnnnnnnnnnnnnnnnnnnnnnnnnnnnnnnnnnnnnngtttttaaaaaactaaaaatgagctgcaatttagaatggaggaatacttatttatttacaattttgcgagacagcaatgcatgtgctagtgcagaagcaagacatgcatcaatccaccacactcaatgtacaggagcaagtcgctttatttgccatctgtgtttgcctaaagtaatatttgcattatcattatcgcccgttattgtatataatatgttgataataccctaacataattagggcaacatgggaagttgatttattcatgaatcctcacccttggttcttcacaacaagcactggacacttgcaatgatgcacacagtagttactaacgctcccaagaaacaacctttgtataggcccacgactgtggcttccaaggactagcagatcgacattttttttctcagctgcttcacatatcatctccttgggatctcctacctcaacaaccgtctctacattaaccccatgctccgcgcagatggccttggccttgtcgaggagcgcctgcgtgagctccctctgctgctcctgcatcgacttgatgagctccggagctacaggaggaacagtgcccagaggggcgccgaaggaggcggcggagacgtatccgagtggggcgagcggctgcacggtgagcagcagcagcgggggcgccagcgtgggcgctaggttccggagcgcccactcgagcgcgtggcggctgcactcgctctcgtccaccgcgaccatcaccttctgcccctgcccctgctgtcggtcgtccggtcgtcggtccttatttcttttcgtttgtttatttcctttntt

SEQ ID NO: 22432 - DNA, 537 bp, Setaria italica
  Peptide Sequence Number=SeqID_88406
tggtggtagaaataaatagaatccaaataccagaaagacaataaaaataagcgcatttgggagcaaatcaaatcaaatatagtgaccattaatgagagtcaggttcaaacaattcaaggattgtaaagaccataacatcaaagtagaatgcaccaaattgagcctattaccagttccaggaagagcacaccaaaagaaataaactcttactaaaaaaagcgaatcacatctcgatccacaaactgccaaaagcctttgttattccattcccagtggaacgtcaacctgtttaacaaacaaaaaacttgctgaattttaaaagaaacaaccttattttcaagtgacaggcaatatccatttcaacctattatgaaagataaatgggttaactgcacagctaattgaattccatttcgaggttgagttcatcttgaaactgcatttgcttcctaattaaactgagactaaatcataatattaaaaaaacgaaagactccacagaacatgaatgaattcaggtacatcacatcaggctta

SEQ ID NO: 22433 - DNA, 354 bp, Setaria italica
  Peptide Sequence Number=SeqID_88407
aacaaaattagaaatgcttcacgtactgaaaaggaatggtagaagctgataccttacatgtagagatgcccatcaacacaagactaataagagtgatgtccaccaaagcaggtttgatgcacatgataccacgtcaccagtatctaagcctcaaccaagtcatgtgactgttcagctatgtgtttaacttgagtttgtgcagcagctaacgtctgtcacaatgtcccacgattgcacattgatcaaggagccacaggcccacagacaccagcttgccaagtctccctggtacaaattcaaacataaaattattttcaagatttgctatgcaccaaggagacttggcaagctggt

SEQ ID NO: 22434 - DNA, 477 bp, Setaria italica
  Peptide Sequence Number=SeqID_88408
tgttaaaaattaaaatcacctaaaagggaagctcataaatgcatgagatggtttagatgcatggttatacttgagctgtgcagaaaatggttgtacgtgaagcatttctaattttgttccgcactgaaaaggaatggtagaagctgataccttacatgtagagatgcccatcaacacaagactaataagagtgatgtccaccaaagcaggtttgatgcacatgataccacgtcaccagtatctaagcctcaaccaagtcatgtgactgttcagctatgtgtttaacttgagtttgtgcagcagctaacgtctgtcacaatgtcccacgattgcacattgatcaaggagccacaggcccacagacaccagcttgccaagtctccttggtgcatagcaaatcttgaaaataattttatgtttgaatttgtaccagaaacttcccaatcattatgcttttgtcatctgaaagtttgttgc

SEQ ID NO: 22435 - DNA, 643 bp, Setaria italica
  Peptide Sequence Number=SeqID_88409
ttcagtgacaatgaagagatgctcctgaaagtagaagtaatcatagagacgaagtatgtgatggtcatcatctggatcatacttattgacaaacttaaggagctttatctcatccaagctctggtcaaagaaatccttgtcattttttattattttaaggcatacatcaactccagtttgaagatcgtgtgcacgtacaaccttgctaaatgcagcagaaccaagatactcggtgacacgatatcttccggttataactgaatccatgacaataggaaattctttgttttcctcaaagccagtcctgttcttccggtggaaaattttcaagccaaatacctcatactcctgatgaaacttagagagtgcaggatccacttttggatcttcctgaaatttgtgagtggtagagtttcgaacatttgtatctgctgtaacaaaatcttccaccccataaacatctaaagggtcagtgttctcaggaaaaggatgtatgctgtagctatcttttagaaattcttcgccatcagcattttcctcatttgttaccacgcaaacatcaagtttttcattgcctctgaagtcatgttcaagcccaacattctcaagagcatctgcatcagccaagtacggactaagcatt

SEQ ID NO: 22436 - DNA, 296 bp, Setaria italica
  Peptide Sequence Number=SeqID_88410
gcaggacgtccggtgcgagccgaggaacgccccgggcggcgagagctcggcgagggtgtcggccgtgttccgcgccgtggcgccgtgggagcacaagtacacggcgagcaagcggagcgggctcagcggcatgacgctctcggccgagggcgtgtggcgcgcgtccacgggccagctctgcatggtgggctgcctcggcgtcggcgagaaggcgtgccactcgcgcgtgtgcctctacgtgcagaccaccttcacggccacccgccgcagcatcacggtggggcagatcacccgca

SEQ ID NO: 22437 - DNA, 253 bp, Setaria italica
  Peptide Sequence Number=SeqID_88411
ctcctgttgctctgatcttgctctctccaactccaagtgtgatgaagaagtgacctcgctccaacaaggcaaataattcagctggcgctgtcgcggtgtgaacccggctttgcagttgcggcggcgccggccgagcggagggagccgcagccgctgggtccgcgccgggagattctccccgtgcggccgcgaggttcgctacggcgacgcggcaccggccaaacgccgggacggcgcaatcagtaggagataa

SEQ ID NO: 22438 - DNA, 1494 bp, Setaria italica
  Peptide Sequence Number=SeqID_88412
cttgcggtttagagctggtggggagggctgtcagctggcgtgacgtgagggaggggacagcagcgcagcggcggccggcgagcgagcggcgatggcggcggcggggaaggccagggtggtggtggtgggcggcggcgtcgcggggtccctcctcgccaagaccatggagcgccacgccgacgtcgtcctcctcgacccgaaggagtacctggagatcccctgggctgaactgaggtcaacggtcgagccatctttcgctgagagatctttgatctatcacaaagattacctcaccgatgcgaccatcgtgacatcctctgcggtcgatatcactaaagatgctgtcctgactgctgacggtcaatctcttccatatgattacctcgtcatagcgactggccatgctttgacttctcctggcagcagagatgacagggtcaaagaattccagagagataatcagaagatagaatcatcagattctgtgttgataattgggggtggtccaactggggttgaactagctggagagattgctgtagactacccgcagaagaaggtgacccttatccatagaggaccacgtctactcgaattcattggagagaaggcttcaaggaagtctcttgattggctgacttcgaagaaagtagatgtgcttcttcagcaatcagttgacttggggtcactatcagatacagaaaaggtctacaaaacatcaggtggagaaacaataacagctgattgccactttgtgtgcattggcaagccactgagttcatcgtggctaaatgacaccatcctgaaggaatctttggataacaaggggagagtaatggtggagaaggatctacgagtgaaaggttataacaacgtttttgctattggtgacatcacagatattcctgaaatcaaacaagggtacctcgcccagaagcatgcgctgctggtggcaaagaacctgaaattactgatcaagggttctcctaacaccaaactgtcaacttacaacaccggctttccgttggcactggtctctcttggaaggaacgaaggggtggctcagttcccgtacctgacaatcagtgggtgcttaccaggcaagatcaaatcccgggatctattcatcagcaagacgaggaagcagattggcctgaatggttgaagtcatccatggaagcatgaaattgaaactgcttgtgccctggttttcagacaaggaaacgaaattacttcaaacagagaatgtgctgtgctgatatgccctgtatttgtgccagttaagtgtgattgtgtggttgcctgaatggtggtgaacaaagtgtatgttatatgcatgtctgaatggtggtgaacaaactgttgttatgtgcatgcctgaatggtggtgaacagagtaaagtgtatgctatatacatgtatacaaggacccttttggttcaaaacaatgtcgtgtttaatcaataagcacatttgtttcttggacaaaaaaaa

SEQ ID NO: 22439 - DNA, 289 bp, Setaria italica
  Peptide Sequence Number=SeqID_88413
ttttactagttggaggttgatatcccttgatgaaagttgaaacctacggttaaatattcaaactttactcttaatgtttaaaatcttcaacttgaatgtaaaatttattgttcaaagtccttcgttccaatttaagagttcaaatcttgaactgaaaattttcaaatctttctctcgaaaaccgaaaatcttgaaagtcccaattctcaatctggaagtccaaaacatctaactggaaaaggatatcaagtgtggagatgacatcaatgagaatgaacgtgctgcccct

SEQ ID NO: 22440 - DNA, 1015 bp, Setaria italica
  Peptide Sequence Number=SeqID_88414
tgcgtctattatttctttgtctagaaccaattcgttgctacttgaacccacagcacctttgccctggtattgttccttatcatagtatatgtaaaaacaaggaagaactgcagcaaattttgatcagatcaaaccactcgaagtttgtatacatagtaacgagttcttaagaaattttcatcacctggtatgctcagatcacttgctttctcctttaatacaggacgttttataggggcattagcacgctttggtttattttttcttcttttgagttagatgccaatgccgcagcttgctcaagcgcttcggctaaggcatctagatcgaaatcatcgtcgttgatatcaagactcgtatttttatcaatctgttcttctggaatacttgtagaagaaggtccagtcgcttgacctaattcatcaccatcaccttctgtttgctcaacactacggcatttttgaactcttaggaccttccaactctgaggcttaggcccacattctggtgtcggacaagcaagcacatatattgtcctctcctcaatgtttagcttcaccacaggggcatatacctgagcaacaagacaaagcttggctccacataagctgcactgaagcatttcaggcttaatgcccgtatcaccagttggccaatcgggcactccaccgatcttagtggtgtagtggtcggccttctcccggtagtccgccgcccagggacctggaagacctagatgcacctcctccaccataccaacctacctgcttctctactcttccccggtaaatagaagctcagcgataaggagaaaccgtcaaaacgcaagaagcacgagtcccccgctactctccggcgaccggcggggagaggagaggcgcgtggagctgtggggaaggttaaaggcggcgacggcgtgggagaagagaactggagggagagtggagtgtgagcatggctgggccgccgcggggagccctgtaacgagagagagagagagagagagagagagaga

SEQ ID NO: 22441 - DNA, 841 bp, Setaria italica
  Peptide Sequence Number=SeqID_88415
tagctgaacggcttctaaccgacagtccataaagccgtacatcacacagttaccaggaatcagcagattaggttcttgacggcttcatcctcctgaatcactatgtcctcctcagctacaccccagcagcagctgcaaggctttccaccacacgaggacggacagcagctctttgagcaagtgtatatgataagagtcagccaagtccagctgctgggtgcataatttgaggaaccgtcaccagcctgatggagaaagtatgataatggagacatcaattgcaattcatactgccgtgatgagccacaaagcctacaagtgccagcatcttgtaattttgttgccgctgacagtagcttgccaccataagaatacctaaagcattgctcaggataggcatccaaccgcttcttgaattttaagaaagttctgtcagcaccaatagctttatcatactcatatttttctccttcccatttttcttcttcatcatttgttgcgtctattatttctttgtctagaaccaattcgttgctacttgaacccacagcacctttgccctggtattgttccttatcatagtatatgtaaaaacaaggaagaactggtatgctcagatcacttgctttctcctttaatacaggacgttttataggggcattagcacgctttggtttatttttcttctttgagttagatgccaatgccgcagcttgctcaagcgcttcggctaaggcatctagatcgaaatcatcgtcgttgatatcaagactcgtgtacttcgtcaatctgatccggaatgtagatccagtcgcttgaccttagttgtcgtacttgtagt

SEQ ID NO: 22442 - DNA, 751 bp, Setaria italica
  Peptide Sequence Number=SeqID_88416
gtggactgtaggtaaggtggcggtgaagcatagttgtttagtggaggtgatgggtactggtaagctggaggaggaaacaggttagaaggaggtggcgaatgttgataaggcaatggttgggacttatggctagccggaggcgagggatactggtaagggagttgcggggaattgtagggatgcgccggtggtggcatgtgaggttttgaacattccaaggtattctttgatgcaaatgccattatctggttcgcttggagaaccacctccttgcttgacttggagtaaacactgagcccagacaaatttaactcaattggcacattgcagtctgatcctcctggtgctccatggagctcgaccttacacgagtcggccccataggtgttgctaattggcaatcccttaaggatcacactgtatttgccattgcttctggtgtaaccaaatgccacgagtgcttggtcatttgcctgacaagtgaccttgaccatggctccttccaggtgccttttcccatgggattcttctgggtgtgcctcattgaagcatctgtagcagtacaccttccctatcaccttaataacaggatcatatgttggtgatatggaaagagaaggtggtgcaaagctgctcgctccctcaccgtgcattgcaaaagtgacaaacaacatggtgaagaccagccataggtgaccctttggctggcctgtcatgctcattttcatggctagatagtgctttgtcaagt

SEQ ID NO: 22443 - DNA, 561 bp, Setaria italica
  Peptide Sequence Number=SeqID_88417
cggggtcggaagtcgtcttccacggggagtttggccatcggagcgctcgacgatgtcagtcggcgtgtcctccaggacggagaggatgggagggaggcgggagagcggcggtggtgcgcgcccgaggccaatgccggcgccggcgccaaacaggtacccgtcccaggacgcgcggggctcgtcccacgagaagccggcgtcgtccacggacatgcgcgccgcgtcgagggagaaacgcgggtccgtgtcgcacgagcgccggccaccggcgagctcggagcctgcctccccgcggaggcggcgccggcgaaggaaagacggcttggaaggcttctcaggaggaggcattgctgcggccgcggccttgctcacggcagcctccttcttgagcttctgcttgcgccgccacttctgccacttcttgctgaacacagaggcggcgacccagaagctcccggcgatctctttcaggtctttgggcgacgccttcttggtctgtgacgactcgagatcaatgtgatccttaatggccttgccttccctggccacattgccttcggc

SEQ ID NO: 22444 - DNA, 719 bp, Setaria italica
  Peptide Sequence Number=SeqID_88418
cttctcaatgcaaatacttttgactgctcatataattcctgttcttacattgtggcgctggtcacctaagcttgcgattcatgttgcattgttacattccattactgaacaacacttgaaccctcctggcaagaaaggtgaacaacaaagaatgtgaacagggaactgtatcttcacaaaagatgagccaccgatggactgactgcacggttgggtgggtatggcatcacaaagcaaaatcaaggcactccagttttgtttcaccgaactggtgtgtagtgctccatctgcagctggtgcagcgcagcctcggagccgaagctgtggtggctcggcgacctccgcgagcgcgacctcgccggcgtcatggggcccttaaccctcggagaccgctgcgcggcgggcggcctggtggacctggcgaagcccatgtcgctggcgatggaggggatgggcgacatggacgggatcggtgagagcatgcggtcggcgaacgggaagcagtgctcggagaaggcgtcggtgcccgcggatcgctccttgggcgtgctcatggaacggaacttggccttggcggaggccgtggacgccatgtaccccgggaacggcgccggcgagcacggcgcggcgtcctcgtagtagtagtcgcccgcccgcgccggcgcgcgcctcgtccgcacgaaggaccgccgcgccgagcagccgagcctgtccgcgtc

SEQ ID NO: 22445 - DNA, 717 bp, Setaria italica
  Peptide Sequence Number=SeqID_88419
cattacccccagtgccatcccaaccgtcctcaatgcgagaccctcgcctgggcactttcgccgccccaacccaaacggcatcatgaacctaccaccatctccatccacttcatccgcatccatgaacctctccggcatgaacttctccgggtcctcccacatcgtaggatccctctgcatggagtacacgtcgactagcaccattgccccacgcgcgacggtgtggccagcgatcacacagtcgcgtgacgcttcgtgaggaacatggttcggggtcagtggtttcaaccggagggtctcgaggatgatgcatcgcaggtaggggagtctggcgaggtcggattcgttcatcagttgggatgtgccaacgacggagtggatctcggtggttgccttcttgagcacacccaggttgctgagcaggagagccattgcccactcaactgtgctggaggacgtgtcggtccctgcttgtagcaagctcaggcagacgctacggatgaccacgtcgtcgagcggctcccgcgacccctcttgctgctgcctgagcaggtcgccgatcaccgtcctcggtgtctccagctcggaggcgaaacgagggtggcgccgccggtagtcgtcgatgaggctctggccgaacctgtggcgcgccttggcgatcgcggcgagcttcttcgccgtcctcccgaagtccagaagccgcagcgccggcaggaa

SEQ ID NO: 22446 - DNA, 1090 bp, Setaria italica
  Peptide Sequence Number=SeqID_88420
agacaagcagtccgccttgcaggcaatcccatccatggcgactgccgcccccttcagctgtcgctcgctcctcgccccggcacagcaatcccatccacggctgcctgcctccatccgcctcgacctctcccaccccaagcaacctcccgccgacccgaagcgccgccggcaccatgccgcttcgcatccggccttctccgcagccgcgcggggtcgtgccaagaagatccccgtcccggacaccgaggagcccgccgccggagtccgcgtcaccgaccgcggcctctcctaccgcctcgacggcgcgccgttcgagttccagtacagctacaccgaggccccgcgcgcgcggcccgttgcgctccgtgaggccccgttcctgccgttcgggcccgaggccacgccgcgcccgtggacggggaggaagccgctgccgaagagccgcaaggagctgccggagttcgactcgttcgtgctgccacaaccgggcaagaagggggtgaagcccgtgcagtcaccggggccgttcctcgccgggatggagccgaggtaccaagcggcgtcacgagaggaggtgctcggggagcccctcacaaaggaagaggtcgccgaactcgtcaaagggagcctcaagaccaatcgacagctcaatatgggtagggatggtttgacgcacaatatgctggagaacattcattcacattggaagagaaagagagtttgcaagataaaatgcaaaggtgtctgtacagtggatatggataatgtctgccagcagctagaggaaaaagttggaggaaaagtaatacaccgccaagggggtgtcatatttctttttcgtggtagaaactacaattacaggactcgcccaagttttcctcttatgctctggaaacctgttgcaccagtgtaccctcgccttgttaagaaggtcccagatggcttaactccagatgaggccgcagaaatgcgaatgagaggaaatcaattaccgccaatttgcagacttgggaaaaatggtgtttatgttaaccttgtgaagcaattagagaagcatttgaagcatgtgatcttgtccgtgttgattgct

SEQ ID NO: 22447 - DNA, 264 bp, Setaria italica
  Peptide Sequence Number=SeqID_88421
tccttgatggcgagtgcgactttgataatcttctccacactggccaggggatcagccatcttgtagttcagtgcaaacttatatattgcctctgttgcctttcttctgatcaccccttcctgctatcctgcaccaagtgattgctagtcttgttctgtttttccgtgcaatcaccaatcagtgaacaaactaattggaagatcagaacctcttttcagtgtactcatcaggcccacaagacggcaataccatcttgtgagcccg

SEQ ID NO: 22448 - DNA, 348 bp, Setaria italica
  Peptide Sequence Number=SeqID_88422
gttgcagcacagattggtgtgaaggggatgttggcgggggaggggacttctaccaagtggtggtgcaaccaggttatgaccaggcctttgtggtcggcgtgattgccatccttgacaacattcatggagagtccacaaggtgttaatgatgttagtagagacgagagctgctcatctgtcgataagattcattacattagcaatctgttaggatacaattgcatagctgtgattgtttttcgaatattttccttttgttgataggttaccatgtacatgatatgtatgacttgaaaccacttcacaacagaacacacatccaaatcatacatatcatgttactattgt

SEQ ID NO: 22449 - DNA, 652 bp, Setaria italica
  Peptide Sequence Number=SeqID_88423
ctgggagggcttctgaggtacaggcagctatgaaggcgctaaaggttgatcttaccacaagagcactcagggatgctcgtagctttgagctggcatacaattctgcttgctccttgatagaaaacaagaagtattcagaagctaaggagcagttggacttggctaaaagaattgggaaagaagagcttatggtggaagactttgatgaaaacgcgattgaatatgaactagctcctgtatctgctcagcttgcttatgtgcagcagctacaaggacaatctcaagaagctatgcaaacctatgttaatatggtaaacgggaagtcagacgattcctcaccacttgctgattcatcatcacttgctgtggcaacaacaaaccttatttcactaaaaggtacaaaagataccgcagatagcttgaagaagcttgatcggcttattgaaaaatctaatgctccaaaccagttgcaacttattgaaagccttgatttcaagttgtacccaaggcaaaaggaagctctgtattctgcccgtgttcttttactcctccatgcaaataaaattgatcaggcacatgagttggtctgtggactgcttggaatgtttcaagatagtgtattcccagttttgcttcaagctgctgttcatgt

SEQ ID NO: 22450 - DNA, 2277 bp, Setaria italica
  Peptide Sequence Number=SeqID_88424
atcggccatcgcaccggccgacgaggcgccgcacgacgacccggccttcgccgtccgccgcgcaggggcacagtcctccggagatgccgcccaagtcgaaggcggcggcggcggcaaatcgaaggcggcggccgccgccgcggaggcggtctccgtcgaggacctcttcacctcgctccaccgccacatccaggccggcgagttcgccaaggccgtcaaggtcgccgaccaagttctcaaggcggcgccgggggacgaggacgcggtgcgatgcaaggtggcggcgcacatcaaggccgaccagatcgacaaggcgctcgccgcgattcgcgacgccgagcgcctccccatcgacttcagctactacaaggcctactgctactacaggcaaaacaaactggaagaagcactgagtcttttaagaggtcaggaagaaactgcagctattctccagctggaatcccagattttgtaccggctaggaagaatgaatgattgcatgaatagctatgagaagcttcaaaaatttaagattgactctatggatatgaagataaatatcattgctgctctggttgctgctggaagggcttctgaggtgcaggcggctatgaaggtgcaaaaggttgatcttaccacgagagcactcagggatgctcgtagctttgagctcgcatacaattctgcttgctccttgatagaaatcaagaagtatttagaagctaaggagcagttggacttgtctaaaagaattgggaaagaagagcttatggtggaagactatggtgaagatgagattgaatatgagttagctcctgtatctgctcagcttgcgtatgtgcagcagctacaaggacaatctcaagaagctatgcagacttatgttaatatggtaaacaggaagtcagctgattcatcatcacttgctgtggcaacaacaaaccttatttcactaaaaggtacaaaagatgctgcagatagcttgaggaagcttgatcgactttttgaaaaatctactgctccaaaccagttgcaactcattgaaaaccttgacttcaagttatccccaaggcaaaaagaagctatgtattctgcccgtgttcttttactcctccatgcaaataaaactgaccaggcacatgagttggtcagtggactgcttggtatgtttcgagatagtgtattcacagttttacttcaagctgctgttcatgtgaaagaaaaaaggttcagaaagctgaagaagttcttagccagtacgctgagaagcatcctgagaattctacagggatcctccttgcactcgctcaaattgctgctaatgccaaccattttcagcttgctgctgactcactgtccaaaatacctgaaatccagcacatgcctgcaacagttgctacactagtggctctaaaagagcgcctaggtgactccaatgctgcagcttctgtacttgattctgctatccagtggtggaagaattccatgaccgaggataacaaattagatttgttcacgcgggaggctgctgcgtttaagctcagtcatggacgtgatgaagaggcttgtctgttgtatgaggaacttgtgaagagccatggaagcattgaagctttggctgggctagtagcgactgcagctcgcactaacctggagaaggctgaacaatacgagaagaagcttaagccattgccaggcctcaaaggagttaatgttgagagcttggagaagacatctggcgcaaggcacgtcgaagggccccaagacatgaaggtagacactcctgaggaagtgaagaagcaaaaggcaaggaagaggaagcggaagcctaagtacccgaaaggcttcgatccagcaaatcctggctcgccaccggatcctgagagatggctgcccaggagagagcgatccagttaccgtccaaagaggaaggacaagagggctcaggtcagaggtgctcaaggagctgtgactagagagacagcagctaccaatgctggtggttcctcgaaaggaagccaaacctccagttcatcaaagactccggcagcaaacactgaccagccaaagcctagcaacaaatccaggaagaagaagtcgaggtcttagatgagaaaatttagagttacaacaaattgacagtgcaaaaggatatacccatttaccttcttgacttgcaattttgggttggattgcttgcagatttgctttgctttttacagtcatgtttaaagcgaccggaaactattgaaaaattagtttgagctgtatcgcgat

SEQ ID NO: 22451 - DNA, 307 bp, Setaria italica
  Peptide Sequence Number=SeqID_88425
aggagcgtcgccccgaccccggccccggcaatggcgccggagccttcgtccaccgaggagctccccaacgtgtcctcgcccaccgcggcgccggcgcccaagtcgtcggacgcggccaccattggaggcaaggctgtcgtggggctcgccttgggcgtcgtcgccatggccctggtggccatgtgagcgtcgtgacacgcacgcatgatttgttatttttttgcagagaattaattaattattatatcctgcggcgcaccgacggttgttgatgaacaagtttacagatggtttttttttcttttgg

SEQ ID NO: 22452 - DNA, 370 bp, Setaria italica
  Peptide Sequence Number=SeqID_88426
catcttctaggattttcatagcaaatttatagttgtgatattcctaaggaattgtatttctaaatgacacttgatcatcgatctagtcgtgaccggggtcattaataggatttttagctagaattggcttcaagtcaaggcaagggaggaaatagaggggttgtccccatgatttttagaaattatgcaaatccaattattatcttggtatattttatcatctatataaacataggataaaaatatgatcaagggggtggatgctaggacttgccttcattgatgttttctaggttgaccagggtcttgacttctcgtcttccggatcttcggcttcttgtctgagcctggtcaggctagcatatctacg

SEQ ID NO: 22453 - DNA, 897 bp, Setaria italica
  misc_feature (846)..(897): n is a, c, g, or t
  Peptide Sequence Number=SeqID_88427
cgagctccgcgcgtacgccgacgaggccgcctcccactacggcgccctgatgggccacaaggcccggctcgccgccgccgacccgctccacctcctctccggcctctggaagggagccgccgagcgctgcttcctctggatcggcggcttccgcccctccgagctcatcaaggtggcggtgcggcacgcggagccgctggcggagcagcaggcggcgggggcgcgcgacgtggagcaggcggcgcgccgcgcggaggaggcgctcgacgcggagatggaggcgctgatgcggtcgctctccgaggtcgtcgcctccgacgcgcagccgccgccggggtgttcggcggccagttctacccccaccacccgaccgccgacgccgcgggctacatggggatggggcacatgcacatggccctcgccatggacaagctggccacgctcggcaccttcctcagacaggcggacgagctgcgtatgcaggcgctgcaggcgctccggcagatcctgacggcgaggcaggcggcgcgctgcttcgtcgccgtcgacgactacttctgccgcctccgcgcgctcagctcgctctggacctccagccgggcggcgccgccccagctggcgagaggccccgccgggtagagaccgagcaacgccgccatggatgggatgggatacatgcatactgctacagtagatagcttagctatgacgtagggaagacgttgaattaagcaccatgtgaatgtaccaaggatgacaagcttgtgtaggatcggataatggctggtggacacagatcgaacagggaaattggaattcaagaattacgtgttgacaaacaaaaannnnnnnnnnnnnnnnnnnnnnnnnnnnnnnnnnnnnnnnnnnnnnnnnnnn

SEQ ID NO: 22454 - DNA, 387 bp, Setaria italica
  Peptide Sequence Number=SeqID_88428
ggccttgcactccataaacctgaacaagcaagaggacttgctgtgcgatttatgaggagagcacttgagtaatttggattttctttgagttcaactctgctaactccctgcacatccaccacaccagcctctcctagttttgtacttcttgatattatctcataccatgatcgtggattatccaaaataactggtacagttcttgatatgaggtctaaatcatataaagattccattgcgcaagaacccgtttcccatctttgctctgaagttgcattgcttgagtggaggattccctttgtattgtgcgctgaactaaggcacatccttaaaggcatgacgagtaccctgtcgaggaagagggcctcctcgagggcgcagcggagg

SEQ ID NO: 22455 - DNA, 499 bp, Setaria italica
  misc_feature (68)..(68): n is a, c, g, or t
  Peptide Sequence Number=SeqID_88429
agatttaattatttccattctaagcaaaatctgcagctcatgttcccgaattttataacatgtactanatttttgcggtttgctccaatgcaacagaggccgaattgcttcctctgtacttcgatactagttctttgggtttcctcaacagaatattggaaagttcacaggcaatttttgcaccagaagcatcttcttcttccttgtgttcagagtacctcactgcaatctttccatgcttaaccaacagcgcgtggacagacaagccaaccaagcgttcagctaaattccccagatcagcatcttcagaacaaagagcttgctcaatcttatgagggacactctcaagaaatgcctctaaatcttccatagaagagaacatcgagctctcttcacccactggtctgtccactccactgcaaattacttagacccttacaattaccaacttaggttaattagttacctaacttttaatttagtactaaattacttagta

SEQ ID NO: 22456 - DNA, 177 bp, Setaria italica
  Peptide Sequence Number=SeqID_88430
gtggttccgcaccaccccgctctcgatcgcctccttgatgccgagctggcagctccggtcagcctgctcgacgtcctccatgaatatgaccctgtgggggttctcggatatggcctcgtacaaccgttccaggtaggccggctcgccggcgggaggcgtccgtggccgcttgctccg

SEQ ID NO: 22457 - DNA, 941 bp, Setaria italica
  Peptide Sequence Number=SeqID_88431
cgagagagatggagaagcggtttgccgtgaccgcagcaaccggggcgttggggccggtcctggtgaagctcgctgctttgctgggtgatgagtacaagcttcaggagggaacccggcgaggcatcgagtccatcaaatccgagctcgagccagttcaccatctcctgtggaagttatgggggagcttggatcttgatgtggcatgcaagaactggatgacagaggcccgagagctgtcctacgacatggaggacgacatcgacggcttcactctcggattggagcgtggtgacggcagcttcatccagcgggaagccacggacagccctttcatggaattcatggaaagggtcaaagatgtatcgaagcggtgcggcgagatgcagaagattggcgacggcatcatctgcaaccgtagcaagctgcccaccgaccctcgagctctcttccttcacaaggatgcatcggagctcgtgggcatggaaccaaagaaggaggagctcatccaattgcttcagaagcacgaaatggtatgccttcttggagctggagggatggggaaaacaactcttgcggacctggtgtatcacgcagtaggagatgaattccaatgccgggctttcgtgtccgtgcacccaagtcctaacatgacggatattctgggtatcatcctcagccaagtaacagatggtgcaatgtctgctggcagtggcaccgaacctgcagccgaacaaaatatggtcaccgacatatcaatttccctctctgagaagagtgagacactgaacctgcagccgagcaaaatgatttcatcaaaggcatatcaaatttcctctcttacaagaggtacgttgtctctattcccactctacttcctgattccattcctaaataccacgtatgtacttgttagtgtactattctgaacaaagcatctcatg

SEQ ID NO: 22458 - DNA, 295 bp, Setaria italica
  Peptide Sequence Number=SeqID_88432
gaaattcatgaatggatgatggatgctggtcttcatgctgatatcattgtctataatacacttgtgaatgttttgtgttgtcatggaatgacaaggaaagctaaagttgttttggatgaaatgttggggagaggaattgcaccagacactatcacattcaatgctttgattcttggccattgtaagagtagccatttagataatgcatttgcaatgtatgctcagatgcttcgtcaagggctctcaccaaatattgctacatttctaactactactttcctagtctagtacttct

SEQ ID NO: 22459 - DNA, 252 bp, Setaria italica
  Peptide Sequence Number=SeqID_88433
ggtcggcctcgtgcacggtggtgaccgaccggtagttggcgagtcggtgctccccgccgacgacccggaagctgagcacgcggcgctcgtcgtcgaggatctcgagccgctcgcggctgctggtggcggggaggcctgacacgacgcgcacctcccgcacggagcccacggcgccgccgtcgccgtccacgagacggcagctccggatgaagtgcttgtacgcctgcggccggtcgaagcgccgcaccaccg

SEQ ID NO: 22460 - DNA, 1052 bp, Setaria italica
  misc_feature (1)..(72): n is a, c, g, or t
  Peptide Sequence Number=SeqID_88434
nnnnnnnnnnnnnnnnnnnnnnnnnnnnnnnnnnnnnnnnnnnnnnnnnnnnnnnnnnnnnnnnnnnnnnnnttttttttttttttttctttcgtatccaccacaggatcggaaaccaacttgattcgttgctgatgcggcacacacacacgtacagatgagagattagcacaatccaacccacacgggcacacgcgagctcgaagctttcttgcagcttcgctctgcacacaccctttgctttgcttagcctcgccacggccggcggcgaggaagcaaccaaaactggaagtggaaacgggaaagggaacaaaaaggaaggaggttgggtggggagggtggaaattgcagggaggctagactgttcttcgatcctccggacgacatctcgcttgaggaaactgtacactcgctcgcggacgcaaacacgctgcttgctatttacacgcgcgcgccggccggccggatggccggccggcgccggctcgtctcgccgaagaagtgaaggaggctggcacgcacgaaccaaggtgggggtgggattgcccgattgaggaaggggtcgtcactccgccgcaacgaccgccgttggcctcgcgcggaggctcgggctccgcggctgccgcagcatctcgatcagcgactccgccttggttttgagcttggggcgggcggaggatgactgggagagggcaacgaggggagggatggcgccctcgcgggcgaccatggtgcggtagacggcgttgtcctcgcagatctgtagcagggagagcgtggcgatttccttctgccgcgagctgccgacctccaccatctcgacgaggacggggatgccgccttcctccacggcggcggcgcggccctcgcctgagctcaccagggagtggaggacgtaggcggccttgtccaccatgccggactccgggtcggccatgaggtcgagcaggggccgcacggcgccggcctcgacggcgcgctgccggttctcgcgcgcgccgctgcagagcgcgtagagcgccgtggcggcgtccttcttcccgcgcgcgccg

SEQ ID NO: 22461 - DNA, 766 bp, Setaria italica
  Peptide Sequence Number=SeqID_88435
gcatcataacccatctctggaactgactcgaggcgcacatctatatgttggataggtggaccaacagtcccaagcatggggtattcacttggtattgaaactatgcccgcacaagtttccgtcagtcctaaacatcaaaacgtgcacagtattatctgaaagcatcaattggtactatgcaaacatttatctcatcaggtgcttaactactcagtaaagaaactgaaagatccataccatagccttgaataacataagcacatgtcactaccctcaaaaattcttccaccggtacagccaaaggggcaccaccagacacaataactcttaattttccaccaagcctttctttcaccttgctgaaaactaatttatcaaagaatggagccgctttctcatgtttaattcctttcctcatgctgtccagtttcctgatgatatgctaatttctagtaactcataaattgtatcatgcatgtaacaaagtttactgaatgcacttatgcacaggcatgaccaaaggttaaaattaggaaaaaacaataaaaccataaaggatgtgaaaggacataagaagaacaccataagaaatcaagtgtccatccagcaatctttgagtactccttgcggaaagaatagcagtgtcagtattaactattgcgaacttcatcttgtaagcaatgttgaataaagttttcttcagtataccaccagaggaaatcttggctgtaagacctgaataaatcctgtcaagtacacgtggaac

SEQ ID NO: 22462 - DNA, 573 bp, Setaria italica
  Peptide Sequence Number=SeqID_88436
tgtcccgtctactaagttttccgttctagttcctattagcctttgaattaacatatattgatgtcactaccctcaaaaattcttccaccggtacagccaaaggggcaccaccagacacaataactcttaattttccaccaagcctttctttcaccttgctgaaaactaatttatcaaagaatggagccgctttctcatgtttaattcctttcctcatgctgtccagtttcatcttgtaagcaatgttgaataaagttttcttcagtataccaccagaggaaatcttggctgtaagacctgaataaatcctgtcaagtacacgtggaacagcacagaatactgttggttttagtgctgcaatatcatcaaccaatagtttgacatccccacgccaaaatccaattttcgatccatggtaaatgaacacttcttcaaacatcctatcaaagacatgagctagtggcagatatgacaaataacatcatcttgatcgaaaacttcaccaacatactgaattacagaatcagggcccacaacgtttacaagaaggctttcatttgataacataactcc

SEQ ID NO: 22463 - DNA, 1275 bp, Setaria italica
  Peptide Sequence Number=SeqID_88437
agaccccctcggcccacgcagagccagcgtcagtgacacgcagccgcgccgaggaagacgaccgagctaagctaagctcgctagcgagggaggcaatggcggcagccggcggcctcctgctgcgcggcgcggcggcgctcacggtcgccgtcctgatgctgggcattgctggcgccgcgagggcgcagctgcggcagaactactacgccagctcctgccccagcgcggagtccacggtgcgctccgtcatctcgcagcgcctccagcagagcttcgccgtcgggcccggcacgctccgcctcttcttccacgactgcttcgtccggggatgcgacgcgtcggtgatgctgatggcgccgaacggggacgacgagagccatagcggcgcggacgcgacactgtcgccagacgccgtggacgccatcaacaaggccaaggcggccgtggaggcgctccccgggtgcgccggcaaggtgtcgtgcgcggacatcctcgccatggccgcacgtgacgtcgtctccctgctgggcgggccaaactacgccgttgagctcgggcggctggacggcaagtccttcaacagggccatcgtcaagcacgttctccccggcccgggcttcaacctggaccagctcaactccctgttcgcgcagaacgggctcacgcagacggacatgatcgcgctctcaggcgctcacacgatcggcgtgacacactgcgacaagttcatccgccggatctacacgttcaagcagcacctgccgtggaacccgccgatgaacctggagtacctgcggtcgctgcgtcgggtgtgccccatcaactacagcccgacggcgatcgcgatgctggacgcgtccacgcccagggtcttcgacaacgcctacttcaacaacctccgctacaacaagggcctgctcgcctccgaccaggtgctcttcaccgaccgccgctcccgccccaccgtcaacctcttcgccgccaacaacaccgccttccaggaggcgttcgtcgccgccatggccaagctcggcaggatcggcctcaagaccggcagcgacggcgaggtgcgccgcgtctgcaccgccgtcaactagctcgccggccgccgacatctagcctagcgtgtgtgcgtgcgtgcctgagtgttttgacgggcgtgcagtgtgtgtgttgatcattagtagagttattgtagtaggctgtgggttcgtaggttcgtgaaagaacttttttttttgcttgtttatacgtttggtggtgagattttgttag

SEQ ID NO: 22464 - DNA, 275 bp, Setaria italica
  misc_feature (13)..(13): n is a, c, g, or t
  Peptide Sequence Number=SeqID_88438
ggaagctggatangtttgttgtgccaaggagagattggatgtttctgtactactgctccgctgaaacaatccaataatcgataagcacttgtgacgtatcggtgcatttacactagaaccatacacctgtgtcatcgtcggtaacaaatccataccaaactgctgtagaagttcagggtgctcacgcaatagcctctcacggccagacctctcgttttctgttgaacttgaaccagccccatcttgtttgatggaagcagatttctttgttgaag

SEQ ID NO: 22465 - DNA, 565 bp, Setaria italica
  Peptide Sequence Number=SeqID_88439
gggaggaatgaaagagaaaagactatgatccatacaataatgtgtccacacttcatgcttcctgggtttcaaaagccaatgcaagacaacgtgaagggcgtgctggtcgttgtcaggcaggaatttgctatcatctttactcaaggtttagagcatcatcattaccagactaccaaattcctgaaataaaaagaatgcccatcgaggaactttgtttgcaggtcaaactgcttgatccaaactgcagaatagcagactttctgaagaaaacattggaccctccagttccagaaactgtaagaaatgccattactgtacttcaggatcttggtgctttaacacaagatgaacaactaaccgagttaggagaaaagctgggttccctgccggtccatccatccacaaccaagatgctcctgtttgctatattaatgaactgcctggatccagcattgacattggcatgtgcagcggattatagagatccattcctccttccaatggccccagatgagaggaaaagagcagctgcagcgaaagttgagcttgcttcgttgttattggt

SEQ ID NO: 22466 - DNA, 2100 bp, Setaria italica
  misc_feature (2074)..(2100): n is a, c, g, or t
  Peptide Sequence Number=SeqID_88440
ttcgttgtacttgttcccataggtcccattttggaatcaacactgattccgctggtccctctccccggttctcccgcctcggagctccgatcgaggctgcagcgtcagttgcaggaatgggaaatcagtgccaaaatgggacctatgggaacaagtacaacaattacaaccaatttaagaatgagcgtttggcttcaagatacgatgatggggacgatactgaggattgctacccggggtcatctaggtccagtgtcgcggttcttatgcagcgaggattgagacgaacgttaacatccatctccgtccttggtcaaaagactcctaatgtaacagagcattatacccttggccggaggcttggagagggtaaatatgggacaacctatctctgcactgagatcagcactgggtgtcagtatgcatgcaagtccatcttgaagaagaagtttgtcaacatgcaagatattgaggatgtgcgccacgagatccagataatgcactatctttcaggtcaaaagaatatagtcaccatcaaggatgcatatgaggatgaggaggctgtgcacattgtcatggagctctgtgaaggtggtgagctatataaccggattacggaggggaattacagtgagcagaaggctgcagagcttatgagagttattgttgggatcatagagaactgccactcacttggggtgatgcaccgggatctaaagccagaaaacttcctcttacaggataaagatgatgacttgtcgataaaagtaatcgactttggtctctctgtgttcttcaaaccaggtgatgttttcactgaagtagtgggaagcccatattacattgctccagaggtactgcagaagcattatggaccggaggctgacatatggacagctggagtgatactctatgtattgctaagtggtgtgccaccattttgggcagatacacgaagaggagtatatgataaagttcaagatgggcattttgatttagaatcagaacaatggcacaagatatcggacagcgcaaaggatcttataagaaaaatgctctgcccttgtccatcagagcgattaaaagcccatgaagttctaaagcatccctggatatgtgataatggagtggctactgatcaaactgtagatccaactgtttcttgtctccacaagttatctgcaacaaataagttaaagaaattagctctacaggttatgactgagcatcttccagagcaggagatcactagcttaagagaaatgttcaaggcaatcgacaccgaaaacagaggcgtgattactttcggtgaccttaaagaagggttgagaagatgctgctcagtgtttaagcgtgctgggattaatggtttaatggaagcggctgatagcgacacaaccactagtatcaattgggaggagtttattgctgccacagtaacccttagtaacattgaagacaaagaacacttgatgccatcatttacatattttgacaaagatggaagtggttatatcaccgttgacaagcttcaaaagcctcccatggaacgtgacatggaaggccttgaagagataatcttggaggttgatcaaaacaatgatggccagaccaactattctgagtttgtcgcaatgattcaaagcaacagctctggacttgggtggcaaacaatggaaagcagcatgaatgtacccctgagggaggcaccccaagtttactgatgttcctgtcgcgcaaagatgctgttctcttcggctcctcatggggttcctcacaacccttaggcaaggtttgtgaatcagggagaagggaacatagtctaaatagttgatcagtggttgaaggctgtctaatactctgtagtctatagcatactggtagtataggcgtgtgtggtataagaacaaagctgtggtcgtgtgtatcggtgattggtttgttaggcaaggttttggctctaataaaaaaacttagtagtatataagaaatgcatccttctgcttaaacttctgtggtcaaccgagtgatggtttgaccatttaatataattgattgagtttatgaggaaaannnnnnnnnnnnnnnnnnnnnnnnnnn

SEQ ID NO: 22467 - DNA, 254 bp, Setaria italica
  Peptide Sequence Number=SeqID_88441
gcgctggctggggttggggggctggtggacgcgcaaaacgagcacggcgacgtggggagggattatatggggcggatattctattctcctcctatttctgtagctcacccttgtcacatgctgctgctggattcgctcgcggtcatggcgatggagagagggagcggtggagccggtcgagatcgctggagctgttcgtcggcctcggcctggccgcgtttgggtttgggccggccggcaggctctgatggccg

SEQ ID NO: 22468 - DNA, 1057 bp, Setaria italica
  Peptide Sequence Number=SeqID_88442
ctgacggtgaaccgcgaggcattcagcagtaacaagctctgcctcatcatcaatgatgccagggttgagttggagaagagcagggagaagtttgacgtgatagtaggagacctcgcagatccagtggaaggaggcccctgctatcagctgtacaccaagtcattctatgagcacatcgtcaagcccaagcttaatgaccacggcatcttcatcactcaggctggacctgctggtgttcttactcacaaagaggtcttctcatccatctacaacacccttaaacatgtcttcaaatatgttcaagcttacactgctcatgttccatcatttgcagacacctggggctgggtcatggcctcggatcatccattcaatctcaatgcccagaagatcaatgaaagaatcaaagacaggattctgggagagctcgactacctgagtggggagtccctcatttcctctaccacactgaacaaaagtgttcacaagtcgctgttgaacgagacccatgtgtatacagaagacgatgccaggttcatctacgggcatggaagagcacgctgagtttgcctctcacctgttcttcaggtatcagcgtctcaatgtaagcaaaaaatgttgccggctagttgtaaattagctactattggtgcaaaataatagcaaggagattactgctatgtacaatttgcaaagaaatttcgtgcgctgccagaaatcagaaattcagaactattcaaggaatccaaccgacaggtgaaaacttaggggaatggagcacggatagtagtaccatacattacacttcttacaattccccctcttgcaaataagcctataaggctatgtgtaattggaattttggttttgttcttcgtgttgcacaatttgctgtcttatttcacgaagtgccgaagttatggtggcaaacgaaggccggcttgaaggttctgcatcccaggttcggcagatgagatcaatcaggccagtaggatatgcatcactgtctgggagttttggtcttaattttccgtctgctactcctagcgcaatctgc

SEQ ID NO: 22469 - DNA, 434 bp, Setaria italica
  Peptide Sequence Number=SeqID_88443
gtccgtgaacggcggccgcgcgcggagcggggaggagacgctggccgtgggcagctacaacgcgctgctggacagcccgctcctggcgagtgcgggcgcgtacgacgccgcggccgagacgttcgcgtcctcgcacgacctgttccgcgccgcgttcccgcgcgggttcgcgtgggaggtgcttggcgtctactccggcccgcccgtgatcgccttcaagttccggcactgggggcacatggaggggccctacaagggccacgccgccaccggcgagaaggtcgagttccgcggcgtcgccgtcctcaaggtggacgagcagctgcgggcggaggacgtggaggtgtactacgacccgggcgagcttttgggtgggctcctcaagggccccaaggtggcttcctccgaggaggaacgcggcgaggtggtgctcg

SEQ ID NO: 22470 - DNA, 435 bp, Setaria italica
  Peptide Sequence Number=SeqID_88444
taaactaaattacttaggaagaaagacaagaatagttttctcaaatcatgactgcaaagtcttcttctcacaagaaggtggtcgaagggcaccatgtacagggttacagtgaatcattgggcaatatcatactgaaaagaatttttctgtttgttgctgcactagacagagccaaaatagaaagtgccctacctcttgaagctggaatcgatggccttgacggtggatcccctcttttattttatcaccaaggccaagtaaaatctagtcggcaaatcatccaggactctttgggggaggccatgcatggagaaggtgaccttctgatgcacctcacaactatgggatataagctaaattatcaacagactgctctgtcagaatatgatttcactataaggagtctatttgaagatctccaagatggcataattc

SEQ ID NO: 22471 - DNA, 789 bp, Setaria italica
  misc_feature (731)..(789): n is a, c, g, or t
  Peptide Sequence Number=SeqID_88445
gaaagcacccggccggggagccccagcgctgggagaagatcgccgcggtgttcggcggccgccgcacgccggagagcgtcatccacgtggcgaagtcgggcgccgcggcggcgggcgggggctcgttcgagcagttcctgcgcaagcggaagccgctcgacccgagggccgacggtcccgatgccggtgacaatgctggcggtggtggagagagtgctgatggcgcttggagcgccggggatgaccgggccctgctgaacgcgctcaaggagttcccccaagggacactgcaatgaggtgggagaaggtggcggctgctgtgcccgggaagacgaaggctgcgtgcatgaagagggtcactgagctcaagcgagacttccggagcaacaaggcggcatcagaggcagcatcataggacaatgcccttgcctgacaattttgggagggtgtcaggtactcaggctgaatgagatgcattggctagcgaggacaaagttacatggctagctccactgaatcatggagatgccagaagaataacggagagtgacataattctagtacagaccatgtaatttttccaattgtaactagaatcagggaaacccttgagacagatgagagttactaggctactactggacaatggtaacaaaccgatggacaggcaaacaaaacaggccactgcatgatttattctatttcctttttgggaaatttgttgcaggacnnnnnnnnnnnnnnnnnnnnnnnnnnnnnnnnnnnnnnnnnnnnnnnnnnnnnnnnnnn

SEQ ID NO: 22472 - DNA, 254 bp, Setaria italica
  Peptide Sequence Number=SeqID_88446
ataaaaactttgaactctgatggcagaaagaagtattcaaatgctgcacagaaggtcccagcaaatcaaaggtattcaaatggagttccacaacttgataaaagggacacagtgccagccaaaagggccatatttcctgccaagtcaaagtttccagagaagacctcgctggagaaatctattactgtggacaaagtcacagcagttaatcaatcatggcataagaggccggcttcatctcccagtaaactcaa

SEQ ID NO: 22473 - DNA, 692 bp, Setaria italica
  Peptide Sequence Number=SeqID_88447
cctctcgggcaccaccaccgccagcaatgcctcctcctcaccatcacccaacgccaccaccagcatcagcagcagcaagcggaatactacaaacaagatccccaccaacctcagggagcttctcgccaccggcctgctcgaaggccagcccgtcaagtatatcatgaggaaaggcaagcgggcagtactccggggagttatcaaacgtgccggcatattgtgcgcttgctcttcatgcaaaggccgaaaagttgtttcaccttactattttgaggtgcatgctgggagtaccaaaaagcacccatccgactacattttcctggaaaatggaaataaccttcatgatgtattgagggcatgcacaaatgctaccttagacatggtggagtctgcaatacagaaggcgataggcccagcacctcacaagagaacattcagatgccaaacctgcaaaagttcgttcagcacactacgcagtgggaaatttgctttgttttgtgattcatgtctggagtccaagggagctaagaatagtaccaggtcttcaaaagttgcacgaggtcggacttcatctgccaagggatataaaagtgcatccccaggagcaaagtctgcgagtgtaggaaggcttacaagaaaggataaggggttgcataaggtggttttcatgaagtggtgttttaccagagggc

SEQ ID NO: 22474 - DNA, 447 bp, Setaria italica
  Peptide Sequence Number=SeqID_88448
tgagcgaggatgacagcaagatgaagagacagatatctgacttgaaatccaaggagctcagcggccacgacatcttcgctcctcctgaggacccgcggccacgcaactcggagaacggctcgacctcacagacaccgggcaaaacgcttatgtcctgatctctcaactcatttcgttcttaattgagccacacacacacaaaaaaagttgtgttgcttactgtttgttgtcgttcacacaacaggtaagcaacttcaagtttggtgaagccgacgaagacagcgtggtgaagacggcgaagaagatccccacgaagaaattcagcgacctgaccggcaacggcatcttcaagggtgacgaggcccccgggatggcggagaagcacctgagcgcttcgaagctgaaggagatgaccggcagcgacatcttcgcggacgggaaggcccc

SEQ ID NO: 22475 - DNA, 1283 bp, Setaria italica
  Peptide Sequence Number=SeqID_88449
cacctcacctcgccctcgcctttttagagagagagagcccccagcgagctagagagagaaacgcagcggcacctcccctccgtttcgtccccggcaggagtgtgtgtgagagggctgtgcgaagtgaggagggcggacatggagaggccggcgccggtgaggaagtcccacacgtcgacggcggacctgctgatctggccggagggggcgccgcaggagccgctcgccggggccacgccgccgtccaaccgccggccgcaccagccgtcggaggcggtcaggaaagtggtgttcggcgggcaggtgacggaggaggaggccgagagcctcaacaagaggaaaccatgctctgctcctaagtggaaggagatgacaggaagtggcatatttgcagctggaggcgaggttgaagaggatgaatctgccaatgcctctgctactcccatccgaacggctccaaagaactaccaggcaattagtactataagccacatctcatttgccgaggaagaaagcgtttctccaaagaagccgacttccatagctgaggttgcaaagcagcgcgagctaagtggcacgcttctgagcgaggatgacagcaagatgaagagacagatatctgacttgaaatccaaggagctcagcggccacgacatcttcgctcctcctgaggacccgcggccacgcaactcggagaacggctcgacctcacagacaccgggcaaaaacgcttatgtaagcaacttcaagtttggtgaagccgacgaagacagcgtggtgaagacggcgaagaagatccccacgaagaaattcagcgacctgaccggcaacggcatcttcaagggtgacgaggcccccgggatggcggagaagcacctgagcgcttcgaagctgaaggagatgaccggcagcgacatcttcgcggacgggaaggccccttcccgggactacctgggcgggatccgcaagcctcccggcggcgagagcagcatcgcgctggtttaacaaaagcagcagcagcttcaacaacaacctgatggacatagcagcccctacaccattcatttcctcatcgccgtcgccgtcctctaggagtgatcttttaggagttcctttttcctttccccccaaggactgatcgattggaaccgccggtttgctttcctgtttcccgcgacttcgcgccaggttttccctcgtgatcgttgttaatcccccctctgatggtggtggtggtgtgtgggtgcgacagcaacgatggttatctctctaatttaacaaaa

SEQ ID NO: 22476 - DNA, 411 bp, Setaria italica
  Peptide Sequence Number=SeqID_88450
ttttacagtatagtgagcatcgttatcgttaccttggcagcagattcttcttgcatgggctgtcatgccaggacttggatggaggtggttgcttgcattgtcctcggcaccatgctttgtccttctcattttctttcctctaacacctgaatcgccaaggtatctttgctcaagaggtagaacaatggatgctacagtcatcttggaaagaatagcaagaatgaaccgagggactctccctcctggaatactaatttacaccccagaaaagcatgttgacaacaatcttggtacttctgagacagcacttctgattgcagaagataatgctggaactgaagacgacacaagttccaagaccaaagtcattgttgcataagatacgctctggtctaacaaaggaaaacaaaa

SEQ ID NO: 22477 - DNA, 651 bp, Setaria italica
  misc_feature (649)..(649): n is a, c, g, or t
  Peptide Sequence Number=SeqID_88451
gggcacccgtcggctgagagcagcagtaccttgtcgaacatgtggtacagccgcgacgacggctggtggatggtgaccacgacggtgcggcccccgccggccgccatccgccggagcgtgccgacgatccgggcggcggtggtggagtcgagccccgaggttggctcgtcgaggagaagcaggctggggtcgatgagcatctcgagcccgatgctgacgcgcttgcgctcgccgccggacagcccgcgcacgccgcggacgccgccgaccatgctgtgcgcgaccttggcaagccccagctcacgcgccacggcctccgcctgcgagcgcttctcgccggcgctcagcgcgcggggcagccggagcagcgccgtgtaccacagcgtctccgccaccgtcaggtgagggtacagcacgtcgtgctgcgtcacgaacccggtgcgccgcttgacggcgccggagaagggcagcccgttgtaggtgatcttgccggagagcagcgcccggccgccgtgccgcccgcccagcgccgtcagaagcgtcgtcttgccgctcccggacgggcccagcatcgccagcatctcccccggccgcaccacgccggacatcccgctgatgatcgtcttctcccgcgccgacgacccggtgngg

SEQ ID NO: 22478 - DNA, 521 bp, Setaria italica
  Peptide Sequence Number=SeqID_88452
caaagttgtatggagtcggtgattcccgattaacttcgcttggcccttcggtctgatagatctgagaacaattaatatcatgttatatatgcggttaggtggttactcgatagtattcttgttcagacatcagctaccttcttatataactcggcactttcttgacgaatctgattgatcttattgtacaagtccatgttttcttggtgaaatagacttgcctgcaatcaatacgatgctaaagtcagtgttactaaatcaaataaacaccacaaagaactataaagtcataattctgcagtaccttccgattcaattcgtgaatttcatcgatcaagagatggtcctgttaagagcagcaacagtagtaatgactaactatctttagtgatgactcttgtaggaacaaactgatcatagagatgtgattagcatccagaccttctttgagcgaaccccacgcaggcttgtttccaactgattctctagggactgcagttccttaacattaagcccagaaa

SEQ ID NO: 22479 - DNA, 348 bp, Setaria italica
  Peptide Sequence Number=SeqID_88453
cgcttggcccttcggtctgatagatcttcttatataactcggcactttcttgacgaatctgattgatcttattgtacaagtccatgttttcttggtgaaatagacttgccttccgattcaattcgtgaatttcatcgatcaagagatggtccttctttgagcgaaccccacgcaggcttgtttccaactgattctctagggactgcagttccttaacattaagcccagaaagatcctctcccgtcaactgcctatgattttcttgcaagttgtgcagttgttgtctcaagcttgctgcctccctttgccaaaacttaagctccgagttgggatttgcggcgacctgct

SEQ ID NO: 22480 - DNA, 251 bp, Setaria italica
  Peptide Sequence Number=SeqID_88454
ccacctccgcggggccgaccccgcacgccgccgcgcagacctgccagagcgggaagtcgaacgcctccgcctccacggcgtcggcgcgggagaacacgaacggcgccgcggtcgccatgtcgtagcacgggatcagcagcggcttcgcggcgtcgcgcaccgtcaggtccccgaacaccttcctgaacaccgcctccgggcgccggaacagcagcccgccccgcccgccgcggccggagagcaccttccgg

SEQ ID NO: 22481 - DNA, 832 bp, Setaria italica
  Peptide Sequence Number=SeqID_88455
aggacttagacgacttagtagacgggttacgttcggtcggttgtttgggcggaactcccgatgcgcgcgttggggtcgatggtgtcctgcaccaccttggccagctccagcatggtgaactcgccggggttccccaggttgaaggggcccacgtgctcgccctccatcagcttcatcaggccctcaacctgcatataagtggtaattggtaattgcatctctcagtagttgatctgggttacgcccacggtaactaattgtaaagccaggaactgctgatgtggagtgaataattgtcaggatcactggatcacaacacgagaaggtatagtaaaaacagcagtgccgatgaggcgatgcaaaggaggatcgaggacatggacatgttggtatggccctgcgttgagttaagcgatcgatcggacgtgaacagtgccgcacagaacagggactattcacagctccatctttcgtgggaggaggctgccatgtcggtagcaagcaaagcaaccaccaaacagtctggaaagcaagtgaggtagcagcagaagtagcagtagcacctaaccaacctgcctgtactgcgcggtccaaaccgtatccaattctgtgcaacaacaagtactatgtacgtgcattgcatgtacgtatcttgtgctcactgggtcagtaagtacttgcatcgaattaggcatcgcatacactccgtatagggtaaggcagctttgtagttgtagctcgctttgcgttgaagcagcaggcggcagcaacacgatggaccaggctgctagtgggagtaggatgctggagttgtgtacgggcatcagcattt

SEQ ID NO: 22482 - DNA, 1623 bp, Setaria italica
  Peptide Sequence Number=SeqID_88456
ttttttttttttgtcaggacaaaagagtgaacaggtgtattttggcatccacatacaggtattgttattgcagaattgtcgtcatggtcagagacacagaacaagggctaagaagatctcaagatacatttcttccaagaaatacaaagaagaacacatggaaaataaaagaaagaatgaactcgtggctaccaataagagggactaacaaagaagaacaaattaataacacgaaggtcggtggcatagtcgtcgtgagctggggcctcgacctcctgctgctggcaatggctcatcatcagttttcttctcttgcagcagcagaccagcagctacacgtatcctctaattaactatcctacacacatgtatcgatcgattcgatccttggttgattgattcagttcgatcatggattaccagtatctttccttcccggccttcaactggatctttccctagctacaggtaccactgaaaaagaaaacaatgatccggtcggtgtggatcatatatcagttgtcgccggcattggcgttggcatccttctgctgctggtcgccgaagatgcggttacggaagtcctggaccatgaggggcaggcccttggtgagcgggatcttgggctcccatcccagcaggtccttggcgcgggtgatatcgggcttgcgcttgtgcgggtcgtcggcggtgtttgggcggaactcgatgcgcgcgttggggtcgatggtgtcctgcaccaccttggccagctccagcatggtgaactcgccggggttccccaggttgaaggggcccacgtgctcgccctccatcagcttcatcaggccctcaaccagatcggagacgtactggaagctcctcgtctgcttgccgtcgccgtacaccgtcaggggctccttcctcagcgcctgagcgacgaagttgctgacgacgcggccgtcgtcgatgcacatgcgcggcccgtaggtgttgaagatccgagcaatccgaacctcgaggttggcgccgcggtggtagtccatggtcagcgtctccgccgtccgcttcccctcgtcgtagcagctccgaacaccgattgggttgacgttcccccagtatgtctcgacctgggggtgctgcagcgggtcgccgtagacctcgctggtgctggtgaggaggaatcgcgcgccgacgcgcttggcgaggcccagcatgttgagcgtgcccaccacgttggtcttgatggtcttgacggggttgtgcttgtagtgcacgggcgacgccgggcacgcaaggtggtagatctggtccacctccaggaggatcggctccaccacgtcgtgccggatcatctcgaaccgggggttcccggcgtggtggagcacgttctccttgcgccccgtgaacaagttgtccaccacgatcacactgtcgccgcgcgccaggaggcggtccaccaggtggctccccacgaaccccgcgccgccggtcaccaccacgcggaggcccttgcgcttcaggcccagcgggacgcgaccgggccggacgccgccgcggggctcctcgaacaacgccaccctgctgctgtactgccgcgacgccagccccaccgccgcgaggtgagccacgctgctgctggtt

SEQ ID NO: 22483 - DNA, 563 bp, Setaria italica
  Peptide Sequence Number=SeqID_88457
gaccacgagaacctcgtcccgctccgtggtttctgcatccgcggcgcgctccgcctcctgctctacccgtacatggcgaacggcagcctccacgactggctccacgaccgtcccggcggcggcgagcagctccggtggtgcgaccggctccggatcgcgcgcggagctagccgcggcgtgctccacatccacgagcactgcacgccgcggatcgtgcaccgggacatcaagtccagcaacatcctcctggacgcggaccacgaggcccgcgtggcggactttgggctcgccaggctcatcctccccggcgccacccacgtgacgacggagttggtggggacgccggggtacatcccgccggagtacgggcaggagtgggtggcgacgcggcggggggacgtgtacagcttcggcgtcgtgcttctggagctgctcacggggaggcggccggtggagttgctgccggcgcggcggcagcggtgggagctcgtcgggtgggtggcgcagatgagggcgatgggggaggcgggaggaggtgctggaccacaggctggagggggaac

SEQ ID NO: 22484 - DNA, 246 bp, Setaria italica
  Peptide Sequence Number=SeqID_88458
tttttttttacgtagtattccagtaaaacaacatcacgtatatatatacgtgatccggtgtcgccgcacgacgcgagcacaacaatgcaagcaatccccccatcaggcatcatccggccacacggaacttatcatatcagctggtggctgaaagctaggatggtcgccacgaatgctcggcgagacgacggtacacacaacagtaaaacacatcacgtatatatacacttgatccgtcatctctaa

SEQ ID NO: 22485 - DNA, 266 bp, Setaria italica
  Peptide Sequence Number=SeqID_88459
acaagttctttccccttgtaaactggtatttaatttggtaaggatatacgtcttgtgacaataatgtggtcggattccacagttacagcaagtttactaaacaacagccattatggatacaaaacaattgcatatattagttagtgcaataataaactgttactacgaccaataccggagaaatctagataatttgcttagcatgcgcatctgaataagttttctatttaatttaactagattagcaataggaacaactattatta

SEQ ID NO: 22486 - DNA, 967 bp, Setaria italica
  Peptide Sequence Number=SeqID_88460
ctgtaaagaagccaatcctctctgcagcctgctgctccaagtaaaactcaacaaatacaagacagtaacatcttgtagtgaaaacattatacggattcaaaatttcagaaggaaaggtagcaaggattcacagagacggcagcagcgtttacaagcccagacttgtgactctggaggtgctgtcactttgtctgctcctgcacaccgtgcccctttcccctgtggctgcacgcgcatctcttttcccctgtgtgccttgtgacctcgcgtacgatcgacgttctcatggaccactgggcaaacgggtgctcaccttgaagctgatgttcttagcggtgaaatagttagagaggatggttacggaggcggtgttgtaggtgcggagcggctgcccgtcggggccggggtcgctggcccggtcgtgccactgcaccaccgtcacgtcgcgcccggcgccgtggaacgtgatgtacggcttcgacgccggcaccagcaccttctctatgtaggtgccggcgttgatctgcatgatgacgcgcacattgttgttcaccggcacggagtcgacggcctgctggatggaggtgaagtcgccggcgccgcccgcgtccacgacgaccttccgcacgcccaccgggtgcttgtacccgtggccggagggcctcgggtactcgcacttggtcgccgcctggcacgccgacggcggcaggatgcccgcgagcgtggctaacaataccagcaagaggacgacgcgagccatgctgctgcctcgctcgagagactaagacgacgacctaaacgctagctgattcgtgttggcaatgcccgtgcgagagtgacaaggtactttggtgtgtgcgtgtgtgtctgcgcttagcttgtgtcttgtgactctctctagctagcttgctctcacggtctcaccctctatatctctctcttcacatgcacaacatatggtgagagc

SEQ ID NO: 22487 - DNA, 240 bp, Setaria italica
  Peptide Sequence Number=SeqID_88461
gggtgctatatattgacagtttaaatctatttagcttcgatgggtcaagctaaattatatcatagatgtggtatctgatacaagaaatgatatatggtattgcacgtgaagaagtaacaaggatggaagatttgatcataaattttatatttatgcacactagactagctaattgagatgtgacacatggatttttgggccaagggggtgctctgcagcacccccagcacggggtgcaga

SEQ ID NO: 22488 - DNA, 192 bp, Setaria italica
  Peptide Sequence Number=SeqID_88462
acggacggcaaggggagattccgcatggcggtgaacacgacggtggcgccgtcgagcgtcgcaagctactgcgacctcgttgtggacacaccgctggcctcctgcaacccggcgctcccggcgacagggatgctccagtccgacctccggctcctcgtcagcatggtcttcttccgcgggcttctcctacgt

SEQ ID NO: 22489 - DNA, 394 bp, Setaria italica
  Peptide Sequence Number=SeqID_88463
cgtaaagtataattattgattaattatatatactagctactgtaaaaaccatgcattttgcctgtggatcggatatattggagtgtggacgagacgacagtagcagctgatctacatcagttaatggtgctggctctgctccatgatcttgtgcaccttggctcgcacctcttggtctctccgcgccatgtcgctgagctcttgggcggtgaatggcggcggcagggtgcagggctcgtagccggcgacgtacctctccctggactccatcatgaactccctctcgcggccctgcgcggggcaggcgatggcctccgggcagagctccaccgccttctccggcacggtgggcttgtagcgcagcaggctggcgtactcgactagtgcgactgag

SEQ ID NO: 22490 - DNA, 546 bp, Setaria italica
  Peptide Sequence Number=SeqID_88464
ctcaccggaagcatccccaaccgagctctgcgacatcgacgggctcgacattgctcttaatctgagccggaacggcctcaccgggctgatcccggagaaaatatcggtgctgagcaagctctctgtgctcgacctctcgcacaacgcgcttgacggcagcctcgcgccgctcgctgggctggacaacctcgtcacgctcaacgtgtccaacaacaacttctccgggtacctccccgacacgaaactgttccgacagctctcggcgtcgtgcctcaccggcaacgctgggctctgcaccaggggcggggacgtgtgcttcgtgagcattgatgccaacgggcacccggtgatgaacaccgccgaggaggcgcagcgcgtgcaccgcctcaagctggccatcgcgctactggtgacggcgacggtggcgatggtcctcggcatgatcggcatactgcgcgcgcggcgcatgggcttcggagggaagagtggcggcggcggtggtggcggcggcgactcggagagcggcggagacctgtcgtggccgtg

SEQ ID NO: 22491 - DNA, 378 bp, Setaria italica
  Peptide Sequence Number=SeqID_88465
ttttttttataaatgacaagatgttaccgcaaacaataacatatctatacagcttatactagtacaattggaaatgtctataatattacccatagccttaaaaaattgctctaagaaaaacttgttcaagatcacgaaataggtggaaagtttggtttgatgccgctacggttgttgaatactaattataagcttcatttggtgctactagctacattgtaattgatgttgatcttggttgtgatcaggaggccagtacaggtgataaggccgttgcacctccttggactgagttgatgctcccgcttctgtgcttgctgattggcagtcattatcagttcttccatttcagcagattctgcagccaactttctgctg

SEQ ID NO: 22492 - DNA, 1838 bp, Setaria italica
  misc_feature (10)..(10): n is a, c, g, or t
  Peptide Sequence Number=SeqID_88466
tttttttttnttttttttttttctcacagcaaatgaaacctcgtcacctttcaaagaaatcatcagaattcagttaacagagcatcaacaatatacaaaagtacccaagagaataatgacgtgtctaacatccatcgaactctcgatttaccagcaagttaaataacatattagttgaaaggaagctacggcagggccacttcaccagcatcatatgatatcaactattcatcatttcccatctgcttgcaaagcttggcactccaggagacatctgtaactaccaccgttactgactagtgactactgatggtaatcaccaggacatcacaggtccacttggccaaaaaaaccattacatgaaggatgtgtcattatatcccccttccatctaaatatcagcgcaacagggatacgaatactgtctgtcactatcctctggttagcaatcaactagtagggagctgggaaactcacgggccagcagggagcaagtaaaccccacccaggtacctcacaaagtaagcagaattagatcgtgatccctaatttctgtcgtgattatcgtactagtaccaatcgaaaacatccccaagatcaccatcgtcatcgtttccagaagcatgctcttcttcttgcacatcaggcttttgtacactgtgctcttcatccaaccaattcgaatcatcttcctccccatggatgaaatcatccagtacattctcttttccagggcctcgttcacttgatgcgccatcttgtttacgggtattgttaatctcttgctgtgcaacatcttcaatgttgagattcttaattaccgttttgaaatacagattatctcctgagcgatgaattatagcatcatggactagcaacggaatttttttctcctcagttttaaattttgcccgcacctggtgacgagtcttatcagggagtaattgctgtatcattgcaaaatcactaccaaattgtcgaagacccttgtaaaacatgtcagtatcagattttgaccatttgcctcgagtttgtttgttcatgtaggaatggtagttcaattttgttacattttgtgctgggttctgtgttctatcattgtcgaagtttctttcctcatctctatagtccaaatcgtccatatcatcaaattgaaagctgcttgaattagaggatggctcaggtggattctcttttccattaacacgctctctggcctcttgtaacaacctgagatgtgctgcacttagcttcatgggatctatctcctcacgaggtttttccagtaaagtcttaacctctttcgctctgctctgacgaattctgtgggtaagcttcttctcaggtttttctgccgacgcatctttcaaagttctcttgcggccccgtgaagatacctggcttttatccttttggaccttttgctgcagtgactcttctacactatcccttggctttttcctaaccttccgtgtagtaccagcagtgtaatcatcaccactatcattatcttcttcagctaatgaaggttcaacaaagtcttcatcaaaatagtcatccgtatccttatgtgtcccaactttctgtgactttttcctgctacgtagtttcatagatgacccgatttctccaacacccgattttggttgttgttcaacaggaggatctaatggttccccctcattatgttcctgatcattagaattcttttgaactgtctgctgcgacaagttacttaaattttcatcaatcaatttgtcatttataggaatcgctgacgttatccatctcagaattggtaactgtaggagtaacgaccccagaagcatctggcatcg

SEQ ID NO: 22493 - DNA, 420 bp, Setaria italica
  misc_feature (1)..(41): n is a, c, g, or t
  Peptide Sequence Number=SeqID_88467
nnnnnnnnnnnnnnnnnnnnnnnnnnnnnnnnnnnnnnnnnttttttttgtaggatggaaatatccgttgccacgataggatgaaaatatccaaagttacacacaggtcatgtgttttcagcacctggctttatcgaattagaatagaattgcccagtgagagaccaaataaaccactggctttatcgccgttaacactggaacagggttgggaatcgtccactgggaatacagacggtactacccatgacgcggccagactgaaccatacacatccttctttgtgtacctccgatcccatgaccaagggacgtcttctgtgccgtaaggttgtggagggagttgatacggcacaggcaatctgacggtcttcgtagacggttccttttcttcgtcgcctttccagcagagcgtgaccag

SEQ ID NO: 22494 - DNA, 456 bp, Setaria italica
  Peptide Sequence Number=SeqID_88468
tgtccaagtaccacttcgacctgagcggcacggcgttcggcgccatggccaagacggggctcaacgacaagctccggcacgccggcattctcgagatccagttccggagggtgccctgcaactacaagggcctgaacgtcaacttccgcgtccaggtgggctccaaccccaactacttcgccgtgctggtgcagtacgccggcaaggacggcgccgtggtgcaggtggacctcatggagaccgacagcaccacgggcaagccgacgggggtgtggacgccgatgcgcgtgtcgtggggcgccgtctggaggctggacaccgaccgccccacgcaggcgcccttctcgctgcgcatccgcagcgactccggcaagacgctggtggccagcaacgtcatcccggcagactggaagcccatgaccgactacccctccaacgtgcagttcccttaaaacg

SEQ ID NO: 22495 - DNA, 649 bp, Setaria italica
  Peptide Sequence Number=SeqID_88469
gtcgtaatgaactccgatgtgcgttgggtaaccttccacagtggttaccgacttcggctacttgctcaagctgctacgcacaaacctgcctgacacgatgtcgggattcttcgatctcatcaagatctacttccctgttatctatgatatcaaacacctgatgaggttctgcaatagcctccatggtgggctgaacaagcttgctgagctgctcgacgttgcgcgggttgggatctgccaccaggcagggtccgactcgcttctgaccgcgctttccttcaagaagctcaaggaggcatacttcaacgggctaaccgagaaatatgccggtgtgttgtatgggcttggctttgagggtggggagaccacctctgctcactgagtaatggatagttaaataaaagatgaactatttatgagaatggagaaatctgtttggtgactttgtctgatgatttccctttgcttgccctggaataggtatggcttttcacttgattgttattacccctgcaagttaccttcagctaggctgctaaggtggtttgtgctgtatgatttagctttggtggtttgatggaatgtgttgttgactgctctttgaggtgtataataccacattaatcaccaattcaccaactgaaaaact

SEQ ID NO: 22496 - DNA, 1086 bp, Setaria italica
  Peptide Sequence Number=SeqID_88470
caccatccccacccccaccccccatccaccccgcccatgggagcccccaccgctcgccgctgacccgtgggctccaccgccccctcctccgccctcccgctcccgctcccggccccgccccgcccccgctccaccacgcgaaccctagctgctgttgccggaagagctccggcgaccgaagaggagaggggaataaagctcgaatcttggatgcgcccgagccgatggcgacgcccgccgcagagaagcccgacgatgtggagatccgcgaggtctgggcggacaacctcgaggccgagttcgccgtgatccgcgacatcgtggacgactacccctacgtcgccatggacacggagttccccggcgtggtgtgccgcccgctcggcacctacaagtccgcggccgagttcaactacgccacgctcaaggccaacgtcgacatgcttaagcttatccagcttgggctcaccttctccgacgagcatggagggctgccggcgctcggcccaggcggccgaccctgcgtctggcagttcaacttccgagggttcgacccgcggaccgacgtcgccgccgcggactccatcgatctgctccgacgcagtgggatcgacttcgcccgccacggtgcggatggggccgacgctcgccgcttcgctgagctgctcatgtcctccggcgtcgtaatgaactccgatgtgcgttgggtaaccttccacagtggttacgacttcggctacttgctcaagctgcttaccggcacaaacctgcctgacacgatgtcgggattcttcgatctcatcaagatctacttccctgttatctatgatatcaaacacctgatgaggttctgcaatagcctccatggtgggctgaacaagcttgctgagctgctcgacgttgcgcgggttgggatctgccaccaggcagggtccgactcgcttctgaccgcgctttccttcaagaagctcaaggaggcatacttcaacgggctaaccgagaaatatgccggtgtgttgtatgggcttggtgtcttgtagtcttgtctttcgttacgtttttgttcgtttcgggtttttgggttta

SEQ ID NO: 22497 - DNA, 417 bp, Setaria italica
  Peptide Sequence Number=SeqID_88471
cgcgcccacgcagagatgggagacgttcgacctgctgtcctcggctccgtccacgtcctcggccgccgtgaccaccaccatggcagccgcgaccaccacctcgccggcggccgcgacggcctccccgatcccgcggttcgactgggagctcttctgaggggggatgggaaagcctccgtgcgtcccggttggtcgatcagacggtacatccctttgtccatggatcctctctgctccgatcattagcgccattgtttctcctgtcgattctttccatttctttctcctattcctcttcttttcttcttccatttcctttcgatttgtatatctatatctacaaaccaacagaggccgacgccggtgagtgtgttcagtgagccaagtccgtcagtccaaacaaaaaaaaaaaaaaaa

SEQ ID NO: 22498 - DNA, 548 bp, Setaria italica
  Peptide Sequence Number=SeqID_88472
ccttcttgctagggattgacttggctatcagctgctccagcgccggcctcgagtcctatgacggtggcctcgctagtctgcgggagaaggttcttgatctgtgcggctcgccaaggaggtccagattgacggtagcccgtgagcagctccattcttgcctggttcatcggtgagtgttcctaatacacagagattttttaatttagatttgctgtcaccaagtgtttgttttggagtcaggacaattggacaaatccacagctaaatttctaattgatctgagtcgggaagcaattaaaaaaataagtttcctatcaaatttggcaagtgcccctatcctataatgtgttaaagagaagagcctcattcttcgtagactgaaaagcatcaattctattgtagttgcataatcatcagtattaggctgttaacaggctcacttctttcgttgactgtgcagccatatttcttcaattctttcagtcaagttggcaagtatgacatgccacacttgttttacacatgatggaatgcaaactgaaacattc

SEQ ID NO: 22499 - DNA, 968 bp, Setaria italica
  Peptide Sequence Number=SeqID_88473
ttgaagccaatggattttttatgatttttcatctgcttgcaattggctgtgtctcttgctctcaatgaaccggtgctggacaaaaaatgatttctcacctgttactggattgattattgcggttaggtcagattgtcgttgtttgtgttttagaatccatatctactgcagtagtgcactgacatggtgtttcagttccatttctgaatctttttgtaatatttcaatcatctctgaaaatttcagtcagcaatgttactaggtcagtatataatgtgctgcagtatgttatttctcatttaagtttagaatgctgtagtttgttctttctcagatttatgtcagttcttagttcttttgaacaatatgctatgtgtacctgaaaattggagtttgctgcatctgtgcatctaaaaaaataaagagaaatgtgaatgtgtgattgagtagcatgccatgaggaaagtagagaatctgtgagccctgtgtgtgcttggcgtagtgtaaacaaatttagttgcttgtagttaactacaagtgttcttatctggttttgcagtcaacccaatacttagttttgggtatttttgcttttgcctctctgattaacttttggaggttggtgtcctttatcgaatatgatttctccttgttcttgagcatctgtactggttatagtctgatgaactaatctgtatagtctgatgaactaatcatgtagctaggatcagcttctgcagctagaaaggtacctgtcaaaaagcatgcccaggcttgataataattgtattcttatttcgttcttaatgctaaaaaactgcagcttcccagttaacgctggcttagtcatggttgtgaacttgtgataatgatttcattcttaatgctatcaaggaggggagaattctcggctttttcgctctatggagaaaacaccattctcagcttcgagctccagaagtgacaca

SEQ ID NO: 22500 - DNA, 337 bp, Setaria italica
  Peptide Sequence Number=SeqID_88474
ccctccaccatctcctcctccacatcatcctgttccccttctcctcatcccctttcccttcttgctagggattgacttggctattagctgctccagcgccggcctcgagtcctatgacggtggcctcgctagtctgcgggagaaggttcttgatctgtgcggctcgccaaggaggtccagattaacggtagcccgtgagcagctccgttcttgcctggtccatcggaggggagaattctcggcttttcgctctatggagaaaacaaccattctcagcttcgagctccagaagtgacacatcctggttaccaaggttcttttgtcaagatggatgggg

SEQ ID NO: 22501 - DNA, 380 bp, Setaria italica
  Peptide Sequence Number=SeqID_88475
gggcaacttatcttgagtatcgacagattcatgtatacttttatctgttcccagatcatttgacaaagattctgatcctggttgatgcacagttgagatgatcctatcagtgaagtcactagtctcacgtgtgtgtatctcaacaacctcttccttcacactagtggtttgtaaacactgatcagtttcatctgctgaactgtttgttcctccacgaggactacaagaattgcagttagagtcggtctctttcccatgatccaagctatgttctggcaatagagtctttgaggtttccatctgattactgctgctagcttctgccaacttgctcttggaagattcatcattagaaccatgagatttcgaactacgtggag

SEQ ID NO: 22502 - DNA, 974 bp, Setaria italica
  Peptide Sequence Number=SeqID_88476
tagcaaaccagcagctggggcgatgggagctcctcttgagtatgatcctgacacctctgagctggctcctgacattacagaatatacaataaagctcaagcagtcacatgaacgtgctcgaaagcttcgggcagatttggcagttgaagagcagcgggaacaagaactgagtagaatgctgaagggcatagtaacagctccaaattttactgagacccataaaaaacggccaagaagaaagagtagcatagaaagactgaaagtgtcaaggcatttagctgaagaggcactgaattatttcgaggaatgtgtttcaatttcaacaatggatagcactgatttctcgtcacctgaggaccatcaaccaaattcagttttaaatgtccaaccaaagagcaatagtagatttttccacaaagggagatcgagctctcaagaaccccacactccagctgatcaacatggccatcatgaggaatttgacaagcaaactcagtgctcaattagcataactggatctgatgtatctgatggtgttaactttagtaacacaaaatgccacatgaaatttagaaacaactccagtgaagatcttgatggccttgacactccacggagcagaagttcttgtttctctttcacccatgagtcagtaaaaaatgttgaaaactgtgatgttccgcaataccttgggaattttggaatgggaaacaataaagagctaagagagacaaggtctagttattttgctgatgactatgtctcccagaaagttaacccggacttactgaaggatatggcgacctttcagaatcgaatgcaatatggagggtttcttatatgtaacattagaacattctgacagtgaacagagtaaatagtgcccactggccaatgaagttaagtaattatcattgtaacttgtaaagtgattagcattgtgcaattatttgtgttgtgtgtgtagttgtcaa

SEQ ID NO: 22503 - DNA, 324 bp, Setaria italica
  misc_feature (281)..(281): n is a, c, g, or t
  Peptide Sequence Number=SeqID_88477
aaaattgtgaggttgcacagaatgccatggaccatttttcagatcgtgacactaagtttgtgagttatttttggaagacactttgggcaaaacttggaacgaagctgctgttttctaccacatgtcatccgcaaatagatggacaaactgaggtggtgaatcgaacactttcaatgctattgcgagctgtgataaaaaaacaatttgaaggagtgggaagagtgtttgccgcatgttgaatttgcatataatagggcaatacactctacaaccaaaaatgngtccattcaaaattgtttatagtttcaaaaccaatactcccat

SEQ ID NO: 22504 - DNA, 450 bp, Setaria italica
  Peptide Sequence Number=SeqID_88478
cggcgacgcacgccacgcacgactcgagtgatctgatcgatcgctcgctcgccggatcggaggatggccacttggttgctgctctgctgcctcatcgcctcgtcgttggccgccgccgccggcgacggggcaaccaggtgtacatcgtgtacatgggtgccgtgccgcagcgcgcctccccgaacctcctccaggagagccacctgcgcctcgtcagcacggtgctcaagaggggacggagggcgggcagcgtggtggtgcggcagtacaagcacggcttctccgggttcgcggcgcggctctccgaggtcgaggccgccgcgctccgccggaagcccggcgtcgtctccgtgttcgccgaccccgtgtaccacctccacaccaccaggtcatgggacttcctccagcaggcggccgtcaagatcgacgccgccgcccgtcgtcgtggag

SEQ ID NO: 22505 - DNA, 423 bp, Setaria italica
  Peptide Sequence Number=SeqID_88479
aattaatagaaactttttaggaagacaagcttaatttcatttctgccatgttgatagaggtgcctagcatggcagccagtacttacggcaaccggaaacctgtgaacaaaacattccgagcgcttcttgaattcagcgagaggctgactttcgttagccctcccgagaatgtgagaggccatgttatggctgctgcaagaatccttaagatgggtgactaccaaaaggctttcgatgtcatcagttctcttgagatctggaagctttggaggagcagggagcatgttcttgatatgctaaagcttaagatcaaagaagcagctcttaaaacttatctcatttcttattcgtcctgctatggctccctgagcctgggccagctatctgtgatgtatgacctgactgaatcacatacacacaata

SEQ ID NO: 22506 - DNA, 606 bp, Setaria italica
  Peptide Sequence Number=SeqID_88480
tagaccaacaaatcccctagcatacattcttacagaggcaatcaacaaccagagaggaacccctatgcaagccagtttcagtggacagacacatcgtcacctacaagtagcggtccgtttatgattgagattgacaatgtttcaggagcaagcgcttcgtccagcagcgcaggtgctctgccgaggacattgctgccgatcggtcagtccagatgcatcgagtacttccatttcttgtgatgtcacatggaagaagaaggttatatagatgctgggagcctaggaggccgcttggtgccagtttggagcgtcaagtgctgggaggcaacattgttgtcctgcctgaaccacaggggacccaacctacagatacccatacggatattactgccttgttgcttagttacattcatattcaagttacatttttgtgcttgaatgatgtggagaatggtattggagtttgttttattagctacatttgtttgtttagagatgagactggtatggctcgaattcctgaatcctgacagcagggtcccttggtcattctctgctactactgaaatactgaaggttacagatttatacagtaatagttttatt

SEQ ID NO: 22507 - DNA, 397 bp, Setaria italica
  Peptide Sequence Number=SeqID_88481
ccgccttcgcctccgctgcctccataaccaaacccgaacccgccacccttcccgtcaggcccggcagcccaaccccagccatactcccaagaaccgccgccaggggttgacccatgcgcggacccagagtcgcccgtccacccgggaggcagcggcggccccgtctgctccgtcgcgggctctgcctccgccggacggccaccctcaccctcctctccgtcgacaacacccgcgcactgcacgagagcgaacgcgagcacgaggagggcaagagcaagcaccagctcccgctctcgccattgctcacagcttctccccatcgcttgctctattccgtcacctcttgtgttgtgtacttgtgttgctggctcgagctcgaaagcttcaagaaatcagc

SEQ ID NO: 22508 - DNA, 744 bp, Setaria italica
  Peptide Sequence Number=SeqID_88482
cggggtccgacaacggcggcagcagcgacagcgacggcgaaaagcgtggcggcggtgctccggcgggcggcggcagcaatggctgcgatgacgagcggaacgaagcctcggacgcgcaggcgctggcgacggggcaggccgccgccgcctccacggagctgatccgggaccccaagagggtgaagaggatcctggccaatcggcagtcggctcagaggtcgcgggtgaggaagctgcagtacatctccgagctcgagcgcagcgtcacaaccctgcagaacgaggtgtccgtgctgtctcctcgggtggcatttctggatcagcagcggacgatactgaccgtcggcaacagccacctcaagcagcggatcgcagctcttgcacaggacaagatcttcaaggatgctcatcaagaggcgttgaggaaggagatcgagaggctgcggcaggtctacgagcagcagagcctcaagatgtcagccggctctgccgcttctgaacacgggccgccgcccccggtgcgcgcggagaaagagctcatgagctagctcacccatgcctgtcccgtgtcagctgtgcagtccgccttatcattattaacctggagggaacattgcatcatgattcctttttttcagattctgtggatgttttcttctttttctgcttcttcttatgtattctatattctcattgacatgtgcattgattctttgtactttaatttggatttgtgtactgcgc

SEQ ID NO: 22509 - DNA, 387 bp, Setaria italica
  Peptide Sequence Number=SeqID_88483
atggccggcaaggacgacgatgggccgccggggatggcgaaggtcaaggcagaaccggtgcagtgtccgttcgtgtcggtgttcatgcacgcggacgcggcggacgtggcgctgatggtgctgggcctggttggcgccatgggcgacggcatgtcgacgccggtgatgttgctcatcgccagccgcatcttcaacgtcaccggcagtggacctgaccgcctccagcagttcacctctaagatgaatgagaacgcaagaaatctcctcttcttggcagtcgccaactggatcatggcgttcctggagggttattgctgggcgcggacggcggagcggcaggcgtcgcggatacgtctgcgctaccttcgggcggtgctccggcaggac

SEQ ID NO: 22510 - DNA, 433 bp, Setaria italica
  Peptide Sequence Number=SeqID_88484
gttcagtgctatattgggattatgaacgctttgacgaacgtggaccatgcccaccggtttcttattctcgtcgtaaagttttgctctgtacatgtatgcatcaacatcgatgggatgatcatttgtgtccacgaggcatccctcggcaactgagcaatccccgcaatcatcgagcacccaaccggaaagtttgtcctcctcgatgtatttcttgaaagcctcgacggccattgtacccctttgttttgcatacttgggttcacccagtatgttcatcctcaacaacactgattcggcaggctcctcaagatccatgatgaggctccctacgcctccctccaatcctgacagtttcatccggaccatctcgatgacgatcttcaccaccatgtacgcaccatcgtcgaggaagtagttctccttgagcgcgccg

SEQ ID NO: 22511 - DNA, 347 bp, Setaria italica
  Peptide Sequence Number=SeqID_88485
ggcggagtcaggggcgcgggagaagaagccgtcggggtagaagaacgcgcacaggcaccctagcgcgacgccgaccacaaccgcggcagcgatgcgggacccacgggacagcggctgccctcctcctcctccgccgccgccgcgcatcaggggcgactcgcgccggctggccatctccctctacgaggccgccgcccgccgccgcagcgacgagatcagagcggtgggggggagggggaggccgcctcggcctggaagattccctttcccaggggggaaggagtttgggcggacggcggaggcgtgtgcgtgacggagacgctcggtttctgggtcgtcgtgctttg

SEQ ID NO: 22512 - DNA, 284 bp, Setaria italica
  Peptide Sequence Number=SeqID_88486
tttcatatgaaaggacacatgaacttatctccaaacaggactgggatggattgcttgagaaggatcagctgaaaaaagaactagggaaaggaagcacattcgatggttgggttgaaggagttatcagctttcccccaacatataaatacgagtttaactcagaaaaatatgtaagtgatgcgacaaaatctgggagaagaacacctgcatggtgtgaccgcattctctcatacgggaagggaatcaggttactttcgtacaagagggcggagctcacgttttcg

SEQ ID NO: 22513 - DNA, 241 bp, Setaria italica
  Peptide Sequence Number=SeqID_88487
ccgtgacgatgatccggacggcgcccgacttggagaagccgaacttctcgaacatgattgaggagcgcgggtcctcccggaaggactccgtcttgatctcggccgccgcggggaaggcgagtgctcccgcgacggcgaggaggatgaggaggcgcgcggccatggcgggagcggtggccgcggcgagatctgtgggggtcggcggcggaagattggggcgagacgagtgggagtgtgtcgg

SEQ ID NO: 22514 - DNA, 368 bp, Setaria italica
  Peptide Sequence Number=SeqID_88488
gtcgcccgagtacgcgaagcagcaggcggcgagctcccccgaccgaggccacgggcagctgcggggacgtgcacatgatccggcacccgctggtgaagcacgcggcgtacgcgtacctccagctgacgccggcggcgcgggaggagaaggccaggctgcggcggaggcgcggcccgctctgccgcctcctcgaggggtgcctcggcttcgtcggggcgctcttcgggcggtgacgtcttgtccgccggcgagaaccggacagttttgggtcacatttgtttctctttttctcagctcttttttcccctccatagttcgctgttactttcttcgctccttttttggtgtatttagaacagaattgactt

SEQ ID NO: 22515 - DNA, 671 bp, Setaria italica
  Peptide Sequence Number=SeqID_88489
gttgcattaaaccagatgtagcagcattcagctgaactgaacaaaaaaagtatatcattgacataacatcttgcttgaagatacgaacatttgtaaaatggtgtcctgtagatattaacgctgaagttgtggacacaagaaaccgatgttcagatccagtatatttcagcaattccactgaatctgtgaaccatgaaaacagctaatttgcaacatgttgcacatctgactagaattagatatgaagtataaaccgtattgcacatgtcatacaatgctatcccatataaattgtaaagtcagtttcacctgagctcaatttagttttttagttaattgcattaaggtctctagtaagtatgaactgacatgtaaaaaaacttattgcagaaaggtctcgttgatggatgtctctaagaagtatggaactgactaccggatattacatgctgtcaccactggtcattcttggtatggccaatggggattcaaactcagcaagggaagctttggaatcacatcaaaagaatactttgaagctatagacagcctttcctcaaccccattattgcacttcttcccacattcccgatctcctcgaaaccagctacaagataccatttcattctaccaatccctttcaaagcaccctctcaccacaatccgtgaac

SEQ ID NO: 22516 - DNA, 538 bp, Setaria italica
  Peptide Sequence Number=SeqID_88490
ttttttttttttttacttttattcaaaatccccaaaagcaataatcccagacagctggaaagtagtactgtagtttgcgattgtttcattcaagcaactcaaagtccctgctagtactgatcatctgtcattaatcaggtgccagtcatgcaaccatgggatgtcttatgatgatccagaagactgggactataggcagttagataatccacgccatttgttgcacggcattgttcatgacaatggcttcggccaccttgtccggataaatggcagagagggtggttccggtcttctgacagggactcaactgatggatttctgggatcggctctgcagatacctcagagtcaggtaaagccaacttgcttcaatgatttcctttacacacacagcatgatgttgagattgtctactgtgctctgttttttggcacaagcaacactgcagcagtaacagaaatgttatggaatataatagactggactttggtgcttcacatgaccagaacataggttaactgtgacatgaaaagctt

SEQ ID NO: 22517 - DNA, 319 bp, Setaria italica
  Peptide Sequence Number=SeqID_88491
tggtgacaccaacgtttcaggacgtagagccgccgccgccgcccatgcgttgtgaacaggatccttggtcgggaatctccggaagcacaagtctcggctcagcagttttaacctgttctcggtgtgaacttactgttttgtagtgatgctgcgttcttgatcgactgtcagaatcacggccgactaaaccatcaatcggcagtttagtcattgccactcgtaatcgctacgagctcgacacactcgaagccattcgcctcaacttgctggcagtactgatgaataagcgacttccattccctccttttcatgatatttt

SEQ ID NO: 22518 - DNA, 458 bp, Setaria italica
  Peptide Sequence Number=SeqID_88492
agtcgcactaggtgcggtagtcggcggagacgacgagggcggggaccgcggcggcgagggaggcggcgtagatgtggtagagcggggaggcggcggtgtggaccatgaacgcgccgccgtggaagaacacgatgacggggagcctcttgccgggctccaccccggcggggaggtagaggcgggcggagatgccggcggcggggtcgaggacgacgtccttggacgcgaccccgttggctgtgtcgccgtcgggggagggagggacggtctcagtgccctcgaagcgctcgacgcggccggtcttgtacatgcgcagcacgcccggcatctcgaactcgagctcggagtctgagtccattgtagtgtggggcttgaggaggcagctgcggatcgggagccggaggagcggggcgacgaagagagccaagaagaacacccgtcgagacagatcgggcatc

SEQ ID NO: 22519 - DNA, 665 bp, Setaria italica
  Peptide Sequence Number=SeqID_88493
actcactgaggaagttgacctcatcattcatcacttggaatagtacatgtgcatcctcctttcttctttggccgtacaagccattcaagaggaacttccggcagtcgcgtgcctcttcatcgctcatcgccggctgatgctcaaaccttcgacgcaacaatttgaagagagcaaacgagaggcagattctcttgaggcgttggatttccttgtgctgactgcctgtctcgggaagctcccaaactttaccaacagtgatgacgccatcgtcgttggtcggaaaaaagaactcatacccatctgcagtagccttcttcaccaacttgttttctcccatgacaatgtacttgcacctcttcaacagctcgtctccgtcctggacagcttggtggcgctctgcttgatgctcctcacgttctagcatctgagccatgtatgaggtgagtacagaagcgttcttgccatgggcatatgaacgcttccccacctcggtgaagacgaatctctgcgccacttttgtggcacaaaggatccaaaggatgctgaacaccgccttccgaccaacgctcttgatgttgaagaagacaaggtttcccagccaaacaacgcggccggcgcgctggatggttgctcgagtgcccgcgcatgcggatctcgtccacctt

SEQ ID NO: 22520 - DNA, 1423 bp, Setaria italica
  Peptide Sequence Number=SeqID_88494
ttagttttttttttttttttttttcgtttaattatatctttgtgcactataatcatgtatccatttgttcgagaaggttagttcacaaaaagaactgcagtatagaaaagtctctgatcaggtcagataaacaaaaccacctaccaaaaccctccgaggccttgtttggaactttggatacatgacatccctccaaggctccaatccatacatattgggaggaattaacatgaaaattagtttatttttcactcaaatccatacttattggaagggttgatgttatccaaacaagccccgaaggagtcatctttccgaagctatacaaaatgatgtgaccagcactgagtttctcgcttattttgaccggcccttcagcttcttcaggcagcaccagcgttagaaatatctttgccgaaaagcccagcgattgcttttcctggatcttcctgcttgatgagggactccccgacgagaaccgctttgcccccggcattttgaacgaacgaaatgtgatcaggggtgaacagtccagattctcctacaacaattatatccttctgagctatcatctttcctcgttcaccctccagaagttttttggtgtttgaaatatcaacttcaaatgtctcaagattacggttattgatgcctatgagctgtacaccatcaatccctaaaacacggtccatttccctttcatcatgaacctcaactaaagcagccatcccaagtattttgcaaattttcaacatgtacttgatatcaaggtcaggtaatacagcagcaattagaagaacagcatctgcacccttggaccgtgcatagtaaagttgccaagcatcaacaatgaactctttgcacagaagagggcactggactccagcattgcgtatagctgccaagttgtcaaaacttccctgaaagtattttttatctgtaagaacactaaggcatgctgccccgtttttctcatatgcctgagcgacctgaaccggatcaaagtcctccctaagaacaccccggcttggtgaagccttcttgacctctgcaatcagagcaggcaagccagtccgatcatacgacgccttgagcgccccaacgaagtccctcgccggcggagcagcctccagcggccccttcaacatgtacaggggcctcctctccttcatctgcgaaacctcgacgtccttgtcccagacgatcttctcgaggatgttccgcggcgtgttcccctcgttctcgaggcggaactggaacgggccgacgtagtgcaccgcgggccccgtcacgggccgccgccggatccttatcccgtcgacgccctcgatggaggccccggcagcggcggcgtcctccacggggctcccgctgtccccccgatccgtggcgaaagccgccacggcgtgcgagctcgtcgtcg

SEQ ID NO: 22521 - DNA, 234 bp, Setaria italica
  Peptide Sequence Number=SeqID_88495
ggttggtatggtcgatatgacttgagctccatattcttgctcaagccgttggtggaatacatccatgtgtagcaatcctaggaagccacatctgaatcccatgccaagtgcattgcttgactctttttgtaacagagacactggcatcattacatgttagtttctcaatcgcatggctaagagcttcgaagtcagaaccatcagcaggatagaggccagagaagaccatgtgtt

SEQ ID NO: 22522 - DNA, 689 bp, Setaria italica
  misc_feature (1)..(45): n is a, c, g, or t
  Peptide Sequence Number=SeqID_88496
nnnnnnnnnnnnnnnnnnnnnnnnnnnnnnnnnnnnnnnnnnnnnaaaatttaaatgtcagagataataggaagcatcaaacacacacaaattctgttaaaccgagtcaaacctgaattaacttgattacaacatcagaaaccagtataggcaccgatatttcaatcccaaacttgcactcctatcgtctaaaatctgttttatgacatgcttgtactcataaagcaaactttggagaatgaaacactagaatccagtaaccaacagataacacagaggaacagattaccacaccattacattctactgcgagacactggtctgaagaggcagagcactttcaacttcagcttcctttgcccccgcggctgatcgctctgcaacaacctttgacatcccaaacatcttctgaattgtcttcttaaagcaggtcttgtgttcatccatggatgcatgaatgaactcatcgatgtggtctttcagatcttcgaggaaggtaacatcatcatcggttttcttcttccggcatgaagccatggcagggttttttggaacagatggggctgaagcttcagattgagcattgcttggatccatcttaacacttgaggagcctgatgctcgtgagcgctcgaggacggtggtggggaggggaacaatggcgagttggcgattggaatgggaggtga

SEQ ID NO: 22523 - DNA, 612 bp, Setaria italica
  Peptide Sequence Number=SeqID_88497
tattaaaagaaaggggggggaaaaattggtggcggaaaaagctagttggaacctaatgtcttgtacacattatcttggcaaacaatcccaagaacaaatacaatgtgcagcatgcagaatgagccaagcaaaagcactgtcccgagcatgtcagcagaccaccactactctaagtttcatgactccatttaatttccatatcttggaccaaagccaattactcttcttgtagtcaactttactctgaggtagtcttcgaggactgctcttagcattgaggaagatccttgggtggtggtataagagtctcatcaggtcttttcccattgtccaccacaaagaccatctttagtccccatgatgtgtgcacctcaaaatggcaatgcatgaaccaaacacctgggttgtctgccctaaatctgattgctgcccaacctccggtaggaactccgatggtgtttctctcaatggggtcaatgaggttaaacgtggagggagaggttttggggttgtagttcccgaccccattcccaaccacgaaaaagttaaaaccatgcaaatggatcgggtggctctcaggtgatatgatccctgtatcctggagtacaacct

SEQ ID NO: 22524 - DNA, 348 bp, Setaria italica
  Peptide Sequence Number=SeqID_88498
agctaggattgctccggtggccgtccctgtcctgctgctgatcaaggctgccatccaccagctgcggcggcagctgcgagtcctcaccggcggcggtggccctccctccggcgtgcttgggctggagcagcaccagctgctgctgctgcgccctccgtgtcttctcctccttcttggcctgcagcgccttggtgacctcggcgaaggtgatgaggcggtacgcctggccgagcgctagcgtgtcccgcggcttgagcagcttcacccgcgtcacccgcgccgcgccgcgctgctcctgaggatgaggaggcttcccgcccgcggcgtcggcggttacgtttacggtta

SEQ ID NO: 22525 - DNA, 946 bp, Setaria italica
  Peptide Sequence Number=SeqID_88499
aatgaagaacaagactctttaaaaaccacataattaactaaacgccacgaggaatatcgccaagcttaatctaccagcaaagttggatggagaacagctaagaatggcgaccacaccatgcctaatgcctggtagcagcagcagcagcagatggctggttgcattcttgcatgcatgcatgatagctacaatgcactcaccgtggggtatggccacttggagtgctgctgccaccattgcttgaggatgctggtggtgtccccaggcagcttcccggccctccttttcctaaggatctcttccctcacatcctctattcttgacttgaaaccctgcttgagctcgatcttgagctcctgcctgaccctctccatgagggagcgctccgagtcggtggggaggagcgggccgaagcccatcacgtcgtgcccgtccgagcccatgtccagggggccctccagcatcggcggctcgtcctcgtcctccgacatggtcgcccctgacccttcctccagcgtcgcgccggtgaggtcctgcagggactgctcgatctcgcggcacgccatgacggcctccacggcgtgcacccggacgtgctgctgcagctgctcgcggaacgagcaaagcagcatcaggtactgcgcgaggaaggagtcgaggtcgtgcttgtcgtgcggggagaggaagggtcggtggtgggcggcgtaggagtggaggaggccgctcgactgcgccagctgcgcgtcgatgagggggaggtggtcgatgggtgtcgccacgcggaggcacccgacgtgcgccgccaccagctgctcgcacagcgggtgcaccgcgatctcccccttgagcagctgccgctcctccgcctccgccgccgcggccgccgctgccgctgcagccgccgccgccgccgtcgccgaagcgacgagcactcggcgccgccgcc

SEQ ID NO: 22526 - DNA, 432 bp, Setaria italica
  Peptide Sequence Number=SeqID_88500
agttgaatcgatcgatcctcttatttttttgttgagtcaccatgcatggtccagcaccgtttgattagcttgttggtatatgtgtgtcaggtatacattgtgcagctctccatatatgtctatcaccttttacgtctttgtatttgagggttgacgtctgggagttgttgtgccaattcctcttcctctggttgatgaaccagttgttgatttgtttcagctgcaggccagtctcttcaacaagcttcgccttatcgtcttcctgtaccatccactcaaatgatatcatcgatctttaggatatgacgcggacatgatactttaaaaaccacacattttccttctttaactgggaatgaagaacaagctctttaaaaaccacataattaactaaacgccacgaggaatatcgccaagcttaatctaccagca

SEQ ID NO: 22527 - DNA, 878 bp, Setaria italica
  Peptide Sequence Number=SeqID_88501
aattatcgtttttttttcttctgccagcttatgatggtatttgcacagggaatgaattagtcctcagattatgtacgtacactggggacaaaggcaaactatggctatacaataacaagaatagtatgcttcaaataaaaatcacagcaaacaaatatgccagtggtcagactagtgtgtatgtgtgtcatgaaactgtcacctctgactaatgactagatagatatacagttgaatcgatcgatcctcttatttttttgtgagtcaccatgcatggtccagcaccgtttgattagcttgttggtatatgtgtgtcaggtatacattgtgcagctctccatatatgtctatcaccttttacgctttgatttgagggttgacgtctgggagttgttgtgccaattcctcttcctctggttgatgaaccagttgttgatttgtttcagctgcaggccagtctcttcaacaagcttcgccttatcgtcttccgtggggtatggccacttggagtgctgctgccaccattgcttgaggatgctggtggtgtccccaggcagcttcccggccctccttttcctaaggatctcttccctcacatcctctattcttgacttgaaaccctgcttgagctcgatcttgagctcctgcctgaccctctccatgagggagcgctccgagtcggtggggaggagcgggccgaagcccatcacgtcgtgcccgtccgagcccatgtccagggggccctccagcatcggcggctcgtcctcgtcctccgacatggtcgcccctgacccttcctccagcgtcgcgccggtgaaggtaccttagtactaagggtaacttaagtaacttaacgtaaattaacttaacgtaactaa

SEQ ID NO: 22528 - DNA, 114 bp, Setaria italica
  Peptide Sequence Number=SeqID_88502
ccggcagcaacgacgcaaagggccggccaagccgcgccagaagcatgctccagcggaacagatttggccgcggcaggacgaaggcgagcagcgcccgcaagccctgctcgacca

SEQ ID NO: 22529 - DNA, 519 bp, Setaria italica
  Peptide Sequence Number=SeqID_88503
tccaggcaggagatcgcgcccccggacctcgctggcatcggggcggccgccgcggacatagaggtccggggggcagaaaaccgcggcaacggcgccagtggcggcgagcttgcggaggtccccggcgaagtcggaggggtaggtggcgaggtcctcggtgggggcgaactggctgggattgacgtagatggagacgacgacggcgacggggccggcggcggccgccaccgctgcggagacgagcgagaggtggccgtcgtggaggaagcccatggtggggacgagagcgacgaccttgccctccgcgcgacggcggcgtgaccacgcgcgcatcgccgccttgtcacggatcacctccggctcatgcgccgccgccggcatgggagcaaaatggaatcgcacggcagactgatgaggaggaggaaaagaaaaaagaaagaaatttgttgacaacaagtgagaatgggatgcggcagcagataagttgtggggaggaaacggaatcgaggacggccagag

SEQ ID NO: 22530 - DNA, 330 bp, Setaria italica
  Peptide Sequence Number=SeqID_88504
taggtagacaacgccgcagctctactccaagctgtgactatgatcgccgggctacgctacgccgtcggccgctgcgcgccccggccatgacacgacggcaccaggagtatatagcatttggtttagctgctcctagcgactgcctatgcaaagaagtccattcaggagagtctctggctttccccagccaaaggtgctttggttgtacaatgcatccaaaccatcctgtctctgactctctatcagcaatcaatgtactatgtgttcttagctatgtaaagatttaggacaacttctaagcattggatgaagctgaatgattgctggcac

SEQ ID NO: 22531 - DNA, 241 bp, Setaria italica
  Peptide Sequence Number=SeqID_88505
agcgtcccgagctggaggccgccgccgccgcggcgctgcgcgcgtgccgccccaacgccgcgctcaccgtgcgggaggtgcaggaggacgtgcaccgcgtcgtggagagcgggctgttccgatcgtgcatgcccgtcgccgttgacacccgcgacggcattcgcctcgtcttcgaggtggagccgaatcaggacttccatgggttggtctgcgaaggcgccaacatgctgccttccaagtt

SEQ ID NO: 22532 - DNA, 732 bp, Setaria italica
  Peptide Sequence Number=SeqID_88506
tctccgactcagtgtgagtagttgttggttctgggcgttcttatgccgtaggtagtggagaagtgtcatgtcgcatgtttggaccgctggaaggtgttgtctttggggactatggtagtgatgtcggttctggtcctaaagttcctggtgacccagcgggagctcgtgggaaaccaggtagcgggtatggttacggtgttggcatccgtgtggactccccacttggacctctgcggcttgaatatgccttcaatgataaacaagcaaggagatttcactttggtgttggctacagaaattaacatgtatattcggcatgttcttctgagcattctttggctgcattcttgtgctagagaacttaagtcgaccccagctggtagattcatcctgcctaaggtatctgaattctgggaggcctggcaagtgaaacagaagatgcgaagaacgagggatgaatatgctgctacaatagtgttgccattccttgcgtatttatgcatgtgtatatgtgctcagtgctcaaacacttgaagatctgagtggttgatttatttatttcatcacatggatgacagatgatatatccggacaatacaaaaggtttcttagtggtagagaatggtttgccaaccataccttttctaatgtatggatctaacaacaattttggctgttacattctgggcaactgcagtttttacgcctatgtacgacatatccgtgaaacaa

SEQ ID NO: 22533 - DNA, 2019 bp, Setaria italica
  Peptide Sequence Number=SeqID_88507
tctttcgtaggttcctttgtttttatccacttcccttccactggcttatctctggaatttatggatgcacaattccggtcgcctcgtcttcgaggtggagccgaatcaggacttccatgggttggtctgcgaaggcgccaacatgctgccttccaagttcctggaagatgcatttcgtgatcgccatggaaaaatcattaacattagacatctggatcaagtgataaagtctgttaacggatggtatcagcaccgcggtctaactgggctggtttcatacgctgagatactttctggaggaattttgaggctgcaaatttcagaagctgaggttaataacattaacatccgctttctagataggaaaactggtgaaccaactgtcggaaagacacagccagagaccatccttcgacaacttaccaccaagaaagggcaggcttacaatagggcgcaagtcaaaagggatgttgaaacaatacttactatgggcatcatggaggatgttacaataattccacagccagttggagattcgaataaagttgaccttgtgatgaatcttgttgaacgcccttcgggtggtttctctgctggtggtggcatttcaagtgggataacaaatggacccctttctggacttattggcagttttgcatattcacaccggaatgtttttgggaggaacaaaaaattgaatctttcacttgaaagggggcagattgattcaatttttagattgaactttactgacccatggatcgatggcgacaacaagagaacctctagaactgttatgattcagaactctaggactcctggaacacttgtacatggtggtgatcatcctaaccatgagcctataacgattggacgtgttactgccggcgtggagtatagccgtccgttcaggccaaaatggagtgggacgcttggcttaatttttcagcatgctggtgctcgtgatgacaaaggcaatcctgtcatcagggatttctataacagccaattaactgccagtggaaatgcttatgatgatacactgcttgctaagtttgaaagtgtctacacagattctggggaccatagctctacaatgtttgttttcaacgttgagcaaggtctccctgttcttcctgagtggctaagcttcaacagagtgacagcacgtttgaggcagggctatgaaattggtcctgctcggcttcttctaagtgcttctggaggtcacgtggagggaaattttccacctcatgaagcatttgcaattggtgggacaaatagtgtaagaggatacgaagaaggtgctgttggttctgggcgttcttatgccgtaggtagtggagaagtgtcatgtcgcatgtttggaccgctggaaggtgttgtctttggggactatggtagtgatgtcggttctggtcctaaagttcctggtgacccagcgggagctcgtgggaaaccaggtagcgggtatggttacggtgttggcatccgtgtggactccccacttggacctctgcggcttgaatatgccttcaatgataaacaagcaaggagatttcactttggtgttggctacagaaattaacatgtatattcggcatgttcttctgagcattctttggctggtatgaggtgatccatgccttcccattttttggcgatgtcgcaagttttggatagaaagctttatttagtcaggtttcctttctgtaacatatagtccctttgctcctgttgtaagcattcttgtgctagagaacttaagtcgaccccagctggtagattcatcctgcctaaggtatctgaattctgggaggcctggcaagtgaaacagaagatgcgaagaacgagggatgaatatgctgctacaatagtgttgccattccttgcgtatttatgcatgtgtatatgtgctcagtgctcaaacacttgaagatctgagtggttgatttatttatttcatcacatggatgacagatgatatatccggaaccgtaccgtttactaaggtactaa

SEQ ID NO: 22534 - DNA, 464 bp, Setaria italica
  Peptide Sequence Number=SeqID_88508
gaccacatagctagaaattacacgagtacttagactcaaacctcaaaccaagaaacacaaaagacaagaaagaaagaaattaagaaataaagcttgaaagactaagctttgaacttcttttacgttcttccttcaaccttgctttggtccttatgcagtcacaaaacacctcacatcacctatcttcttagaaacttttgatgttaggatcgtcgacggtcatgtgctgcctggtaatccttgtcgtctagaaactacactgagtcgatctctgccacgaaaacaaatcgaacaccgccatcgctccaagctgaccatggtgtcgtcatcaaggacttcaagatgacgcctcaagaggaaagcaccatcaagatattaccatcgcccgaaccagtgagtcggttctttgattttcacctggatctgtccctgaatggttgaggtcctcacgacaacaccttcga

SEQ ID NO: 22535 - DNA, 698 bp, Setaria italica
  misc_feature (25)..(25): n is a, c, g, or t
  Peptide Sequence Number=SeqID_88509
gcgtagtatcatgcgcctaatgatnagggaaaaactgaaccttccaatgttccaccctgtacagaaatagagaagctatgcactggactagaaagatccaaagcagcagtacttctttcctatctttccaaatttactggtagaccgctctttctgagacttgatgctgctctgtgagctactcgaactgttggaacggcttcgcttcacatgactacttgggaaacaggaagacccaggactctgatgctgaaacccttggcttgaatgttgacctctatcaccttctggcggtggcttcttctgtgaagttcccggcaccatgacattgttatcatggatctgaactagcccttgttttgaagggccaaggaccacattagctgatttagtaggtgcagctatgctaaacttgtggtcttgattttgtccatcagttgtgttactgcctttcaaaatctcacccagcaatgcatcactatcaaaatactcctcagaaatcatagatcgcttgcttgagttttctgaagttgatgcagacgcttctgagcttagtaggtcattcaactctaagtagtccccagtagcaataacatcaatatagtctacagcaccaagaggtttttgctcaaactgtcttttgctagaaacatcctgctcatttgcatctggagttcaaccttgtcaaaactagaaga

SEQ ID NO: 22536 - DNA, 323 bp, Setaria italica
  misc_feature (292)..(292): n is a, c, g, or t
  Peptide Sequence Number=SeqID_88510
caaggcagaggtccaggctgttggtcatgaatgtgacttggctctgttgactgttgagagtgaggagttctgggatggggtgaacagcttggagcttggtgaaatccccttttgcaagaagctgttgcggtggtaggctaccctcaaggtggagacaatatttctgttaccaagggggttgtctctagagttgaaccaacacaatatgcccatggtgctacacagcttatggctatacaaatagatgcggcaattaatccaggtaacagtggaggacctgcaattatgggtnataaagtagccggagttgctttccagaattt

SEQ ID NO: 22537 - DNA, 1601 bp, Setaria italica
  Peptide Sequence Number=SeqID_88511
ttcccattgccgccgccgccgctcccctcggccgagtttgacggcggtcggcgattcctccctctcccctcccgcccctgggcccccttttaccgccgggtgccggcatcaccgccgcggccacccgaacagcgcagcgcgtgcctggctgcctgctaggcgttcacggttcacccctgcccctcatctcagtttctctccccgtctctcttctctcttcgtcttccgtttcctggcggcgactactgggcgagcggcggcgctatttggtcttcgcagccgcagggccctttgccggcgacgaacaaccatcagctgagcggccatgcgccaaccaaggtccgggccagggaagaggcggggccgcgggccgcggatccccgcgacgacgcttcgcaagcagcaggccgcgttggcgaatgtcgaccagatcacgggtgccaagatccccaagagcttcgttttctcccgtggcaagctcccctccacgctccgccacctccaacaggacctccgcaaggtcatgctcccctacactgctctcaatctcaaggagaagaagcggaataacctcaaggacttcgtcaatgttgccggtcttccttgggagtgacacatttcttgatcctctcgaaccccaagagcctgccacatttgcgcttttccaattcgccacagggcccaaccttcactttccagatagaggagtacgcactcgcggcagacattgcaaactcccagaagcggccaaggtgcccaccagggatattcaagaactcaccactggtcgtgctgagcgggttttcaggtcttggcaacccttttgagagtttggtcgaatactttcagcatatggtccctgccgttgacccaagcactgtcaaactggcagaatgtcaaaggattctgttattaaaatatgataaagagaaggaggttgtcgatttccggcattactccatcaagctccagcctgttggggtcagtcgcaggattagaaagctcatgcagaacaatcaagttcctgatctaagagaccttaaagatgttagtgattatgtgacaaaagctggatatggatctgaaagtgaagtagatgatgaagcagcaacggtaagcctaccaagtgatgttgacaaattaaaccgggcatcaagaaaaagcgctgttagactccaggagatcggaccacggatgactatgcgccttgttaaagttgaggctgggctatgctcgggagatgtcttatacccttggcctgtggcaaaggaatctgtgggagagaaagggaaagtaactgaggaagagatagaaggacaagaagaaactgaggatgagctggaggatgggtcagaggacgagatggaggaatagcaatttcgatgagctcatcaaagcacttatcacccagcatctgcctacaaggatagtccacagtgtgaagccaccactctccttcaacactaaggagaacttggctcatccccagatgaaaacaaatgtggtatatgcagaagcaggtgtagtgacagtcctagatgtttcatgccgaattaaacgggctctgagtgttgtagcatgatgcattcatgccagttttg

SEQ ID NO: 22538 - DNA, 466 bp, Setaria italica
  Peptide Sequence Number=SeqID_88512
cggtaacttggtatctggtcgcactacggaaaggaagttgcaaaaattatagcaggaccatcctgttcagcattcacaaccttaaaaattgccattcctgttcatcattttgtcccaatctggtcagagacatcgttgcttgggatgacaggaacaaggtaattcccaaagagggaatcaaagcttttatagcttccaaggcatccctcatgctgcgcttgaaggacaacaaatctctttgcctctctaactttgttgagatcaactctcgctggcagcacacccgaaaccgatgagttggaagatgctgctgacttgtccttatctagggtaacctgagaaggcctggtcctcctgggcggttcaatctttcgccgcttcagcggcggcggcggcggcggcgccgtcgccggggagccaagctctgacccctcagccgccatgccgcggctacttgcctcctttt

SEQ ID NO: 22539 - DNA, 400 bp, Setaria italica
  Peptide Sequence Number=SeqID_88513
cgtatgttttgaaatggtggaaggaaaatgcttccatctacccaactcttgccaggctggcacgtgacatcttagcaatccctgcatctacagtctctgctgaatctgcatttgatgaaaatgatgaacggatgagtcttttcaatcaaaaacttagtcctgaattagttgaggccctcatctgcactcaggattggatcaaatcttcagaaacaaatgacatagttggtggaaacagaaacatgcctgcttgatgcacagcaagctccttcgtcattttgactggttcagtagcatgtgaagagcggtttcaactgtcaacctcatctgaattttacctatcaccatataatgcaccagcctagggtgacgaatggcttaatggccatggttgtaataa

SEQ ID NO: 22540 - DNA, 322 bp, Setaria italica
  Peptide Sequence Number=SeqID_88514
catcctctctacaagcatgaggcgtgtgctttcacttggtggccagagcttgatggagaatgttctcggttggaagtcttgcgctgctgcatccatgtgaaaagctttgaaattgacacggcaccctgggctggggtcggtggagctcgagtagttgatggaggagctgcggccgacgaaggacgacccgtagcagttgagctggggctgacggcctgctggcccgggcggcgagctgctgaggggcagcgagggcgagatgtgtatcagcctagcacgggccgggggatctcggagcggcggtgagcgggcgagattcggg

SEQ ID NO: 22541 - DNA, 510 bp, Setaria italica
  Peptide Sequence Number=SeqID_88515
aaagcggccaaaaacattacagcaaataagttggagtagtaaatagggtccttgaaataagttcatgccagcttcaagagtcagcttcacctgaccctgacaatacagataccacagttcagaattcaggagctactaaaggttctgataaacgacaaggatagatcaccaggctgctcgactcacttctaaatggtggagccacagtacatttttctttataactataaaaatttagcctagctggtgggctttcagaagattatcggaccaaaagctagagctggttaacctaagcatgctagccatcctgctcaacctttacgttctgcagcttcgaatccagcccgtcctcgtcatcatcatccttggcatcttcgtcgtcgtcctcctcatcatcatcaggctctccctcaggatcattctcatctagtgagcccaggacatctagtgaattcttgccagccttcaaaatgtctttcacctcatcaatcccttcatcggagatga

SEQ ID NO: 22542 - DNA, 686 bp, Setaria italica
  Peptide Sequence Number=SeqID_88516
tttgcaattcaggtgatcctgaaattcagtaatagatagcagcatccaggcatgctacaatagcacagattccaaataaaccaacaaagcgccccaaaatttcacagcaaataagttgggagtactaaatagggcccataaaacaagttcaagcgagcttcacctgaccccgacatggtgacaacacagataccgaagttcagaagctacaaaagggttccatgaaacgacaaaggtggagccacagcgcatctgtttataactaaaaatctagcctagcacattcagaagattactagaccaaacctaagcatggttaatcatcccgatccacctgtacattctgcagcttcgaatcaagcccgtcctcatcgtcaccatcctctgcatcttcatcatcttcctcctcatcaccatcatcaggctccccctcaggatcgttctcatctagtgagcccagtacatccagcgaattcttgccagccttcaaaatgtctttcacctcatcaatcccttcatcggagatgaaattaccattgatgttcagttgcacaaaaccaggcttatttgcaactgcccgtgcaaagcagcgagctccaacccgctgaagcatgtttgtgctcaacaatacaaagactacctttacaagaatactagacaataggaccaatacttaccaaatagaa

SEQ ID NO: 22543 - DNA, 218 bp, Setaria italica
  misc_feature (183)..(218): n is a, c, g, or t
  Peptide Sequence Number=SeqID_88517
aagcttctgcctgccctttggcatttcgactcattctgtttgggatagttgggtaatggcactcccaacggttccaactctgtgaaacgccgccgcaatcatatatgcctgtgaaaaatgacgctttaatggccgactgctgcttgtccatgtccaaaaaaaaaaaaaaaaaaaaaaaaaaannnnnnnnnnnnnnnnnnnnnnnnnnnnnnnnnnnn

SEQ ID NO: 22544 - DNA, 238 bp, Setaria italica
  Peptide Sequence Number=SeqID_88518
cggcgccgcgccgcctccttcgtcctcctactggctctccgcgcccgacggcgcgagcggcggcggcgccggaggagggagcacgaggggcaccggcacgcggagccaccggagctgggggtgggcgctggcgagccccatgagggcgctgaggccgaccagctcctcgtccagcaagagcatcatggccgcgccgacagccgcgtagacgacgtgcgtgcgccgaccggcggccggt

SEQ ID NO: 22545 - DNA, 252 bp, Setaria italica
  Peptide Sequence Number=SeqID_88519
ggagaacttcctcgacctgctcgcgtccaagaacgtgacgcaggagatgttcgaggacgtccccgccgacgccggtcactactccgcgcatcatcaggctctgtcaggacggctcggagcaggctccgatgttgcaccgatcaagtacgaggccaccggctcgccgctgttctttgggaactctaatcctcccggtatgcaccaggggatgaacatggcgggttgcacgccatgctacccctacgcagacca

SEQ ID NO: 22546 - DNA, 445 bp, Setaria italica
  Peptide Sequence Number=SeqID_88520
ttccggggtcaggcgcaggcgccgggcatgcactactcgagcccttaccacctgatgaaccccaggcagagacggcggcacatggagctcgagaggtctctgcatcagatatggttcttcctcttcgtgtttgtgctgctgtgcttgctcctgttctgatgtctgaagcagaacatgatgctgcgagccatgcgcagaaacaagagaaccgagtagctgacttgctttgtacatagtgaagggatgtgtgatatgattcacccgtgacctatgtgtctaggctcttgttcatgtacatgtgaatgtaatagagctgtggcgattgcatgatagagttcaggatgaaaattgaaaaccaatgaacatagcttttcgatcctagaaagaatacagggaattggtttagaaactgcaacggatcctttgcagtagattagaaaatgtt

SEQ ID NO: 22547 - DNA, 850 bp, Setaria italica
  Peptide Sequence Number=SeqID_88521
aagacttaatagaagtagaattactaggtaggaccccaaatacctgagatgaagcagctggccagtgctggttcatcatcattcgtcatgcttgctgaagaaaggagcacccccacgaagcaacaagacatggatgctctcaccaagttggttaccaggaggggtagcgaccgtcaggtgatcacagtgtgggagttagggggcgaccttggagcagcgtcaaagtccagcatcagcaaggcctatgaaaatgcaaaaaactggggttgccgtgcttggatcaagcttgggaaccctttcaatcttcatgagtttcgcagaagcttgatagatcagttctgtggtaatggtgtccaggggagaaagcaggcgccactgacagaagattacctcatccacgagcaagtgaacaaccgacgatatctcgttgtcctagaagacctgtctactaaggaagactgggatgctattctacggtctcttccagacaggagtaatgggagtcgtattgttgtgctcacacaacagttccaggttgcaagatactgcactggccttccatacattcagtatttctgggctaataactctgtttgtgtctttttcaaggagggttcccttattggacgcatgtcagatatcaatcaactttctgggtatctagctaaagcacgtatggaggctttgcaagtgatgtctgtgtggggaatacctggagttgggaaatctgctcttgttagaaatttgtgccataacaaggttcttcagcatcacaaatttgagaagcatggctgggtggatgtatcccatccattcgatttaagggattttctcttcgacgccttgcttt

SEQ ID NO: 22548 - DNA, 450 bp, Setaria italica
  Peptide Sequence Number=SeqID_88522
gatgacgcgtacaaggttctcatgtgcaccgacctgacaaggtcatcgaccaaagaaggggtgcagaaaccggtttacgcaggatttgtcgacgtggacgtggagaaggacaagtgcatatcgctgagaacactgattgatcactctgtcattgagagcttcggaggtgggggccggacttgcatcactgctcgagtgtaccctgaacacgtcgcaacaggcagcagtcacctgtacgtcttcaacaacggattgcacgcggtgaaggtgcccaagctcgaggcttgggagcttgccacggcaagcgtcaatgttgaagatgacggcctgaatgcattgctgccgccactggttgttccaatcctatcggatgacgctgaataggcgcaatcatcgtcacaaggagtgaagcatgatttcaaataaagccctagttcgttccaatatggt

SEQ ID NO: 22549 - DNA, 417 bp, Setaria italica
  Peptide Sequence Number=SeqID_88523
gggtgggcggacgtgcccatgctgtgcttcccgctgctcacggaccagatcaccaaccgccggctcgtcgcgcgggagtggcgcgccggcgtctccatcggggaccgcggcgcagtgcacgccgccgaggtgagggcgcgggtcgagggggtgatgggcggggaggagggggtgaagctcagggagcaggtgaggaagctcagggccacgctcgaggccgccgtggcgcccgggggatcgtcgaggagcagctttgacgagttcgtcgacgtgttgaagcgccggtgcggcggcggccagtgatgatgacccgagcagaggcgaccctgccccctgtccgacggagacctcgcggggaggtggtggcctggaatggaatacgtgcgcgatgcacatcgccaagcacattggcatgta

SEQ ID NO: 22550 - DNA, 268 bp, Setaria italica
  Peptide Sequence Number=SeqID_88524
tccgccatgaaggcgtccagcgggtcgatctcttccgcatcctgcgccttgctggccaccgcggcggcagcgggggcgtctgtgggagcgtcgtcggagaaggcgatgtcgtcgaggtccgggtcgtcggtgggacggtatagccgcggtacgggctgcgagcgctcgaagctgtaggtggtcggccgcgggatgctgaacccccccagcttcgggcgcttcgacatggcgccgacggcgggacggttctagggtttgcgaggcgccg

SEQ ID NO: 22551 - DNA, 310 bp, Setaria italica
  Peptide Sequence Number=SeqID_88525
catcattggggagttggagtggttagcgaccgagcgagtgaaaacaggtggccagagagagcctcatggcatccgtggcgcggcgcgctgctctgctccgtggcagctgcctcgcggtcgtgctcgcgctggcggctctcgcgtcggcgggtgagagcagcggcgcccccgactggcacgtcgtgagcgtcggctcgctgctgccgagctcaatctgcgccgcggcaacagcagcgtccaactcgtcggctctcagcgtcgtgcaccggcacgggccgtgctcgccgctgctggctcgggtgggcggcgc

SEQ ID NO: 22552 - DNA, 470 bp, Setaria italica
  Peptide Sequence Number=SeqID_88526
gttctcctctcgctccgttggatcaggggttcttcctctgctcgccggagttcgtcgcgcccataaaatgtaaactgcttcctcggtcccaaaataagtgcacttcttgggacggaaatgtactgtcccaaataactttagcatgtcccaaaatgtttggcatgctaagcagcttcttgggaaggagggagtaagtaatgatatatgtttgtgctagctgggcagatgaggaggtatctgatccaaaggcgctcctagaggatcgcacaaaggctaagtgtgtgtcacagtggtacgaatatcagaaatgtgtcaagagaattgaaaacgacgagactgggcagaagcactgtactggccagtacttcgattactggaaatgtgttgacaagaatgttgctgagaaactctttgaacttctaaaatgataaggaaaatgcttcctctttcaattttctactcaaaattgg

SEQ ID NO: 22553 - DNA, 683 bp, Setaria italica
  Peptide Sequence Number=SeqID_88527
ccagatccgtccctacctcgtgatccatactagccatctgtttcccgccccgctccgacctcgccgttctcctctcgctccgttggatcaggggttcttcctctgctcgccggagttcgtcgcgcccatggcagatgaggaggtatctgatccaaaggcgctcctagaggatcgcacaaaggctaagtgtgtgtcacagtggtacgaatatcagaaatgtgtcaagagaattgaaaacgacgagactgggcagaagcactgtactggccagtacttcgattactggaaatgtgttgacaagaatgttgctgagaaactctttgaacttctaaaatgataaggaaaatgcttcctctttcaattttctactcaaaattggtaataattgtatcacttgtgcgccttatagactattcaggtgcttaatatttgtcagagaagttttgcctcttgggtagcaattttcccactgccaatttacatttcacttttgccagtagtgttgaactttacagcaggttttctcctgcattgttggataaaaagaatcaatggatcattccaagattgtgactgagcattaaatgctgtatgatgactgaataaccagtctacactacaacgagatttggcgtgagtagaatgttgcaagtaatgcactgcaaagtaatccttgatatgga

SEQ ID NO: 22554 - DNA, 480 bp, Setaria italica
  Peptide Sequence Number=SeqID_88528
gacgccgccactcgcgccgccgctccccgcgcaccacgcccgcgcgccggcgtcctctctgcttctccccacgccgtcctctgctcccggcccgctcccgcagctcctcgtcgggggcgccgacgaggtcggccgcctgcacgagtccggcgacgggggcttccggtttgtgccctacaacgcctgcgactactcctgcaagaccagcagcgcgcacggagggttgagcttggctcagtggatgtcaatcgagcacggggacggcggaatagagcatggggacggtggaatcgagctcgtggtggatttccatgtcggcagcggtggccggaggcaaggaggacgccggtgacgcaggggcggaggggacagaagcggcgcggaaagctccgaccaggagcgggtggccttcccgccgctagggaggagagaatacagagatagcaatctatatacatgtatacatatactctcggagag

SEQ ID NO: 22555 - DNA, 525 bp, Setaria italica
  misc_feature (512)..(512): n is a, c, g, or t
  Peptide Sequence Number=SeqID_88529
cttgactctaccatctgagcttcatccaaacaaagccgccaccagtggatccttgtcaggacagttggaatgacgggatatctcttttgaaatctcaagaaacggcgatcaccatcatgccgatcaaaatcatgtgatagatcttctttcaagacatcataggttgtcaagacaacatcagcagtacttatctcagtcgtatcaattttttggatggtagccagatccaagttcctagcaccttcataaatgcaaactttcagagatcctggccttgtgtgtcgggtaatttcagagtgccactgtgccaatattggtgcaggacatactatcaatgtagcatggctgaatatattagtttgtgctgcttcagtaagctccaagcacagtgcacaaatgtatttgtcttctgtatcaacaatagaacactggggtttctttttccttccaatcctaggcttcatgttctttttttaattttgatgctacaccttcagcggtgtcaaaaggtntgtcttctttggg

SEQ ID NO: 22556 - DNA, 322 bp, Setaria italica
  Peptide Sequence Number=SeqID_88530
acggcgttgtagagcgggaagaagccccagaagacggagaagaagaagacgagcgccgtccggtcctggaggtgcgacgccggcgtgcgccaccacagcaggccggcgaggctcgccacgctcagcacctggaagatgcggagcttgttgaacgactcgtggcggcgctccttgaggccgcgctggaggagcaccaggaactgcgtgcaccacccggtggtccactccgacgaggccgagccgcggcggcgcgacgacggcgcctgcccgccgcccggcgacgccgcggcggatgtctcccgggcgcagatgtccagcttca

SEQ ID NO: 22557 - DNA, 1301 bp, Setaria italica
  Peptide Sequence Number=SeqID_88531
tagcgaaagcaaacgatagagatcgacctacatattcggaaacaatcttaagataacttgctaattaacatccgaaatcatatgcataattacccagggaaattctccacgatgcgactccaagtgaagcttgaagaaagctatatcacttaacctcttctaagctgcgcgcggcctcatcaattattagaacggcgccggacggccaccagcggcgcccgggttccatccgtaggctgattccggtggcagctgcacgttgccgagcaggttcggtggcagtccctggaagaggcttggatcgacagagccggcgagctgcgccgcttgctgcgcaccggcgagaatcccggcgctgtcggcctgtgcttgggcggcgagcatgtcgtcctcctccaacggcagcctctcgtacaccgcgttcgcgaaagaggccgccattatcaccaccggcccggctgctgtcagcgcgccgacgacgctgccgcccaccacctgcccctgcccgccggcaaggtagacggtgagccctgtggcttcgggtggcgcgggcggggggaggaaggagccggagagggagagaatctcaaaccggccgtggagggcgacgaccgcgccctgggagggctggctgccgcagggtgacgttggtcacggtgcccgcgccactgagcacgcagaccccacgctggcggcggcgcgcgaacgccgtgatgctctccgagatgtcgcagccgccggcaacctccatgacgtgcgtccggagcgtgttggcgctgtccctcgtgatgatgatcggtggcttcggcttgttcttggaccccgccggccggcccctcgggcggcgcggggtggtctctccgccctctggcccaccaccagatggaggaaccagcgccagctcatcacctccgccgccaccgccacttccgttgccattggcgccgctgttctcgtcatcctcgtggtcgcgcttggtgccgcggccgccgaacacccccggcgtgccgccgccctggtcgtcctcggtcttgagctgcagctggtggtgatgctgctgctgctggagatggtgatggaagtcgcgggtgttgaacggcggaggaagatggtgaccgtgtatggatgccgcgaccggatccatcggcgcgagctagctaggttattctttccctccctgctagctctcctctcgccctctttctttttcttgcgagatcttttttatttttgtggcctcaatcttatctgctaacaaatctctcaagtggccagggacgacgaaacctacgagatggaac

SEQ ID NO: 22558 - DNA, 247 bp, Setaria italica
  Peptide Sequence Number=SeqID_88532
ctgagtggatggcacctgaggttttgcggaatgaacaatcaaatgaaaagtgagtggttttctgatgctttcatttatctcgttctggatcatctgtgtgaagttatacaacatttccatggatgtaggagtcttatcttcctgtggaatgcttgtccttgtgttattttgctcaaaattttgactccctgtccctgagttaactgtgatatactgcttataatttttcatttgcacaacagagaag

SEQ ID NO: 22559 - DNA, 474 bp, Setaria italica
  Peptide Sequence Number=SeqID_88533
gtgggcagcaggggatgtcaaggtagatccataccaactggcattcgagcacaatgttttgtttgtgtctgactggacgaggcttgggttctttgaggttgactatgggtggggtgcaccaaaccatatcataccattcacttatgctgactacatggcagtggcagttcttggagctccaccttcgccgaagaagggaacccgaattatgacacagtgcgtggaggagaagcatctcatggacttcaaggatcagatgaagaccttcttttaggggcttgtcttatattgttacggtgccaatgctatgtgttttctatgtatgctagatagaaataaaattgctattgactagtagccttgttgttcacaagaaatataacattattttatacagttaagccatgaattatatatctatgaacctatgacctttgtaaaatacgtatgattttagtgaaggactaaaaaaaa

SEQ ID NO: 22560 - DNA, 318 bp, Setaria italica
  Peptide Sequence Number=SeqID_88534
ggaggaaggaaagaagacaggatcctattggggcaaggcaaggaagctagacgatgacgatgattcagatcacggttcggactcggaccatgatcacgatcacgattcagactcggaccatgatcatgactcagactcggatcaagctcatgatcacgattcagactcggaccatgaccatgatcgtgatcacgattcagactcagaccatgatcatgattcagactcggaccatgatcatgatcacgattcggattctggtaacaatgatgatgacgaccacaactcgaagaatgaaaggaagaagaagcatgcagc

SEQ ID NO: 22561 - DNA, 161 bp, Setaria italica
  Peptide Sequence Number=SeqID_88535
ggggtgggtcctcaagcaccgcaacccgtctgtggtgtactggagctggttatccggagcgtcgacaccgaagctcataccgatactcaagacgatgctggaggccaatccacagaccaaaggtttgattgaccccgtatatgttgatgacgatgaatagg

SEQ ID NO: 22562 - DNA, 555 bp, Setaria italica
  Peptide Sequence Number=SeqID_88536
tgaaagtaaactgtgacagacttttattgatatgagaaacagcttaacaccttacatcactcgaatgtgttttcagttcagagttcaatcagtacaattttgcacagatggtcatagctctttggacatacttcttaatgcaacctcttcctaatctgaagtggaatggatgtagcagcagtgcagcacacatcaatcctgctttccctcttccttcggtttgctcttcttcttcttgatgtagcagaagcatgagcagcaggggaactgaaacaagaacttcattgtcagataaatcaccaatactttgtttggagaaatgttttgcggaagggatttgcatgcaatgcaacccttaaatatacagcttggatgcgttgccttatcaatctgacattagaatttgtggtccaaatgtcttcggcttgaagtttgtaccacctgtgatactttcttttgtttgtgatcttaacgtaatgtcatcacgttaaactgttagtgagcagaggatattttcacagcaagtaattatcgttcctttggctgattcttgta

SEQ ID NO: 22563 - DNA, 349 bp, Setaria italica
  Peptide Sequence Number=SeqID_88537
agcaaatggcaagccttcaaactagcaacactatccggctttgcagagccactaggtgtagttattgtggcatacctattcccaagcaacttgaaccctgaattattgaagagaagtagtggattagtgggaggagtgatggcttttctaacattgtatgaaatgctaccattagcatttgaatatgctggacgcaaggatgctgttaaagccgtatttgtgggcatggcttttatgtcaatgagcttgtatttcctagatgttagcctcccaaaggagatgggtgcttaacatgatttgcgcctaaaccaaatgatgttatggtcaagagcagtacaacaccttgttg

SEQ ID NO: 22564 - DNA, 345 bp, Setaria italica
  Peptide Sequence Number=SeqID_88538
gtctggcttcgtacgttcagctttagttttggtcagcggctagcgccggcgggcggcggtctcgcgctgcgcgttgaagtagacgggcggcgacggggagaccgaggtcgttctcctccgcgaattggcgggtgctgaagcggtccctcgacgacggcgggctcactgcctgccggcggctctgccggaacagcacgaatatgaacctgtggatgccaatgtttggccttgggttctcgtagctcactagctccctcccaaaagaagcatcggtagtcccaggaatatcagtaacaatccagtgaaggtgctccctcaggtatggatcactaggtcctggcacat

SEQ ID NO: 22565 - DNA, 601 bp, Setaria italica
  Peptide Sequence Number=SeqID_88539
agtagggccccctcgttgaagagtctccaactcagcttgtgccatcatgtctctaatgaaggttttgcagaggcaattaattgtttacctcagctcgaggagcttgaagttacattttgcacgttgcatggcaacgtgtgtgatactattggcagagcctgcccacaacttaaacgcttcagattgaatgagcgctggtctattcttcaaagtgagtttgcaccctatgagggcatggatgatgacacagaagcattaggaatcgctagcaccatgcctgggctccaagaacttcagctgattggtaacaacatgaccaatgatggactcatggcaattcttgaccgttgccctcaccttgaatctcttgacatacgccagtgctacaacatccaaatggacgatgccatgaaatcgaaatgtgctaggatacgagatctgaagcttcctcatgactccatctccgacttcaagtaccgcgcacacatcgtcagtgctaactctggatctgatttcgaggttgatgtgtatgatgatctgctggatccggtcactgaagatgatgatgctgattttgatgatatagatgattttgatgacg

SEQ ID NO: 22566 - DNA, 362 bp, Setaria italica
  Peptide Sequence Number=SeqID_88540
taaatgacctgcatagctctctcctgcaatgtagaagtcatgtcccttgtactgagtaaacttgttgaaccaatttactaagaaggtgtaggtgtcctcagcgacaaagccgtcatctaggtagtctaggtcagaggtggtatttgtgtatgagaagccaactccaacaggagactccaagaacagcaaattggcctctctggtccatgcaaacttgttgaactccaaaccggtcccgttgccattgaccaatagagggcccatctcagaagctgctccatagcccacagatgagcaaccagggcctccattgagccagagcaggagtggcttcttctccggcgacgtctgggcctcaaaga

SEQ ID NO: 22567 - DNA, 433 bp, Setaria italica
  Peptide Sequence Number=SeqID_88541
gcagcctggtctctgctcttggtgtggctgccgcattggcacacatccagaggctgcggcacctcggtgaaacctgagctacctgatgagcaacattgctccgatggcctcgcgggcgctcgccgcgtggcggcagctcatcatgctcctcgctctcctcttcctcgacgccgccgtcgcgaggcagtgcttctggccggggcaggcgcccgatgacgccgggtgcctgagctggcgcgtcatggtggaggccaacaacgcccggggctggcgcacggtgcccgcgcagtgcgtcggctacgtcaaggggtacatgacccggggccagtacctcagggacctggccggcgtcatggagcaggcctccgactacgccgaccaggtcgacgccggcgccgacggcctcgacgcctgggtcttcgacatcgacgac

SEQ ID NO: 22568 - DNA, 639 bp, Setaria italica
  Peptide Sequence Number=SeqID_88542
aatactgctgcaatttgatgagcatggtctccactctgatggcaatgtcctgaatggtcatggtgatgatgctcatgctcatggccatggctatggctatgtttttccttacaggcgttgtccatgaggttgttatggatgccgtcgatattaccattactgtggtgataatgatgatgactctcatctccatgatgatcacaacatgccttcacatgattaacactgtgatgatcatgatcatgatgttggtgatctccgtggccatggtgttggtgatgttcatgaccatgttgatgtgaatgagaatgtgaatgggagtgagaacaggtaccaccatgagcatgatggtgctcctcatgaaagaaaaccaatccaatgacgtttacgacaagtccacctattgaaactgccaaaagactactagttgatatttcccgaggctcaagaatcctctcaaatgactccaacacgatcagcacaccaacaagaaccaagaacactgcattaacataccctgacagaatctcaaacctgcctcttccaaagttgtacatcccatttgcaggcaatctcgctatgtaggatgcgtagagaccaattgccagtgcagcacaatcaaacaacatatggcaagca

SEQ ID NO: 22569 - DNA, 618 bp, Setaria italica
  Peptide Sequence Number=SeqID_88543
gtaagcgatcaagcggctccgggagcccttcggccggttcctggccgaccaccgccccgacgccgccgtggccgatagcttctacccgtgggctgcggacgccgccgccgagcacggcgtcccgcggctgtctttcctcgggagcagcatgttcggccgcgcctgccacgactccctgctgcgcaacaacccgctggaggagctcgatccggacgacaccgacgccgtcgtatccctgccggggctgccgcaccgcgtcgcgctgaggaagggccagatgatggacccgaggaagaacgagctggagtgggagttcgacaagctcgtgaacgccgccgaccggaggagctacggcgagctcttcaacagcttcgccgagctagagccgggctacgccgagcactaccgcacgacgctgggccgccgagtgtggctggtaggcccgctcgcgcacgccaggaaggactcggcggcgagtggcggcgccggcgggctcgcgcctgaggcggaaaggtgccttcggtggctcgacgggaagccggacggctcggtcgtgtacgtctcgttcggtacactggcgcgtgtcacggcggtcggtagtcttgtcgggtaggtcta

SEQ ID NO: 22570 - DNA, 335 bp, Setaria italica
  Peptide Sequence Number=SeqID_88544
ctgacaatgtcatagtacatttgatcaatagtttcacaattgctacctcagttgcatcctgctcagttctgacggcttcaatgtgatgggtggctcttttagctgaatgatagagggtaatttgattgatgaactcccaccaacctgtgaattacccatctgacttccacctgtcagatttgtccctgcatctgtatcagcctgttcagatgtagcttttctggtagcatctcttgcaaaaacagcacgtgacttttggcctctttcagctgttaattgtatgtcagaaccgataatagtaccatccttacgactcgatagtgaagctgatgttt

SEQ ID NO: 22571 - DNA, 912 bp, Setaria italica
  Peptide Sequence Number=SeqID_88545
tttttttttttttttagttgcaaactggtcacaatttttcactgaaacaattgtattcatcctcatttaataatacatacaaccataattggttacaatttgaaacaacatatccaccaatttgtctccagatcaatccttttctccttgccttcacaatatgagatgcttgatgtgcaccgtagcgattagaggaagatgtcaaaatgccattcgggccatcctcactgaggccatggatttttggtagcccggttgcatgttcagcaaggtcatagcccttctcaatcttttcagcttcaaggggaaattcctcaagtgtcctatgtgcctgctcaagaacttcaagcgtttcttgaatacgctgccgtctgataagtacttcatcagtttccctcatcaattcattgaggaggttttctctgtatagtttgcggattaaaaaattgtgcagatcccgctttgtatggttcaccagaaagtgcattacagcctttgggattgcatcctcaatactttttctgacaatgtcatagtacgatttgatcaatagtttcacaattgctacctcagttgcatcctgctcagtttctgacggcttcaatgtgatgggtggctcttttagctgaatgatagagggtaatttgattgatgaactcccaccaacctgtgaattacccatctgacttccacctgtcagatttgtccctatattttcaaagtaagatgatagcacaaaatatgatctcttatcttaatctagagctacaacattcaaattattctatacgctgtaattgaaagtagaagaggataacaaggtacttccgaaatagaacgtattttagaatcagagtagccatcacatctatgagcctatgcaactttggtggcaccaaagagggaatgtag

SEQ ID NO: 22572 - DNA, 1494 bp, Setaria italica
  Peptide Sequence Number=SeqID_88546
tcccaatcaagcagaaacagacagacaaagaagtcatgcaaaaaaaaattgtaaatacgatacacaaaagacggcttaaacaataataatagtatttaaaactgtgctagcctgttcagatgtagcttttctggtagcatctcttgcaaaaacagcacgtgacttttggcctctttcagctgttaattgtatgtcagaaccgataatagtaccatccttacgactcgatagtgaagctgatgttttgggaggtacaacttcatgcttagcaagctcaactaccttggtgcccccaacaaaacttggatgtgaagtatttatataatccatctccatttcaatgatatgagttatcattgtttctgccggtcgaagaccgtctctcaagaaactgctaacgacttcacccatccgctttttaagaattggaaatttctgaagctcactggttaagcaaccgtggctaattttgattaactcatcatagataaactgggcacactgaaggcttggatcgagcagacgacctatctgctttcgcacaagaatttcaaatggcacctcgggcagaaacatggccccttttgggccgccataattctggatggttgtgcggatatcttcatcagtaatactcttgcaagggtcaacttcctccagactcttgacaaatattgactgaaaaatgtagtgaatccttgctccaccagaaagcttatctgttgacactctatttttccctccaccattgaagaaaaagcttcacaatattttctcaatatattcaacagtttgactccctgaccagccgttgattctacagtatcaccataggcagcatgctccttcgcaactgctaccaactgagcatttatgcgagttttcaagcctggaagcatattcgtgatgtgctttaatagaatcatattcagcttcttggccaattgaggaacaccacaacaatgtgcaagaccatggtaagcaggtagagttgagaagaatttctcctcaaaaccaagtgcatctttgacgcttctgttaaagttgatatcctcttggctgcgatttacaacaccaacataaccaagcttgagtgggatcacatttcccagcaagaagttacgagcatcagtgcccctgtccatgatatctaacttggtgataacaccaattgtacgagacccatcaggatcagcaagccttgccagttgaagcgcatcagaattagccaaatctgcatttgctggagagacagccaagataatacaacttggatgcttaatatattgcatgatcattgttcttattcttgactcaatatcactaggctggtctccaactggcacccgtgttattccagggaggtcaaccaaggtgatgtctaggacatttggtgaaaatattttcagacgaatttgtttctcggaaaccctttattatctccagcttctttgtccgtttcaagctggatctcgcgctttatctattcaaaat

SEQ ID NO: 22573 - DNA, 1812 bp, Setaria italica
  Peptide Sequence Number=SeqID_88547
actaaataggaattttagtagacaaggatgttgctgcttatgctgtggctgtgaagctgggattacaccagccgcacatccttgactctgctgttgcatttgtgagccattctgcacagttggcactgtactggttccaggtagtgggcgctgttgctggggcatcatttgttgaatatgtctctctttaaagcgcatagcataagcctgctgctgctgtgggtttgactggtttgttccttgggtatgagaaaggtgtgtatttccgtacatgtgtgactgttgcggcatctgatgtggttgggattgctgaacagggaaagattgaacaggtgaggatcctccagcattggaaaatggtgggccgctgaaatggacaacctggttatttccctgtgagacttgtaactgaaactccggcatcatcatctgtctatgctcttccgaattctggacaggccgaagcatctgcattggatcacgaggcctcaacatcgtatttccaggaccaggtatggcaccaggatgaacattcactgtattttgtaatccttgcccattgttgggtgacatgtttccatgtggaactacatttgccattccaggggaaccaacccttggaaaacccggcctagttggtgtacctcgatttagtccggtcataattccggcaccatgagctggtggcatcattcgggcaccccgatcaactccagatggcaacacaccaggaactccaggttgctgaagatttcttccattgaccatctggctataatgaattcttgattgctcatcaccctgtaacaaggttggtctaggcacaccatacctctgagcatccctggagggagcattcaaaggcaatggcgaattgcttcctataaccataccaggagaacctggtaatctggaattcacattggaggtaggaagagtaggaccaatagaaccatgattgttttgaagagctaaaccacttgtgtgagatccttggtaaccaacagaaagtgtatccgagtttgaaggtccatcacaaagatcaagtggcgttaaaactacaccagataagttgcctggacatgcttgagaaagtgcaaaaacatgagaagtatgaagtggatttatttgcctcagctcctggatctcaccctttctacgagtttgatgcaatttttgtccaaaaaatattattttctcaaagtgtgtcttgagagtctcttcctcgaacggtccttgaaggcgctgaaacagctgcctggcgctaccctttggaatgccaggcaatgcagatggatagtgttgagatgagcctgagtcatcagcactgtcagcaccatcaccagaacttttatccgtcaaaagtttatggcgttccttacactcattaggccttctatatatacacttcaattggatgatgctattaagggcatcactcaccaattcccagttttcacccatatcatgtacaaggacaacaagagcctggtcctcaaaacttgaccatggacttccaggaccagaatgaccagctcccatcttgggtcctttactttttcttccacgagtgctaatctttatcttagggtttgccatgttgctcatttgtgatgcagcaggagatgctattggaccaactggtgcaagagcttccagtgaaatatccggcgcttgattcatcagtttaggcttcttagaagcatgttgaccgttaaccacaaaattcccatttgaatcgaattgatgaatctccggtctcttttcaacataatccttctgctcatattgagtaaaccaaatcgacctgag

SEQ ID NO: 22574 - DNA, 826 bp, Setaria italica
  Peptide Sequence Number=SeqID_88548
gttgctgttctaaagattggtggagcaagcgaagcggaagttggtgagaagaaggatagagtgattgatgcactaaatgcaaccaaagctgcagttgaggagggtatcgtgccaggtggtggtgttgcccttctctacgcgtcaaaagacctggataaattgcaaagtgcaaaccttgaccaaaagattggtgttcaaatcatccaaaatgctttgaagacgccagtccagactattgcttcaaatgctggcgtagaaggagctgttattgttggcaagcttttggaacaggaaaacactgatctaggctatgatgcagctaaaggtgaatatgtggacatggttaaggctggtatcattgaccctcttaaagtgatcaggacagccctgatggatgcggcaagtgtatcatctctgatgactaccacagaatctatcattgttgagagccctaaggaagagagcagtgcaccagcgggtgggatggaatactgacatgccgatgaggttgtccattgcaaagaggattgctaactttaggtagcgtttgaagttgggatgaacacaatccccttataccaccatcaccgggttaaatttttgggtcaaatcgcggttggcccttagctgatatcttctgtttcatcgaaacaccctgtaaccgcacggttttgccacttctccctggaagtgcacttgcttactggatccggtgcggcactggtttcaagttgaatgttaggagtagatgttgactcgatggtccgggatccgatttccctcgtggtgatggttgcagtaatatatgctttatgtctttaccaaa

SEQ ID NO: 22575 - DNA, 388 bp, Setaria italica
  Peptide Sequence Number=SeqID_88549
cttggcctccttctccagggcccccacggtggagacggagaggcgggaggcgagggcggagaggcgcgaggagatggcgaggaacgcatccgtctgggaggccgagagcgcgctgaggtggcgcgcgtgggccgtgtacgccgccaggacggccgcgtggtcctcggcgtggcgttggacgacggccaggcgcgaggccggggagttcgcggcggcggagctggtggcggtggcggacaggaggaacgagacagaggcgagtaggatcagcgtgatcacggccgcgagcaccgcgcgacgccgtgcgggtgccttgccgccggccatggcgcgggcgcgtagcgtaggtcgggcgagtccgatcgagggccggggcgaggaaatggcg

SEQ ID NO: 22576 - DNA, 432 bp, Setaria italica
  Peptide Sequence Number=SeqID_88550
gccgttgaagaaggggtcctcgaggagctcggcggccgagggccggttccgcggctggccgatgcagcgctcgatgaacccacgcagctcggggtccttgagccgcttgagggccgccggggggacgccccgcgtgacgttgtggaagatctgcacgacgctgccgcactcggcgtagggcacctcccgcgtgaccatctccagcacgcacatcccgtacgagtagatgtccaccgactccgtgtacgtctccgtgtagagctccggcgccatgaactccggcgtgcccaggatcgtgtgagccacgtgcgtcttgtccacgatcgccgccagcccgaggtcgccgattttgacctggccgttgttgccattgatgaagacgttgctgcagttgaggtcgcggtggatgatgcatgggtcgtgggtgtggag

SEQ ID NO: 22577 - DNA, 470 bp, Setaria italica
  Peptide Sequence Number=SeqID_88551
atctcgagaattcacgaaaggatctctaaagcggagggagcaattcgcggacgaggggaggggattagggttggggcaaggcaatcgtaggtaggttgggtgccgccagcccgaggtcgccgattttgacctggccgttgttgccattgatgaagacgttgctgcagttgaggtcgcggtggatgatgcatgggtcgtgggtgtggaggtggttgaggccctcgaggatctggcgtgcccacttcttgagcgccttgacggagacgtggcggtggcgctggcggtactcgcggaggctccccgacgtgcagacctcggtgatgaagttgaggacgccggcgtcgcggtcgagccacaccttgtggaagccgatgatgtggtcgtggtggagggagcggagcaggcgcacctcggcgtggaggcggtccaccatgccggggtcgcggtccgccagcgcgcgcagccgcacg

SEQ ID NO: 22578 - DNA, 886 bp, Setaria italica
  Peptide Sequence Number=SeqID_88552
tcatgatgaagatgaacagcctcagattgtaattctcctcacgctgtcctgggctatatagctggggatatttcagcaatgtccgacggctgagatccttgtcgagaatggcaacaacaatagtagggacagcagtgtatatcacagagtacagcacgctgctccactcagttattgctgttgtcagggtgaaaccagtgtaaagtacataccagaatagtacaaagacaaaagtagcatttctgtaaaagttatataagatcatgtatgccatcctctggtagttccaatggccatgaaccaacaatagaggaactaaaaatctgaattgccccatggcgaaatctgaggccataacagcttgccttccctcttgtccgctgatgccaatgccaacgtcagccatttgaatcatggatacatcatttgcaccatctccaatagctagagtcatgtcactcgttctcttctttatgagatcaacaataccagccttctgtaggggagctacccgacagcataggacgacatcacaagctattgcgatttcaaagagcttctcatcccaatccgcatcaaaaatatagacaaggctgtttccatcaataatcaaagcaaggggcactctgagttgtgggtctgccgagaatgattggtatttgttaaccatggccattgcatcatccagactctttctgcatgaatctcttgagcgactgttgattacaatctgtaccatgtcccttgtcaaaagcttgcaggaatagccaatggagatggcagtttcttgcttgtcacctgttagcacccaaaccttgatccctgcttgcctcagtttctcaattgcttcaggtactccatcttgcagcttgtcctcaataccaga

SEQ ID NO: 22579 - DNA, 580 bp, Setaria italica
  Peptide Sequence Number=SeqID_88553
aaggtaactaagaaccgaaagctagccgagaatgattggtataggttaaccatggccattgcatcatccagactctttctgcatgaatctcttgagcgactgttgattacaatctgttagcacccaaaccttgatccctgcttgcctcagtttctcaattgcttcaggtactccatcttgcagcttgtcctcaataccagacgctcccaataggcacaagttcctctcgatgtcagcagccacgccacggagtaggtttcctcttcctagtagtgcggtgctagccttttcataagccatttgccactcctgaaactcttcttggctaagttcccgcataccgatgacaagcgttcgcaggcctaatgatgaatatgaatggagatgcttctcagttgcttggacaacatctgaattgacatttttgtcaatgattccaaacattgaactatctgcgccttttacaaacagcttgacagacttatcagggcagccaattataacagacatcctcttgcggtcactgtcgaactcatgaagcccaaggacatcatatctctgtttctcaccaaggacatcg

SEQ ID NO: 22580 - DNA, 380 bp, Setaria italica
  Peptide Sequence Number=SeqID_88554
ttttcaagcaaaagccaccgaccgatccaatctggaagtaagtcgtgaccatcccgctgcatgctcttagcttttgccaccaacaccgccggccctacggacgaaggagaggaggacgataacaatggcgaccgccgccacaaggccgatgatgatggcgagggttttcccggattcatcgtgctggccataggtatttggcacgaacccgccgtacgcgtatccattgtttgctcctcccacgccgccgacgccattgctactgccggtgccggcgccacctccgactgctggtacaccgccgttgccgctgccgccgccggcattggaccagaagcgcgcgtagcacttgcctaggtacacctccccggcggaggcgt

SEQ ID NO: 22581 - DNA, 293 bp, Setaria italica
  Peptide Sequence Number=SeqID_88555
ggggggaggtgctttgctttacagatgcgggttaggcaacaagtggacctgcctgtcctccttggctccgagctcaagaacgggacagcccttgcgcatggagctatctgcgaacagtcacggtcacatgcggcactgatttgaaaacttggtcgcttcctcctcggctccgtgaaaagataaaaataaatggaaagggaggacagacagatggcgataaaagggggaaagcgtagtttagagccgcccaatcgcataattccatctcacagctcgccgctggtaaattcagt

SEQ ID NO: 22582 - DNA, 271 bp, Setaria italica
  Peptide Sequence Number=SeqID_88556
gacgtgctggacgtgacgggcacgtcggagcagctcgggaagacggcgggcaaggacgccgccgccggcaaggccacgtacccgcggctgttgggcctggagggggcgcgcgcgtacgcgggggagctcctcgcgaaggccgaggccgagctcgacgggttcgacgccgcgcgcgccgcgccgctgcggcacctcgcccggttcgtggcgtacagccagcactgaaactctgaaagtgatgacgtgttcattgacgacttcgctgaagctt

SEQ ID NO: 22583 - DNA, 1165 bp, Setaria italica
  Peptide Sequence Number=SeqID_88557
ctacacctaaagacactaaatgatggctagacaaaagcagagcccattgcttgcccaggacctaatgcatcaaatctagcatctccaagtgaagaagtgaagatgatacaatataatatttcgctagaagttcataacaattggtcttgtgttgcgaagaactagtgatctttatcatcactttgtcggcttgctgtgtcgcaagcagaaggacttgagcctgtcaaggccgtcttctagagaagatggatcaattgcgaaggtgattcggagccaattcttgtatcctacagcacatcctggcagaagaaccactaattcttcctttgccagtcggcagcagaagtccatgtcatctttgatgtcttgaaggcaggttagatccagtttcaccatcacaaacatggagccttcaggtttgctcgggcaagtaatggcactgatgcccttcagcttctcccagcatatatcagatgtttctctaagaattttgacggttttgtcgaagaattcctcctttgtgttctctaggaggtttggaattgctccctggacaaacgttggcggatcagaggagatatcaaggtagctcttgatactgtccacaaccttagtcctttgaaatacactattaggatcattggtaacaatccatccaagccgccatccaggcaccagccatctctttgatattgaccctagggtgaagacaggagccacttccccaaacacacccatcggcacaaatttcctctccccaaatgtcaagtgtgcatagacttcatctgtaatgacaaatatgccaagcttccgcgctgtctcggcaaccttggccaggtgctcgtaggtgtagacattaccacaagggttccctgggttgacaatgaccatggcaacagtgttctcgtcagcaagagcttggacgccatgaatatcaacctcccaatctttctcaggtagaagatcatagtaccgagcttccatgccgttgaaaacagcacgtgcctcatagaacaggtagccaggccttggaagcaagatgttggcaccaggacgggctaaaacagagcagattatttcaattgcttgagcgcagccgcttgtgaggtagacgtcatcaggtgataattcgtatggcagattatgggataaatacttcgcaatg

SEQ ID NO: 22584 - DNA, 392 bp, Setaria italica
  Peptide Sequence Number=SeqID_88558
tttttttaacgtttaacggggataagatgaacaatatggtatatgtgagcgcgatagtacgccaacgacggatgcgtacgtacagcactcgtacagaatcgaaagaagacagattactgcacatgatagcttcccctgcttacccctgtacactagcaccccagcccgcagtaggcgatcgatgctccagcggatcaccatagcagccgaccaccctattattgcctaagtagtacagtaacaaataaatccgaacgaactaaataagcgccgtaattaagcaaagcctgcagttttgattaattaattagcttgctaggaattgctcgttgcgcttctcttctccgacatccactgcttgtactggtcgaagaactccttattctccttct

SEQ ID NO: 22585 - DNA, 558 bp, Setaria italica
  Peptide Sequence Number=SeqID_88559
ggacgaacatgaaggaaaaatactgtcagaccagtccagtttctggttatcggacacaacaaaggcctgtccgtagccttcaaggctgtttggtagctgtgagcaagccttcttggcttcaagtggctgcttgaagaactcagctatgtcattcatcaggttctcaatcacttcatctggaactccatggttggtgagctgaaagaagccccagttctgacaggcagaaaccaacttcacgcactcctcctccgttgactgtgggtcaagtaacttgttgagatcgacaattggaattaccaaagtactaccatggccgatgatcacctcctcagacctagcctccatcctgacgtatctttccggtatcttgtcattgaacccgttgcaagtttccgcaagtgcctgcacattagccacagggagagatccaacggttcttgctgccattggtaatttccaagcttccacagttccactgcaggtagttgttctccacttggagtttttcagaatagagaagatgctggaatatagatgcgcttcaacctcgtggag

SEQ ID NO: 22586 - DNA, 464 bp, Setaria italica
  Peptide Sequence Number=SeqID_88560
gggtcgttggcggaggtggcggtggcggcctcggcgatcgggattggcgtcggcgtgggcgtcgggatgggcgccgcctgcacatcgtcgactacggcatcggctatggcttccagtggccgggcttgctgcgcggcctcgccgccaggcacggcggccgccggaggtcaggatcaccgggccatcgacctgccccagcccggcttccgccccgcgcaccagatcgacgagacaggccgccgcctcatgaactgcgctcgtgagttgggcgtgccgttcaggttccgcgggatcgcggccaagcgggaggccatctctcccgatgacctggacctgggcatggctgatgatgacgaggtgctcgtagtgagcagcctctgccatttcagacacctgatggacgagagcgtcgtcgccggccggcccagcccccagggaccaggtgctcgataacatccggcgga

SEQ ID NO: 22587 - DNA, 323 bp, Setaria italica
  Peptide Sequence Number=SeqID_88561
caaggatgctaccattattacggagaaacatcttactgacagagacgggagggatctggactttatggagcacacaccattggcaacgggctcctccaatgagacggaatcggactatagtcatggcaacggtttggacattccagaaatggatgatatgatctcagattaatcacaatcgggtcgtcgcatgtattgcctcaaagtgattcctttgttcgtttcatatacatcattagttaagattatcaaagaactgatgcttatgtatagttacaagcaggtgaatcatttgaagtaaactccatgctccctgaagaaca

SEQ ID NO: 22588 - DNA, 303 bp, Setaria italica
  Peptide Sequence Number=SeqID_88562
aggtttacactttactacacaagtgtgagctttcataatactgttatcattcttttattcagtaatgtgagatcatgataaaggtgctgccgtgtacacagtacacggcatctgcttcactccttgtggttcatcactttaggggaatgccaatttggtgtttgtgtgttcccttggtcatatctacttttaagttttagtcatgcaagtatgcactatgacgaagatttgacttatgtatgctgtgggcgaatgaacatacattattaaatgatcagaagttgtagttaaaaaaaaaaaaaa

SEQ ID NO: 22589 - DNA, 1070 bp, Setaria italica
  misc_feature (93)..(93): n is a, c, g, or t
  Peptide Sequence Number=SeqID_88563
cctcgcaatcgcagtcccgtctcctctcgcgcgcgtgctcccctcgactcgccccatcggtggcgcctcccgtccgctccatccggcttcttnttcccacgcgcgctcgatctggtaatttctggtgcagaataagcagaagaaccggagacttgacactctagcgcaggggccctgaaagcatgcgatggctgggtctttcggttgacgtgttccgctgggggatctccttgaacctttactgccgtgtgattctgtaaatcacctctgtggatactggagacattcctgattcataagcttgtgaaggcatttcaaaacttccccatccagtctctggtgttgctgttaaggtgctgtggttgcttggccaaagcttttgaggagaacggagtggagtactaatggtgtggaaagcagctgctcagacaagattccgcgtgtttaagcatgagaacggaatcgctgtgagagttatagcttgcttccagccgctgcagaattgccaggccgagtactttcgccatctcctcaagcctgtgacgtagcttcgctctgctctccatttgctgctgaagaaaaatttctgatttagatttttctccatcacaattcaagtgggagaattccccgttcatctgaactttctgctggtaattttttggtggttgtctcttcatggcggacaaggttaatccttggtgccattggcctaatcctccatggaaattcaacactgaaagctctgcgggcaatatctacccacctgacattggacttgttgattccaattcggtggcattgcctacatatctgaacactgttgctgcacctgtgccatttttcacagcatcagttgctgacagacctcttccaatggctccaagatttgtcacaaaattggcaccgagttttgaattttctgcactgtatccctcgcataagagatctctggttttctaccaggagaatcatactcctattgcagctcctttgataagcaagcagacactggatcctgtgccagagctccaaggtagcaatgagactaatgtaactgatgttggagc

SEQ ID NO: 22590 - DNA, 1235 bp, Setaria italica
  misc_feature (1208)..(1235): n is a, c, g, or t
  Peptide Sequence Number=SeqID_88564
tgagactattccgactgccacattgcaccccaataaagatgagatcgagtacctgaggaggcttgtcatccacagggactcttctatactggtgcttaacaagcccccccaaagtgcccatgaaaggccatttgccagtacataatagcatggatgtgctagcagcagcagcactgtcatacggaaacaaggagggtccgaaattggttcatcgactagacagagaaagtagcggtttgattttgatgggtagaacaaaagaaagctttactcgactgcactggcttttcacaagcgtaaatttagctagaacaacttcacagacatggaataaggcatgtgaagcatacgtgcagaagtactgggcgctagtaattgggactcctaaagaaagggaaggagttatatctgctcctatttcaaaggtccttctagatgacggtaaagctgagagggtcattctggcacatccttctggcatagatggtgcacaagaggcaataacagagtatcgggtgatgggaccaaccattaacgggtgctcatggattgagctacgcccattgacagggcggaagcaccagcttcgagtgcattgtgctgaagctctgggcactcccatcgttggagattacaaatacgggtggtttgtgcaccaaaggtggaagcagaatcctcagcctgactttgaaccgttcactggagaaccatacaagataaggcggccagaaggattggaggttcagaagggcagtgttctatctaaagtccctttgctacacctgcattgcagggagatggtcctccccaacatagcaaagttcctgagcagcaccggagaatggcatgatggtggcgccgcatgggccaaggagaagcccaacctcctaagattcatcgcaccaatgcctccgcacatgaaaattagttggaatgtcatgtcgtcatatctggtgtgatctctgccagttttttttccaggaaaacacctggtgtgatcaactgatcatgtaccttttgctttgtttgtaacccctcttgtcaatcccaattcccaagccatgtcgtatgagattgtagttgcttagattgttttagactctgcgattgcagtcaccttgtcagaatcaatgcacaaaactattgatgtgaatatgtatccaatattttttgagagagtgcatctcagtcttggggaaaaaaaaaannnnnnnnnnnnnnnnnnnnnnnnnnnn

SEQ ID NO: 22591 - DNA, 381 bp, Setaria italica
  Peptide Sequence Number=SeqID_88565
aggtttgcccccatctgggcttggagatcgactatgtgacctgcggtgcctgttggcccgaggacgtggagagcatgatcccccaggtgagtaattatcacggtggtccctgcccctataaatagtttaagagttcaaaatcctgagtatggatgtcacgcaaaggacaaaaggagcactacatcaaaagcataatacctggaaagtacaagaacaagcagaatcatcaacaaactaaattatatataactgaacacttgtcaacagcagctagcagtacagtaccacttttatcccaagacaactgaagtataaagcgagatatcaattttacctgtcccatatcaataaaagctacccagtttgatccaaacatgcaat

SEQ ID NO: 22592 - DNA, 142 bp, Setaria italica
  Peptide Sequence Number=SeqID_88566
tgggacggcgtgcgcgccgagatcatcccggcgaagcggcgcgtggacctctacctgaaacatgattcccggagctacaagcttgaggttctctttgaggacatcagggagtgcttcggatgcagcttcgatgggacgggcg

SEQ ID NO: 22593 - DNA, 283 bp, Setaria italica
  Peptide Sequence Number=SeqID_88567
caactacaacccagacatgtgcccccaaatgcacatttgtgtttctcctagcagacatatattggtgacacatttttctgcaaaatccatgcattctactaccggatcaaaccaaaacttgccaaaccaaactacgagccgcaagccaagcctaaggaattcgagcatgcattgctcgataatttcatctaaattccctcaacaggttcaaaccaaactgaacaatgacgcatgcacaaactcaaccaacaattgctgcagacagcacaaaaccgacaagtcc

SEQ ID NO: 22594 - DNA, 216 bp, Setaria italica
  Peptide Sequence Number=SeqID_88568
ttcgagggccccgtcgccgtcgcggcggtggcacccggcgaggagctccagccggggcagatctacttcgtgctccccgccgagatgcagcgccgccgcctcacccgcgatgaggtggccaagctcgcggtcaaggccagctcggcgctcgtcaaggccgccgccgaggctgcacgccgcccagccgtcctcccctgccgccgccgccggcgcggc

SEQ ID NO: 22595 - DNA, 339 bp, Setaria italica
  Peptide Sequence Number=SeqID_88569
caactcacgggtctagcattattctctgccgagttgctttcagaaacaacaggagaaacacacagcttgccagcatggttgcaggatcgggaccggcggccaagaaaaaccgctcgctttggggtcaatactttgcttggttactgggaggccgtcaggtgcatcaggctcgatgcgtcgaacagctccatgaacctctgatcagtgctcctggccttcgccgccgcgaagtgcaggtactcgtcgaagaccgaggacaggcaccacttctgcagcttcctcaggcacccgacgacgcagccagtccggtgcttgcctctcttgcagtggatggaggga

SEQ ID NO: 22596 - DNA, 157 bp, Setaria italica
  Peptide Sequence Number=SeqID_88570
caagctgttgttgttgtccaccaaaagattggaattgtgtttgttgaaaattttgttgtgggtatccaaaggcctgttggtgttgggcttgtggaggggggtagccttgatatgaaggtgttgggttattaaatccagaaaggaagtcatcttcaat

SEQ ID NO: 22597 - DNA, 554 bp, Setaria italica
  Peptide Sequence Number=SeqID_88571
acaaccaatctaactacgaccgaatgtcccagtgcctgtcccctcctggcctgaatttctgatgcgtttatgtgttcgtttggctggtgcagggatgtagccctgtactcactggctgtgggagcttgtagcgcagatgcagaggatgaaaaggagcttcagctggtgtaccaaaggaatggccaatcttccattaaggtgctcacagagggttattgtggcgaactggtgatatccttttattcttttaatcatatatcatgtatcctaatcctagtgtcaactagagtgctcagatcagtatttaatgatcgtcatatataataatccacagtagtcagtacccttgcaaactgatcatctgttggattcttggttgtttgctgtttgtcaaattgagcttatcacggaactctaatgcatgagcttggtcaggtcaagttgtactactcctggaattctgtatgctagatcgtgctcaactaaccgaacttgactattctatttcagctcaagatttcttattagaatggatccttaagttataggatggt

SEQ ID NO: 22598 - DNA, 598 bp, Setaria italica
  Peptide Sequence Number=SeqID_88572
ggcatggtcctgatccttgggagcagctctgcaaccttggcgatggtttcaggagacagctcatcagtcgatggctctgtaagctttgctctgatctccaccctctggcttgaaccacctgccaaacctgggagagactgcttacaccgcttctcttgtgttccagctgccagggatgagccaggcgtgaggctgtagcgacttgggacgatcctgaccttggagctccccgctggcctcttcgcaacggctgcattgcctgtgtgattgaccacgcctttgggcttgagctcatcatcccccttgttaactgcaattgcagcattgcgtccccttgtctctgtagccttggtgttgcctcccgctgtctcagtagccttggaagccgactgcctcctggacctggggctcatgctcccgctcctcgccttggctctgcttgctgcagtcccttgcctggcattgctggatggccaaggtctggcggggacggcgttctgcttggaacgctggccatcttctcggacggaagagagcttactggagaacggcttgacccgcgccgctgccgctggccgcccccagcttgctgccggcg

SEQ ID NO: 22599 - DNA, 261 bp, Setaria italica
  Peptide Sequence Number=SeqID_88573
aggtgctatcctcattcacccagtaggagttgagaaccctgagtccaccaatcttgcgtccagctctctcctcagcaacagacctcttgttcctctggaacttgagctgggtgataccctggtgcttgggcttgccatagacaatacccttaggcacaggcctcttccggccaccacgcctgacacgcacacggtaaacaacgtaaccctgcttggccttgaagccgaggcggccgccaccgtagccgccgccgccgccgg

SEQ ID NO: 22600 - DNA, 1794 bp, Setaria italica
  Peptide Sequence Number=SeqID_88574
ggaaaaacgaccacctcacctcagcttcttcccccgccaatggcggccgccacagcaggcgtggccacagctctccggcccccatatcaccttcctctccggcggcagcgtcccaatccccagcacaacccttcaaatcctgccctctgtttccccccttccctttcgccgccgtggccgcatcgtactcgtctccagcgcctcgtcgtccccgtcttccccgccgtcgccggaggacgcggtggccgaggcggttccggtgcctacggcggagtcctgcgtcaacctcggcctcgagctcttctccaagggcagggtgagggaggcccttgaacaatttgagaatgccttggagctgaatccaacacctattgaagcccaggcagcgctgtataacaaagcatgctgccatgcgtatagagaagaaagcaaaaaagctgcagaatgtttaaggacagctttgcgagactacaatctcaaatttggtaccatacttaatgatccagacttggcgccattcagagcatcaccagaatttaaggaacttcaagaagaggctttgcgtggtggagaagatattggttctgggttccgaagagacctgaaactcattagtgaagtacaagcaccatttcgtggtgtccgaagattcttctatgtagctttaacagcagcagctggaatttcaacattctttactattccccgacttatactagcagttcaaggaggtgatggtgctcctgatcttctggaaactgctgggaatgctgccatcaatattggagtatattggaggtattgttgtgctggtggctttgtatttctgggaaaacaagaaagaagagaagcaaatcacacaaatttctcgtaatgaaacgctttcaagattacctgtgcgcctgtcaaccaatcgcattattgagcttgttcagctccgggacattactaggccagttatattggcaggttcaaaagaatctgttactcgggcaatgcaaagagctgagaggtatcggacggaactgctcaaacgaggtgttcttctaattcctgtgatctttggtgcttctcagaaagaccaaaccagaccaaggggttttggaacgagaagagctgcagcatcaattccttcagttgggggtgactttgaaaagcgtactgaatctattgcggcaaagtcacgtttgaaagctgaggttcgatttaaggctgatattgtctcacctgaacaatgggaaagttggatacgtgaccagcaagaatctgaaggtgtcactcctggtgaagatgtgtacataattcttcgtctggatggccgtgtcagaagatctggaataggtatgccaaactggaacgacatattgcaggaactgccacgacttgaagatctgatgagcaaacttgaaaggtgaaaaaggtgttttccttccacgtcagaacacaaaatgatttatcggtagtgatccagaaatatggtaaaccgtgctgaagtgtggttacaaaggggttggatatattctattcctggaacttcagtacagatccacagcttctcacaaaatctaattgaagttcttctaactactgttgcactagttccatgtcgagaagaaccaaaccctatctgttcaaattgtacaattcacggtttacccttcgtgccccttgtaatttccgtgcttctgcaccctctgtgcttggtccgtgtacctcatacagcacgtatgcatgggtgctcaacaacaagaaggttgggtgatccgatgcctttgtgtagaggaagccgtttaa

SEQ ID NO: 22601 - DNA, 904 bp, Setaria italica
  Peptide Sequence Number=SeqID_88575
cacatgacatgagctcacagcattcgatactaaacctttgttgactgataacacaggtgaatcgcaaacatagttaacagcatttgctccacagtacacactgctaacaaagttcatggggctcagaacacaagtagcaaatttcgacaatgcaataaaggtaccaaatactatcgaagtctggatgggacaggttccacagtaggagagcatcaagacatatgaactcaacggtagcggcggagggagagggtctggttgcgcttccaggtagccctcctcgagggcctgttcttgtggtgagcactgcccttgccacgcagaccacggtacttcttgcctgcagaggtgagaccacggagttcgcggtgcttgtgcacatccttgcatagccagttgatccttgggtcattgcgaatggcagtgtgggccacatcaacaaggatgacctcaaagtacttgtaggtgctatcctcattcacccagtaggagttgagaaccctgagtccaccaatcttgcgtccagctctctcctcagcaacagacctcttgttcctctggaacttgagctgggtgataccctggtgcttgggcttgccatagacaatacccttaggcacaggcctcttccggccaccacgcctgacacgcacacggtaaacaacgtaaccctgcttggccttgaagccgaggcggcgggccttgtcggggcgggtgggccttgtgaggcggacgatggccggctgctgcctgtactcccagcaacgcacgcgctgcacgaaccgcatcacgtccgactgcttcctcctccatagctccgacacgtacttgtacgcccccatggcggatgcggctgcggctgcgcgcgacggcggcggcgaggaaggtggtggagtgtgcggag

SEQ ID NO: 22602 - DNA, 1075 bp, Setaria italica
  Peptide Sequence Number=SeqID_88576
gactgacacctgcaaagatactataatcagagtgcaaaaccacaagaacccgactccaaacactgcacagaacaagtcacaactacgccaaaatcaagaacagtgtgcaaaaatacatcggcacagactgagtttgctcacaatcaaccgtccacagcagcacaaagcattagatcactaaccattcgttgtcggataacacaggcaaattgcaaattgttcacgacatatgctccatagtagacttctaacatagtttaagtgctcagaacacaagtagcaaaatttgaaaaatgcaacccaacacaggtgaagttttgcttgggatggtctccaatgcaactggagcatccaggcatagagctcaacggtagcggcggagggatagggtctggttgcgcttccaggtagccctcctggacggcctgttcttgtggtgggagctgcccttgccgcgcaggccacggtacttcttgccagcggaggtgaggccacggagctcacggtgcttgtgcacatccttgcacagccagttgattcttgggtcattgcggatggcagcgtgggcaacatcaacaaggatgatctcaaagtacttgtaggtactatcctcattcacccagtaggagttaagaaccctcagtccaccgatcttacgtccagccctctcctcagcaacagacctcttgttcctctggaacttgagctgggtgacaccctggtgctttggcttgccatagacaatacccttgggcacaggcctcttcctgccaccacgcctgacacggacacggtaaaccacatagccctgcttggccttgaagccgaggcggcgggccttgtcggggcgggtgggcctggttaggcggacgatcgccggctgctgcctgtactcccagcagcggacgcgctgcacgaagcgcatcacatcggactgcttcctcctccatagctccgacacgtacttgtaccgcccccatggcggatgcggctgcgtgcggctgcggcggcctcgaccgccgaatcatccttgatcttggggatggtgatgatcctcgcaaagcggaaatccggc

SEQ ID NO: 22603 - DNA, 505 bp, Setaria italica
  Peptide Sequence Number=SeqID_88577
aaccaagaacaatcattcaagatcgcgccaccatcatcgatagagaagcagattgatgccaacacacttaaaaatcatattgttttgccagaagcattctgtgatggtattgggttgcgggaacgctgtgcgattacactcaagaccttaaggaatggtagtgaatcttggcaggtacatagtctcccatgcaagaataacagctaccagctcaagaagggtaaaacatcaccatctgtgcgtacaacgtgctgcatacaagattaacttcatgcttaccaagagtagtaaggtacattgcacattagagtgtgaaaggaacaaaggatacggggcagtcattctctatgcttcagaatcctaaagttcatgaaggggaggaacccaaagtaccaaaacgaccatcacatggccagtaccaaaacgaccatcacatggccaataccaaaacgaccatcacaggaccatgcatctcaccacaagcattcaagtcaaatttaatcat

SEQ ID NO: 22604 - DNA, 497 bp, Setaria italica
  Peptide Sequence Number=SeqID_88578
cgacaaaatattgaagagcagcaggaagcaccatctgcttccattcagaagcagcaagaagcaccatctgcttccattcagaagcagtataacaacaatttgccaagcagtaatggagaaaaggaacaacaaagcctcacagcatcttggaaccagacatcattcaagatcgcgccaccatcatcgatagagaagcagattgatgccaacacacttaaaaatcatattgttttgccagaagcattctgtgatggtattgggttgcgggaacgctgtgcgattacactcaagaccttaaggaatggtagtgaatcttggcaggtacatagtctcccatgcaagaataacagctaccagctcaagaaggaattcagttaaccaaaagcaagcgctggtgctgcaacaatccattatccagggcgaagtgtttaatgggacaacagagatcagctgggtaccaaactaccaattccccttcttggcaatgtgaggccaca

SEQ ID NO: 22605 - DNA, 1373 bp, Setaria italica
  Peptide Sequence Number=SeqID_88579
cgaaacccctgtcgctctgccgccgccgccgtcgccgttgccccatctctcttgtgaacaccgggcgaagcgaagcacgccgcccgaagggaatccgtcgcccatctgcttgggggcttcgttggtcgattttcatcaggaaagttgtaccattagttgaggaagtggttcgagaaaatgcctatgtgtttatggatcaaaggaaattgagtcaagatatatcaaagcacctacagtaggcagaattgtcaaaccttgctgcactatctctgcgtactgctgccaacttaaccacctcaatttaaggtaaaggggaaggcattgaaccatcatggttccttggttcatcttgcgacaggtgtcgccaacttaatatcaatattggcattgtgaacaagtcctaacaggctggcgctgaaaaaaatgttatccatgccctaagcttttgcttgttgagataaatcacactgcccttccttcccgacatcgtcatgacactaccagatgatgtgcttattgatatctttctcctcctccctccacacccctcttgcctccttcgagcgtctcttgtctgcaagcattggcactccctcatacttgacaatcgcttccttcaccgctttcaggcactccatggattaccagtacttggtgtcttcacgaactccactcgcatcccccggtttctccctgtcggggatcctcctaaccgtgtggcagcagcatctttctctctaccagacatccactggcatgtccttggctgccgccacagccatatccttctcattggttcaacttggaatcagctccttgtgtggaaccctataaatggccatgagcgcctcatatcagccccacctgatgtggatcctcgttttaattatgggcatgtgcctgaaagcaacgctgctgtggtttgcgcagcgaaccatgctgaccatggttattgccactcttgtcctttcttcgtaatatgggttttcaccaccacgcgctatgcctatgccactagatactcatcagaaagtcgcagttgggagatgatggcatcttcaccaataccatctgatgttgatttcaggcctagcatccttgtcaggaacatcttgtattggccgctcaagtcaaagtatatccttgcgttcgagttggtgacacataggttataccatattgagtgtccaccagagacgcatgatatatacaggaggaatgtccatatgatgaaaatagaggatggtgggcttggccttgctgctgtgacaaagtttaacctgcgcctgtgggcctgggatactgatgttaagggtgttacaggatgggtgctgcgcaggatcattgagttggataaatttctcccattggaa

SEQ ID NO: 22606 - DNA, 686 bp, Setaria italica
  Peptide Sequence Number=SeqID_88580
aacaataaattaagaaagtaagtaaccaaaccaagaagaacgacaatagaataataataacaggaggaatgtccatatgatgaaaatagaggatggtgggcttggccttgctgctgtgacaaagtttaacctgcgcctgtgggcctgggatactgatgttaagggtgttacaggatgggtgctgcgcaggatcattgagttggataaatttctcccattggaactgccgtctctgccttctatggataatcgtccatgtggaaggcctcctgtcaggatattgggtctcgttgaggatgatgatttggtttttatatggacaaaaactggggtctttacggtccagctgaagacaatgaagcacaaaaaagtgtttgaggctgatgtctctgcaagtgtttatccctacacaggttttcgcattgcaggtgccgtggcacatgatggtggaaatgttgcagctgaataaatagtaagacagtatctgccggcttcctttggtcaactaatcagcagataaaatcagatgacatctgctgactcccgtttgccgttcatgcctagataataagcagtgagactgacataatgcaatccaataggtgccaatagggcacctttgtttcgtatattctgctatgattgtgatgtatctatcttatgtaacactcgtatcgatcatttgg

SEQ ID NO: 22607 - DNA, 224 bp, Setaria italica
  Peptide Sequence Number=SeqID_88581
ggcacggtcaggggttctcagctctgcttctagtctagcaacttctgtctgaaggtgcttcaccaattgcttatctgatacaaccatattaacttttgcagtatttgtgacctcttttgcacaggttgcaaagaatagagtatttctagattgttctacatgtgtcagagctgggctcatagtacagatgattgctgttcttgcgtttccacccaaagaaagct

SEQ ID NO: 22608 - DNA, 253 bp, Setaria italica
  Peptide Sequence Number=SeqID_88582
ccgagctggagaagccgcggagacccgcgccccgccggcttgcccgtcgcctagttgtccatggcggccgcgatgggcgccgtgatccggcggatgcacgcggcggcggcggcggcgcatcccccgcgcctgacgaagctcgcgctgcacccgcccaaatccgtggaggttgaatttgcagatggtagctcatttcatctgtcagcagagtttctcagagtatacagccctgcagctgatagcaaaatcagat

SEQ ID NO: 22609 - DNA, 441 bp, Setaria italica
  Peptide Sequence Number=SeqID_88583
cgtaatcaactgagaaactacactctgctttagaattcaatttttttattttcatttgcttctcgaatcaatgtgatgcacactctttcgagaatccatatgctgtgcagactgcaaaactgaaagttggatctcctcacatgatgtggtggcaagttttgtcgcagggatagcggcagtcgattgccctgacttcagctcgattgtagtaccaatcgccgactgatttcgcaatccccttgttttgaatggtgggggagccacctggtacaatgttccaggtgcccagctgctcggactggcagtgcgcaaagcaggagcttatgaacagcccattgctcctggaccgggagaagccctgcacagatgacaccatctggtccctgaaaccttgcaggacattcatttgggatgcattgcaggctgaacggttggacttgc

SEQ ID NO: 22610 - DNA, 417 bp, Setaria italica
  misc_feature (51)..(51): n is a, c, g, or t
  Peptide Sequence Number=SeqID_88584
ctggcggctgcgcgggcgaggagcaggcgccgcagcccatggtgatgcggngcccccggggccgcccggcggggtccaagaacaagcccaagccgccggtgatcatcacgcgggacagcgccagcgcgctgcgcgcccacgtcctcgaggtcgccgcggggtgcgacgtcgtcgacagcgtcgccgggttctcgcgccggcgccaggtcggcgtctgcgtcctcagcggcgccggcaacgtcgccaacgtctccatccggcagcccggggccgggcccggcgccgccgtcaacctcgccggccgcttcgagatcctctcgctctgcggctccttcctcccgccgccggctcccccgtccgccaccggcctcaccgtctacctctccggcgggcagggccagatcgtcggcggcgcgg

SEQ ID NO: 22611 - DNA, 756 bp, Setaria italica
  misc_feature (37)..(37): n is a, c, g, or t
  Peptide Sequence Number=SeqID_88585
aagtccattccttaatgttttattaatcattgttgcncgtttgctggagagttgcatgcggaatatcagaagtgctagtgatgggaaatatggttgcaatcaatcaaatgaccatgatgatggcggcctggcaaatgttgaagtgggtaattctgcaaatatgaatgaatgccctaaagaaatccatggagcagaccatacagaggcaagtgtgtcgatcaagcagttgaagcagttggagttgaagcagttgaaggagttgaagcagttgaaggatctgaggtctttgtgtattaaaattgtcttctcagcacttagtcactatgaaagtcatgactttggagaaaacttctggaatattttttctcttcagtgaaacctctggttgactgcttcacacaagaagcttcaagtagtgagaagccaagttcattatttgcttgcttcatggctatgagtcggagcccaacattagcaccactactggagtcaaataatcttgtaccagctattttttctattttaactgtgaagacagcttcgggatccatcacctcttatgcacttgagttcattgagaatctattgaggttggatattgatttggagcagcaagatgacaattcagtgaagaaaattcttgttccacatatggatgttcttatccatagtctccatgattttgttaatcatcgcaaagagcttaacaggttatctggtacatggcttgggcaacgtgaactctgtccaaactag

SEQ ID NO: 22612 - DNA, 576 bp, Setaria italica
  Peptide Sequence Number=SeqID_88586
ctttcttgcactgccgaagtatcttaacactgctatcgtcgtcccaacaatgcaaaacaaacttaagtaagacaccatcagcaggagggacagactcaaacatgtcaccagagatgaactgcaccgtgccatcagcaggtgcctcgctgaccacttgttcaaggtccagcacgctgcactggatgtgcggaaaggccctagcgatggccaccgcggctgcgccgtgcccaccgccgacgtcgaccagtgagctgagcccactgaagatacttgcaagaccgggatcttttagaatggtatccatggcgaaattgctatctgcggcgcatgcttcgttcaagactttgttgtacgcgacatcgttcttggtcaggggcggatccaaaatggagctacaccccgggctaagttgctgaatcatcaccaaaatagtctaatcttgcctcataaatctccttttattaggctaaataccacatatgttaaagggactacatgggctcgccccgggctgcagcccgggcagcccgggccctagatccgcccctgttcttggtcatcatccatggggtcatg

SEQ ID NO: 22613 - DNA, 1754 bp, Setaria italica
  Peptide Sequence Number=SeqID_88587
agaaacctggatcagtaaagcaggtagccaacagcttgttacacttccacaggcacctgaaacctgaatcatacatacgtgcctcaacagtttgacaaatgcagtaccatgaataaccttcagatccttcaaacggttcattcaccgagactctcggtactttcgacaaatcgtataaatcatttgacacatctttttttatatcttttccatcagatctacatttttttacaattgccttcgtggggaaacagggggtgagaaagcagatgtctacatttggcagaaaccagccatcccaacagataacaaatcaaccataaatctgagtagcctcatgatgattatgtgctggtgaggaatttatgatcctgaatcatgcattgtgccatcaatatcctcgccaatgtgctcattttcctgccatccatgcagccacacatgcaaggacatgctcgctttgcagtgtttgcctgagcttgagcttgtaaaatagcgccaatcatgatttgtataataaaattggacacttctctgaacagcagaaccctgattaattgtcccgatggttgcatcaccagtgaaacaatttaagccttgctatgcagaggagacgagaaatggtactattagaaagatactcaacaccagtaagagggtgatccgaatagaacggccaaactgaatggtttgttgttggccttgtatatgaagcccacccgtccttgcagaaattctggaactttccttccaacttgtcaaataacttcggcttctttcagttagccctatcaatctctgtgttaataaggatataaccctgaagtccagattatttggcatatcatatcttaatggacgatgttcatcactcttcggtttccacaagctattccagaaccatctcactcttgttaaagattctgtacttctccggatgcctgataaagcagttgtctgacttgaggcctgaaccccgttcggagataattttctatcatcatccatctcattaccaatgtcaatcttccaatgaccatcaccagaactcaaatttgttctgtggccatgtaactggtcagctagactgcaaacatcactcttaacactagaaatttgtctgggtggtacttcatgaatgtctttaatgatcaaagctgcatccttctgatcgttcatgccaattggtacattcttttgcctggatggaatatggtaactactatctgtactcttcatttctgaatagaactctgcaggtgctgaaaggaaagcaactagatcatctcgctcctcatcatctaacttcacccagttgagccctctcctgccactgtccactgaagaaccgtttatttctttctctacacgagaaatctgatccttgattgctacaacaaactgccgacgtctggccactgtaccctcttccagtgaatacttatcattgctggaacttacagctctctcaaactgttccaactgccattttgcagtccctaaagctgtctgaagctccctttgcaaatcagctacctcctctgagctagaaccattacttcgttctcgcatccaagttctataaatagattccatcaagtccgccgactcctgcacctcctcggccgccgggaagaacccgtccttctgccactgctcgagccctcccggcgccgccatgtcggcctcaacctccgcagcagatcaaatcaggaaccagacgcccgggacccgcgaagcgccgacgaaacccg

SEQ ID NO: 22614 - DNA, 455 bp, Setaria italica
  Peptide Sequence Number=SeqID_88588
aaagtctaatagggtaaatccatcattacaaaacaccaagtgaccaatttcacgagttcacatacagtacagcataccagctaggaattaccgagtctccaccacatgacagccacacggctacacccatacatactactaaattagtgagttcatcacatattacatgttcgtgactactcaaccatagtgatagttgtaatactagtgagtagcaatttaagtattacaaccaaaaggagatacataaatagataattaagcttgcattgttgacatggagttgctgcagtttgataaagcttgaacttgggatagcacagcgccaacaagttaccatcagttgctttaaatcatcaaagggcaagccccaacaaaaggtcaaacagcaaactatgtgatattgcttcaaacggtaagctcctgaagctctctatcgtcttcgaatcaaccaa

SEQ ID NO: 22615 - DNA, 357 bp, Setaria italica
  Peptide Sequence Number=SeqID_88589
cttctcaagaaagagaggtagttgagcaacttctgctggaacccattgcaaaccaaccgatcatctgtgataacctcaagaaggtttaccatggaagagatggaaaccctgacaaagttgcagtcagaggtttgtctcttgccctaccgaaaggccagtgttttggaatgcttggtccgaatggagctgggaaaacatccttcatcagtatgatgattggacttattccaccaacatctggcactgcctatatacatgggatggatataaggagtgacatggatgccatctatactaacatgggtgtatgcccacagcatgtacttactttgggtaaactatttagtaacgggtaaa

SEQ ID NO: 22616 - DNA, 427 bp, Setaria italica
  misc_feature (384)..(427): n is a, c, g, or t
  Peptide Sequence Number=SeqID_88590
aggaagggactagttagggaccagaggaaggcgctgagaggaccgataggatggcggctagcagggagtggcagacactgatggagtgttgcggctttgagccagtcaagctcagcaactacgccatgagccaggctgattttctgctttggaactacgatgcaaagtacaagtattcacttgttgagctgccaccagcgttcttgtccctggcatgggagaagcggccgctgctcaccgtgtctgcttggcggtgagtcctttttgtgtattggtgctgttgtatgtagcattgtcatagaatcagggaagaaatgactagaattggtttgcattgtattagtttcctcccaagatgatgacaatgactagataggtaaaatnnnnnnnnnnnnnnnnnnnnnnnnnnnnnnnnnnnnnnnnnnnn

SEQ ID NO: 22617 - DNA, 1040 bp, Setaria italica
  Peptide Sequence Number=SeqID_88591
acaaaaaagcaaacaagtctaagaacaaaaggagacggccagggaatgatcgccacaaaagtgactgcatatgtgcggtttgtcaagttacacggcgtaagaaggaaagggatgaaatattggctgttgtagataatgaaactgctgcgatggatagtaacacttctgaccagcatgacatggagggaaactctggtgctaatcatcctggcagtcatgatacttcctctagccatgagcaaccaccaaggactgatgtgtacaaagagacagtggaagcagatgattctgggattcggatggaagatgttggaaaattctccagtgatcggccatctagtttgccgcatcctgactatgatgatgagggttctagacaacattttgagggaaaagaacaggttgagtatagagatatgaacagtaatggagagcatacttccactcagcctaatgagtactctgatgttgagaatcaccaacagaaggcacagatagagaccagccaagaggttgagatggaggaggattatcccatgctgcagctgaaccctgcattccagcaactttgtgcgagcctcttccccagcaacccgagctccactttcggggtccgccattcactgttccgtccccggcgccgagctccaatgaaggagagccccctgcatgcagccatggcagagttaatgaagcgtcgttaggaatttcaccgcttggttttctttcaagagaagccgctccaaggcagactttggcaaagctgtaccctgaagacgtggaaactggttgggatgatgaggtcgattagtctatacgttttctttgagctcaggatctggtctgatgtaggcgtgtgattagttgaggcatgcgtgtctattataacatggattccgaaattctctgcgatttttgtatcgggctaattggggtagccacatgtggctccattccttgccgccctggcatagggttggcctgaacttcccctataattggaggatctgtaggatttgtttagtgtttggacaaaatta

SEQ ID NO: 22618 - DNA, 947 bp, Setaria italica
  Peptide Sequence Number=SeqID_88592
gctcaaaatatcgatgcaaaccttgggaccattgttgaagagtgcatgcggcactatgatgagctgttccacctgagagctatgcttgcaagatcagatgtgttccaccttatgactggcttgtgggcaacgacggctgagcgatgcttcctctggatgggcgggttccgtccttctgaaattctcaagatgctgatacctcagcttgatccacttacggagcagcagctactagggatgtgcaacctgcaacggtcatcggagcagactgaggaggcgcttgtgcaggggctccagcagctgcacaagtcgctggcggatgcggtgggcgctagtcctctcagtgatggcgcaaatgttgccaactacactgctctcatggcactagcacttgacaggctcgacacccttgagagcttttatcgtcaggcggacaacctgaggcagcagaccttgcaccacatgcggcggctcctgaccactcggcagacggcgcggtgcttcctctccatcggcgagtatcaccgccgcctgcgcgccctcagctccgtctgggcttcccgtcctctcgagagcttcgtcgcggcagcagagaatgtcagccctacagggacggccgagcaagccatccaccatccgtaccaccaaagccagttttccggcttctgaaggctcgatggtagggcacagattctgccgtcagtggtggcgaggggacagattgtactaaatactaatgccctatgattaacatattcgtcgagaatggaacatcaacccgtattcagtgcatcactttggaaagggagcagaaaggttgtaggccagaggggtaagatcgagggagttgggatatggctcatgggctctccatcttcacttgctttttgttcttatccccctggctcttgaactgaacgaaaggctatcgcttttagaaaaaaaaa

SEQ ID NO: 22619 - DNA, 1023 bp, Setaria italica
  Peptide Sequence Number=SeqID_88593
gctaccactaccatctcaattctcctaactaaagtctcgcagcctcaaacttagcagcatccagttcaccaccaccatccatccacattgcagaattctacactaatctactggtatacggcggacaaatatgttacatgacgggaagtcagcaccaatggcagatggaagtcaccaaaggcgagattgagctccatttcctcagctgatgatgaacagggtgacctcaaaaatgcctgtcttgatgcatcaatcagtcgagaggatcccggttccagtaactgttttcgtcctcgaagatcatgaagctgctagtccaggagttttgctcagggtacatgctgtggaagtcagaggatgggtgccagtcactgttggaggccttgagctccttctcaggctccacctcagcaaatgtcacccgcttcttcggtgtatattcctttggatctttcagagattcctgttctttcgaatcctttagtgctttcttcagttctttagaatccttcagtgatgctttctttggatctttcggtgctgccttcttctgttctttggaatctttgggtgactttgaatcctttgatggcttcagctccttcgaatcctttgatgacttggattgctttgcatcttttgatggcttgggttctttcgaatcctttgatgcttttgattctttcaactcctttgctggttttgattctttcaactcctttgctggttttgattcttttgaagatttaccagattgtttaaatgacttgccagccttgtttgccagtttcttcaaagcttcagtcccattttcttcaacgaacttatcaagtgctgtgaggaagtcatcagatttcccaaaaaggccctttttctgagggacataccaaatgttgaccatctggttctttatgaaggcaggcctcacataattttggtacacataggctgcaccattgaagtatggcaagacaagccagcaaataaagaatcaaatttcaattagaaagaaccaagaaaaga

SEQ ID NO: 22620 - DNA, 385 bp, Setaria italica
  Peptide Sequence Number=SeqID_88594
caagaagagcacaggactcatctactcatctgagagcagaagctccttccgtcctactgctctccgatcagacatccctgcagaccgatcgatcgaggatggttgtcgcgtccaagtccaagtcgtcgtcgtccagcgagctggggtccctgttcgcggcgttcgacaaggacgccgacggcaggatctccgccgccgagctgcggctctgcatgcgggcgacgctgggggaggacgtgtcagcggaggacgccgaggcgctggttgcgtcggtggacgcggacggcgacgggctgctggacggcgacgagttcgcgcgcctcgtgcacgccgaggtggaggaggaggagcgccacagggggctccgcctggccttcggcatgta

SEQ ID NO: 22621 - DNA, 346 bp, Setaria italica
  Peptide Sequence Number=SeqID_88595
tttttattatcaatccatcactgattcagttccattccaattaaatgtttggtaatagttcagccaagaatactataattccctcaacagaaattaaaaaacgacatattttattatatagttgaaccagctcaactacaaaacaataaccatgctgcttccgctcaattttgtctagtttttcatacttcagtctcgtatctgaagacaaatgaacagtccaaaagctttgatcatatcaatcaactatcaacctaaaacaaattaaaaaaagctcaaatgatctgatcaccttcttcaattgtttcccgccattgaataatctcatagtcaaacaggagcttat

SEQ ID NO: 22622 - DNA, 1555 bp, Setaria italica
  misc_feature (50)..(50): n is a, c, g, or t
  misc_feature (60)..(60): n is a, c, g, or t
  Peptide Sequence Number=SeqID_88596
tccctgtgtcgtcctttggctagttctcttttttaggttttttttttttntttttttttntttttttttttccgttctcaattttgtctagtttttcatacttcagtctcgtatctgaagacaaatgaacagtccaaaagctttgatcatatcaatcaactatcaacctaaaacaattaaaaaaagactcaaatgatctgatcaccttcttccaattgttttcccgccattgaataatctcatagtcaaacaggagcttatctcatacaggaaccggagtcgcttcttctgcttgcaagctattgtagtagtcgactaggactttccaccctccagggcacatgaaaccgtcaggagggttctctccagttttggcgaaattgcgcatctttgttcctgagatgaaaagaaaatcttgactgcgtgaaggatcaaagaaggccatcttctttgccactgtatcataagctgctaccttgaagggcagtatgttgagtttctctagacctggagccatgctcaggaccttctttccatggtccgggttgtacaaatctctcttttctgttggatggcccatcccagctggatcacggcctactatgtagaaattggcaccagcattaattcgtgcctttgcgtgccattgcacttctgttggaccagcataatgcattggagagggaaatatagacactatagtagtctcaggatcaaggactccatcctctaagaccttgctgtgttgttccattctaacaggcagtgggacatcatcagcttttgtaaacccacctaaaggatgtagtagtagaatgggattcttgtaacccatttccaggagacgccttctagtgtcattcatcaacagtgcatggccattatgtactggatttctcaactggaaagcaaacacagcatcagccccccgcttgtcgaactcattcctgagttgccgaggtgaaagtctgtagtgatcaagaccatcattgtatttgatgggttctaacacctccagatcaccaccaatcagccaattcccagctgatgcaattgcctcatcaacatagggtaaaccaggtgcagttgtaccccatgttcttgcgattctttcttctttattgtgggggtaaatttcaactctgcgcaggatggcgacgacgccgccgtccgggccttctaacgcgacgtcgggcttatccccgatctgctccttatcggcgtccccgatggcgagcacgatggggagcgacatgttgacgaggcccccgtcggggagtcggatgcagttgaagtggagggactgcaggtactccgcctcccgcatgaacccgcgcagcgggctcgcccacccctcggcgagcacgtgcgcccactggaggtcgacgggcgcgaggcgcacccgcgggagggtctcggcctccgcgcgcagcgcagggaggcggtcgggcggggcgacgagctcgacgagcgcgccgccgtccgggtcgatgagggagctgcggaccgacatggcgcgccggctgcggtggtggcccggggacggggagtgggg

SEQ ID NO: 22623 - DNA, 143 bp, Setaria italica
  Peptide Sequence Number=SeqID_88597
tctgaagacaaatgcacgggcagaagatgagataacactatttgatggttatattgttgtttataagtttgtacatgaccttcacgttttcgtcaccactggagatgatgagaatgaactcgtcttagcaagtgtactacatg

SEQ ID NO: 22624 - DNA, 529 bp, Setaria italica
  Peptide Sequence Number=SeqID_88598
aaaccgcggaaaagcattctgccagcagcacggtattcttccccaacccagatcccatactgtcgtggtgttccctttttaagttgtagcaaacactcgacgcactactggtgcggaagatgtagatatgcgtcggtgcagtgaagacgatcacgtagtcgtacgtagtcgatcaacgtagtcgtacgtagtcgatcacgtccagcagctcctcagcagctcgtccacgtgcacagcaagatcgcctccggtgccgcggctcgtcgtcggctcgttgtcggctcgtcgtggctcgtcggcggctcgtcgatgactcgtccaagtgctgcaggcgcaacacctcaaaggtatccacacgtgcagggaggaagcgtcgcaagccggattgctagatccgcgagttgcaacaggtgagggcgtgggaggcgcggcagaagtgtttcgccaaaaaggtgtaaaccctagggcgcccccacccctctatttatagaggttcctgatgagtaattagtacctaagaaataagaaa

SEQ ID NO: 22625 - DNA, 784 bp, Setaria italica
  Peptide Sequence Number=SeqID_88599
catcgccgacgactacgccggcgggctgctctgctgctacgaccagactcggtgcagggtggaggaagggttcgtcgacggcgaggcgaggaagctgttcttccggtacaccgtgatgtggctcgactggagcgatgccgtcgtgccggtcaagatttacatcttcgatgccactcatagacctctgcctgtgggttgcaaggttgagtacgaggtcgaggaatgcagcccggagaggcgggccaagaacgattgcgtccatgttcaggtggccaagcaagtcgtcccgcgtggaggcgacctcgtcttcggcgtcgcgcaccagcatgcagctggcataggttcttccttgcacggccaggatgggcgtcttctttgcgagtccatcccaacctacggcgacggggaggaggccgggaacgaggcgggctacatcgtcggcatgtcgacgtgctaccacccggcgccgggcgccgtgacggtgcgcgacggcgagaccctgaccgtggtgtccaactacagcagcgagcggcggcacacgggcgtgatgggcctcttctacatcctcgtcgccgaacaccagcggccggctcccgacacgaagccgtccctgctgtagtgcttcagcttcccggtctcatggtgcctaccctcatggctgtggagcaacctatgaaaactgacaagcgatgcatgaagaagctggaataaaaaaatcatcatcgttcagtatatactactccgtatatatagcatgtgggtacgatccatatatctgtacaaa

SEQ ID NO: 22626 - DNA, 624 bp, Setaria italica
  Peptide Sequence Number=SeqID_88600
tagacgattaaggaatgcagaccgggcggcacgtaactcagatcgtcgcaataatgttgtttcatggatctctgagattaaagacacatctagtgtggctgtaaggaagaaaagggggagaagagcacctccgtctgctaaaagattgcgtgataaaaaggtggatacggagattgatagtgatgatgctgttgacaatgaaattggtgatacagatgaaggacaggttggtaaaagtcagtctgttgtgcacaatgaggagaatttggatgggagtgatggcttacaaaaaataggccagtcaggtaattcttctggtggtccatcctcagcttcggaagaacaagaccattcaacaaactctaaagatatcctccaaaaaggtagctctggaaccacaaagaaggtttctgcatgctcaccgagaagcaaacaagttgcatctcatttggatcaggaaggtgcagatgaagatgattctcatgcgcaagctgctgttgcgaaaaagggtgttgatgacaaaagagggtctcatgaaatcaaggatgatggtatctgatgcacaagtgaataccacatcctctgatgataaaagttctgaagaagttgaagatgtgaaggtgt

SEQ ID NO: 22627 - DNA, 600 bp, Setaria italica
  Peptide Sequence Number=SeqID_88601
tcgaactgctggcagatggagaaccagttggcccgcacgttgcccttgtgcgccaggtacacgatcgccgccgccgccgacgcgccggccgtcagcagggtcagcatcgacgcgtccaagaagatgaggatcagacggctgtagcgcgccctgggcctgatgatgtgcacgatggacagcgggatggacagcacgaggtacgtgcacaccaccgcgttggccgccacgaagaacgtgaaggacggcaggtcgctgtacttggcctcgaactggatgaactgcgtgaagaaggggagggtctcgttagtggtgcccatggagatggcgctgccgatggtgccgatgatggcgaggaaccggaggaagatgtcggcgaaggacacggcgcggccgacgcccgccgccgccacaaggggcgccttggagctctcgccgtgctcgaccacgacgtccttcgtcatggcgtataagtacgtgtccggcgcaactaattgagctgcagcaaatcgcgagaagggaagcttgttgctagctaggtgatggctcttgcttgcagaagcgagattgccttgctgctctggctgtttgcttgggatgaag

SEQ ID NO: 22628 - DNA, 658 bp, Setaria italica
  Peptide Sequence Number=SeqID_88602
ctgtggagtatggacgtgcctgatgatatcctttgagacatcgctctcaccggccccggcctccatccaacccgccaccgctgaggcagcaaagcgagcgagctctagaaggcagctgccctgtccttgacgacgacgtcctccacctccctcctcatgagcttctcctcctgctgcctgcggcagaagagcacccacgcgttcacctccagcgcgacgcaggcgcccatgagcgtggcgagcgccaggcagtagccaagcttccagtaggaggcgccgagccccatgacctcgaagccctggaacacgttcaccaccccgaccaccacgcacccgtaccccaccaggtggtggtacgacttccagtacttgcggtaccggttcgtggtcttgggccggaagaacatggccagcgtctgcaggctccccgccgtcgccgccgcgatgcccagcccgcggtgcagcttgtacgtcacccccggcgacgccgaccccatcaccaggcccagcgcgaacccggccgcccccagggtgtaccccgtcgcctgcatcgccgcgtgcgcgtagaaccacgcgggccccgcgtacgcgcacggccgcaggtaccgggccaccgccgcgccgaccgggaggagcaggccccaggagagcgcgttcg

SEQ ID NO: 22629 - DNA, 882 bp, Setaria italica
  Peptide Sequence Number=SeqID_88603
tctccttacttcccttgttgttcgttccgtttggtctagttcttctttttagttttttttttttttttttttttattttttttttttaattattagttataatttttttttctgttttttgattttctcgtcagataccattagccctgacattacattacaatcaggtagatagatccgctacacacatacgcacccatattattcccctttccctgtccaggcgactgctagtttgctatactcaagacatgcagggttcttcgttcacatccccatggcaagagctactaggcccctggctctcattattccattcccccataaccccagccatcacaccgaggagacgtccatgtggaacgccgccccgaacagccggagaacgccgaagctgacgagcatggcgaaccacccgcccaggagcaccctcagccctgacttcaccatgctcgagccacccaggtacgcgcccgccgcgccgaacgcggccaggccgacggtgctggcggcggccaccgcgatgagcctggcccaccacagcgccacgaacccgccggagagcagcggcaggatggcgccgaacgcgaacgccagcgcggacgcgagcgcggcctgcgtcgggctcggcaggccatccctggcgtcctcgtcgccgtcggtgccgtcgcgcttgagctgcgagacctcgatgtcgtactgcgcgtacacggacacgaactcgccgatggccatgctgcatgcgccggccacgagccccgccatgccggacacgagcatggccttgcgcgacgcgttcacggcgccgacgccgatcatgagggaggccacggagacgaggccgtcgttggcgccgaggaccgccgcgcggagccactgcgc

SEQ ID NO: 22630 - DNA, 1030 bp, Setaria italica
  Peptide Sequence Number=SeqID_88604
tatcccctcgtgtgccttgcctatcccctccccctcgttgctcgtcttccaatttcactgctgaataggagcgagctaggtcacccttctttgagagggagtaaggatcaataatggcatccttgaagatccatggtgctgtggcagtggtagcggtgatcttcctcgccgccgtggtcccttctgcatcgacgacggtcgacgagcctgctacgtataagcccacggctccagccgcccccgcctccatcgtacccctcgccgccgccggtccagcctgtgatcgtcgtccatggcgtcatctactgcaagtcctgcaagctcaggggctacaacagcggcatggacgcgtcccctctccccaatgcgacggcgagcttggtgtgctacggcgaagaggagagcaagtaccgggtgctgaaccagacgagcacggccagcgacaaaaacggctacttcatcgtgatggtgtacgacgtggacatgttcgaccggcacacctgcaggctgtacctgcgctcgtcgccgacggcgctctgcgccaagccattcatgccgtccaatcctaagctcgggctcaacctcgtgagggaccgcgcggccacggcgcccaggggcgcgcgcagcgtctggcacgtcaagaccgcgctcatgtacgcgccgagcgccggcggcaagtgcccgccctactgacctacatggccggaggcgtcgcgatctggatcgatcagctatctgtgtggagcgagggatgcgttggcgagtgcatgcgcggaatggatgctcgttcagattgaacaagagttgtcggaggcaaaaataagacgaaatgtttggtgtcacgtaagtgtgtcgtgcttttagttgacgctcgctcgatacggagcgtttgttgactgtaaggttgtgtttgagtctctgaagtctgaagcgtggttgtgtcgtctgtgtgtgtaacctgttctcggtcggtcctgtcttctcgaaaatggaggaatgtgggtgtcctttatttttatttgtttcggta

SEQ ID NO: 22631 - DNA, 371 bp, Setaria italica
  Peptide Sequence Number=SeqID_88605
cgggttcctgagcgccatggcgtccaagatcagcgcaacgatgtccgggacgaacgggagcggcggcgaggccaatgccgccgcggcgtctgatggcgaggcgctgaagagagatggtagcggcgagccaggtgacgaggacgggttcctgagcgcgatggcgtccaagatcggcgcggcgatgtccggtgctgatggcggaggcgaaagcaacggcggtggaaatgcggcgggggcggctgatgacgagggcagggagaaggacgaaggtaatggcggtggcggaatcttccataagctcctgtccagctcgccccctgcttcgtcgtcggcgtcaggaacattggaagcagaggcagcgaaaggggaag

SEQ ID NO: 22632 - DNA, 807 bp, Setaria italica
  Peptide Sequence Number=SeqID_88606
ggtgcaaggaagtgggaagaacactgacctgcagaggctgctgccatggcaaccagctcctctgatcaagttcctgccgctgcaaggaagctggaggggaaggtggcggtgatcaccgggcggggcgagcggcatcggcgagtgcacggctcgtctcttcgtgaagcacggtgcgcgcgtcgtggtggccgacatccaggacgagctcggcgggcgcctctgcgcggagctgggcgccaccgccgccagctacgtgcactgcgacgtcaccgccgaggccgacgtcgcggcggccgtggaccacgccgtggcgcggttcggcaggctggacatcatgttcaacaacgcgggaatcggcggcgcggcgtgccacagcatccgggagagcaccaaggaggacttcgagcgcgtgctgtccgtgaacctcgtgggccccttcctcggcaccaagcacgcggcgcgggtcatggtgcccgccggccgcggcggctgcatcatcggcacgtcgagcctggcgtcggcggtcgccggcgctgcgtcgcacgcatacacgtgcgcgaagcgcgcgctggtggggctcacggagaacgcggcggcggagctgggcaggcacgggatccgggtcaactgcgtgtcgccggccgcggccgccacgccgttggccacggggtacgtcggactggagggggaggcgttcgaggaggccatggaggccgtggcgaacctcaagggcgtgcgcctgcgggtggcggacatcgccaccgccgtgctcttcctcgccagcgacgacgcgcggtacatcagtgg

SEQ ID NO: 22633 - DNA, 292 bp, Setaria italica
  Peptide Sequence Number=SeqID_88607
atcaacatgaagttcacactatttgcctgaacattgaagtgtgtttaatctaaatattgttgactactttgtaggaactacagcctgaccgaatatgtggctactttcatggggttcatgctagcattgggacaacattttagtcttgatttgacctgacaaatttctatgcagtgtaacaaatttcatagttgattatctaactctgctttaaaatggaagaaaattccttataaaaaaatggaagacaactatgcaaaatctacaagcattatcgcatggcaatcaacta

SEQ ID NO: 22634 - DNA, 433 bp, Setaria italica
  Peptide Sequence Number=SeqID_88608
tttttttttttttctaccaggaaacatgagatatttttattcaattcacttcttttaacatgtacggcattgtttcagtgaacatttgagtataatctatttcttctgctcgaattatctaaacaaaacgaagcgtagtgtgatacggcagatgctcgtatcatgtcagaacaaggcagcagcaaaaaatgggttcagcaggcactccaggatggttctccatcaatcaacaaatacaacgactgcgtctctactgcagtgctttcgggatttgtctgcaccagctgagaagccatatgtattcacagaaagaacttgccctccgcactgctcagctgtcagctcagcaaaacaaggctgcagcacttgtgctcctttcagaagacgactagaaggggctgccagtcatcaccaacaacaaagaactaaacaa

SEQ ID NO: 22635 - DNA, 587 bp, Setaria italica
  Peptide Sequence Number=SeqID_88609
ttttttgcaaccgcaaaaaggctagcgtgttgggtgagggttgcccccccacctgtatgttatgctaaccatcatcaattttttgatacggaactaatcctaacaatgacaccactacagtgtcagactcggaggagataagcgcatggctgtcatggagtacttcactatcatcaatttttttaccaaacatacttcaccaacaacaagcgacaatattattcagatgatcacgatgccttgtacaaaccagcgaaaccacgagcagcaagggtgagcttgtatcacccctgcgaggctccagccaaagcctacgcctgcgctgggcatttgaacgtgtcgccggtgaccaggtggtggagcacgcagttgattccgtccttgggcgcgcactcgcagtcgcagccgtccagcttctggtaggggtagttgtcgcaggtgatgtacccgccctggatgcacaccaccgggcacggctccgccgccgccgccacccctccgatctcgccgaacacgacaagcccggagaggaggaggatgcaggtgagggagagcagcttcatggatgccatttttgctatttttgt

SEQ ID NO: 22636 - DNA, 1615 bp, Setaria italica
  Peptide Sequence Number=SeqID_88610
tagattcatcatcactactgctagcatcctcatcatcatcaacacttccagaatcctcactatctgatctagcatcttccttccctttaatttgggggtcaacacggagacgatatgcagaaggtgcaatcttctcaaataatgtgatgtcactagagagagttaaatatatcaactgctctagttctaatgtgcccgagacattaagatcaacaatctcagatgatttggctagtactgaaacctttagtccaccacttcctgccttggacaatagtgcaaacaattcacctttcagtgtgcgaggacgtaagccatatttgaccatttgatttttctccttgttaaagagattgagattcagcatatgttgtttggacccaaagcccgaagcaacaaggacttgtcgcagtatttcaacccaagtaagagaattcagtgatctgatccagaaattaacatcgaattcttgctccctaacaaagttcaggaaactaagaaatctgcagtctttagaagatcgtggaacaaatacaccatcgctgcccatttcagcatttaacagcaacaacttcagaagaccaatatgtacttcccccaacaacaaagagtccttgtcatggaatgcttgtgcaaactcatcaaatgtgaaggggtgaacatcaatagtaccaaaatgagtgtatacaaaccggattacctgaaaaagctttttcaccatttccggtgatgagtcccaaggttttgcggagaaaggctgtttcatcttgacactctgcggaggaaacttggcaagtaaatctttacaaagggggcagccatgtctcccacttgaagaaagatgagctgaacatcttaatggattagggcctgcttgtaattcactgagctcgagctcctcatcatccactaaagtcacctgctcagtcagtagttctgaagattctgatttattgattgaaagatggcaatccatcggaggatgctcctttggacctgtaactctcttacatggcacctttcgttgttcaatggaggtttactccttttgtctaccttcttctgtgccatactttgattttgagtagtctttccattatcttctaacccgtcacgatcatcaaacggtctcagggacctcaaacaaccagtttcatcaatgaaatttgggccactttgacattccacattatgggattgggaatacattgcatgccacactgtcatcagacctttgccaattccgtgtttcctcacaggaacagtatcctcgtatggcacactggacctctggctggtagactcaatgatctttctcttcttcacagctctttggttttgagaggaatgatggcatgtggtatctctgatacgatcacgttcacttttggggaggggatcaaattcactcccaagaggtggaccatctttgcgaaagattttcctcaggatataatccttggggaacagaacttgtgattgaactgtattttcctctcctacaacgctggtactgctgtcaaactctggtcgtgaacacgaaataccatacatgggagcttcgttacaagaggaagaactgctgctggtttcttaggttcctactttgtattct

SEQ ID NO: 22637 - DNA, 384 bp, Setaria italica
  Peptide Sequence Number=SeqID_88611
cggcgtctcaggcttcggcgaggcgaagaaagcctgcaggcagaggtcgtcgacggccaggtcggccaggagaggttgcgacgcggcggcgtccatgatctggtccgtctgcggctgcagcgggggcagcccagaggaggactcctccgacgccgacggcgtgttgagccaggagaaggtgtcgtttgaggccgacggcggggtgacgcggccgctgccgctgcaggcgaagcgcacgacggcgtgaaggtcccagttgttgcttccgctgccgcagaaccaccccagatcgccctccattagccgcgttctggaggtcttggcctgtggaggaggaggagagagagggggcgttgacttgctagggagagggagagatggaag

SEQ ID NO: 22638 - DNA, 237 bp, Setaria italica
  Peptide Sequence Number=SeqID_88612
tgaggcgaaccctcctgctgctgctcttgagcatggcggcgatggccggtatgatgccctgcctgcgcaccaggttcttgttagcgccgctcctgtggcacacctgggagatgtagaggagggcacgcagggcgtcgtcctcggagggcatgtcgagctgggtgagggaggcgcaggccttgtcgagctccttgtcctggttcctggccctccactcgtcgatgacgttgcgcaggg

SEQ ID NO: 22639 - DNA, 1557 bp, Setaria italica
  Peptide Sequence Number=SeqID_88613
tacgtacgtaacgtaacgtaacggtactaaactaaagtaccgttaggtaagacttcgcggggtctcaggcgatccggacccgttcccccatgaggaagccgccgccgacgctggagaggcgctgccggtaggtcccgcggccgtcgccgacgagccctgggcgaagggcttcggcgtggaggacggcgatagtggggacgtgttcgaggggatctacaaggaggcggcgtcggcggccccggcgagcggagaggcggctccggcaggcgacgaggagcagtggacactgagtggggatgagaaggatccctttgccgatgctgtgcttggggaggggatcgatgggattcaaggtgagggtggtgggctcgatgagctcgatgcgggtgaagaccctgaggctgagctgaagcgacagaagaacatggagagggagaaggagctgatggagatactcaaaggtccaaatcgtgcatttggtgatgccattgcttcctctgggatcactgagggaatgattgatagtttgatcctcttgaaggatgtcagggatgttccgggaatgcctcccctaactgaaatagaagatgaagctatcgagaaactgagtgcaacatcaagcagagctgaagtcgagcgccaaaagcaagaagaaattgccaaggcacgagtaagacaggttgatgagaaaggaagggcttatggaacagggaaaaggaaatgcagcattgcccgtgtttggattgagcctggtgatggcaaattcattgtcaatgaaaaggagtttgatgcttacttcccaatcctggatcatcgagccgaccttcttcgtccatttaccgttaccaagactttggggctttgggatgtgacctgtactgtgaaaggtggcggtgtctcaggacaagttggtgctatccgcttgggaatcagcagggccttgcagaattgggaaccaggactgcgtccatacctcaaagcagctggatatttgacaagagattcacgtgtggtcgaaaggaaaaaacctggaaaggcaaaagcaagaaagagcttccaatgggtcaagcggtaacagggccatcagcagaactaccatttttttgggtggcagatcgatgcccctcgtgggttttcttgtcaatttggaaggttctttcagcttgatactaaattccttcagtttgtattgatatgggattgtgctacacttgtgaaacatgacacagcaaattgatccagaaaataccatttgacctagtcaagattcagaagttgctttgcaatgagctgtcaataaaacaggctgtgccaatggaactcaatgttcagctctgatgaaaaatcccctcgcgtctgaggttttcattgctgagaaacaggtttcatatgccgattgatgatcgtgataacttgctttacaatttctttttcttcgtgtatgtccatgtactctagccttcaggtaatcatttgactctggtaaaggaatttgacacggtcggtatcacgatcatcaatcggcatatgcccaatctttggcaaaaaaaaaaaaaa

SEQ ID NO: 22640 - DNA, 354 bp, Setaria italica
  Peptide Sequence Number=SeqID_88614
acgggcggggctcccacgaccggcggcgcttcttcgacgagttcgcggagctcaagtcggcgcccgcggcggagttcctgggcgaggggaacccgcggtggggcgcgctccgcgagttcctgcgggaccggtacctgtcggtggtgcacgagcgcatggaggcggcgttcttcggcggccgcgccgagcagcgcgccgccgtgcgcaagggcggcgcgttcccgcgcacggcgtggttcgcggagttcgcggagatggcgcggcgcgtgtggctgctgcactgcctgttctggtccttcgatggcgccgcgtccgtgttccaggcgcgccccggggagcggttctcggaggtgt

SEQ ID NO: 22641 - DNA, 421 bp, Setaria italica
  Peptide Sequence Number=SeqID_88615
ctagcacccgccgtcgtgcctgagagatcaagcacctgaactcagcacctccatggcttcaggcttagttcatcttgcccggttagtccagctcagtgtcatacagaactgtgacagcctccacactcaatggtatttcacaaaccaatttctttgcataaggaactaatgtcagggattattccggcgccagagtttctaatgatggcatcaccagcaaaatccttcagcaaggacgatgggtcctttgagccgccatgctgcaagaatttctccctaatggcactgcctgcactgcgggacaatgggtcctcttggcatatttcttgccatattgttgtggcaaaacatcgagcataaaggtaactgtagtagccggcaccatagtttatgagatgggtaaagcgggtatgcgagtgcg

SEQ ID NO: 22642 - DNA, 294 bp, Setaria italica
  Peptide Sequence Number=SeqID_88616
ccgctggcggcgtcggtgtcctcgctcttggtagcttggggcgtcggccgtttaacctttcctcctctaggcctgcccatctaggaatggagaaacaccctcaaaccgcgccctcaaccaacaagggagttgcgagcttgttgccctggtgccactactcggtcgatcccacacctgcaaataggcacggaatagaaaagaactggttcaggccgttttcattcacacgcattttcaatatgtttttgaaaaggtgggaaggaaaaacagtggggaagaggtaacaggaagaat

SEQ ID NO: 22643 - DNA, 484 bp, Setaria italica
  Peptide Sequence Number=SeqID_88617
aaagactaagaaagtaggttaaataaggaagaacaatcaactattctgtgattatttgtgatatgctgttgaaaatgacattcagatattttttttgaaataatgacattcagatattgggggaggaagattgcaaccataaatctattactgatgaagcgatgaacaccgaagtagaaccaagtacaactgagactgtaccatactaccatccaatggaaaaaacctgaaacaaaggcaagaaatgtgtccggagctagtctcacatcgcctgcatcgacctctccaagacattgaccaacacaataagctccgaggcacaagatcgatacgtatactgaagaagaacacagacatgaggagagctagcaagaacacgcacggaactgacctgctgtgggcccgcggtatcatgcagagaggccggcgatctgtcgacttctctctgaatagaagcccgtgatcaagagaatccgtggataag

SEQ ID NO: 22644 - DNA, 488 bp, Setaria italica
  Peptide Sequence Number=SeqID_88618
tcacggcctcctcgtcgccgctggcggcgtcggtgtcctcgctcttggtagcttgggcgtcggccgtttaacctttcctcctctaggcctgcccatctaggaatggagaaacaccctcaaaccgcgccctcaaccaacaagggagttgcgagcttgttgccctggtgccactactcggtcgatcccacacctgctgtgggcccgcggtatcatgcagagaggccggcgatctgtcgacttctctctgaatagaagcccgtgatcaagagaatccgtggataagatatttctacgcgaagatgctgcagatggcgacggattgtagagagcggcgaccggcgagcgtccgatcgaggtttcgcccgccgcaagacttccacgggcttatctgagcagaggaggaggccggaagaaggaagagctgactggtcacactgttctgcagacagaaagatagagggagggacggaggatgcttggcttggccg

SEQ ID NO: 22645 - DNA, 749 bp, Setaria italica
  Peptide Sequence Number=SeqID_88619
ttggaaggccatgcagcttggagattgagctcctgttttgcttgactgagaaataagcttacctagtagatatatacatgttacagcttatatctactagatgttcggccaaaattcttgggtattcccaggaatcatggtggctccacccctggatatgtggtccacactcaacttttgtaggctgaagttgcaacagatccctaccttgacctagctcagtagtactactttagttctttgcacagtaggaggctaatcatttcccttgacttggcaaggaatggctattaagtgtgtaagaggtagagtgcctaaacataaactaaattgtcactattcgcaaaacattgattttatcttctttgacagtttttacatactggatctgtagtctaaaacaactaaagtggatgtacagtgttattaggatcgaggtcattaacttgtcatggtgtgttcagttaactgttattggcaagactaatgctctgtatatgatgcgtattattgccgctaccaagcactgatattattttcaacagagaaaggctttgagacagagtaatattagtttcagttttatcaaaaaatgttgataccgcaaattgagtaacaaattgcatttgcttggcggcttcaatatgatgtgacagattagggtaaaaataacttgaaacgaatgaatgtattcattaaaattataagaaccatttcccccctaatctggcctttgaaatgaaaggggt

SEQ ID NO: 22646 - DNA, 309 bp, Setaria italica
  misc_feature (33)..(33): n is a, c, g, or t
  Peptide Sequence Number=SeqID_88620
tacatggatgagaaggtcacatatcctggtgcnggaaaccagaagagggtcgatcgaaatcaatcctacgtgatgtgtttattgcacatgtgccggtcaagaacgggaacttccgacaaaaatgtatatacactggcgtaatgttaaggcgcatgatggacgcaatcttgaatgctaacacctttgatgataaggattatgtagggaataagaggctggagctgtctggtcaactaatatccctgctttttgaggatttgttcaaaacaatgaattcccaagctgtagagctcatgaacaaaaatagcg

SEQ ID NO: 22647 - DNA, 346 bp, Setaria italica
  Peptide Sequence Number=SeqID_88621
ctcatcaaggcgattcctgatcccggacccgatcgccagctcgctcacactccacgcgtccagctgcaacggtttctcttccggcgcgtaccaaacttcgcctgcttcttgcagcagcagcagcaatggcggacggcggggagtgcggcgcgcgggcgcagctggtctcggagctgtgccgcgtgcaggacctggtgcgccggctcgagctgctgctgcacgcgcccgcggacgccgcctccgtcgacctctgccaccgcctcgtccacgagatcgtcgcgctcaccgaccgctccatcggcatggcccgctccccggacctcgccgcgcatttcctcctccccgc

SEQ ID NO: 22648 - DNA, 383 bp, Setaria italica
  Peptide Sequence Number=SeqID_88622
ggagacgatgttctccgccacgaagccgcccgtggcggcgcgcagctccgccagcgagaactccttgagcggcgggcacctcgcggccggcggcgccggcgcgcgccgcggaggacgccgtcgactggtgctggttgagcgagagggaggggcggtgcggggggagcggctccgtcgccctccccggcggcttcttctccgggtgcgtccccgtccgcagcgaggagccgcagcagcccatcgggagtccactgggtggcttcagccgcggccgcgtctgcgtgggcgcgcctgtggtgtggtgttgtgtgggtttgggttcccctggcttgcctgccgagtagcggcgcaacaggagataggcaaggcacacaggggatagg

SEQ ID NO: 22649 - DNA, 418 bp, Setaria italica
  Peptide Sequence Number=SeqID_88623
agccacaaggatgctgccgggaggaggacgaggccgccgtcgaggaacgcgctctccgctgtgttccagcgagaagatgagggattgagggcggagcagaaagcgagctcgtgggccgaccagggcgatttgaggaaggggatgggatcgggagcctgaatcccaggctattatccatgaaagctatggtgcactgctggaagctacagatgcaacccaaagagagcccaaaaatgcagattcagttcatcagaaagaaacacattcaggatgtcttcctgccatgtctgatgatgtgcatttcatggaagccctgaaggttgagaattgtgaaactcctaggtctcatcagagctccactgtacctgatgcaatgagttcatcaaaaacaaatgatgagttgcagtcttcatctact

SEQ ID NO: 22650 - DNA, 389 bp, Setaria italica
  Peptide Sequence Number=SeqID_88624
cgatcaatcaccagatcagaatcagatacgcagcaatgcgctgcgatcgtttgcgcagtctctgaagcacgcttcaagtcagaggagtagacggcagctggcttggcttcttccgacagacgacgggcaaccttggcagcttgctgcctaccagtttcgttcagctcctgatcgatccgtccctgaatgatgcgggagacgttccaatccgtctgtccatggcgcaccaacaccacctccgcgaagtgctcgccatgcggcgatgcaggtgccattgatcgatcggccggcgttattgctgcagagggaacgaaggggagatggatggtcttgctctagctggcttgcagaggttccttgaaatctggaacctctctgatctcttgtgc

SEQ ID NO: 22651 - DNA, 233 bp, Setaria italica
  Peptide Sequence Number=SeqID_88625
gcggcggggtggcaggggtcggcggggccgccttgggcgccgcggcaggggcgccgctgggcgcctgcgccgtggcggagacggcgaggagggcgagcacggagagcacggcgaggtgagaagcggccatcgttggtggagactggaggagttttgttcccttggctcgcttctcggcctgccttggttgtgctccggtgagatcgagctcgtgggagggaatgcgagtgggg

SEQ ID NO: 22652 - DNA, 625 bp, Setaria italica
  Peptide Sequence Number=SeqID_88626
gggggggggggggtagagggaagggggggaaatcgaggtgcgtgagaaaccctgcaaacaagaacgaacgctccaatggccatgcgttcctggcaacagcaacatcggattgctcagtagtgtggatgatcttagttgacgaccctgcattgcttcctgatctcgccctgcttgccggtcttcacctcgattttggacatctcgacgaatgccttcttgaacttgccctcccaccacccggggatgttggcgctgtcttgcaccatcttggccgtcgccggcgtggtgagcagcgtggcgtcggacgtgaagagcaccttgtgcgccagcacgttcttgtagtactggttgtcgagtccgttgggggtgacgatgtcctggttcacggtggggtcgttggccggcgtcgggttggcggggcactgccccctgaggaagttggcgaacccggcgttgatgtcggaggggacggcgaggcggtcggggacgaaggacgagcagtgggagcgtccgatggtgtgggctcccgagagcacgaccatgtcctcggcgttgaggcccttgccggcgaagctgccgacgagctgggcgacgttgaagacgggcggcggcaggttgttcaggg

SEQ ID NO: 22653 - DNA, 716 bp, Setaria italica
  Peptide Sequence Number=SeqID_88627
gacgtccgcctctgcctcacgcttgctcgccggcggcgctgagggctctgagcccgccaagaagttccccttccagcttgatccgttccaggccgaggccatacgatgcctcgacaacggcgaatccgtcatggtttcagctcatacatcagccggaaagacagttgttgccttgtatgcaatagcaatgtctctgcgcaaccaacagcgtgtcatctatacatctccaatcaaggcattgagcaaccaaaaaatacagagagttcaaagaagagttctcagatgttggtctcatgactggggatgtcacaatagagcctaatgcctcctgcctggtcatgaccacggaaatttggcggagcatgcagtacaaagggtccgaggtcatgagggaagttgcttgggttatatttgatgaggtgcattacatgcgggatagagagagaggagtggtgtgggaggagagtatagtgatggctcccaagaactcacgcttcgtgttcctctcagctaccgtacctaatgcgaaggagtttgctgattgggtagctaaggtacataagcaaccttgtcatatagtatacaccgactaccgacccacacctctccagcactatgtatttccttccgggaggggatggattatatctggtagtggatgaggaaggggaagttcagagaggactagttttcagaaagcattgaatgcccttgtc

SEQ ID NO: 22654 - DNA, 377 bp, Setaria italica
  Peptide Sequence Number=SeqID_88628
cgtgcactcggggtggaggaggatatggcgcacacctctattcgctttggtattggccgctttactactgaggaagaggttgacagagcaattgagctcactgtgcgtcaggtgaagaaactccgtgacatgagcccactctatgagatggccaaggctggcattgaccttaagagcatcgagtggtctcagcactgaggcagttttcatgacaaacaggcactcctaagttctctagatgtacacagaatgcatacatagccataggtatgtggttcttagttgcctgccctctgttatgtgctgttttgtttcaaaagaagaggctgccatggttccaaatcaccaggtagagtaaatcttaactcctgttcagg

SEQ ID NO: 22655 - DNA, 335 bp, Setaria italica
  Peptide Sequence Number=SeqID_88629
agcttgaagaactcggctatgtctcttttcacgtcccggatcacgtcgtccggaactccatggttgatgagctgaaagaaaccctgctggcaggccgagccgaggtttgcgagctcctcttccgacgaccgcgggtcgagcagcctgccgagatcgacgaccgggagcgcgtggccggcggcgacgaccgcgtcggcctcatccgtcctgacgtaccgtggtggcacctgctcgcctgatccgttccaggtctgagcgagcacctgcacgttgggcacctccagatgacctcctgcattcgcgtgcgccatcgattgattttggttcctagctct

SEQ ID NO: 22656 - DNA, 1357 bp, Setaria italica
  Peptide Sequence Number=SeqID_88630
cttctcgcacatcatcatcctccgaatcctcatcgtcatcgtcagtatcttcctcctcttcctcatcatcaagatcttcagcgccatcgtcgtcgtcgtcattatccccatcctcttgaacttccttcagctgaatgcaagattccatcaatgatacatagcagtcttgcaacagtttagtaccacccatggaaaggaccaggagacgctcgatcacagtcgataacgttagcaaagctaatttgatctcagattcagatgacaggccaggactgaatgagctgcttgagacttgtgccaatgcagatgcccagattgcataaccattaccatcatagttgttcaagacttgttcaatgacatctggatagcaaatgtagcatgacgaaattgccagcaaaagtggtttccatatcccagcaggactgtcagatatagacttgaaatgggaaaatgctgcttgcgcaaaggatacagcaacagtctttctagcatcttctgttccaagggagaaatttggagcatgcagtagcgtatggatgcatgagcatgccctccatgtggcagatgggtaggctgcaatggccctcgtgacaaaattagaaacccgaccaatgattgaactctgtgaaccattttcagactgcgaaggaagcatttttaggaagaaaccggtgaggtcaaatctttggtggaaattgacagcttctttaattgtattgaaaacttcctgatcctccatctcctcccaggagtcccagttagcaatagtgtcagcccatacaactactagttcaaagaccttcatacttgcagtttcttccatgcaagtcacagacctcatgacaaactcaagtaacacagaagcatcatttacgcatgacggaggcggcaatgcagaacaagagttctcctgaactggcaataaccaagctttttgtagcagcaacgaaaatgtttgagcaatagcagactggcctgactgccagaccctcttttcatgtttcttgttttcatctggcgcagagctctcccaagcttgagccatcgctaccagtgaagcaaaaccctgttcaacaacctgaggccagggctctggaacagggggcaggagcttcattatggtattggcaatgttagacacaatttcaggaatatgaggcataattttttcttgcccaccctcaactatagtgcccagaagcttaaacagaagagcagactcattttcatctccagtacttattcttttcacaaccgtttgcaaaagaacgagccagtcaggtggagcataactgttctcaatgagttctgcaatgcaccagaagcagaggcataaactggatagcaagttata

SEQ ID NO: 22657 - DNA, 432 bp, Setaria italica
  Peptide Sequence Number=SeqID_88631
gaaggatacctctgtttgttggtgccatctgcaatactctcagtgacgcgcaggcaatgcctgcctctgcttttcttcaatggtgaatgctgagccgtgctcaatgggtggaattattgattatggtgttggagttggcaccaaattgtcaccccgcagtctgtccatcgagaaagctcaggaggaactcaggcaggagtttgatgttcgtgaagaacggaggagagagttggaatttctagagaaaggaggcaacccattggatttcaaatttgtacatgtagaaacagtcagtgtacactccgcttctcttacaaaatcaaaacagaaagcacaaaaatgtgataaagtgacgctaaaaggtagtttcctgcatcgccttatggagactcagttgagagtactggcaaaaccaggaagttcactgtgccg

SEQ ID NO: 22658 - DNA, 437 bp, Setaria italica
  Peptide Sequence Number=SeqID_88632
aagcctcctcttgtcattgagcttgggagggcccagtcaaccagactctgctccctgctgggccgtgacttgtcaattgactttcgccctgtcaagagctccaggaggacaacaccaaagctgtagacatcacttctagcagtcaagtgaccagtcatgacatattcaggggcagcataaccataggttcccatcacccgtgttgatacatgagtctcatcaccttcagggccagcttttgccaggccaaaatcagacagtttagctgtataatcctgtggcaatggaaacaaaaaagatatgtcaacatatgtattcccaatggataatatgcatagaactgaaaatgaagaagaaagaatgagctgatttaacactcaacagagtccagcagaatatttgaggtcttaaaatctctgtagatgacaggcctttga

SEQ ID NO: 22659 - DNA, 463 bp, Setaria italica
  Peptide Sequence Number=SeqID_88633
ttttaccgagcaagtaatcatccaagatgttgagtcatcacaaagttcaagagttggatgctcaatagttatttcgcaaaattttgaaatatcatgtaaaaaggaatctccaaaggtaaatgaatcagttgttaataggtaaataaaatatgccaaaccatctgctgggtagagaagttagatcataccaacaatagttatgaaaatgagaaatgtatcttatcatttgtatcttttatcagttcaaggtgttgtgatcagtggatggcattcaagaaaacagaaaatagtatgtaaaaagtggcatcacagaaactcagttatgatatcattcacaatctgacaaacatgagtagaaggcttacttcggaataagtgattttctagacttcctcgaaacatgaactcgtagacaagaagccggtggtcatcttcacagcaatatccaatcaacttcaccaaa

SEQ ID NO: 22660 - DNA, 2311 bp, Setaria italica
  Peptide Sequence Number=SeqID_88634
tttaccgagcaagtaatcatccaagatgttgagtcatcacaaagttcaagagttggatgctcaatagttatttcgcaaaattttgaaatatcatgtaaaaaggaatctccaaaggtaaatgaatcagttgttaataggtaaataaaatatgccaaaccatctgctgggtagagaagttagatcataccaacaatagttatgaaaatgagaaatgtatcttatcatttgtatcttttatcagttcaaggtgttgtgatcagtggatggcattcaagaaaacagaaaatagtatgtaaaaagtggcatcacagaaactcagttatgatatcaattcacaatctgacaaacatgagttctctttagttcctttaaagttgatttttattttttttcctgaacccgcctgtttcggcagggctcgctcagtcaaggaagaccactgtgaaaattagagggccttacaagcagcagtatgcggatcaaatttacacatcaaaacgctggccaaaacccgaaaaacaaaaagaccccaaacgcacacagcagtgacagcaccacagaacaagtgcacacatgcacccacaccacccgcggtttagacctcgcaatatacaactgaacctattccagcagaaattcaagcatcaccattacctcactctgcatgctgggacaacaggggagcacttggggtttgggatggccctaaagtggacgctgttcccggttagcctgcgacgaactctatagtcaggtaggccggaagattgaccggatccatcgcttccaccgctgccctgcaatggctctagggtttcgacgacatcactcataagtggccttgccttggggttgtggctcaagcagtagaatgcaaggctgcaggctttgtgagcagctctgaccgaatactgcccctccagtttcgggtcaattatttggagaagcctcctcttgtcattgagcttggggagggcccagtcaaccagactctgctccctgctgggccgtgacttgtcaattgactttcgccctgtcaagagctccaggaggacaacaccaaagctgtagacatcacttctagcagtcaagtgaccagtcatgacatattcaggggcagcataaccataggttcccatcacccgtgttgatacatgagtctcatcaccttcagggccagcttttgccaggccaaaatcagacagtttagctgtataatcagagtccagcagaatatttgaggtcttaaaatctctgtagatgacaggcctttgagcgttgtggaggcaggcaagccctttagcagctcccaatgcgattgacatcctagtaccccagggtaatggcatagctgtctttcggaataagtgattttctagacttcctcgaaacatgaactcgtagacaagaagccggtggtcatcttcacagcaatatccaatcaacttcaccaaatttggatgccttaattgtcccaggaagttaacctcagtaagccattctctgtgcccttgatgcccatctttgttgagcaccttgactgcaacaggcagtgacttcagcccaaccctgacattctcatctatgtaacccttgtaaacagtcccaaatcctccttcaccaagaacataatcagcacggaagctctttgtgattgtctcgagctcaaacaatgtaaaggcaatcacatcattgtatatggaaatgttcttggcatcttcaattttcctaggtgttgaaggatcacttaaatctgatgaggtgcgggtgtgcttcctatcggcaatggcgttcttggcaggatgttgtaacaagtggagctgctgaacttgagcatgcgcagcgacgacggcattctcctctcgcgtgccgcagttgcccatctccccctcttccttcccttcctccctgtggctcagttgctggtgttcttctacttgtgccgggggtaacccaggctttcattcttggcaggttgcttcatgccatccgtctcctcctctgactcggagatgacaccagatagacgacgggtagcgacgaagaggactctaggatcctttgcttgaggaagagaacgaatccaaggcacaaactgcaaggaaaatcgaaaccccctttcctggtgcctgctcttcaccggtgatggctcgaggcagatccagcgatggaggcgcgggtcgagcggcggggcgaggagcgaaacaggaggagggggtcgggactcgggaggtgagcgagcgagactgcgggagatgatgaaagaagaacagaaacgggaggagggcgtcgggcggtgaagaaatgcgtt

SEQ ID NO: 22661 - DNA, 524 bp, Setaria italica
  Peptide Sequence Number=SeqID_88635
cctggattcccaaagacttcctgatcctgtatagagagccaaattgcttccataagcataacttcttcaagatccatatcaaaactattgcctcttgatttcattgaaatgtagatttaaatgctttcttcccaaaaacccgtcaagcattcaagaatgccttgtttgtcttctcaatggaaccccatacggtggagcaccagccgaagatggaatccaaacttgggatggacccccagttccacgcagttgacgagcttgagcgaatacataggggaaaggacgccttgttcttgcagcaaagtgaccggcgatgcaggagactgaggctgcgggggcgagggaaaagaaacgtggagaagattggggcggcaagggctgagctagcagcaaacgaaggaggcggcgcgagatttgggggaggaagtagattgcgtgaggttgggagagggagggcacggtggtgatttggggagatggagcaggcgcggtggggatatggatttggcagggaccagcgagcg

SEQ ID NO: 22662 - DNA, 395 bp, Setaria italica
  Peptide Sequence Number=SeqID_88636
tagggcgggaaggaaggcggccccggccgacggagatgtcgccgccagtggccgaggagggcgcgaagggtgcgaggaggagtgaggaggcgacccacacgaggagggaggagaagatctggtaggccggggggaggtagaacgcggcggcgaggagcgcgacggccgtggcggcgcaagatgcggcatgggggagggagggggatgctctggccgtggtggaggaggagggtgaggaggtggagttggcgccggaatggacgacgcgagctcgggactgggagtcacaggggtcgacgaactccatggccggcgccggcgcgagggatcggagtctcggagatcgtcggagtccgcggaagcggcaaagggtagcctcgaatagtcaaagggtg

SEQ ID NO: 22663 - DNA, 424 bp, Setaria italica
  Peptide Sequence Number=SeqID_88637
gctgaccaacattttgagttgggagaagctgggcattttcttccttggcgctgctggctaccgattggtgagcgcggcagcgcgcacttccaatctctcttcctcgttctgagcttcacaggctactttcttccagtttgtgtgtgcactgctaatgtttgatgccactttcctgcagtgttttctcgcaagctagcccaatggaaggaacgatggagctcgcgatggagaggaggagctctgcgacaaccaagcagcctacgtgagctagaggtgttcacatgccatggaaacccaagagcgcgtacaccttggccggccggagcactggttcagatggttcatgtctagcactagttcggtgttatcctgattgagcttttcatccaagccaccatcctcgtccttcttcatatcctctaac

SEQ ID NO: 22664 - DNA, 422 bp, Setaria italica
  Peptide Sequence Number=SeqID_88638
gctgaccaacattttgagttgggagaagctgggcatttcttccttggcgctgctggctaccgattgtgttttctcgcaagctagcccaatggaaggaacgatggagctcgcgatggagaggaggagctctgcgacaaccaagcagcctcgtgagctagaggtgttcacatgccatggaaacccaagagcgcgtacaccttggccggccggagcactggttcagatggttcatgtctagcactagttcggtgttatcctgattgagcttttcatccaagccaccatcctcgtccttcttcatatcctcaacgttgcaattgttcgcgtctcacgggatcaaatcttcttgaccttgcaagaccttttcttgaccttgtaagacccaacattgcgatgtttctttcttcgacttgatcttattt

SEQ ID NO: 22665 - DNA, 582 bp, Setaria italica
  misc_feature (15)..(15): n is a, c, g, or t
  misc_feature (547)..(547): n is a, c, g, or t
  Peptide Sequence Number=SeqID_88639
cgacgagtgtcgagntccgccgggacgtgacgcccggtcgaggctgttcgttgctgagctgcagctgctgcaggttcggcagcgtgccgaagctgctcgggatgggtcccgtgagcgagttcagcgacaggtcgatgagcacaagctccttgcagttggcgatctccggcgggattgtgccgacgagctggttctgccacaggagcaccgtctgcagcttgcgcagccggccgagctgcggcgggatcgggccggtgagggagttctggtacaggtacagactggtgagctcggtgcagttgccgatgctctccgggattgagccggtgagcattgcggtgtagatggcgatcgtctggatcttcttgagctggccgatcgtctccgggaggctcccggagagcccggtctccgcgaggccgagcatggtgaggtcggtgcagccgccgatctccggcggcagaggtcccttcatcccctggttcccgcccgcggcggagcacctgcagcttcttcaggttcccgatgctcgctgggatcggcccgntcagctcgttgtcgtagagcgtgaattgcatcagg

SEQ ID NO: 22666 - DNA, 407 bp, Setaria italica
  Peptide Sequence Number=SeqID_88640
agctagatgaggaaataaaactgctggccagatgaggtaaagctaggtagctcggtcatcagtggttgccgccgccgttggcgccccagaggaaggcgccgatggcgaaggtgcgcttgtggtggagggtgccggtggcggggaggccgtactcggagaggaggcggtccagctgccactcgggcatcgcctcgtactcctcccgggtatacctcgggtagtgcagcggcatctggaagtagtggccgccgcacccgacgccggcctgccggtgctgctgctggccgccgtcgtccctcttccccccgtacgacgacgacctcgccgccgcctcccgcccgccgtccgccgccatcatcgtctccatggaagatacaagatctgggatctctttctctctttggtct

SEQ ID NO: 22667 - DNA, 133 bp, Setaria italica
  Peptide Sequence Number=SeqID_88641
tcactttcgcaaatggttgaaagtgtgcgtcaaactgaaagtaaaagtggaatttaatgtagtggtgttctatctaaaggttaaatgccttctatttctttcgtgtctgaaatagcacagcaggaagtacact

SEQ ID NO: 22668 - DNA, 244 bp, Setaria italica
  Peptide Sequence Number=SeqID_88642
cccaccagatcagatcactcaccgcggcagcggcagcggcggcggcagcagctcacggcctcgacgaaatgggcacgcaaagactccgacctcgccaccaggaattagacgcggctggatcgaagcgaagcaactaggaatcgcggagggaggggaagtgatttggcttaagaaaaaagagattaataacttcggctgagattagggaggctgagggttccagaagggcgccagtggagcacgg

SEQ ID NO: 22669 - DNA, 535 bp, Setaria italica
  misc_feature (500)..(500): n is a, c, g, or t
  Peptide Sequence Number=SeqID_88643
ggttaatgacatctagcactaatgcatctctgtgttactcttacaaaggataaaatgcacataacaacagagactaatggcttggtgacgacagagaaagatagctgtcaggctcgtgctgcatcaagtcagccctttgtgagaactgtttcaagagcacaaattgtctctcaggaagcatcagctagcatctttgcttcaaagccacctgtaggcccttcagttgtgaaaaatacatatggaggttttagttcaggaagcgcccattttgggtatccaaattttggtaatccgctaccgaatgatgggtgccttcaaagaaaatctgaatctctatctggtttggaagctcgggggcattcacctttattagtgcaacctgctctggaaaatggaagtccacagaagggtcctcgcatagccaatgttgtgcatcgattcaagagctcagttgaacttttggaaattggggctgttgtatctgggaggttgtggtcctnaagcaaagcaatcttcccaaagggttcagaagccg

SEQ ID NO: 22670 - DNA, 293 bp, Setaria italica
  Peptide Sequence Number=SeqID_88644
atcataacagctcctcatatctgccatatcctgggcagccacgaggagctcgtccgccgcggtggcggcggcggcggtggagtggccccggccgcggtcgcggtccacccgctgctcgtgccgctgcagagcgaagccccgcagcttccgcagcgacgacttcatctccgctccaccccccgggggacccggttcgcccgcgcgggatcgcgccccggatcgccggcgaggaggggctcgcggtcgcggtcgcggaaaccctagcggctagctgcccccgcacacacactcac

SEQ ID NO: 22671 - DNA, 1506 bp, Setaria italica
  misc_feature (1)..(54): n is a, c, g, or t
  Peptide Sequence Number=SeqID_88645
nnnnnnnnnnnnnnnnnnnnnnnnnnnnnnnnnnnnnnnnnnnnnnnnnnnnnnacgtcccaaaaagttgtgcttatcggtcggtggtacatggtgctaggccaagatcagcattttccgtgttccagctagctttagttcctcatttgagagaagaaaagctgtctattatattcatctggtcaggaactactcttaatactaaatcaaaatggacggatggtaaaaatgaggggaagaattagcttggatttgaaaaaaagaaagaaaaaaggggctaaagcaagcaatcatggagcgtatgattttgctctgctccaagaatcatatcccccggcggagatccacgacgaccacgctgacattgtcggcgctccgccgggccagcgccagcttcgccagcagcatagccgcgtcggagcacgccttgtcggaatccaccttgctcacgcccttcaccaccgcggatccgttctcggcgtccgcgtcgccagcgggcggagccacgccgttggcccgagcggccggcgccgccggcggaccgttgctacggaagcacgcccggacgaccccgcaagccatcacgttgtccacgacgtcccacaggccgtcgctggccaggatcaggaactcgtcgtcgtcggtgcgctccgtcaccgtcacctccggctccgacgacacgaacggcttaaggtaaccatcgcctatggctcgagacatggcgaggacgccgagaacacgggcgccatcccagtagatgacgcgaccgcccgccgcctcgatgcgcgccagctcgtcaggccggtcaggcttgtggtcgacggaaagcgggacgggggcgccagcgcgggagaggacggcacgggagtccccggcgttggcgacgacgacgtgggtggggttgactacagcgaccacggcggtggaccccacgtgatcgcaccgcgagggcatctgctgctcgcatctgcaggcgggctcgtcgccgctgcggctgctcgcccagctcgcggcctgctcgtccaatcgcgcgaagctcctctccatcacacccttccacgccgtctcttcgccggagccggcgttgttgtgctcgtcggcgaccacctcatgcatccgatcctggcacaacgtcgccacgtgggagcagccgtggccgtcgaagacgccgaagaagtggtgcttggtggcgccgggcaggaagtccggcctaatggagacggcgtcttccatctcgcgtcgccggccgcagacggaggtgaccccgtgcctcggcaaccgctccggcagttccggcctctcgaactccgagaccacttcggggcacgaaccggacgccgtgcgagccaacctctgccgcttgccggcccggacgtcgtcggccaccggcgcctggaaccgcctcatctccaacctgcgtcgcctcctctctaacgccgaggaggcgactgccgcggctgccgctgcggcagccgcggccacggcggtggccggcgtggacttggg

SEQ ID NO: 22672 - DNA, 147 bp, Setaria italica
  Peptide Sequence Number=SeqID_88646
gtgacccgaaagagtggagcggaggacgtagcctggggatggcgaggcatcgtcggccgccggcgccgccattgccgccgatcgaaagggtttgggactttgggggttttgagggagctttctccacgagacggtggtgcggctcgg

SEQ ID NO: 22673 - DNA, 226 bp, Setaria italica
  Peptide Sequence Number=SeqID_88647
gtcagagcctaccgcctaaacggcctgaaaaggaggccaagctaagggaagcttggccacaagagtcgtgagacaagtcaattccctttatataattgccatcgcaattcacagctcgcaaagggaaaggccacaagcagcacacggcggcgtgccagcagcgccgcggccgacatgggcaaggacgttgggccgccggaggcggcggcgaagaaggcggcgccgg

SEQ ID NO: 22674 - DNA, 511 bp, Setaria italica
  Peptide Sequence Number=SeqID_88648
ggcctctcatcaacagaggaatcatcattactggattgttctgttgtagcatcacttaatcttcttgacattgcttcctgagtcctgaggatagtatccttgtcaaccttggcctttgatttcatcacggaacctgccgttgccgctgcaagggccattgttggatcgtcccagctcttcctccccggcttcatggccgacccatttcccaaatctgtcatcttggagatcccagccaccagtaccccaaccttcttcttgccagtcccttcaccggagagccgccgcgaactaggggacagggatgctcgcctcccgcctaccgccggagacgccgctccccttctccctcccgccggtgaaggttgcctgtacctcgacggcacgacaatcgccggctccctggccgccctgcggttctcctccttggccgcaacgaggctgggcacgacgcacttggacggcgccggcgacgtcgccctgggcgtgcccctcaccgcgggcgaggagg

SEQ ID NO: 22675 - DNA, 294 bp, Setaria italica
  Peptide Sequence Number=SeqID_88649
caaggactcggaaaagcaccgggcgatcgccgctgcccccagctccaagaccatccagccatcgaagccaccccacgcccttcacacgagccggcaacgcacggcaacaacgcgcgtagttctgtctcatcagtcatgcatcggccttgcaacaaccaaccctgccgcggctcccgcgtcgccgccgccgccgtcctcgccgcgctgatgtgcgcggcgggcgtcgccgacgcgggcaccggcacgttcatctacgccgggtgctcgccgtccaagtaccagccgggccacccc

SEQ ID NO: 22676 - DNA, 243 bp, Setaria italica
  Peptide Sequence Number=SeqID_88650
ttggatcacaggtctatcacgataatacattagcaaactacatggataatgcagatagaagtggggatgattcagtggatctgaatgatgttgtgggccgtgttaaggaagttagtatggatcaatttgggagtcggtttattcagcaaaaacttgaaaatgcatcacctgatgaacgcgagaaaatattcccagagatattatccaatgcaattgctctaacaactgattgtttttggctaa

SEQ ID NO: 22677 - DNA, 276 bp, Setaria italica
  misc_feature (269)..(269): n is a, c, g, or t
  Peptide Sequence Number=SeqID_88651
tcttgttggaaacatgtgatacaagtgcagtagtcaaataacaggcatagagaagactaggtagtaacaatttggaaagatcttcaagtttgagaggaatcataggtatttaacagtttagagtaaacctaaatacaattacatacatttaaaaactccatgattgtagtgatttctataaggcgttatttgacaaaaacgaaatgagccccaaatcacccacgttagcaagcaagctgtgtacagaccagaaactctcatcaaagggncacaaag

SEQ ID NO: 22678 - DNA, 226 bp, Setaria italica
  Peptide Sequence Number=SeqID_88652
ggccttgatccgccccgtgaacctcttcccccggcgcacgtctcgagctcggtgccggcgacctctgcgccgaggaactcgcgcacgaactcgcccaccatgacggccggggatgcggtgaccacgaccctccgctcggcgcagccccggaacaccgcccatgtgtcggcgcgcacccccgcggcgtagtgtctgggcaggacgccgcgcgccacggcctcgacgt

SEQ ID NO: 22679 - DNA, 1414 bp, Setaria italica
  Peptide Sequence Number=SeqID_88653
tttttttttttttttaactttgaaatttgaaattcattaaaaatagaattggttctcactgcttctcagtacaaaattgttttcttaaagtttgaatctcccaaattaaattttgaagttttaatcaatttcaaccacccatagtgtttgcgccggcagtcagcaaacatcagttgcacacaagcgctctctcagctcattgccaggcactcaacaagatcagtgaaccacgaagctggggaattggatacacaaaaccttcatttggcatttgacgtggaaatgtacaatcacaaaccggttgcagactacactcaaccagggacaatttgaattgccatggaatagacgtggacctcaccactgttgaagcctgcttcaaaacatcactgacgagtaattctcccttactttcgccctgctctatgttacaggcgatggactatcccccatcaaggtatgatcatcaaatggttacctccgtacagccttgatgaagagcatgtagtaacatcgaacctgaactggttgatgacttgatgtatgtggggccaggttaaaccatcatcggtgcgggtcaatacgatagttcatggccgcgcagtgatatgtacttcttaatccagatagctatatcctcagcacaagcctgagcctgaggcgtcttcagcaggacgtctagcgtggcaaactcatggactgcatccttgtactcaagaacaggggcatccacgtttaccttgcggagctcctccgagtatgcaattgcacgatccttcatccagtcaagctctgcaacgactgtcagggtcggaggcataagcttcaacggagggcctcttccaggcacaagagggtttgcagctgggtggtccaagctgaattcaccctcagggaagaagagtttccaggccagtaaacacgatgacttgtcatagaaataggagtttgccagcttcagttctgatcgagtgggtgcgcttcccatgaagaatggatacatcagaacttgcgcaacaactctcacagggtccaggagtttcccagcctcaacagcttttcgggccacatagtcggcaatatttgctccacaactgacaccaaggagaacacacctggacggatcggcgtgcgcggcgagccacggttcgaccatcgcggcgccgaacgagtcggcgccggtccccttgcccatcattgtccgcccgcacgcggcaaggttggcctgcttggcgatccatcgcagcacggcgatcccgtcctcgaacgccgcggggtacctgctctcgggagcgaggcggtacccgacggccacgacgatggcgtcgcagaggcgggccacgcggcggcagaatgcgtcgttagcggcgctgtccgcggcgcccgtcacgaatgcgcccccgttggtaactgc

SEQ ID NO: 22680 - DNA, 268 bp, Setaria italica
  Peptide Sequence Number=SeqID_88654
atcagtagcagtaggtggtgagtccatcacccgctcgcccatccatctgctttcgacctcccctgctcttgaccggccaaccatcgatcgcggcgcggccaagcgatccccgccataaaggcgagcgcgagcgagggagagcaagtccactgttgcattgctggctgctctggctttctgaggaagaagaagaagaagaagagtggttgcggtgccggtttcggttgcgacatgaggaggccagcggggatggcgcgcggtggcgcgg

SEQ ID NO: 22681 - DNA, 577 bp, Setaria italica
  Peptide Sequence Number=SeqID_88655
aacagctgatatggatccagtccagcgtgctgcctttcttgaggaggatgatgagatggaggatgctcattctgttgctgcaactgctggcgacactgacgccaatgttgatgtgaatgaacattttgtatgtttctcctgtgttgatggtgaactttatgagcttgatggacgaaaatcagaacccatatcccatggcccttcatcaccagaaacgttgttgcaggatgctgcaaaggtcatcaaagccagaattgcggagaacccaaattcaatgaacttcaatgtcatggctctttcgaagcagtgaagtaaattgtgatggataggttttctttggcagaagacaggcccccttttcttttaagttgtgctggttacagctggttacttgcaccgaatagaatgtttgaataggggaaaacaaattaaaacactgttaccaaaagcatgaagctgtgctcgttgcacagatttttgatcatatgacctgagatgtttggttgatatgcgcgtgccttgttgatggagataaaatttgttgttcacgatttcacttaagtccagtttatgtacg

SEQ ID NO: 22682 - DNA, 331 bp, Setaria italica
  Peptide Sequence Number=SeqID_88656
ccaaggactcttctttcaacctatggtagaagtcaatcaaaatgcaatcacctgttgaactactggaacggttttcatctgtttcaaatacgcagttctcaatctttccaatcccatccccaggcactcgtccgcctcgatcctgatcggcaggttccgccgtcgccgccgtgaattcccaatcatcgtctccgatcccttcgccgtcctccgcctcctcttgcggacccgcatccgcagcgccgccggcggtgggggaaggctgagatccgtagaggccggcgatgaggtccttcagatccgctggcctcgatccgtcggtggtgcagga

SEQ ID NO: 22683 - DNA, 1670 bp, Setaria italica
  Peptide Sequence Number=SeqID_88657
aacaatatttgaaactatacatatccttttagcttgctatgctagtgccattatcaggcactatggaaggaatggtataatgaggctacaatttgtaccagaaaaaaaaaaaagacagtagttcatgtggaccggtcctccagccctgtgatggcagggcccttactctatattgtgcccagggcaacttaatgaacaatttttactcaaaaagctaccgatgcttccatcagaataggtcactagtttgatgggttattcagtatgattgccaagtgttgctgcgttgttcctcaacgacaggagtgactgacatctgcggaggataagaagatatccaatttgcccacaaatttgcaactttaacaatatagtgattgccattccacatgatcaacttcattcctggtacagaactgggtgggaggaggcttagtctacatgttgtcttgttggtgggaagaaaattttgtagactgggcacctcaagttcattaatattgttgatggactccaaaagaggtttagccacagatgcatctaagtgattgctgtcaacaacccttttaagagccatttctaaaccacttgtccaagcattaatacatctgtccaaacaaaccagcattttactcaacattccaggatctgcaagaacccaaggcttgaaacactgcatggagaaacataaaatctagtgcaactctatatatctccccaagagcaataaagtaacgaccaccttcagaaatcacttggtcgcagacatttgtatgacaagatttttgccaaatcgctgcaccatgctgcaattcttgggcacagggcagaagcatactgtaccatgcaccgacatagtcaccttgttcctttctggaagctagctccaatgtatgaagggtggaaacactgtgcttgtaaagttcaactgccacacttgtatcttcaattgcccgtgaaatcttttctgctaaacaatactcttgttcaaaatccttcagttgttcctctttgatacagttaagcacttctgttatacatacatccctaggatgttcctctgtgcaaaagccattgggcagtgaagaatcttttagtttgtcatatatttcctgaatctcccttccgattgctgttgctttcctgttttcaccagacagtgtaaaaaccttctgtgctgccttaagatccttcacatgcttgaatactaatgccaaggactcttctttcaacctatggtagaattcaatcaaaatgcaatcacctgttgagctactagaacggttttcatcatttcattgttagaaacaaatcatacgaattctgcacactttctgcagagctttcttcaatgcgaataacatctgcccgaacactctcttcgtacaggttgagtatggctgaattattaggcggagagtaaccagaggccttcacacattctcccgtggactcatgagtcccaatatcaacagtagtttgacgaaaatggttcaatttttcatcaacactggttaacgatgactggacttcctggtcagtgctcaatgattttgttataccctcaatctttacaatcccatccccaagcgctcgtccgcctcgatcctgatcggcaggttccgccgtcgccgaccgttagaaatttaccctaaattactaattacgta

SEQ ID NO: 22684 - DNA, 292 bp, Setaria italica
  Peptide Sequence Number=SeqID_88658
cgaacttgaatataattaccagaactgagcagcacgcttcaaatacacacccaaagagtactgagaacatgaggatgtttcatctttccagaccttgccaaagccgcggagctcgagctagcgcctgcctccggccccgaatcgcgccgccaggcggccccgatcggcgcgattgcttcctgggatccaatgaggcgcggagagcatcggggatggcgtcgcgcatggagctgctcgagggagggagggaggaggggggccgagggttgaggggaaggagggggggtagtcg

SEQ ID NO: 22685 - DNA, 259 bp, Setaria italica
  Peptide Sequence Number=SeqID_88659
ctccaccgccacctccatatcctcctcctcctcctccagcacgccctccgccaccgaagccgccgccgccgccgcctccacctctaccgcccccaccgccgtagcctccaccgccacctcggccgccgtatccgccgccgccgccgcggtagtcgtcggatccgtaagaccccgacatgggctcacgacgcgcctagggtttgggaccgttcgagaagacgggggaacagagtgttcgtgatgcggacgggtggtctgt

SEQ ID NO: 22686 - DNA, 761 bp, Setaria italica
  Peptide Sequence Number=SeqID_88660
ttttttttcccttgatactgaattactgatacacactgcagatagcagttttttttataacataattgcagagagcagtagcgcccatcatccatggacatggcataaacaataaccgtgttacttccattcagaagacagcaagtacaatatgaatatatatcagatggctctaaaatactactgtagcatatattcttgtttccttcagagactgtttgattgctaacttattctgatgtctggtgatactttgtagactgtagtattcaacagagaagcctccatgggtttaaaatgtgtgcgcatcctaaacctccacggacgctttcctgttcttcttcttcttcaccttgagccggattttagggcgggaggcgtcgccgtccgtttgcccgtcggtgtcgtccccggagaaggacatggatgcggctgctgatgcctcctggtcctcggccttggactggaggcgcttcatgagcaactcgggcaccacccagttggacacgaagtagaagagcagcatcagaacactgactgggatgagcgacgagacgtcgccggtgtcggacggcgagcctggcaccagcttggggctgaggatctcgctgagctccggcggcaaagcccgcagcctgctgccgcacggcgcccggcgccggcgcgccacggccgctgcggctctccggtggccatgcgcaggagcagcagcggccgcggcgggatgctgggcggtggagcgtatcgtgagcgcagctgcc

SEQ ID NO: 22687 - DNA, 588 bp, Setaria italica
  misc_feature (556)..(556): n is a, c, g, or t
  Peptide Sequence Number=SeqID_88661
tagcacatgagattgataacttgaagaaaaagttggcctgggcatgggtttatgatgttgtaaaaaagattgaggaacaagcaaataagcttgagaaactcaaagagcgtatccctgcatgccaagaacgaattgatcgaaatacggctattatagaggaactgaggaaagattttattgtgaagaaagaaaatgttagatcttttctggagaagacacaagaagtaaggaggatgaaggaaaaattggaacatgacatgcatgaggctgggaaactgaagatggatctagagaaagagcatgaacgcggtatgcaaatgttgaataaaatgaataaccgtgtgagacaacttcaggtgcaggttgatgaatttgaactgcagcatatgcaagaaactcaggctgaagtatctcaaattgaggacaaaatgcgggaactacagcaggagatcaactctgctcatttaagtgctacaaggttaaaagaggaagagaagaaattatctgaagaactatggggcattactaaaagcatcggtgacattgaaaaaaaagntagctgaagacgcccgcaagatcaatcacctg

SEQ ID NO: 22688 - DNA, 380 bp, Setaria italica
  Peptide Sequence Number=SeqID_88662
agatggtgcagcagcagcagccgccctacggcggcgggggtccagggccagcaggtggggggtggtggcggcgcagatcgcgcagcagctgacggcgacgtgcggcatgcaccagcagcctccctatggcggcgtcccctactgattgatgaacggataagtgatgtaatatgtgtggccgctggcgagctagctatggggtaataaagtgtcatgcatcacaccatgtgtgagcgatgacacgaataattcgaaagatataattcctttaccatgttaacgatcgagatccttgtcatcgctcacacatggggtaataaagtgtcatgcatcacaccatgtgtgagcgatgacacgaattatatctttcgaattattcg

SEQ ID NO: 22689 - DNA, 313 bp, Setaria italica
  Peptide Sequence Number=SeqID_88663
cgaataattcgaaagatataattcgtgtcatcgctcacacatggtgtgatgcatgacactttattaccccatagctagctcgccagcggccacacatattacatcacaccatgtgtgagcgatgacacgaataattcgaaaagatataattcctttaccatgttaacgatcgagatccttgtcatcgctcacacatggtgtgatgcatgacactttattacgccatagggaggctgctggtgagctagctatggggtaataaagtgtcatgcatcacaccatgtgtgagcgatgacacgaattatatctttcg

SEQ ID NO: 22690 - DNA, 691 bp, Setaria italica
  Peptide Sequence Number=SeqID_88664
aagaaaaattaagaaacaaaatagaaaaagaataggaagactacctagactagtcccaactgagtggcagggacatcaccgagctcattgctgctggtagggagaagtttgcttcagtcccatgcggtggtggtggtgtggctgttgcggcagctgcccctgctgctggtggagctgctcctgcagctgaggcgaagaaggaagagaaggttgaggagaaggaagaaagtgatgatgacatgggcttcagcctcttcgactgagctgtgcagtcatcggagtcctctttttgggtggaaaaatagttgtgatgtttggattctagccttgtttcatgttggtggaatgactgctaggtagtaattcagctgtaacttgctatcctggctggtgtttttactggtgaaccagagtttttctatcaaaagaggactccgatgactgcacagctcagtcgaagaggctgaagcccatgtcatcatcactttcttccttctcctcaaccttctcttccttcttcgcctcagctgcaggagcagctccaccagcagcaggggcagctgccgcaacagccacaccaccaccaccgcatgggactgaagcaaacttctccctaccagcagcaatgagctcggtgatgtccctgccactcagttgggacagcaggagctccatcttttcattgtcaatt

SEQ ID NO: 22691 - DNA, 211 bp, Setaria italica
  Peptide Sequence Number=SeqID_88665
catcggagtcctcttttgggtggaaaaatagttgtgatgtttggattctagccttgtttcatgttggtggaatgactgctaggtagtaattcagctgtaacttgctatcctggctggtagggagaagtttgcttcagtcccatgcggtggtggtggtgtggctgttgcggcagctgcccctgctgctggtggagctgctcctgcagctgag

SEQ ID NO: 22692 - DNA, 627 bp, Setaria italica
  Peptide Sequence Number=SeqID_88666
cgtagaaaccctagagaccgctgagcactccgccgccgccgcgcttgcaccgcactcctcgtcttcgcgggctcctccccctcccggatccaggatgaagtttgttgctgcctatctgcttgctgtcctcgctggcaaccccagcccctctgcggaggatctgtctgccattctggagtcagttggctgtgaaattgacaatgaaaagatggagctcctgctgtcccaactgagtggcagggacatcaccgagctcattgctgctggtagggagaagtttgcttcagtcccatgcggtggtggtggtgtggctgttgcggcagctgcccctgctgctggtggagctgctcctgcagctgaggcgaagaaggaagagaaggttgaggagaaggaagaaagtgatgatgacatgggcttcagcctcttcgactgagctgtgcagtcatcggagtcctcttttgggtggaaaaaatgttgtgatgtttggattctagccttgtttcatgttggtggaatgactgctaggtagtaattcagctgtaacttgctatcctggctggtgtttttactggtgaaccagagtttttctatcaaatatattatgaattggttaaccgaaagtactaa

SEQ ID NO: 22693 - DNA, 678 bp, Setaria italica
  Peptide Sequence Number=SeqID_88667
aaaatttaagataagaatgaacaagacacgcagaaattgggaacatccaagaaactttgctgagacaatcaattcttaatgaaacagcaagatagggtagcaaaacatttggttcaccggtaaaccgaacatcataatctacgctgacatactacatagagtagcagtcttccagtgattcccaactcctaaacaaggttaaaatccaaacatcctgactctgttttcctctgcccaaagacttggcactgatgatagaaggatcccagcttagtcgaacaggctgaagcccatgtcatcatcactctcttccttctcctccaccttctcttccttcttagcctcagccgcaggagcagcaccaccaccagcaggagcagcagccgcaacagcaacaccaccaccgccgcatgggactgaagcaaacttctccctaccggcagcaatgagctcagtgatgtccttaccactcagctgggacagcaggagctccatcttttcattgtcaacctcagcaccaactgactccagaatagtcgtcaggtcctccgcagaggggctgttgttgccagcaaggacagcaagcagataggcagcaacgaacttcatcctggattgtgggaagcgagagcccgaggaggaggagcggcgcggcggctgcggagagctcgagcagag

SEQ ID NO: 22694 - DNA, 708 bp, Setaria italica
  Peptide Sequence Number=SeqID_88668
acgaataaaatttagatgagaatgaaagacacagaaattgggaacatccatgaaactttgctgagataatcaattcttaatgaaacagcaagatagggtagcaaaactttggttcaccggtaaaccaaacagcataatctacgctgacatactacatagacagagtagcatagtctttccagtgtttccaactcctaaacaaggttaaaatccaaacatcctgactctggtttcctctgcccaaagaattggcactgatgatagaagagacacttagtcgaacaggctgaagcccatgtcatcatcactctcttccttctcctccaccttctcttccttcttagcctcagctgcaggagcagcaccaccagcagcaggagcagcagccgcaacagcaacaccaccgccaccgcatgggaccgaagcgaacttctccctaccagcagcaatgagctcagtgatgtctttaccactcagttgggacagcaggagctccatcttttcattgtcaacctcagcaccaactgactccagaatagtcgtcagatcctccgcagagggactgttgttgccagcaaggacagcaagcagataggcagcaacgaacttcatcctggattgtggaaagtgagagcccgaggagcggcgcggcggcggcggcagggagctcgagcggaagctgagacacgcaacaggagataggcaagg

SEQ ID NO: 22695 - DNA, 964 bp, Setaria italica
  Peptide Sequence Number=SeqID_88669
ctcctagccctaaacccttttccgtcctgatggcgtcctcctcctcctcgccgccgccgccgccgccgccgccgaagctgccgatccccggtcgccgcaacatactcatcaccagcgcacttccgtatgtcaataatgttccccatctcggcaacatcatcggctgtgtgctcagcgctgatgtgttcgcgcggtactgccggctccggggttataacgcaatctacatatgcgggactgatgagtacggcaccgccaccatcgacctctcagctcagacaccaaagaacagaacagaaacctagccaattaacaccatgaaggcgatcctcgctgccctggctctcctggccctcgccgtgagcgccacctccacgcacacgtgcccgtgccatcagcaaccgccgccgcagacgtatccccaccagcagccgccgatcctgacccagtgcggcgagctgctgaggcagcagtgcagtcccgtacgtccgtacgcccttacttgctcgccgcagtgccagatgctccggcagcagtgctgccagcaaatcaggctggtggagccccagcaccagtacaacgccatctacaccatggtctaccagatggtgcagcagcaggcagccgccctacggcggcggggtccagggccagcaggtgggggtggtggcggcgcagatcgcgcagcagctgacggcgacgtgcggcatgcaccagcagcctccctatggcggcgtcccctactgattgatgaacggataagtgatgtaatatgtgtggccgctggcgagctagctatggggtaataaagtgtcatgcatcacaccatgtgtgagcgatgacacgaataattcgaaagatataattcctttaccatgttaacgatcgagatccttgttttgccagtgataacaaagagtgttcggaccatttatcagtgaaacaacgagcattcacattaagg

SEQ ID NO: 22696 - DNA, 267 bp, Setaria italica
  Peptide Sequence Number=SeqID_88670
tccggtaggcagccgcatcccccgaccgccgccgcctccgcagcaccagcaccagcagctcccctcccaacgcccctgccgccgcccgccaagaaggcgcgcaccagcccggcaccgctctacagcgacgacgacatcgactgggcggtggccggcggtccggacgtcggcatcgccgggaacctgccggactggccgctcgtcgacgagcagttcagcgctccggtgccgagacccgcggcggaggcgcacgtgaccagaaccccg

SEQ ID NO: 22697 - DNA, 1027 bp, Setaria italica
  Peptide Sequence Number=SeqID_88671
cgccgccaaccgcctcgccggcaagcaccgccgcctcccgctccacccgcccgccgccgcctccgcgcccgccaagaaggcgcgcaccagcccggcaccgctctacagcgacgacgacatcgactgggcggtggccggcggtccggacgtcggcatcgccgggaacctgccggactggccgctcgtcgacgagcagttcagcgctccggtgccgagacccgcggcggaggcgcacgtgaccagaaccccgtccaagcggagcccccggcggccactcgcggcggcgttcaccgtccagggcggccttgcagggggcatgccggactggccgctggacgagttcttcggcttctcggagttcaacgccggcctcggcttcaccgaaaatggaacgtccaaggctgacagcgggaagctcgggagcaccgacgggtcgccggcgggccggtcgtcgtcggacacggcgcaggacttcttcgggcaggtgccggagttccaccactggtccgtgccggagctcccctccccgcccacggcctcgggcctccactggcagggcggcccgcgccacggcgccgccgccgccgacaccgccgcggtgtccgtgccggacatctccgcgccggaggagatgttgacgtgacaagatagggaaagagaggcgtctccttcagtactggagtggtgtactggggtgtgtaggcttgcacgaaacaaaagatttgctggcgtgtacttccatggtgaggagtcagtagctcgtaggacaagatcgagagtgagggttgcttggagaagatcagatgaagcagacagagatagcacttgtagttcctagtcgatgaacctgattaactaggagatttctgtgtgactatgtacgttggttttgttagctcgaggtgtcagaaaaaaaagagtaaagatgaagaataaaaaggtgaatctgctgggctgtcacgagggtaatcatgataaagctccaaattacagacaccgtgcatctgttaattgttcacaaaaaaaa

SEQ ID NO: 22698 - DNA, 409 bp, Setaria italica
  Peptide Sequence Number=SeqID_88672
gagcaaaaattaaccatcagcgacgactggcagcgttcgccagaaccacgccgcacgaaatcgcgaacgagccagccaccaatcaggtggtgggcttgcggtggaacccttcggctgggtctacgggatcgacgggggagggaacgacggcggtgacagcggcggcgggcgggccgacggggattcgccgggacaccatctcgtcgaccttgtccgggtccccggagaggagcgcctccacggtgccatcgcggcggttgcggacccacccggcgagccccagcgagcgcgccgtctccacggtccagtcccggaagaagaccccctgcacgcggcccttcacaaccacgcgcaccgccttaggggccggcgacgacggctgctgctgcggcggtgggtcggatgggga

SEQ ID NO: 22699 - DNA, 158 bp, Setaria italica
  Peptide Sequence Number=SeqID_88673
gggtggagatcaggcgagtcaaagctgctttcaggtgacgaaacaatgtttctggcggatcctgcagtactcggttggaaagcgcttctcgcttcaagctgtaatggggctaaactgcccgagatttccatggctgcatcactgaaattgctttcgtt

SEQ ID NO: 22700 - DNA, 439 bp, Setaria italica
  Peptide Sequence Number=SeqID_88674
gaggaaggccagttgcgaagaagggtctgcgcattctgtcaatggatggtggcggcatgaagggccttgcaactgttcaaatgcttaaacagatagagcaaggaactgggaaacgcatacatgaaatgtttgacctcatatgtggtacatccactggtgggatgcttgcaatggctcttggaatcaagcagatgaccttggatcagtgtgaagaaatatacacaaaacttggaaaacttgtgtttgctgaacctattccaaaggatgaagctgctacttggaaggagaagattgatcaacttttcaaaagttcgtcacaaagttttagagtagttgtacatgggtccaagtgcagatcaatttgagaggttactaaaggaaatgtgtgccgatgaagatggtgaccttttaattgaatctgctgttaaaggcattccga

SEQ ID NO: 22701 - DNA, 592 bp, Setaria italica
  Peptide Sequence Number=SeqID_88675
tcccggtgagctctagctagtagcttaacacacttagttttttttttttggtaaaagctgcttcacacttactccatacttatctaggatagtagtactgctcaagaagatgtgatttcacgcagataggtctgtcgccgacgcgagcatgcacgccatagcgtagtatgcggctatgcgcttcagatcagtccctgtcgttgaggccgaacctgcggtcgaagaagttgccgacggcatggaacgccgggccgaagaatccgccgccgccgcctctcctcctctggtcgtcgttgttggtattatcgttgtcgtaccccggcggcgcgccgtagacgtgcacctccctggtgttgatgtacaagggggacctggtgccgtcctggtgagcccagtacccggcgggagcgttgttgttgtacggtgcgtaactgccgtcaccgccggtgccgtagggagcgccgccgttgccgtggccgccgccgccgccgtaggaagagttgtggccgtagccgctgcctccgtgcggggagttgttgccgtagccgccgccgccgtagacgggcgcgcctaccactacgccgctgccgtt

SEQ ID NO: 22702 - DNA, 346 bp, Setaria italica
  Peptide Sequence Number=SeqID_88676
tgcgctgcggccgcgcggtgctcggccgagcttagctcacttacgtcgccgccgccgccgccatggtgggcggggcggagggggcggctgatctggccgcggcggtgggacggggggcggtggaggaacggctggtgcagcgtggaggagaagtccttgaagtagagcacggagacgaaggtgatgaaggcgagcgtgagggcgtaggacgtgaggaaggggctcctgcccctcccgttgctgtgctgcgccttcatcgttctcatctgggggaggaggtcccctccccttcccccgggccgggctcctcccttctctaatctctcctacccgcgcgcgctccctc

SEQ ID NO: 22703 - DNA, 507 bp, Setaria italica
  Peptide Sequence Number=SeqID_88677
atgtgcccccagggcggtggctcacggcaccattcaacctgaccagccacatgacgctgtttcttgccgagggtgctgagatccttggcattccgtatgagaagtattggccattgatgccagcattgccatcctacgggtatgggcgggaacgcaaaggaccttgctttggaagtctcattcatggacagaatttgaaagatgttgttattaccggacacaatggtagcataaatggccagggtgaagtttggtggatgaagcatcggagaagaatgttgaataacacgagacctcctcttgtgcagctgatgtggtccaaggacattattgttgcaaacataacattgcggaattcacctttctggcactttcatccatatgattgcacaaacgtgactgtttcaaatgttactatcatccatatgattgcacaaacgtgactgtttcaaatgttactatcttatctcctatttctggatctatgccatctgtgtttggagcgcc

SEQ ID NO: 22704 - DNA, 2104 bp, Setaria italica
  Peptide Sequence Number=SeqID_88678
cgctcccgccgtcgcgccccgcgccgcggcttcgcccgacggcgtacaacctgacggacttcggcggcgttggggacgggcgggcgctgaacaccgaggcgtttgagcgcgccgtcgaggccatcgcggcgctcgcggagcgcggtgggggacagctcaatgtgcccccagggcggtggctcacggcaccattcaacctgaccagccacatgacgctgtttcttgccgagggtgctgagatccttggcattccgtatgagaagtattggccattgatgccagcattgccatcctacgggtatgggcgggaacgcaaaggtccttgtctttggaagtctcattcatgcacagaatttgaaagatgttgttattaccggtctgttatttctctgaataagctactgttgaagttatccaatataaaacaccttacagaattctgaatcaagcaacttcagtgaaaaaagtgcaccatgtgcatattaagcaatataatggttggaaccatgtatcatcatgtgttagtaacataaaccaactacttgatccttgttgaccccagttcaaatgtgcttggtgcatcctgtgtgaatatttgaacgtttattaaaatataatataatatttacagcttgaactgtcgtatatttcaatgatgttttaccgcctaaacaggtaacttcgtatgaatgcaacacctgcacctctatttgcaaatcccatgctgtaattgtaactgaccaagttgtttgctcgccaattttacactaacagaataacgaggttctttatatttcaactgcttcattgagtggtaattatgtggccttcatatgtttactcctgtctgttaaataggacacaatggtagcataaatggccagggtgaagtttggtggatgaagcatcggagaagaatgttgaataacacgagacctcctcttgtgcagctgatgtggtccaaggacattattgttgcaaacataacattgcggaattcacctttctggcactttcatccatatgattgcacaaacgtgactgtttcaaatgttactatcttatctcctatttctggcgctccaaacacagatggcatagatccagattcttgtcaggatgtgctcattgagaattgctacatatctgttggtgatgatgcaatagctgtaaagagtggctgggatcaatatgggattgcatatggacgcccatcttcaaacattttaatccgcaatgtaacagcccgttctcttgttagtgctggaatttcaattggtagtgagatgtctggtggagttgcaaatgttactgtggagaatgtccgggtctgggaatcaaggagaggtgtgaggataaaaactgctacaggaagaggtggctatatccgtaacatcacctaccgcaacataaccttcgacaatgtccgtgctgggattgttataaaggttgactacaatgagcatgctgatgatggatacgatcggactgccttccctgacatcacaagcatatcattcaaaggaatccatgggcggggtgttcgggtgcctgtccgtgctcatggcagcgatgtcatccccataaaggatatcagcttccaggatatgtcagtaggcatcagctacaagaagaagcacatcttccagtgctcctatgtcaaggggcgtgtcatcgggtccgtgttcccgaaaccatgtgagaacctggacgtctataatgagcaagggcagcttgtcaagcgggcaatatccctgaacagcacagagcttgactatgacatctgacacatactccagcgatgatagggagtagtggaaatgggagctgtctaccctctgaaatcattcatctcccgctttctaatttcccacgtttttgctctagaattgtaaatacccaatacagatagaggagattctcctcgtcataggtttgctgcttacagtggctgagtgtatctcaccagtggccatcaacattttgcattgccaggacctcctggaaacaaatctatgttttcaatgtagtatataatcttaaatgaaggaaagaagaatcgtgtgatcaaacaaaaaaacaaaaaacaaaaaacaaaaaaaca

SEQ ID NO: 22705 - DNA, 556 bp, Setaria italica
  Peptide Sequence Number=SeqID_88679
cgcgttttggaattgtactgagcaaatacagcccagacatcctttgcatgttatttatcgaaggaaatcacaaggcatcagctcaaaaccttgtaactaacctttatttgttttagttttccttaagtattttgtagatagggtaaaaaggagtactgctccagatgttcatttagataactactctacaaaaatcatttcagtccaatagcaagacatgagcaggtcttccagcggtttatcaccttcgtacagatagacccatctctatataaaaaagaagaaataaagcccataaatcagaggattggacatttaatcattcttcaattataagtgtgaagcatacagtgttgcattgcatgtgaggcccgacagtaacaaaaagacttcacaagtttggctctacttaagctctatgactaaaatgtggttgtcgcatcattgccaaatatccaagcacccaccttaagacattgcgtaaatgtttcacgtaccatcattttcatcctgagagagagcgcggcagctcgagtccgtgctcagccgcgctctc

SEQ ID NO: 22706 - DNA, 384 bp, Setaria italica
  Peptide Sequence Number=SeqID_88680
gaaccgcgtcacctggacgaggaggatgagcgagtcctcggggagggggtcggaggccgggtaggtggggtgggggaggagctcgtccttgggcaccatgagcgggtactcgaggtagtccacgtcctcgagggtgcagctcgccgtggcctcgacgaaccagacgccctcgcccgtgcagtcgaccaccaggtccccgtcgtccgagaccgcgagccggccggcgatggggtagtagctcacgagcgcggcggccagcgcgcgctcgatggccctggcgggcgcctcggcgtcggcgccggcgcggcccttgaagacgtggagggactcgatgagcgcgcgctgcgtcgggtagcggtcgagccaggagagcgggagctccgg

SEQ ID NO: 22707 - DNA, 552 bp, Setaria italica
  Peptide Sequence Number=SeqID_88681
tcctatcctccaagtcattcaccactgctgtcattttatttggactttttcgtagtacgtttattgatattgccatacacttcataaggaaaggtactgcagtttattttatttgcattgatagcttgagatcgggacctgccagagatcagtctcacacgcagtcgtttcaccatgacgcatgaaagatatgctcacgaactcagcaagatattcaccatgctgagttttcgtgtaatctgctaaactgcagtaacttaaatttacatgcgaggaatgaaacggtgaaaaagttgtaccactgcaccatcttaaattcttaattccttggaggtgcgcgcgcgcgtgcaggtgacgttcctcaagtgcggcggcgtggtgctgggcacgggcatccaccacgtggccttggacggcatgggcgcgttccacttcatccagacctggaccggggtgtcccgtggcctcggcaccgccgaggcctgcggcccgccgccgttccacgatcggacgctcctccgcgcgcgctcccctccggcccccgccttccac

SEQ ID NO: 22708 - DNA, 730 bp, Setaria italica
  Peptide Sequence Number=SeqID_88682
cgcagactcgctatcagcagaggctacacgagcagcagagacagcaaagaaagagagagggacgatgaaggttgacgtgatggagacgacgctggtggcgccgagcgaggacacgccacggcgggagctgtggctgtccaacctcgatctcgccgtgcccaagacgcacacgccgctcgtctactactacccggcgtcggaactcggcgccggcgtgggaccggagggctccttctttgcggcggagcggctgaaggcggcgctggccagggcgctggtgccattctacccgctggccggtcggctcggcgtgggtgagggcgggcgcctgcagatcgactgcaacgcggagggcgcgctcttcgtggtcgcccaggccgactttgcgggcgacaatgtcttccgggactacgagccgtcgccggaggtcagacggatgttcgtgccgttcgtgccctccggcgacccgccctgcgtcatggccatgttccaggtgacgttcctcaagtgcggcggcgtggtgctgggcacgggcatccaccacgtggccttggacggcatgggcgcgttccacttcatccagacctggaccggggtgtcccgtggcctcggcaccgccgaggcctgcggcccgccgccgttccacgatcggacgctcctccgcgcgcgctcccctccggcccccgccttccaccaccccgtctactccccggcgctgctcagcggccgg

SEQ ID NO: 22709 - DNA, 280 bp, Setaria italica
  Peptide Sequence Number=SeqID_88683
gggcgggacggcccccgcgagccccttcccctggagcgagatggtggcgaccctcccgcgcgcgtcgcaggtgacaccctcgaagtagtccccgcggccgcaggggtcgccgccgcgcgcccacgaggcgagcgcccgccccgacgggtccagcgccgccttcaggtccatcagcgcgtccagctcggcgttccgcgacgacgaggaggacgcgttggtggaggataggagcaggaggaggaggaggaggaggaggaggaggcgggggagcgagctccgg

SEQ ID NO: 22710 - DNA, 432 bp, Setaria italica
  Peptide Sequence Number=SeqID_88684
ggcaagcggagcaagacggcctacggggcgcccgtggggacatggcgacactaccctcctgcggctcaggcgggtggcgggcatcgaacgtcggactccctctcttgagcagatcttgggcgacggcgtggcacggcctctcccagctcgtgagagcttgcagcgttgacctcttcttggctggcgagtgccggcggcgtcaggctctttcgtggctcgcgagcgctggcggttgcagcttctccaggcggtacagtggcggagccacgggccctttcctactccaactccgcgctcatctgcaatcgatcccccacagtgtcaccctgtatatccatgggggcccgtccaactccggcatgcctctgaccctccctgaggatgtgtgctgcacggctagagcaacagctggtgcgggttcccttcccgagc

SEQ ID NO: 22711 - DNA, 407 bp, Setaria italica
  Peptide Sequence Number=SeqID_88685
agtgttcctgagaaaggcgccagaaggcatccaaggggtgacaatatccagattgatacaaaaaacattctcttcatttgtggtggtgcttttgtgggcttggagaaaactatttcggaaaggttgtagacatggtcttttatgttttacagttgtgatatcacaaggtttgaattttcatgtttcccctataattttttctaggagacacgattcttcaattggtttccgggcacaggttcgttcaaatatgcgaactggtggtgtcataaatgctgaaatcacatcttctctactcgaatcagttgaaagtggtgatctcattgcatatggattaattccagagtttgttggtagatttccaattcttgttagtctatcctccctcagcgaagatcaacttgttg

SEQ ID NO: 22712 - DNA, 583 bp, Setaria italica
  Peptide Sequence Number=SeqID_88686
gctttgcgtcttattgccaaaagagcaatagtgaagaatactggtgctcgaggtttaaggtccatattagaaagtatattgaccgaagcaatgtatgaggtatatactctttcgcttcccaccacagcaatactgacgtccattaattgggttggtacaacctttttagaatatttgacgcagcacctttccagacaggcaatgctttgagtacatatgactttgtaattttgttctagcttttgtggaactgtctcttgaggactgcaccataaaaacggtgaaaaactaagagcctctaacaatgctggtgggtcatacagagctattaccaacaatgaacctaaggctcttttcgagaaaacaaacctaaggaccgacatgcgtaaccatacatattactatggcgtaaaatcagttcttgtcatttttcttgatgctaaattgccgctatccaattaggtacagggcttagtggtaaactatcaaattagacaccacatattcactgtatataggaaattggtgtatccttgcattgaattatattcttggtggttggattgtaacatcgtgatgttct

SEQ ID NO: 22713 - DNA, 913 bp, Setaria italica
  misc_feature (891)..(913): n is a, c, g, or t
  Peptide Sequence Number=SeqID_88687
ttcgtaattggggtaattcttgtagtattcgtattgtctagtaagtcctgttggatctgcaaatcaacatggaatcggagcaaagattcttgtggtgaaggagcattggagctctatctggccaagcatgataataaagaatcaatggtatttgttgttttcgttaatttcacagcaattgactgcatcgtatggttgaaagaaactgaaaagcctggccatcttaccaattggttgttaggcatttggtgttttacagctgacttcagagattttgacataagttcatgtcttactattttcaatgatagtctagaggcatgttggacattttggaggcagagcatctccataatcacttcaaatattaaggaatgcccatatctgtgtttcattggtcatgaaatacctttatgcataggggtaggaatgtgcattgatacatgcaaagaacaaagtggttactgtgcatgacaattagtgaagtgaccaggcattgggtgaaggatgattaacatgaatttgtttgtgttgatcaaaactactcaggttttagcactccacgaccaattgttgcttgattggtttgctattcttatgctgcttgttatttttgcagcatcaacagctggagaaatcgaatggggaatctgagatcgatgcagaagccccctctagagtggccagcatgtagggttcctgacaacagtaattatgtatataaataacggccttgtaattgtagccaattcaaatgtaaagccatgctcatgaattcatcatgtataaggtcggctctggggttgtagtttgttatgtcgaattggtaactggagcttgatccttgagactttacgttcaagaaaagtaatggggatagcttagcttacnnnnnnnnnnnnnnnnnnnnnnn

SEQ ID NO: 22714 - DNA, 1793 bp, Setaria italica
  Peptide Sequence Number=SeqID_88688
tagttggggtaaggatcgatttggttagggttgcgggccccggtggggaagggtttgatggcaaggacggggccggggaaaccgggggctggggcggctccaacctgggccgacggttccccacgcccaaggagatttgccgtggcctcgataagtttgtcatcggccagcagcgggccaagaaggtgttgtctgtagcagtttataatcactataaaaggatatattgcgagtcactctccagcagatctgctgggaattgtagcgaaagcgattcttgcatgagcgacactgacatggtagagcttgagaaaagcaacatccttgtcatgggtccgacgggctcgggggaaaacattgctggcaaaaacactagcaagatttgtgaacgtgccctttgttatagctgatgcaacaactctcactcaggctggatatgttggtgaggatgttgaatctattttgtataagctcctagcggctgctgattttgacgtagctgctgctcagcaagggattgtatatattgacgaagttgataaaataacaaagaaggctgaaagcatcaatcttagcagagatgtttccggtgaaggtgtgcaacaagcactgttaaaaatgcttgagggaacggttgttagtgttcctgagaaaggcgccagaaggcatccaaggggtgacaatatccagattgatacaaaaaacattctcttcatttgtggtggtgcttttgtgggcttggagaaaactatttcggaaaggagacacgattcttcaattggtttccgggcacaggttcgttcaaatatgcgaactggtggtgtcataaatgctgaaatcacatcttctctactcgaatcagttgaaagtggtgatctcattgcatatggattaattccagagtttgttggtagatttccaattcttgttagtctatcctccctcagcgaagatcaacttgttgaggttctcacagagccaaagaatgcccttggcaggcagtatacaaagttgtttgaaatgaatgatgtcaaattgcattttacggagaaggctttgcgtcttattgccaaaagagcaatagtgaagaatactggtgctcgaggtttaaggtccatattagaaagtatattgaccgaagcaatgtatgagatcccagagacacgaactggacaagacaaaatagatgctgtggttgttgaagagtctgttggatctgcaaatcaacatggaatcggagcaaagattctttgtggtgaaggagcattggagctctatctggccaagcatgataataaagaatcaatgcatcaacagctggagaaatcgaatggggaatctgagatcgatgcagaagccccctctagagtggccagcatgtagggttcctgacaacagtaattatgtatataaataacggccttgtaattgtagccaattcaaatgtaaagccatgctcatgaattcatcatgtataaggtcggctctggggttgtagtttgttatgtcgaattggtaactggagcttgatccttgagactttacgttcaagaaagtaatggggatagcttagcttcttttgaattaccggctacaattacaaggccgttaattatgtatataaataacggccttgtaattgtagccaattcaaatgtaaagccatgctcatgaattcatcatgtataaggtcggctctggggttgtagtttgttatgtcgaattggtaactggagcttgatccttgagactttacgttcaagaaaagaagctaagctatccccattactttt

SEQ ID NO: 22715 - DNA, 397 bp, Setaria italica
  Peptide Sequence Number=SeqID_88689
tggtacccgccgttgccaaaggcgatcatgtaggtggacaggtagaagagcgcgacgccgggcgccgacggctcgtcgcagcgcgagttgacgccgccgcagccatgggattcaccagcaagaaccatgacgcgagcgacagtatcaccaggcccgtgacgtagatgatctggaagatggcgcaggtgatgtatcggccccagtaggagtcgctgaggaaggcgccgatgagggagaagatgtagacggtgccggtccacttgctgatgttgttggccgcctcggcgttgtcctggtggagcacccgccgcaggaacaccaccaggttcaccccgacgccgaagaaggcgcacgtgaccaggccgtagttagctagcagcaggatggcagatctcca

SEQ ID NO: 22716 - DNA, 244 bp, Setaria italica
  Peptide Sequence Number=SeqID_88690
cacagctgacacggtagcgcagagcgaacagcgcggcaggctgcggatcggagagatcgacgacatggagcacaactactcctgcagcagagacgtgaactgcctggcggccctgctgctcgccgcgctgtgcctgggcgccgccgtggtggcgcggggccagctgacggacgacttctacgacgactgctgcccgcaggcggaggacatcgtcaaggcgcgcgtgtccgccgcgatgaaggcc

SEQ ID NO: 22717 - DNA, 273 bp, Setaria italica
  Peptide Sequence Number=SeqID_88691
cgctagcctatcgcacgtacacgacgtgacgtctatgggatctcgccgcgtcagatctcctggataacgattttttgtaagcttctcgccttctcctcctctgtttcagggagtcgcagaactcgcagtctccaaggatcgctgaggtgaacactgcacgcagcacacggagcagtaaactacatgggggcacgcacgtcgcggtcaggcacggtgactcggtgactgacgttcccgtccactgccggatcgaaccgcccccagatgtgaccg

SEQ ID NO: 22718 - DNA, 490 bp, Setaria italica
  Peptide Sequence Number=SeqID_88692
taaaacaaaccaaaggaacaccaggaagaaacgcattgattcctcctcctcctcctgcagtcctcctccccccattgcgtgattcagtgattccgccgcgtcgcgtgcgcatttgcgctgcgtccaatccgtccccgcgccggagccgcgcctccgatccggcgacccgccgcccgccgcagatcggcgggacaccgggagccccctcggcgctctggataaaggtggtggttattcctgtatcaaaaaagtgtgtctctgctgtggcactaactgctctgtgacatctgcaagcaatcttgtgttctcatggctcagtctcatgacatgatgagcaggagacctcctggtcttcggttatttggaggtgctggttctctgagaacataccaaacccttgtcctggtcctgacattctttgcatacacatgctttcatatgactaggaagatcacaagcattgtcaagagtgcacttgattcccctagta

SEQ ID NO: 22719 - DNA, 294 bp, Setaria italica
  Peptide Sequence Number=SeqID_88693
ctccctctctgtccaccaagccacgcaggaggagtagagtacaaccagagaaagagagagttagctcgcagctccttgattccacccaccactgtcccttatttacaggcgttcgtgatcagcaacagctactcgtcggctagagtgcagcaggcagagatacctagcagcagctagaaaaaaagggggctttgttcttgtgtgcaccaagcaagccagcccagggaggagaagagcgagagctttcctttgtccgatcgtttccgaggaaaaagagcaagcaggaattcacac

SEQ ID NO: 22720 - DNA, 241 bp, Setaria italica
  Peptide Sequence Number=SeqID_88694
caaacaagagtcaacaagatgcgcagctccagctacagacacagccagtaagtgtaattgcactgacatgtttttcaggcaaaattaagacaaaattgtcatatttacgtattttgtggcactctcaattcggtgcatctttttctttatgaattttcagtcaagtgagagcatagatgcagcgataggtgattgttttatcgaaaccatggctgccactgccccttggcctgaagccacc

SEQ ID NO: 22721 - DNA, 752 bp, Setaria italica
  Peptide Sequence Number=SeqID_88695
gtcgtcctcaacccatgcagcacttcggaaggccgttgcacgtctggggccaccctaccccaggggtagagtcgccccgcgtgccaatgtggccacggcacctcgtccctcgcgctccaacgccgccgtgggctcctcctccgccgtctgacccggcgttctggcaccacccttacatgagggggcctgcgcagatgccgggtcagatggctccctgcatggcagtgccaatgccagcagcgcgatttcctgctccaccggtgaggggtgttttgccttgtccacctccaatgtacagacctctcgttcctccagtactagcaaacaagagtcaacaagatgcgcagctccagctacagacacagccatcaagtgagagcatagatgcagcgataggtgatgttttatcgaaaccatggctgccactgccccttggcctgaagccaccttcagtagacagtgtcatggacgagttgcagaggcaaggtgtagcagatgtacctccagcttgtggatgatctgggagatggatgaatactccatagctgctcgtcccctcagtccaacaaaaagaattcgtcgacatgccttttttttcattttcaccaaccatctacggaccactctcttaactcgtgcagggttagaaaaaaagtctaccctcaagagaaattaacctgagtgcatccatgtacgatgtgctgtttgtcagaataatgaaatcttcgcccggatacaaaaaaaaaaaaaaa

SEQ ID NO: 22722 - DNA, 261 bp, Setaria italica
  Peptide Sequence Number=SeqID_88696
aaggtgcttagggtgcttgatttggaggatgcttctaatgtgacagataaagacctcgaggagattgtaaagcagcttcctcgcctgaagttcttgtctctgcgaggaagatgtgagattacccgtttaccgcattcactgggtgacctgaggcagcttgagactctagacgtcaggggaacctccatagtcaccttgccggcgtccatcacaaagctaaagaaactgcagtacgtccgtgctggggccacatcccttgca

SEQ ID NO: 22723 - DNA, 987 bp, Setaria italica
  misc_feature (36)..(36): n is a, c, g, or t
  Peptide Sequence Number=SeqID_88697
tcaccaggtgcaaagcacataacaagacaaatagcngaaaagcatgtcccagtcaaggctaccaaaacctgcgtgcaggtgcagcaagcaaactacattgctcaagaacaccacaagaaccctgagctttttgttagcaccatgtataccccacattcatgaattcaactttaaccatggtgacaaatgtgctcaaaatgctaagacacgtataaccagagtggaaagccttttattcaagtactagcccatttggtaggaaggatacagaacaagaacctaatatttatttctaaggattcaacatatgtaatgcgttcatacttatgcacttaatcaacagggaagcaaaagagcatacaagaatggtgatgcactgcatgatgaataggaagaaatctaccataaattctctatttgatgccaaaattaatatcaagatcaaagtcaaagcagatgttagatccacgcattaagttcaagttccaaaattgttttatggacatatctcaaaattattcacctatacatcttggtagtgaaatgaaaataagtgaagaaaagcactccaacgtcgactatgaaatgtcactgatctcttgtagttgagatggcaaggagaaaacatccatgtaagaaacatctcactcagctcagttttcttcatttcttgtcatttctttccagttgttttccttttcaatttattatttagaaaatgacatggaagcagctgctatgtgcatgacctaaatagtcttaagagatcacacattaatattaagtccaacatgaaaatgaaagatatcacattaatattaagtctgttcacctaaatagtcttaagagatcacacattccatacaaactaatctttcaggaacgaggataagttccacgctcattaggtttaagtcagcagtactagcaattggcttttgcatatattaccttccaagttgtattaatgtccattgatttcctggt

SEQ ID NO: 22724 - DNA, 397 bp, Setaria italica
  Peptide Sequence Number=SeqID_88698
caccagcatagaaaacatgacttcttgggtctagtgctacagaatcaatactagtgggaaactgaatgcttcttagcatcctaccctttgataaactccaaattttgcatgttcgatcttctgaagaagatacagcaattgctccaaggaaacaagcaatatcagttacgggcagcgcatgctgattgaaactgtagagatatggtgtctgggcttccaaccttgactgctcatcaagcaccctgtaaccaacacaaacaaacccagttagagactatacaaaaatagcttacccaatgttaccacactaaacacacatacgtgatcaaatcccaaactttgatgctaccatcttctgatcctgagacaagcagatagtcataaagtgcaaggcacc

SEQ ID NO: 22725 - DNA, 441 bp, Setaria italica
  Peptide Sequence Number=SeqID_88699
caaacttttacgtaatgggtgtagtggtggcagatttactacgttttggcgttatctattcaaaacattggttaccggaccttgggagtgtttgaattttcgggttacttgctgacttctagtatcccacacccgaacattaccatcctcagatccagacactagtagaagtccatctgtgcttgataccaggcttgttactgccttgctgaatcaattaaagaaattaccagaattaacttaatagatctcgccccacaaatgctaggaatttgacactgaagcagagaaagtaattgcaaacaaatttctttagcaaggcataacaataatggagatcaatcattaccccaaaaaaaatttcaaaccagacttccagcctatatgaagtttgtaagcagtggaccaacagtgaaacagtattctaaaaaagtagaagca

SEQ ID NO: 22726 - DNA, 1725 bp, Setaria italica
  Peptide Sequence Number=SeqID_88700
ttttttttttttttttggtcacaaagcaaacgcgcagctcctaatgatttgctaccgcatcattttacactactgcaaatctgtcttaaactcttaatttatatctaatccacccaaatggcaccttcccagatatcctccagattgggcccatctttgcacgatgttacgattcttgtattcctaattttgttctaacataatctgccacatcttaacaacccacatatctcagtgaaagttcacccatagctaccagattcattactccaacgagctcatctgtgacatcaatggacttccttgatttgcatttgagtagcaaacatcaccttttcggtagcaccaaggatctcatctcagtgacaaaaatacatccagcggcatggtatcatggattcctcgaggatggcatctggtcgaggacctcatgcacaaagagatcctgcaactccaagtatctacttctccattcaccctgttggttttgtgcgccattctgaatgttcagcccagaatcaaataacatggaagaaccaccatacttctgaagttcatccaagtaacgctccataaaaatggaggttcgatttccaggaataggaacgtcattttcaggccgaggcagaattacagaccgtggttcaacttccccatttgctgagcaaactttacgtaatgggtgtagtggtggcagatttactcgttttggcgttactatcaaaacattggttaccggaccttgggagtgtttgaattttcgggttacttgctgacttctagtatcccacacccgaacattaccatcctcagatccagacactagtagaagtccatctgtgcttgataccaggcttgttactgccttgctgtggtcatccaaagcaccaagaatagaggactcatcactaccatgagaactgatatcaacacccatagcagtaacatatattttcccatctctaccaccagcatagaaaacatgacttcttgggtctagtgctacagaatcaatactagtgggaaactgaatgcttcttagcatcctaccctttgataaactccaaatctggggaagaagaagaaatgcaatggaaaatgatgtaaataattatccacatgtgttactaggtaaacaatgtaaataagaagagtcagcaagaaatagacaacagcccttctgcatagcattcaactaaagatagtaaagtcgcttacgcactttgcatgttcgatcttctgaagaagatacagcaattgctccaaggaaacaagcaatatcagttacgggcagcgcatgctgattgaaactgtagagatatggtgtctgggcttccaaccttgactgctcatcaagcaccgtgatcaaatcccaaactttgatgctaccatcttctgatcctgagacaagcagatagtcataaagtgcaaggcacctaacagcacgatagtgtgcatgccatgtgtggagaagctctccactggccacctcccaaaggaacaagttgccattgctgccaccgccgatgaggtagctcccctcctggtccgcaagaagcgcgcgtatcggctcagcggggaagcttttgacggccacctgcggcttgtcccagtggtagaagtggacggtgccggagttgccgccagacggaggggcctgggcggcggcgaggaagcggccggcgaccgaggcgagcgcgcgaggacgggaggcgcggggccggg

SEQ ID NO: 22727 - DNA, 545 bp, Setaria italica
  Peptide Sequence Number=SeqID_88701
ggctcccctgcttcaccctcaagctccacattagtgcggagtgaagtcatgagaagtgagcaaatttgatgacgcaggacctgctggtaagataacaatgcccggaatatagaaacatatgtggatagcacaaactcaagtatgtcaagggcgaatgtcctatgcagcgaatgaacacgaagccacgtagcagatccacctgcagcaagagctgtcaggtcttcaagcagacgaagtccaagctttccaacatcactcaaattctccctcatagtaggctctccagagttgcttgctagtgatagtatgcgactgaagctatgagtgacgttatcagcaacagagctaacacgggaactgagtcttgctgaagaagctttaccggagggaagtgattcagcacgaatgacattatcaaagaccaacgccactgcttgtctaaatgtagctgctgccgtattgcggacactgtcagaagatcgactgctttcaagtaggtaaaggcatattccaagagcttgagacatgctctcctcactttcagg

SEQ ID NO: 22728 - DNA, 333 bp, Setaria italica
  Peptide Sequence Number=SeqID_88702
cctttgatgtgttcggagagccccaatctcacacccaccatagaaccagcaacagatgtctgctccaaaccaggaaaaaaccaatggtaataacaagagtcatgagttgtggaaatactacagataaagacatgaaaaatctttaagccaacttgatgttaagatgcaaaagggatacctggttaagtatgtatctcacagcaacagttgcaataggaactccgtgtttcagtgacaccttctttaaggtttggagcaaagtctggaacaggctccagccaccccaggcatcgaccatctgtcacaggcacagcctcaagaatgagcatgagg

SEQ ID NO: 22729 - DNA, 1338 bp, Setaria italica
  misc_feature (1)..(36): n is a, c, g, or t
  Peptide Sequence Number=SeqID_88703
nnnnnnnnnnnnnnnnnnnnnnnnnnnnnnnnnnnnttttttttaattcttacgataattgtactattgtataggtctagccaatactcgctagacaggaccatgaacaaattaacacatgagccatctgcatcgttgtatatttacagttttatagctggggtttcctccggctccaaggaggttacatgctggcactcaaaagaatagacattcctcaactgcgctgagccgctagactttggagcaaaatttcagagctatggaaaattgggcacaagtatatgcgccaagcagaagcatgagcaactaagctctgtactcgtcgccacaatccccaataatatccatcaaatttctgcccttcttcgatacttcggtgatgctgttcatgtcctcttcatccaattcaagtgagaatatggcgttggtatctttgatgtgttcggagagccccaatctcacacccaccatagaaccagcaacagatgtctggttaagtatgtatctcacagcaacagttgcaataggaactccgtgtttcagtgacaccttctttaaggtttggagcaaagtctggaacaggctccagccaccccaggcatcgaccatcctcttatacttctgcagggatggtgtatttaggggaggtccagcaaaaggtattgatacattagtgtcaagaaacttttcagacaaaagaccacccatcacggtgccatacgttataagtttaactccagttagctggcaaagctctgccattctttgctgcgggcgcatatcaacgatggaatgttgaacctggttgctgacaactgggattccattttctagaattatttgtagtctttctgtatcgaagtttgtcagagctacagtctttatcttgccttcctccttcaggtctgtgatgtgctttagtgcatccaaatatccaggatttgtgtaatcccaccagtggaactgcaacatgtccaatgcagcaacatccatcctcttccgagatctgttgatattttcctcaacgtaacttcttgtcatcttaacgggaggcggtacccactttgtaagccccttgatttcttcaagcaattcaggtgggcgctcccgcctgactctattgatgaacatgccatacaaatcttctgctggcccatagtggtcggccatgtcgaaggtggagagtccggcgtcggcgtacgcgagcatggcgtcgacagcggcgtcgcggtcgatgcggccccaccctccgctggtctgccacatgccgttgagcacccggcatatcgccagggagtcatcgcggttgctgacggtcggttaccctcgccggcc

SEQ ID NO: 22730 - DNA, 334 bp, Setaria italica
  Peptide Sequence Number=SeqID_88704
catccagcgtgtccaggctcatgttggcgaagcacaccctgaaccatccgggctccgagcaatggcacgacgaccccggcgagatgttgagcttcacctcgcgcagcatccggtcccacagcctcagctcgccggcgacggtcgcctcgccgagcagccgccgcatgtccatccacacgaacagcccggcattgccgcgcaggcacggcacgccggcgcgggccagcccggcgacgatgtagtcgtgccgcgcccggaggcgctcgcggttggtgcggatgtaggcggcggcgaaggcgtcgtcggcaagcatggcggcgagcgccttctgcgt

SEQ ID NO: 22731 - DNA, 997 bp, Setaria italica
  Peptide Sequence Number=SeqID_88705
ttttttttttttaggtaaataataactaggacaaccgacaaagtaacaaattaacaaaagttaatctgatgttcaaatgatctacgtattcaaattatacatctctgacactaaagtactgaaaaagtggccccgtaataaaaagactggaaaagaggctaaacaaaagcggccacagcattcagcgctttcaagtaaagaaacgagcattttctgggcttctagcatgtcttaatatggaaatgcaaaaaccaaagtaatccttactcctaatcgtcaagcattcagaatggcattaactattgtacagaggactgcagctctgcaggatagtgctcaagagtcaaggccatggacctcaagccgcttcaagaaccaatctacatgtcaacgccatcatgctcaggaaggcgaaacatgatttctagtctccagacaagcaccgatggcagtggcactcaaagccgaatccgtcagcaagaatcctctgccgagcattgacatccatgctagtatcgatgtagcagatgcgcagctcctccccttcttcaatgtcgcggagggctttcaatttagcatctgcgttttccagccagactatgtgactattcggatcgcagtcatggttatagaatgagggaagcatataaaccgcattgccaacagatgcatcacatgacacagaggctgctgcagaggatagaagatcctcatatgagcttggaaccaattcaatgcgaaatgcatttatgcgtatccttgccaatacattgatgtaccactctttggtcaaaaaggtggtgagttcttcctgaaatccagctttcataaaagtggactccaacaactcaaactcctcctccatttcgatgagtgtcccctggtgcaaacgggctggctgaagtatgttaaggcagtccgcattagcagctcctgagattaccatgcaagcaagccgcttggccatgtatgggtatttcagaccacgtgaactgca

SEQ ID NO: 22732 - DNA, 291 bp, Setaria italica
  Peptide Sequence Number=SeqID_88706
ggggtgggggggttagtgaatctgtgaaaaggaaggaacatataagttagttacaaagtaatgcatgtagtcttgaacacatcaaaagatgaaataaggcattgtatgagctatttatctatgaaccaaagtaattcaagtgtccgccacgtcactagaggcacacgtttcttctttagggacaatcagatgcacaagcaatctggacaaataaggctgcagggctgcttccgccctactcgatgccccatggattctttggagccggcaactcttcacaccgtttagcat

SEQ ID NO: 22733 - DNA, 1469 bp, Setaria italica
  Peptide Sequence Number=SeqID_88707
cctccaccaagaacgagtaccccgacttctgccacaccattctctgttgcatctcttcagcaatatacaaatagtttcagcgaggagaatgtgataagagagagcagattagggaaggtatacctagcagagcttcctgatggcaagttattggaggttatgaagattgacaacgctaatggaagaatatcagtagatgatttcctagaacaggttgaatgtatctcagagattaagcatcctaacattctggagttagttggatattgtgctgaatatgggcagaggttactcgtgtacaatcactttagcagaacaacactagatgatgcacttcatgatgcagaggaaactggaagtgctctgtcatggaatgctcgccttcaggttgctcttggttcaggaaaagccttagagtatctgcatgaaagcttccaacctccaattgtgcaccaaaattttgaaccagctaatgtgctccttgataaaaaattctcagtgtgtgttgcggaatgtggactggcagaaatgatgccatcaggttcagtcactcagctgtcaggtcggatgcgcgcattgatgaactatgaagcacccgagttccaggattctggggtcatttcagaacggggtgatgtctatagctttggtgtagtgatgctagaacttcttactgggcgtaaaccgtatgatagttcacgcccacgtcatgagcaacatcttgttagatgggccagttctcagcttcatgacattgagtccctgtccaagatggtggacccatctatacgtggacaatgttctgagaaagcattgtcacgatttgctgacataatcagccgctgtgtccagcggcagccagagttcaggccgccaatgtctgaaattgtccaagacctagctagacttgtaaatgctactggtgaggaatcagagtaacagaaaaattgtggagcacatacaaatacaaacctcacgaccaaatagcatgatgtacaaattttgagaaggtaattgttttgccacaattccgaggagaaattgtgaagatatgttttcctcggagagcattctacactccatattctgaggagaatcttgtgaagatatattttcctcggagagcattctacactacatattctgaggagaatcttgtgaaggtagattttcctctgagagcattctacactaactcatgtcaaattggagcttcatttacacatgacaggagggtggaggtgcaaacattcgtgcacctggttgctgatgataaaatccatgtaatttttgcagacgtgatattatagtggaccctgaattcttgtaactaatgctcaggaattcgttaaattggtcacagttgttccattcatcgtgtgtttattataatgttgcatcttctctgagcagtcgaagaaaaactgcccagccttttacagcttgtagagctgacatgtttactgccg

SEQ ID NO: 22734 - DNA, 210 bp, Setaria italica
  Peptide Sequence Number=SeqID_88708
acccccgcggcgccaccgagggctgctgctccggtgccgacgtcggccgcctgtggcaggtcggccgagtggccgttgccgtcaggttccatgccgaagggcaggttgctgctgtgcgcgccgaggggctcggcgaatggcgggagcgcggtggcgaggcccggcgagcccggcgcgccgcagtgctgcgcgtggcgcggctcgtcgctg

SEQ ID NO: 22735 - DNA, 630 bp, Setaria italica
  Peptide Sequence Number=SeqID_88709
ttaccatccgtgagaccatcactgcaatatccgtggatttcacgggggctaaagcctttgagatatccggcacaccggttgactgcgtctcgttggcattatctgggaggctgtttccttggtcagcgcctgctttggtgatcagtggtattaacgcgggacctaattgtggatatgagatgttccactcttctgccattgccgctgcaagggaggccttagtgtatggcgtgccttcaattgtgatctcattgaattggaagaaggatgaaagcaaagacagtgacttcaaggatgcagctcaggcctgtttgccattgataaatgctgccttggctgacattgagaaaggagctttcctcaaagggtgcctactgaatatcggggttccaagcgcaccatcggcaaacaagggtttcaagttgaccaaacagagtgaatatagtcctgctcaaagttggcaagctgtttcaacaagcagaccttcatctgctgttcacttcatgggcatgcatcaaagcctcggtattcagctggcgcagcttgggaaggatgcatctgcagcaggagctgcacgtagagttagtgctcagcgaaagcagtcgaagttgagtctgttgcagctgctgg

SEQ ID NO: 22736 - DNA, 665 bp, Setaria italica
  Peptide Sequence Number=SeqID_88710
aaattcagaaccaaacatgtcaaacaaaatcactttctgcagtaggatccataaggagcgacggtgctctctcattagagatgtctgggagcttgcgccgatccatatttttgacagcttgaacaattacatcagcagggttttgtacttcattagcctttcctggaccagcaagatccgagctactcatctgcttcccttgagaaatggctgttttcaagctactagaaagatgagaggcagacgacacagctgcagaagcttgaaaggcctctcccttgggactctccattttcataacatattgggaagattggggcatttcatatgaaatggttgctttatgccctgtcaccccagaagtagaactgcatctttgttctaaaatttgatttgctgtgctggcatacaggttacccttgactaccctagtaccttctgggagaaaatcaaaacccccatgaccattaacaaaatctgacacctggcttctgccatgcaacagagtcatgtttgtgttttcatgaactaaagggttccggtatgcaagagatttcaagagaatatttctgggatctgacagctctcccatgtttccttgctctaactgtctagtgttagtcatcaacaaaggatgcctttccattgatgttgagatggatgag

SEQ ID NO: 22737 - DNA, 232 bp, Setaria italica
  Peptide Sequence Number=SeqID_88711
acgccctcggcgatcatggcgttgtagatccgcctggccatggcctcgcggccgcggcagagtatggccttgaggacggcgttgtaggagagcgcggtgcgggtgatgccgaggtcgggcatcatccggaacagcttgacggcctcctgcgggatggcggccttcccgtatgccgcgatgagcgcggcgagcgtggcctcgtcgggcgcgacgttgaaggacggcatggtgt

SEQ ID NO: 22738 - DNA, 446 bp, Setaria italica
  Peptide Sequence Number=SeqID_88712
gtcttgtttctatgcacctgttctattgcgaacccaaacccctgactggaacagcgtgtttcagaggatccactggccacctgcttgatggtccatggaaatatagaataaaagtggcttaatttggtgaaatattgattcagacatgaagccccacaatcttttggtcactgtacacacgcaacagacaactagcttttccgtaatcagaagcgacgatgtacaagtctcagcaatgcaaggatagtgatggatggattctggggtttgaattgtgaagttgacgtaaggtaagagagatcatgaagaaaggaccacgtcaacatttaaaaacgagatgcctgtttattgaagtgatcagggaaacaaaggctgttggatggtagctcactagtctaaattgttcttgcctttctttgagcacgaaagcgacttgcattgaaaac

SEQ ID NO: 22739 - DNA, 308 bp, Setaria italica
  Peptide Sequence Number=SeqID_88713
atacctgggcgccaagctgcgctttcacgtagagctccgggaagatggggccgccgcactgcttcgccttggcgtccggcggggacggcaagcgcaggtcctgcgcctggatgacactgaggcggaggtaccagagcttcggggagaggtaggccttggagcgcgtgtgcaccaggtagccgccggagtctgagtgccacgcctcctggaacgcctcgtcgacctgcgtgccgacccacacggcgagcatgacgtcgcaggccgccgcgccgtcctcgcaacagtggccctcggagggtgtaccactg

SEQ ID NO: 22740 - DNA, 341 bp, Setaria italica
  Peptide Sequence Number=SeqID_88714
tgctgacgcccatcacggccaggaccgtcacgtagaggaagaggaacgtggccacgaactcggcgatgccggcacggtagaatgaccaggacgagagctcggcggcgtcgaacagcggcgccggcggcggctcggtgtagtcgcggcccaggtcgtccgctgccgtcgcaccgatggggtgccgctctgggaagcggtccacgcccacgcgcacgtcctcgtcgtcctgaaacctgtcctgcagcttacctcctgccatggccgtggcttgctgagctgctacgagctcgatcagttgatggagacgtgccaaatggcaagtgcgagctgctagcttgcaa

SEQ ID NO: 22741 - DNA, 2092 bp, Setaria italica
  Peptide Sequence Number=SeqID_88715
ctacaaagcaatgaatttgcactttggcactgtgttgactgcatgctaccagatgttgaaatttcagtatcatctaggatctgtttcaaacttagattatatgcaacaaaagtgaaagaaggtaattgtttacaccatgctttgctctctggatattaaatttcatccaaacctggtctgtttgatacaagagataaacttgtaacccacaaaacctaaaccagtgtccagctaagactacaaaacgctagttctcattgaactcaggcgtcttcatcaacagcttctttctcagcaacaagcataagcgtctccagtcgtttatcaaacagagctgcactctcatccctctcgtcaagctcagcaccctctgcttctaaccacttctcgcgcaaatcatcaagaatgttgccttgatcagtgttgcctgcagtcccaggtgcactgggacgagttgtccgcaatgagtcgtctccagatggcggtgggagagtcaaaagcaaggcccggaactctagagtgcctgcaaacatctcgaagttgcaggcaatgatatccaagatgtactcccttattttcatgacaccatatatgtctgacagcatcaaccagcggcacaattctgcaggcgaaacatgttcgagatatggcaacagcatatcagctacaacccgcttaaggggaaacaacaagtacctcgatgcaacatcaaatagttcttcagcctgatcaggatccaaatgctcaagcttatcagtatacatgtattccagcatcttttcgaatgcttctgcactcaagtcatgctcctcaagaagtggaaggttttgagctgcttgaaatccactgctaccttcaaggaaatcaacagttcgagatagcctggctctaaagtactctgacctcgaggccaaaatcaccatatgacaatggaaaaccttatcacctacttttatataaagatcggcaagatcctcctccaagtttttgcgcatctcatttgaatcctcactataatagccttcttctcttgagttagctagacaagtatgcagaatacgctgcaacgttgatggaaggcgatcttcctcaggcaaggactgtgcttgtaaaatgaatcgtttctgtgaattgtccaaatccaattctcttgccgacttgtattctgcatacttctgatgcacaacttcactatccaaaatcttttgtaattcctcacacttgcaaactttgcatgcccgcgccaaattttccatgtcgtccacagctacctccagtctatcagaatagaagaaatggatgaggctgtataaggcaccataatacaacttttggttagaaaatctcacttccttcctgtctttccagtctgtcttgaacttcttttcaaagaaaggagatcgggcacaaaggatgacacggtgagcttcaactggttttccatccaggtagaatgtaatatcgggagggaaaaggcaagcacttgatggatcatcctttggaccaaatccagcggctgcggcgagggcggtggcttcggcgccggcgctcccctggagcatctcgaggaaggcggcgcggttggcggggcaggcgagaaacgttgcccggagcgcggcggggagcggcgcgagcggtggcggccgggcttcgaacgacttgagcagccagcggaggcgaaggttgagcgcggcgtagtggcaccggtcgccatcgaaggtgcgctcggcgcagacggcgccggcctcgagcagcatccgcgcggcctcggcgtggcccgcgaggcaggcgtagtagagtgcgacggaatcccagcggtcgcgcgcgttgacatttgcgccggcctcgaggagaagggcgaggcggtcgcagtcccccgcccgcgccgcctcgaagaggtcgccgccgggaaccttcttgaggggcaccgacggctggaggtcctctgggtcgagttctacatcgatgtcgaggccgcggagctcgacatccgtcttcgagtccatggctgtcgggattggcggcgcggcggccggcggcgaggagaagtgggaggtagggaagagccaacggaaccggtgtgcaaaatatc

SEQ ID NO: 22742 - DNA, 203 bp, Setaria italica
  Peptide Sequence Number=SeqID_88716
agtgctcccgtctttcaccaaacagtgtaggtgcaccttgacacaaacccggcctctttcttttcagctgagaagtggatgactttgtatacgggaggaaggcttcgtagtcgtagctgtgctggaacgttcattctttggcgcagaagcagcaggacctgaagatgagtaagccacacttccccctgatggtgccctcgcgc

SEQ ID NO: 22743 - DNA, 813 bp, Setaria italica
  Peptide Sequence Number=SeqID_88717
aaagaataataaagggtccaaatacatgaagtaaattttttggtaggagttgaattcaggactcggttaattttggaagcgtaacataaggttggaaaatgccacagccaaactgtatgcatgtccttttgttttttggaggacatcttgttagtgtagttgcatgctggtaattattttcttttgagtaaaagcatgagcttgatcatgcatgtagtacctcttgttgcatgaaaagccacaagtttgagctgtttgtgtgtgtgtgtaacatgtacccctcctgtataaccaatgctgtatgcatacatgtttactgtttgtgatcttggactcttgttcttcttaagttcaagtggggctaatgaattgctgttttttacatgtgtggtgtgatctgtataaattataatgcaaagaaaatggctttctataactacaacttggtttcgtatcgttgtaacaccacttatatgaattgttttaattcatgctgtccaattactttttagttaaagaaccatgtgcatgcttgatttgcgatctaaattgcttgaattttacagggtaaacaaggcagggagggcagctggtgtccttgaaaatcatgaggaggggaggcgttacgcaatgcacggcctcaggagctttgtgcatgacaagacccctgaaatcatgccagcgattaacaagttcttcactgagccaaagtgaagcattttgcttggctgttgactgctctgcttaaatggctattgtcgattgtacccatgtcatccataaattgaagcacagccgatacctcttattggg

SEQ ID NO: 22744 - DNA, 274 bp, Setaria italica
  Peptide Sequence Number=SeqID_88718
cagccgcacacacgccgccgccgcaagggcagcgagccgaaaaggaatcgagcgccgctcggccccccggcactgacccgtccgtctcttgctcctccctgtctcgaccctcaccgcctcccatggcgtcgccgctggaggatcttcccgtggagggggaggagcaacgcccgcccctcacccgggctctgctccaccgcagcgccaccaacaacacctcccaggtggccatggtcgggtccaacccctgccctatcgagagcctcgactacga

SEQ ID NO: 22745 - DNA, 464 bp, Setaria italica
  Peptide Sequence Number=SeqID_88719
tttttttggaacaatttgtgaagtatggttcccattacatagacaccaactgacaaagaaacattttgagataggaccccgactccttgaacaacacgattttcaaatgaagtacataatttattcactaatcttcttgctggaaatgaagtatgacgaaaaagcaaggataaccttcgtggtaactattgagattttgatctcttgtgcagagttcaacagcgatcttactaataactcaggaaagtgttcatcctggtcctagcatcaaaaataccaaggtggtgatgctccattttgacctgccagaggcgcattactaggggagatggcactgtaataagctggtgagggtgctatagttgaatacgccgggggaaatttcctgtggccacgtggtggtggtgccttgccatgagaaggcgatggaggtggcgaatgcctgtgcgatggaacatgcggtg

SEQ ID NO: 22746 - DNA, 506 bp, Setaria italica
  misc_feature (463)..(506): n is a, c, g, or t
  Peptide Sequence Number=SeqID_88720
tcgtcaacgtgtacgccatccacagggacccggggatgtgggcggacccggcggcgttcaggccggagaggttcgaggcgggcggcggcgccgccgacgggctgttcatgatgccgttcgggatggggcggcgcaagtgccccggggaggccctcgcgctgcggacgctggggctggtgctcgggacgctgatccagtgcttcgactggggcgcggtcggcggcgccgccggggttgacatggccgaaggggtcgggatcacgctcccgagggacgtccctctggaggcaatgtgcaagccgcgccagggcatgcttcgtgtcctccaggagctgtgaactgtcgtctgcgagtggcagcaagcttgattcgaagacgaatctattgataccgtattaccgtgtgctttatacttgtactaccagtattttacatctaatgcaagtattctaccagaaaaaannnnnnnnnnnnnnnnnnnnnnnnnnnnnnnnnnnnnnnnnnnn

SEQ ID NO: 22747 - DNA, 741 bp, Setaria italica
  Peptide Sequence Number=SeqID_88721
ggggagccgagacaacgtcgacgacggcggaatgggccatgtcgctgctcctaaaccaccccgaggcgctgaagaaagcgcaggccgagatcgacgcctgcgtcgggccctcccgcctgctcaacgccgacgacgtgccgcgcctgggctacctccagtgcatcatcagcgagacgctccggctgtacccggtcgtgccgacgctgatcccgcacgagtccaccgcggactgcgccgtcggcggccatcacgttcccgccggcaccatgctgctcgtgaacgtgtacgccatccacagggaccccggggtgtgggaggacccggcggagttcaggccggagcggttcgaggacggcaaggccgagggccggctgctgatgccgttcgggatggggcggcgcaagtgccccggggagacgctcgcgctgcggacggtcgggctggtgctcggcacgctgatccagtgcttcgactgggacagggttgacggcgtcgaggttgacatgactgagagcggcgggctcaccatccccatggccgtcccgctggaggccatgtgcaggcctcgtgcagttatgcgtgatgttcttgaggagctctgatgtctcccctctagtactgcatcgacctcgatctccggcaagctgcaagttccatcaccaagtgttctaggctttaaccaccgggcgcatcgctgtggtttcttctagtttcatctaccagttatcaagtatcttggat

SEQ ID NO: 22748 - DNA, 442 bp, Setaria italica
  Peptide Sequence Number=SeqID_88722
ccgcgctggtggcgcagaagaaggatttctcgtggctcggccttccggcgccgtccgagggcaccgtcaagaggcattcggggggaggagggcatagacatccgcaccaagacgaggaggctcgcgagggagaaggccgcggagcaatggaacgaggagagggataaggctgcaagagaagctgctgagaaggggtacaccattccgagtggccaatctgtttctcagtccactgatgagatgatggaggttgatgggccaacagaaattgggaagtctagtccacccctttgcgctgatgaaatgcacaagaaggatcatcacttggcgacaggcattgactctggttcgaagcatgcagatttggagaaatcttttggtgtcaaatcacgcattccagggatcaacctctggtctaggatgatatcaggccccagtaggc

SEQ ID NO: 22749 - DNA, 232 bp, Setaria italica
  Peptide Sequence Number=SeqID_88723
cgggaggtacagggacgggcgcgaggcgaaagggagcgcgcgcgacacgatgcgcgccatggccgggctcgggctcgcgctttgcgcccgcaacgcaatcgtgtgtggcggcgggagcgagggagagggaggaatggagaggctgggggcggggttttgttgggtttcttttggtttccgggctttgattcgtgcggaacctgttttcctacggtgcagggggttttcgttt

SEQ ID NO: 22750 - DNA, 224 bp, Setaria italica
  Peptide Sequence Number=SeqID_88724
taactgagatgagtagagttaattgacatcacgacaaatttttttcaccccataagacattcaatttaagaaattttggttaggtggttgtagtggcattacaaataagaaaagaaagcagtgtaaaccaatataccgcacttgtgctatacaaaagcaccagggatgcagagttgttatttatttattattttttggtgtgggagttttgacaaaaaaaaaaa

SEQ ID NO: 22751 - DNA, 682 bp, Setaria italica
  Peptide Sequence Number=SeqID_88725
aagaacggttaagacggacggacggcgctcgatgcggggcaggaagggggcggatgcgaagagaagaggaggcgggcgaggtgatgttccgaggcaacaccgtgatgagcgggtactacaaggacctcaaggccacgcaagaatcgatggccggcgggtggctgcactccggggacctcgccgtgcggcatccggacgggtacatccagctcagggaccgggccaaggacatcatcatatcgggcggcgagaacatcagctccatcgaggtggagtcggtgatcttcagccacccggcggtgctcgaggcggcggtcgtggcgaggccagacgaccactggggcgagacgccgtgcgcgtttgtcaagctgaaggacggcgccagtgccacggaagccgagatcattagcttctgccgggagaggctgccccattacatggcgccgaagacggtggtgtttgaggatttgcccaagacgtcgacggggaaaactcaaaaatttgttctccgggacaaggcccgggctatgggcagcctgacaaaggctgccaatagcaaactttaagactatttgggtgattaagtgacacattgttctcgtatgattgtaccgtgcatttcatttggagactgcaatgtcgccctcctatatattcatgcttgaaaaggactttattctac

SEQ ID NO: 22752 - DNA, 732 bp, Setaria italica
  Peptide Sequence Number=SeqID_88726
tgatcaagtagttttgctcggcgacttgaattataggatctccctggaagaggccgagacgaggtcgctggtgaaagccaagaactgggccatcttgttagaaaatgatcagctactatttgagttctcaagggggcggcatttcgaggggtggcaagaagggttgatcacgttctctcccacctacaagtaccaccccaactctgatcagtattactggtgcttcgatgctgcccggggagagaagaagcgtgcaccagcatggtgcgatcgcattctgtggcgaggcaagggactgaagcaagtccaatacgagacctgcaactacaagttatccgatcaccggccggtgagagcggttttccacgccgagtgcgatgtatcagagggtgcagaagtaaacggccagaatcctcactgaacgcagcaagcgactgatgtagagaagccgtggcattcaaccaacgagtgctcgcatggacgcgagtgtcaaatcaagaattggacgggagatttgaccaagcgagtaaccaagaaatttcttctgagacgaatatgaaatcgtttttcctcgagaggatgagaattttctgaactctgattgggctgtgtgcaactcgattaaagtattatgaatggtatttgggccagtgtaacaggttcagagaagatgccctcaaaaagcaaaagaaaagaaagaacgaaaaacaggttcagagaagaggtgcagat

SEQ ID NO: 22753 - DNA, 496 bp, Setaria italica
  misc_feature (470)..(470): n is a, c, g, or t
  Peptide Sequence Number=SeqID_88727
tttacgtttttttacctttacgttaagttaaggttaattgtagtaatttttcttgtaacttctgattgggctgtgtgcaactcgattaaagtattatgaatggtatttgggccagtgtaacaggttcagagaagatgccctcaaaaagcaaaagaaaagaaagaacgaaaaacaggttcagagaagaggtgcagatttttgtttattctattagcggtgctattcaaatattcttttttttctctcgtttaaaatttgtttattcagggctttgggcttttattttccatcgttagccttttatactagaagaatatcgatgtatgtatatcattcctctctacaattggcatctgtacattacttaaaggcttagatgttcgattaaaaaaagggtccaatgtcaagctctagctgttcaaaccactaaacacgtgtcaagctccggctggttagatctactactttcngtcaatttggaacatgcatgatggat

SEQ ID NO: 22754 - DNA, 2071 bp, Setaria italica
  misc_feature (2034)..(2071): n is a, c, g, or t
  Peptide Sequence Number=SeqID_88728
aactcacgaaggtcctcaaagcctcaaacccagacgaccaggaacctcccatacgcgaccaaaaacaacgacgctcagctcagctccggctgctgctccaatggcttcccgtcctcctcccgagccttcttccgactcaaacaaggggtggggcgacaacgaggagatccacgtctcctccggcggcgtccaggcttacaccgacgacgacgcggactgcgagagcaggcgccccttgctgctcgggactcccgccgccgccgagtgctactccgtccccgccgccgtcctcccgttcctctttccagctttgggaggccttctctatggctatgacattggggcaacatccggcgctaccatatcgctcaagtcttctaaattcagtggcacaacctggtacaatttgtcatctgtgcaaactggccttgtggtcagtggctcactatatggtgctttgatcggctccatcttggcatatactattgcagactttttagggcgacgcaaagagcttatcctttcttctatctcatatttgatcggagcccttctgacagcagcagcacccaactttgctatcatggtggttggccgccttttatatggcataggaattggattggctatgcatgctgctccaatgtatattgcagagactgcgccaagtcggataagaggcatgcttatttctctaaaggagttctttattgttcttgggatgcttcttggttatatagcaggcaatctctatgttgaagtggtttccggctggcgttatatgtatgccaccagcacaccattatgtctcataatgggagtcggaatgtgctggttgccctcgtcgcctaggtggctccttttatgcgccatacaagggaagagaaatctgcaggagacaaaagaaattgcgaccctttgcttgtgtcgattgaggggtcaagcttcgcctgatttggtctcagagcaggttaacttgattctggaggaactgtcatacattgatgaagagaagcaagctggcttcagtgagatctttcaaggaaaatgtcttaaagcaatgataattggatgtggtttggtgttctttcagcaggtcactggtcaacctagcgtgctatattatgcagctacgatctttcagagtgctggattttctggtgcatctgatgccactcgtgtgtcaattcttcttggcttactgaagttgatcatgaccggagtggcagtccttgtggtcgacagacttggcagaagaccattactcattggaggtgtcagtggaattaccgtttccttgtttttgctgtcctcctactacacattactgaaggatgcctcctatgtggctgtaatagcccttctactgtatgttggttgttaccagctgtcatttggtcctataggctggcttatgatctcggaggttttcccattgaagctgcgaggacgtggactgagcgtcgctgttcttgtgaatttcgcgtccaatgcgctggtcacctttgctttctctccactggaggatttgattgggacggggttgctcttctgtggattcggggtgatcgcagtggcgtctctcgtgttcatattctggatcatcccggagacgaagggactcaccctagaggagattgaagcgagtctgtaatagattaatccagaagaatgttcgttcgtccaagttccaattaactgaaggaactgctggctgctggtgtcgttttgcagccagtcttctgctgtagctagcttattcggattttctgcaagctgtggtggtaatacttattgattcctggtaaagattaattcatgaggtgtactcaccagaggagcattgccttgctgctgtaggctgtagatctagcactgttggtcaccctaaataagcagtaagcagctgtgtgctatgggataaaatggccagtgtatgggccttgtgctacatgttgtgggtgtgatgaaagtgatgtttacaccgagacgggcttcatgccatttaaatccacaagctttcagtatggcccnnnnnnnnnnnnnnnnnnnnnnnnnnnnnnnnnnnnnn

SEQ ID NO: 22755 - DNA, 682 bp, Setaria italica
  misc_feature (627)..(627): n is a, c, g, or t
  Peptide Sequence Number=SeqID_88729
acggaaagaacaaaggacagtcatggagtgcttgcaccggttttgtagggactgcatagataaatccatgcgacttggaaataatgaatgtccagcgtgccgcactcattgtgcaagcaggcgttccttgagggatgatcctaactatgactctttaattctggctttgtatccagatattgataagtatgaggaagaggaacttgctttcagcgaacaggaaagaacccgtaacaaaaagattcaacaatccattgctgagacatttcggagacaaacagaagcacttgtgaagaagcgctccgctgcaaaagcaccagatgcagcttctacaagaaagactcgacggaatatgcggtcaaggaggagagggcgaactagttctcctgacattgtcccaactgattttgaagatgaggatagagaagaaaatggtaatgatggaagcaaggagtcatcttctgttgatgaccgctccccagaagtaaggccgaaaagagctcggaggtggcccgtgccacggcgttcccctgctaagactattggaagcatggacaatggcattgaggataatgacgactcaggaggtgctagagacttggtgactgctgctccgctgcgcggagngatgctcgcatggggaaaaatggcaccgcagccaaaccggcatggcaatgccagt

SEQ ID NO: 22756 - DNA, 1407 bp, Setaria italica
  Peptide Sequence Number=SeqID_88730
caagcttgctgggacaactgggtatcttgcacctgagctcgcatacatgacagggtgaccgagaaatgcgacgtctacagctttggtgtggttgttcttgagctactcatgggatcccaccctggtgattttctctccgctctcttgtgcacaaccaagaaaagagcatttctgatcgatctgttggacacccgtctcccgctccctgaaggtgaggtagcaagagaactctttgtgctcttcatggtgggactccagtgcttagatcccaacccaggaacccggctgacaatgcagtgtgcaattcagaagctctctgcagtgccgacagccggggattttgattaccttcatactgacatcatggatactggaacccaagtgcactgactgcacttacgaaggagaaagggtattatgtggctgggtttgagattcagtgatggggatttgttctttcatagttagcttggttgtttacatagcattggtgtatgtatgtgttgtgcagtgatataatgtgcagaggagataaccgatgaaaatagcattgtgtttaagttgatccataggatttgtcttgtatgcttcatgtttatgaggttcactggtcgttttgaacacaattgtgcttaacgtgtaatatcgctgcgtcggcctactattaaacagcatccctccaagtttggcggactgcatagagctgaagtggatgtcacttgccagcaaccggcttcccggtccagtacctccctggtttggtcgatttctgaagcttcaaatcttgaggctaaatattgctaaggggcctgcatctcagactttggcatagctaaaatactgagctcttgattcatcaagctgtacaaggcttcctgggataacaggatatcttgcgccagagcttgcatgcacgacgaggagaaatgcgacgcctacagctttggcgtggttgtgctcgagctgttcatgggatcccatcccagtgattttctctccactcttttgtgcacgacccagagaagcatgccgctgaaggatcttctggagacccggctggcgctccctgaagctgagaccgcaagagaaatatttggatttgtgaaagtctccctcatgtgcttggatcccaacccggcgacccggccaacgatgcattctgcaattcagaagctttccgcagtactgagagcaggggatgctgattacctgcatactgacatctttaacaatgggtgtacttggaactggttcgttactgagcttatttcgttcccagcagaccaggaccccagttttgatggtttccttgggtatttgctcagcacgtaaagtttaagcgttacgcgaagtcaaattcgctggattcacggaatattatgctgacatgtgtaatttctgttgctg

SEQ ID NO: 22757 - DNA, 1307 bp, Setaria italica
  Peptide Sequence Number=SeqID_88731
gttgaagccaataatgttcagtggagctattgggcaaattgaccatgcacacatatcaaagggtgatccagaaattggcatgctagttgtgaagattggtggtccagcatacagaattggtatgggtggtggtgctgcctcgagcatggtcagtggccagaatgatgcagagttggatttcaatgcagtacaacgtggagatgctgaaatggcacagaaattgtatcgtgtggtcagggcatgtgcagaaatgggagagaacaaccccatcatcagcattcatgatcagggcgcaggaggaaattgtaatgttgtgaaggaaataatatatcctaagggtgctgaaattgatatccgctcgatcgttgttggtgatcatacattgtctgtcttggagatatggggcgctgagtaccaggaacaggatgcactacttgtgaaacctgagagcagaagcttactggaatcgctttgtcagagggaaagagtttcaatggctgtcattgggaaaattgacggctgtggaaaaattgtgttgattgatagtgctgctatggagcatgccaagttaaatggtctccctcctccaacccctgttgaagaacttgagcttgaaaaagttctaggagatatgcctcagaagaccttcgagttcaagcgtgtttctcaagtcacagagcctttagacattgcaccagaggtaacactactggatgctctgaagcgagtattaaggctcccctctgtgtgttcaaagcgtttcttgaccacaaaggttgataggtgtgtgacaggtcttgttgcacaacagcagacagttgggccactccaacttccacttgctgatgtggctgtgattgcacaaacgtacacagaccttacaggtggtgcttgcagcattggagaacaaccaataaagggtttgcttaatcctaaggccatggccagacttgctgttggggaagccttgactaatcttgtttgggcgaaggttacatcgcttgctgatgtcaaagcaagtggaaattggatgtatgctgcaaagcttgatggcgaaggtgcagatatgtatgatgcagctgttgcacttgctgactgcatggttgaacttggtattgcaatcgatgggggaaaagacagtctttccatggcagctcaatgtgatggtgaggtcgtcaaggctcctggaaatctggttattagtacttatgtcacatgtcctgatataacattgacagtaactcctgatttgaagctcgggaaggatggaattcttcttcatattgaccttgctaatggaatcgccg

SEQ ID NO: 22758 - DNA, 185 bp, Setaria italica
  Peptide Sequence Number=SeqID_88732
gtctagtgagctctacaggcctccctgtagcctccccaagatgaacaccgcctgctccaagcctggttgagagctctgcagcaatggtgtctttgcccctggtcttggattcaaagatgaaccttgagctgaggcctgtccttttcccagccgtgtcaagggttgcttttgcttgttcaaattca

SEQ ID NO: 22759 - DNA, 229 bp, Setaria italica
  Peptide Sequence Number=SeqID_88733
atcgagagcttccgcaggggctgaagctggagaagctcaactcgtaccgggagaagtggcagaggcacatccaagaggacgccaccgtcgagattgaagaggagggagagttcatggtgatcgggtcgctcttcggcagcgacgatgaggatgacgacggcatctcgttgccggagacgccggcgaccgctgctgtcgccgtcggcttctaacgacactgacattgaag

SEQ ID NO: 22760 - DNA, 418 bp, Setaria italica
  Peptide Sequence Number=SeqID_88734
gactaggggaagatggggcattaccagcgccagggccagggccgtcagggccatcaaaacgaacagttcttgatgatgacagcagttcagatgacagttcagatgatgacatagctcggacggtgccatatcgaactcctgcgtttactcagggaatcggaaggctgttcagatgcttgtgcaacccagcttatgatgttgacgatgattttgaaccccgcaaatgagtgctaaagaagcagacaccaatagatgtttcaacggttcatgacttttgtcaagtatatgattcagaacaatgtgaatcggattatacgttgccatcctttatcttaaggatacacatgtagatgctacttcagcactgttgagcacaatgacagttcagatttcagggatccccttttctctcccatga

SEQ ID NO: 22761 - DNA, 258 bp, Setaria italica
  Peptide Sequence Number=SeqID_88735
gaggcggctggacgagccgctcctcggcagccccccggccgctcggccgccgagtcagcggtgaaccagccggcggcgatctggtcggcggccccctccatctgcggcatcggggttagggtttgggaacactggcacggcccggagcggcacgatagcgaccgcttgctgctgctagctctcgttgtaggcgcgcggatggaagctccctagcagcagcggcggcgggtgggatacaggggagagcttgggtagggg

SEQ ID NO: 22762 - DNA, 686 bp, Setaria italica
  Peptide Sequence Number=SeqID_88736
tcgtcgacgccgcgcacgccatcggccaggtccccatcgacgtgcgcgacatcggcgccgatttctacgccagcaacctccacaagtggttcttctgcccttccgccgtggccttcctgcacatccgcaaggacgaccccatcgcctcggagctccaccaccccgtcgtgtcgagcgagtacggcaacgggctgcccatggagagcgcgtggatcggggtgcgggattacagtgcacagctcgtcgtgcccgatgccgttgacttcatgagccggttcgagggcggcatcgaggggataagcagacggaaccatgacaaggtcatcgagatgggcctgatgctcgccgaggcatgggggacgtttctcggctcgccgccggagatgtgcggaagcatggttatgatcgggctgcctggttgccttggtattgacagcgacgatgacgcgatgaaggtgagggacatgctgaggaacgatttcaaagtcgaggtgccaatattccacaattcaagaagcgttgaaggacaggagatggccaaggacgcgaatggcgatcaagtgacagggtacgttagaatctcacatcaggtttacaatgtcagggaggagtatgaggtcctcagggatgcggttaacaggcttgttcttgatggtttctcctgcagcaagctgagaccttctggc

SEQ ID NO: 22763 - DNA, 299 bp, Setaria italica
  Peptide Sequence Number=SeqID_88737
tacaggttcttctgctgtgggtgcggcgccaatgcggcggccggcgaccgcgagggcgacgacgacggtgatttcggcgtgttcgaggagaaggtcgagaagggggccgaggccgggccgcggggcctgtcgtgggcgcaggtggaggcgatgacgggcgggttcacctccgccgtggtcggcgagggcgggttcagcaccgtgtacctcgcgcgcctctccggcgcgctcgccgccgtcaaggtccaccgcagcagcgagcgcctccaccgcgtgttccgccaggagctcgacgcgct

SEQ ID NO: 22764 - DNA, 696 bp, Setaria italica
  Peptide Sequence Number=SeqID_88738
tatctatatgacatccatgtacaaatcttctccttcggatggaagagctctctcacaactacgaaaaccagcagaacgctacactgtccacccactgcaacaacagtgcaaatgtgggcttggagcatcggccattggtgaggtgcataagcatacactacctcagcttcaaaatgcctacttgcataaataacagtgccagatactaccatcaaactctaacctagcctatgtgttaggattgtcacagaaaaaagtcatcagccccacgaatgattacaagtccgccatcacaccatgaagaggtatctgagatcttcatcggtgagtcgggtagcattgccactggaaccgtcctcgccaaaggcagattgcaccatcgttctcttcttctcctgcagagctaaaatgcggtcttccaccgtgtcctttactgtaaaccgcgaaacagtaacaggacgggtctgaccaatcctgtgtgctctgtcaacagcttggtcctcagcataaggattccaccaaggatcaagcataatcacatggcaagcagctatcatatttagacccagattgccagccttcagtgacataagcattactctcaccttgggatcatttttaaactcgttcactcctttttccctcaagttgagagacattgctccatctagcctcctaaattgtatgccacctact

SEQ ID NO: 22765 - DNA, 235 bp, Setaria italica
  Peptide Sequence Number=SeqID_88739
tgatttgtttgtcgttagccgtttcgttacacatgggaggagcatagaaaaggagcggtgtgtgaggaagaaagaggaacatcagggcaaaacaaatcctttcctctcacacttgtgacttgccatctggatgcatatgtgatgttttgatcaacagtagcacatgcatctaagtttttctttcaagaattgttgactgttcacttcagacaaaaacagtggctatgaacacact

SEQ ID NO: 22766 - DNA, 579 bp, Setaria italica
  misc_feature (15)..(15): n is a, c, g, or t
  Peptide Sequence Number=SeqID_88740
cgccccgggctgcancccgggccagcccgggccccctagatccgcccctgttcttggtcatcatccatggggtcatgccatgcaccacctcgaagagcgacgcggtgccgtcatctttgagccactcttcaaggttgaagtaggtggagaccgtcgtggtggggcgcaccaggaggcgcaccatcggggaaatgtcgcatgaggtagtcgaggccccgccgtcggcgagaaggcgggacgccggagtgagcatgtagatggtctcgctctcgtagtcgacgggcgacgcgggctgatccgcggcgaagatgccggagacggtgagcacgcgcatgagccgccggagatacgggagcttggacgggtcgacgccggtctcggtgacgaggtccgagagtgtcgccgccccgccacggcggtggatggcgctagggatgccgagctgaatcgcgcaccagaacgccatggacttgacgtggcagaggccgaggtggtggatctccacgtacccgcggagcatgtcctgtgtgctgagctcctcctggacacgcgacatggtatgatgtttttgctctaaat

SEQ ID NO: 22767 - DNA, 459 bp, Setaria italica
  Peptide Sequence Number=SeqID_88741
gattggctcgatccatggggaaactgaggagagcagttgatttggaacaaattgcaacccttaatgcaaaagtatattaactttttggaagcggaagttcttccatctacttcagaacattcaaggacctaagggtagacaagactgaaaaagagctgacataatggcttggatttaaaatcactccttggatttcttgatcggccagcttttgaagatggaattctggaaaagtaccctgtattcctgaatattgtacttaaccatgtcagtgatgacacatctgatttgtcgtgtgctgtaagttgcctcaaagcttcatttgaaatgcttggttgcaaactttggttgagaacaacactatcacctagtgttatgcgaaacacattattaggtcactgtttccatacccgagatgagaaaagtcacaaggaaatttttgatcttttcctcccattt

SEQ ID NO: 22768 - DNA, 469 bp, Setaria italica
  Peptide Sequence Number=SeqID_88742
cgccgcgctcgccgacatctacgcccgcaaggctgatatcttgcttagaggatatattggctggaacacaaggcgggccttcaagtcatggacaaagtgttccctaaggattcaccagtgcagccgtccttggtcatagtttactttggtggaaatgactcgattgctgctcacccgtctggtctggggcctcacgtgccagtagacgagtacatagacaacatgagaaagattgcagagcacctgaagagcttatccgagaagacccgtgttattttcctgagctgtccacctctgaatgaggagatgcttcgtagatcaaccaggtttgttgcgatcatatccatacatgtttgttgcaatctacatacatagtacaaaggcattggtgagatcgatcctgaattcagcagcaccatactgagcgagatcgtgcgaaccaatgaaacctgccgtctctactcggacg

SEQ ID NO: 22769 - DNA, 1207 bp, Setaria italica
  Peptide Sequence Number=SeqID_88743
agtactgcacctctccatccagctccagctactttcttcttcaattcgatcagagcaaatcgagagccttcccgacggcggcggaggaggtggaggaagaccaagcaagctaagccaagggcgtcggaccggaggatgctcggacgtcggccgctcatcgtgctcttcggctcctccatcgtgcagtacagcttcagcaacggcggatggggcgccgcgctcgccgacatctacgcccgcaaggctgatatcttgcttagaggatatattggctggaacacaaggcgggcccttcaagtcatggacaaagtgttccctaaggattcaccagtgcagccgtccttggtcatagtttactttggtggaaatgactcgattgctgctcacccgtctggtctggggcctcacgtgccagtagacgagtacatagacaacatgagaaagattgcagagcacctgaagagcttatccgagaagacccgtgttattttcctgagctgtccacctctgaatgaggagatgcttcgtagatcaaccagcaccatactgagcgagatcgtgcgaaccaatgaaacctgccgtctctactcggacgcctgtgtggctctgtgcaaagagatgaacctgaaggtggttgacctctggcatgccatgcagacaagggaggactggatgactgcgtgctttaccgatggcctgcatctgtctgaagagggtagcaatatcgtggtggaagagatcctgaaggtgctcaaggaggcagactgggatccgtgcctgcattggaaggcgatgccgacggagttcgccgaggactcgccctacgacctcgtctcctccagcggcgacgccacggtgaacccgtcggagtggaccatccacaggcggataccatgggactgactgactcactgaataatggtggcttttgactccatggcggccgggatcatcatatccatggcttgctcgctccagaataatgcatgccatctctaatcctggtcatggatgtgcaactcagccatcatcatttttcatatcccgatcagttatatatttattagatatattggtggtgcagaattatatatgtattccatatgaatgaatggtttgtcatgatgatgcattgttcttgatgatttgtggcaggcacgctttgcagatgcaggtagcgtcctttttttcctttatttttttcttt

SEQ ID NO: 22770 - DNA, 476 bp, Setaria italica
  Peptide Sequence Number=SeqID_88744
cataacaccacggaaatactttgatcaagcagccagcaaacatatccagcaatacacaatgtggtcattatatatagtcaactggtaattgtatacaagtacggaatgagggaacagaaggcattatttgaggccagcatcccaagcactgcatgcaaaacttgataggaaatgatacagttttggaaaaggattcaaaaaaatgtgtatgctaatgccggcataccaaatagaagggaacttgtgaagtgtatcagtgacatgaacacagaaaaggctgttaagacactagcatgcatcatcagtaataaagaagactccacaataaggatgagtaaacacgaactaaaaaagatgtttaaaaaaaggaccaactagatctgagcatgaagggatttagttatcagctgagaaagcagttgaaatacacttaagcttttaaggaaaaaatgaaccaagaattcaagaaatgtatg

SEQ ID NO: 22771 - DNA, 413 bp, Setaria italica
  Peptide Sequence Number=SeqID_88745
ggcctctagcaaggcgaagttctgaccaatgcaaatgcgtggtccccaaccaaacgggaggaatgcgcctgggtccttggatgccttggagatcccctcagaaaatctgtctggcctgaactcgtgcacatcccttccccaaatatctgggtcatggtggatgaagagcacgggcagctccaagatcacacctgcagggtatgtaatgcctccaatctccatctccttgtatgttttccggaggaaagaaatggctggcgggtacaaccggagaacctcataaaggatcatggtcacggttttgaggcggctcaggccttcatactcaggcttgtttttgccgaacaaacctagcacctcctcccttgcacggtcctgccactctgggtgcatgcttaatacaaccattgtcc

SEQ ID NO: 22772 - DNA, 339 bp, Setaria italica
  Peptide Sequence Number=SeqID_88746
cgcctgcgctcggggtggcccgccgctttcccttccgcttctcccctgccactaccaccaatttgcccctcggttctccggccggattctctcccgtcctggggcgccgcttggattccgctccgcgaaagcttcggttttccgtgccggcgccgttatttcttcggggagagggaccggagcgccgcttcttggggcctgcgctcaggctcagcagagatcgaattcttggttggtgaacgctgccactagccctgacaacggaggtttcttctgcttctggccgtgattttgtttccccactcctgcccccagccaaattccagtttctccattcct

SEQ ID NO: 22773 - DNA, 371 bp, Setaria italica
  Peptide Sequence Number=SeqID_88747
acgtcgcatctgttcgacgtgcgggatgccatcgcctccaaccggacttcgtccgcggcggctgcgggcggcgcgaccgatcacggcggaagaatcgggagctctgattggatcggcagcagctcccggcccctgtctaggacaacgtcggcagccgctgcttccacgggctttgcgttgggcagtctccatctcctgtctaaggggatgagaggcgccgctgctggtagcaacggctaccaccccaacggcgacgccaacacgacgtcatccgatcccgtggtgacgagggaagccctaggttcccggctcgagacgcacctagtactgagacacgcaacagaggataggcaaggcacacaggggatagg

SEQ ID NO: 22774 - DNA, 2176 bp, Setaria italica
  Peptide Sequence Number=SeqID_88748
catagatagatagacaaagactctaatggaaactcaaaatagctactagccctgtacctgaccccaaccaccaaaatctcatctcaatatgatgccaccatttctctttgtctctccagggaaaccaatcttccaatggatttctctcatgtttttcctataaggtatttacatgtaacgaaaatcgcaacccccagcccccctccctaaaagatgtatgctaaatctagacaacattacagacattttccattcttgagaagcagggtgctggcctatggactatgatagaggtaaatcaaaatggagtatcaaaatacatatgaggtgaaaggagcccaaaatatgaaaaaaaaagtattgaattgaatgggatcggcatatgaacgggtgaatggtaaaaaaaaaaggcggcagaagatggggaatgtggggctctttcactgacagtcttagctcattgtgctcaggctcaatggggaatagttatgcaggtggtgaaaatgctctggaggctggtaatgttgtgcaagtttgacggggaaaaggggagctctatgcatcaacgaaaatgggaaattggggtactggtacctaaagcttctcaagaactggatacagaatagtgacgcacggtgtagcgcagaacatgtaaagtcgggcagatcatctccttcactttcatcccgtctttgtatatcttgaatgtcgggacaatccgcacgttctctgcctttgccaccagagggctgctgtcgacatttaccttcagaaaatttactgaggggcattcagtgcagagagtgttcaccgaaggtgtgatttgtgtgcattgctggttcattgccgacatgaagtagacaacagatacccctggtgagcctatggcagcatggagttgctctacattggttactatctctacctctcctccaaacttcatatttgacacatcctcaccacgagtcgccttcaaagcaatttgggcatggaacagagcttctgcaacctccttatcgctaggaagctctttccgaagcacctcataatcccgcacgcaatcagcccaacgctcaagcttagcgtaggacgcagccctccttaagagagcctttgtataatttggttgtattcttagagcctcattgcagtcgtcaacagctttctcccacttttctagctttgaccagcaagcagctcgattgcagtgaagcactgaatttgagggatcatacttgagcccttcaccataggctattgatgcatctgaaaacttgccaaccttaaagagatcatttccttgggctcgggcttttgcaactagtctcacattattcagaatcatccccacttctgcattcccaggatcaagatctctagccttttcagctgcagcaacagcagtatcaaacctccccaaagccatgtcaacttgggctcggacaatatgtacataggactcagcgagcatgcctgagagtttcgctgctgtcaatgatgagggcaatgtgccatccaatttcagcaaacttgcaagagtcgactcagcctcatccagcttgtgaagtcggaggagtgcttctgatctcaaggcaagaagcaactgagaggagtcagcgccagaggcaatggcagcatcagcttccctcagtgcactcttccaatccccaattttccgtgcatcagtgcttcttcccagatgcatctccacctcctgcagcttctgccactcagcgggatcagactgctgaagatgacctgcctgggtgaagttcctccgggccttatcaatcatccccaaccgcaggcagacgccggcgaggcggctgtgggcgcgaccgctggccgggtcgagccggacggcctcctcgcattcgcggagcgcgtcggcgagccggccaagtcctatgagcgcggcggctcggttgccgcgacacgcggcgctctcggggcaaagcgacacggcgcgctcgtagtagcggagcgcctccgcgtacttgcccttcttgtaccactcgttccccaagcgggtcacctcctggaggctcccgccgccgccgcttgccggggagctcgccggcgacctcgaggagtgcccgaggaacgaaggggcatcaatgctgctcctggccgggggccatgcccgcgccgcgcatgatgctcccgtggccgtagt

SEQ ID NO: 22775 - DNA, 287 bp, Setaria italica
  Peptide Sequence Number=SeqID_88749
ccggcgtcctgggcggggccggaggccgaggaggcggcggtaggcgtcgacctccttgcggagcgcgcgggcctcccgctcgcgcaggaggacgatgtccctgagctcctcgacctcgtcctcgtagaaggcgcagcgctcgtcggcggtgcggcgctgctggcgggcctcgatctcgagcgcggacttgtccttctgcaggcgcaggatcatggccatggcctcctcggccgccgacgccgcggcgctgcgctccttctcgagctcccgctgcagctccgcgcgcg

SEQ ID NO: 22776 - DNA, 401 bp, Setaria italica
  Peptide Sequence Number=SeqID_88750
tttcgtgtcctacatctagcatttagcaccaaccaacttctacctacttcgctatgtgggggcccaaaatgtcaaaatcagcatgaaaccatcaatgatatcacaaagagcttccaagcagttaacataacaaaacaaggtacaatcagtttataggagttccttacttgtcatgaacaccaaagtagcttttgcaaaatgttacttaggactttatgtttgtatgttatctttcagtgggtgcagagccagatacaaactaatgaactggttggttgatggatctctttttctgtcctcctgaggaatgcagactggggaggtttattactacttaaataagatccttttaggatggaatactttggtcaagaatattagacatccaagtctccaactca

SEQ ID NO: 22777 - DNA, 437 bp, Setaria italica
  Peptide Sequence Number=SeqID_88751
ggcatcttggacaatagacaacgtcactcattgcatcaagagttctctgaagcagtaatccctccaacgttcaaattcatcctctccaagcagccttttcaatacattaggaggaacagcactttcacattttgtatcaggacatagcaacttcactacatttccttccttgacattcattttgcagtatgtttgcatgcatttgcagcagaagaaatgatgacatggaagtttgatgaaatcaacaccaggacactcgctgaaacaaatcatgcagtcatggatagcacgtaagaaagcttcatggtgtttattgtcattgtatctcatcatccttggaattataacatttggtgaaccattatctagacaagcacgcttatctgcatcacatgttacatcattcttgctcaatactatctcctcacccctctact

SEQ ID NO: 22778 - DNA, 1181 bp, Setaria italica
  Peptide Sequence Number=SeqID_88752
caaagaattggttctattggtttttgtttcaatcagcgtcttgaatatacagagtattctaaaaaattcagcaggtagtgaatgaatggatggctcatgtttatattcgtgaatgtaaaccatggagctgctgctgtggataaaatgatgttgtagacttgaaaacatgctctcttcaacaaattggattcgtcggactaaagtacatcctgggacaggtatgtgtgtacatgcacagaactactgataattcactgatacgatggtgtcggtatcgatgcacatatgggaaaacctcattcagggatctgacgtatgttgcttgcaacctttgggaccataatgctgtgccgtctttgggacaggcttatggcacagggcacaaaaatgtttctggcatgcccaacagaacaggtggttgttgtttccgacctttggagatggttgacggcatgtcggacaaagatgagcttgaccatgctgtacatgcatttcagcgtgcgcctgtgcaacaaattggcgccgaacccttgggttcatctgcacttcccatctgtcaatttcctcctgaggaaacagcgcacaagaacccttaaaatgctcatatccagtgatcgcacggttgcattgataacagaagtactccccacagttccaacaatgcatcttattgcatccttctgtcttagatatggccatcttgcatttcgggcactgttttgcatccttcataatttccttcaggctctttaattcttcaacaatcctctgctgatctgcttgcacttgcccagattcttggcgtttctccaagataagaagtttttctgctggagacatacattgctccccaatatgacgtcgatttctacagagtgtgcaaaagctgaataaacaacttgaacacactgcttcattacctactacatcctccaagcaagcagtttggcatcttggacaatagacaacgtcactcattgcatcaagagttctctgaagcagtaatccctcccaacgttcaaattcatcctctccaagcagccttttcaatacattaggaggaacagcactttcactattttgtatcaggacatagcaacttcactacatttccttccttgacattcatttttgtcagttattgttttgtctattgtctattttgttcttagttcttagtt

SEQ ID NO: 22779 - DNA, 569 bp, Setaria italica
  Peptide Sequence Number=SeqID_88753
ttcttaaattttgtaaccttgtaacatcgagttttagcagctagccttctcctgcaattagatatgatggagaaaacagatggcaggagtgtgttccaagatgaagcgatggaggtcctattggactctctatcatctcaagaaaacagtaaagtgcaggtgttatcagcatcatttctttcaaaccttggagggacttattcctggtcaggagaaccatatactgcagcatgggtcgcaaagaaagcgggtctcacatcaacatctcatagaaatacaatcaggagcatcgactggcttgattcttgcctgcaggatacagaaataatcacatggagcagtagatccgcacgagcaattattaaaataggaataccgtttatcagcgctttagccaaaggaatgcagagcaagatcaagggaatctcacatgattgccttgtatgcactgcatggcttggaagtgagctggctgcccttggtgaaaatgccatcagatattctgcttgttgagtatttttgttacatgacattagtctaagttctaccttgtctattcctagggtttt

SEQ ID NO: 22780 - DNA, 1562 bp, Setaria italica
  misc_feature (1537)..(1562): n is a, c, g, or t
  Peptide Sequence Number=SeqID_88754
acttggaagtgagctggctgcccttggtgaaaatgccatcagatattctgcttgtgagattttgttacatgacatagcaagtcacctgcatccagggtttgatcttgacgaaagggttctagcatgcatgtgtctatacaattacacctctggaaaaggaaagcaaatgttgatgagcttgtcagaagggtcccgagaatctcttaggaggctttcatcattcacatggatggctgaggaattacttcaagttacagattattttctttccagcaaaccacgtgtatcatgtgtacatacacaaatcctggaaattggtcagcctagcaatggtgcagcaactgctatagcagtcttcagaggacagctttttgctggttattctaatggcaccatcagggcatgggacataaaaggccaaagggcagtaattatcagggaggtaaaagagcacaagaaggcagtgacttgttttacactatcggaaactggggagaaccttctgagtggatcagcagacaaatccattcgggtatgggaaatggcacagcgcaagcttgagtgtgtcgaggtgattcagacaagagaggctgtacaaaagcttgatatttgtggtgacaaaatccttgtactgacgcagaacaatgttctcaagttctcttgtgcatcaagaagcagccaaacattgtacaggggcaagcatgtcaaatctctagctgtatgtcagggcaaagcttaccttggttgcacagacttgagtatacaggaactagacatgtcagttgaatccaagattgagataagggcacctaaaagaagatggaggattaggaaacaatccattagcgccattgttgtatataaagatttgttgtattgtgctggtgctcaagtggaaggttcagccttaaaggactggaagaaacgatgcaaacctaatatgacaatgccactaccaaagggaacaagtgtagaggcaatggcagtggtggaagacttcatctacttgaactgcagtaaaagccctagcatcattcagatatggctgagggagaagcagcagaaagtaggaaggctatctgcaggaagcaaggtgacgagcttattcgccgcgaacgacatgatcttctgcggtacagaaactggattaattaaggcatggatcccattgtgaagactagaagcaaaaggaacagaggaaggctcaatcttgtaaatgcaaaggaaagctagagtgtacaggaaacatgaaaaaacaaaaagagagcatagcattgtataagccctcaggaggacacaacagcacagctggcatatttgtgtgtaaactccatgattagcttgtccttcaaaatgatgactagtagcttcataatgtaaatactaaatagtgtgtgtgttttgggaagggttggtgattgtgaatgtcaataaaagtagagtaaatttcttaggacggcatatacttgtggcagtaatactatccaagaatgggatttttatgaaatcattatatactaccttggaataaaaaaannnnnnnnnnnnnnnnnnnnnnnnnn

SEQ ID NO: 22781 - DNA, 283 bp, Setaria italica
  Peptide Sequence Number=SeqID_88755
cttgtgtcttcttttcctaagtcagaacctgatgaactagtcgattccatcacaaaggggatctccattgtactggggataaacggttcagctcctttcagacctggttcaaaccaatgctggtagatttcggttggctccggaggtacccgaagggcctcaatgtgatttcagcgggcaaggccgggagtgcccgaacctgatgagggccttccaggtttggtggcggcggtcatttgtaagatcctcacggctaaatagaaaacgaatccgtctcggagtc

SEQ ID NO: 22782 - DNA, 241 bp, Setaria italica
  Peptide Sequence Number=SeqID_88756
gcggagaggtggcggtggaaggaaaggtcgaggtggagtccttcagggaggcggtcgagatgatgctggaagacgaagacgagaccgctgcgatgaggcggctcgctcgtggtggtgtcgcgcgtgccatcggcgttctcgagaggagttaacaactgtctaatgtatcttgaggctgttccatggaatgaatctgaagaggacatcatcaagcaattgctttctcagcattcttcgtacg

SEQ ID NO: 22783 - DNA, 245 bp, Setaria italica
  Peptide Sequence Number=SeqID_88757
tttgttgagatggctttgcaagtattgtgtgttcctaccctcgtctgaacaaaatactacttggcagcaggcctgtcaaatactccatacgtcaagtaacatatgcaatcattctaacaacactgcaacatgagagcaggtttttccccatggtggccagattggagcattgttgctgtttaacaacaaacatctaaggtacgtaattaaacagcaacaatgcagcatcgtccagtgatgttaag

SEQ ID NO: 22784 - DNA, 356 bp, Setaria italica
  Peptide Sequence Number=SeqID_88758
tgacgcgaggtgacggcatggcggcgtagcacatcttcgacggccaccaccgcgacagcgactgccgccttctcgccgatcccaccagcaccattaagagttggggaaggtgaaccaccccccttcttgggatccggtaccaactccaatagagatcgtattagaaagaggagggaggaagaagatgatgacatgatgatgtttctattccctgccttatatctgatgggttctgctagagaaggaggagtaaagaagaaacgtcatatatcagaagaaacaggagaggttaaggttcgtcgactccttgagggacatatcaagaactgtcaagttacatttaggatggaacccca

SEQ ID NO: 22785 - DNA, 386 bp, Setaria italica
  Peptide Sequence Number=SeqID_88759
cgcgacgcgaggagactccactggcggcgcgcgaggcgacgaggcggcggcgcgaggtggcggcgtggtgacgcgaggtgacggcatggcggcgtagcacatcttcgacggccaccaccgcgacagcgactgccgccttctcgccgattctaaagatctgcatggggacacctgctgccaattcgggctgcttccgaggctgcaacctctttggcctagaaacagtggagtcgaaactgtatcgtcttgtgtggacagaaattgcttctttgtttgtagcaatgtggtgcaatgattgttcatggttaagaggaattgacggagtgaaagcaacctattccccatgctctgggaatatgtagtggctgatatttgtattggctttg

SEQ ID NO: 22786 - DNA, 235 bp, Setaria italica
  misc_feature (211)..(211): n is a, c, g, or t
  Peptide Sequence Number=SeqID_88760
aagcaaaatatgaagctaaacagctagcaagagaaaatgatgcaagagatgaagaggaggcaagtggagaacaaagaatggttgcatcaagaaagaaaccagaaaggaaggacaaagacctaggaagagtgcaaaaattgaagtcatgatggaaagattccttgaaatgaggacaaagcaagcaaaatatgaagctaaacagctagcaagngaaaatgagacaagagaacaggag

SEQ ID NO: 22787 - DNA, 272 bp, Setaria italica
  Peptide Sequence Number=SeqID_88761
gcaagcagaagatgaagctaaacatctagcaagagaaaataaggcaagagataaggaggctgctaaaggtgatgaatactccatcaaaaggtgcatatcgatcatcaatacaatggaagtgaccaaacaggaaaaggccaaagcttatgcaatcttcaccaagagcaaagaaaatagagagactttttattgtgctagtgaagaagatgaagaatccacttgatttggcttaggatgagatggcctagcagggatggaaagtgttgcggaaa

SEQ ID NO: 22788 - DNA, 276 bp, Setaria italica
  misc_feature (188)..(188): n is a, c, g, or t
  Peptide Sequence Number=SeqID_88762
taggtaggtcttgtctaaaggttgatgaatactccatcaaaaggtgcaaataaataacgaaattaatacaaacaacaaataggaaagtgaacaaaaacaggaaaaggccaaatcttatgcaatcttcaccaagagcaaagaaaacagagagacttttattgtgctagtgaagaagatgaagaatccgntttgatttggcttaggaatgagatggcctagcagcactcaaacgcaagtgctggtgagggatctggagtcggtgcttcaactgcatca

SEQ ID NO: 22789 - DNA, 464 bp, Setaria italica
  Peptide Sequence Number=SeqID_88763
catgtgattttgatctcaacatcacctttatttctagtggatgggagggatcagctacagattccagagtgctaagatcggctatgagtaagggcttccaggtacctccaggcaaattctatctggttgatggagggtatgcaaatactccatctttcctcgctccatatcgaggggttcgataccatttgaaagaatttggagctggacatcgaagacctcaaaactcaaaggagctcttcaaccaccgccacgcactactgaggaaccatgtcgaaaggactttgggagtacttaagaagcgcttccccattctcaaagttgccacattccatacgttagaaaatcaagtgaaaatacctatagctgcatccatcttccacaatctaatccgattacttcatggagatgagaaatggttggatcatcagccagtattaattatcgatccaacacacttttgt

SEQ ID NO: 22790 - DNA, 287 bp, Setaria italica
  misc_feature (271)..(271): n is a, c, g, or t
  Peptide Sequence Number=SeqID_88764
ggcccggaagacattccgacctcatcctggcgaggcgacgacgcggcggcgcggcacatcctcgacggcgaccggctcccgtccagcctccaccctctccgtcgccttctccccatcgaagaagacttgtctgctgcattgcggcgtaggcttctcaggatgatcaccctgatgtgcttcaatgtagatgcaggagatgtttaccttcttaggttctaatttaatttttagctcatcaagactctggtcatgttctaaggcagggttttangtaatgtgaggataat

SEQ ID NO: 22791 - DNA, 256 bp, Setaria italica
  Peptide Sequence Number=SeqID_88765
gacatcatcatccccagaacgatctacccttgagctgagatgattgtgagagaagaggatgagacgagacaggagatggggctgtgctgggagtgtggatgatgttctatgtgtgtgattggttggttactgggcactgcctagacgtagacgtagacaaggaactagtaacaacgaacaacgacggcgactttccggccggccgggaaccccttataatgtaaagcttattattattaagtagcggctaccctta

SEQ ID NO: 22792 - DNA, 355 bp, Setaria italica
  Peptide Sequence Number=SeqID_88766
aacggttcagcttctttcaggcctggttcaggccaatgctggtagatttcggttggctccggaggtacccaaagggcctcaatgtgacgaccctggaggaaggaatcgggcaagcgctgttgacgctcacgttggcgcagcagcaggtgctgttcatggaatggttcgaggctttcagcgggcaaggccgggagtgcccgaacctgatgagggccttccaggtctggtggcggcggtcatttatcccaccagcaccgttaagagttggaaaaggtgaaccacccccttcttgggatccggtaccaactccaatagtgatggttggaaaaggctccccaaagctcaatgtgattgc

SEQ ID NO: 22793 - DNA, 382 bp, Setaria italica
  Peptide Sequence Number=SeqID_88767
agtacaagctcaaggagatcaagaacggtgagtctcctggttttgtgtactatatgatctcgttgttgtagtgacagcctcccactccattgatcatacgctaaccactgggcatcgtctaaacgattgtgcatgatgatgagcaggccggcttgcgatgttggcgttcgtggggttctgcgtgcagcagtcggcgtaccccggcaccgggccgctggagaacctggctacccacctcgccgacccgtggcacaacaacatcggcgacatcatcatccccagaacgatctacccttgagctgagatgattgtgagagaacatcatccacactcccagcacagccccatctcctgttcttcgttcttctattccttctttctt

SEQ ID NO: 22794 - DNA, 298 bp, Setaria italica
  Peptide Sequence Number=SeqID_88768
ggcacaacaacatcggcgacatcatcatccccagaacgatctacccttgagctgagatgattgtgagagaagaggatgagacgagacaggagatggggctgtgctgggagtgtggatgatgttctatgtgtgtgattggttggttactgggcactgcctgcgtgcgtgcaggaactgtacaacgaacaacgacggcgactttccggccggccgggaaccccttataatgtaaagcttattattattaagtaagacggactaacccttaatagaaataccaacccaaagttttagtaga

SEQ ID NO: 22795 - DNA, 771 bp, Setaria italica
  Peptide Sequence Number=SeqID_88769
tttaggagctacagactgcaatgcctagaactagaggaacagactgcataataacaggcagaactggcattctggagtgctaagtgtcaatgaaatatatggtttttaaggatcgaaaattgatagcagtaactgcaaataatagtttgctcttcttttgcaagttgtgtaaccatgatagactcgctgttacttcagattctaaagatctgcatggggacacctgctgccaattcgggctgcttccgaggctgcaacctctttggcctagaaacagtacgctgttatatgtcatgaattatgtttatgtttctgtgaggctgacatgcgaaaatcatttttgcttattcgctccatatttctacatcagctttttgttcttgtttcctggaggtggagtcgaaactgtatcgtcttgtgtggacagaaattgcttctttgtttgtagcaatgtggtgcaatgattgttcatggttaagaggaattgacggagtgaaagcaacctattccccatgctctgggaatatgtagtggctgatatttgtattggctttgattttgttacttgtagatcccaccagcaccattaagagttggggaaggtgaaccacccccttcttggggatccggtaccaactccaatagcgatggttggaaaaggctccccaaagctcaatgtgattgcaagggggtcgccaaagttgagtaggttcctgcctacaacaagtgctataaaaagagccttctcctacatgcagtggggcaaagagg

SEQ ID NO: 22796 - DNA, 351 bp, Setaria italica
  misc_feature (347)..(347): n is a, c, g, or t
  Peptide Sequence Number=SeqID_88770
ggatcggttcctgaccacacgtgacgcgaggagacggacgctccgctagcagcgcgcgaggcgacgcggcggcggcgggaggtggcggcgtggcggcgcagcacatctccgacggccaccaccatgacggcgaccgctaccttctcgccaatcccaccagcaccattaagagttggggaaggtgaaccacccccttcttgggatccggtaccaactccaatagcgatggttggaaaaggctccccaaagctcaatgtgattgcaagggggtcgccaaagttgagtaggttcctgcctacaacaagtgctataaaaaagagcttctcctaaatgcagtggggcaaagnggag

SEQ ID NO: 22797 - DNA, 806 bp, Setaria italica
  Peptide Sequence Number=SeqID_88771
ggagaggaacgctccgctggcggcgcgcgaggtggcggcgtggcggcgcgaggtgacggcatgtcggcgtagcacatcttcgacagccaccaccgcgacagcgactgccgccttctcgccgatcccaccagcaccgttaagagttggaaaaggtgaaccacccccttcttgggatccggtaccaactccaataggtacataattctatctatgtttaagtctattccaatgagtaattttttctattgcaatgagtaaaattgccatgacaacctgtttagccttccattttatctatttagcttctatctgactataaatttatatgctttcgttctgcaatgaatatctcattgagagatcgtattagaaagaggagggaggaagaagatgatgacatgatgatgtttctattccctgccttatatctgatgggttctgctagagaaggaggagtaaagaagaaacgtcatatatcagaagaaacaggagaggttaaggttcgtcgactccttgagggacatatcaagaactgtcaagttacatttaggatggaaccccacatcttcaaagagttggcgacttatcttagaaggaaaatactcgttgttgatacaaggattacggtggaggagaagttgggtttcttcctatacatgttaagtcgcaacgcctcatatgaggatcttgcagtgacctttgggcacagcaacgacaccttccatcgtcacatcaaccacttcttcaagaaggtcattcccacactttctcgtcgtttcctccagtccccgatcctaatcaagtgc

SEQ ID NO: 22798 - DNA, 954 bp, Setaria italica
  Peptide Sequence Number=SeqID_88772
acgggggggaacgaaggtagggaagttacgaaggagcgcgaggatgccgtcgcagatgcgtgcgagctcggcctcgatcttggagcggtaggcgcggatggaggcggcgtgggcctcgttcccgcggccctcctccttctgctcgatggaggagatgatccgccacgaggccctgcgggcgccgatgaagtaaagtaaaaggagacatggtttcaacaccacgcatgtttgtggagaagacatgacagaggagattaagcacacaacagtaagagttgatcatgcattgtgcatgccggtggtttcattctctaaatcagaaggtgtgatatactgccatacaagacctagtgtgctacccattatgttcatgatgacagctgagagtgcaggtggcagggaaaccaagggtgaggagaaatgtgcagctgctaacactacccctaaggacgaattttgcattcctacctcaattgatattgctctcctttgtttttctttcaaaccacttatagctgctgctgtatacccaacaaagaaaccagcaaaatgcagcaaggagacagagagcatgacaactccgatatccccagagaagaagtttccattcacagaagatgcatcagcaattgttgaacttaggcgtacaaaattctcagagaagacactgcaagccagaagcgatgaagccaagactgccatcagaggtgcaaaaggagtcacaaattgaactatcgatgggaatgctgtttgtatagaagaacctaatagaattggggcaacaaacacctgcaaagtactgagagaaagcttaacagcatccacaggaatgtaagcaccagctagaacttttgttaagagaggggtaaggaacacagcagcaagagtgctgcagacagtcatcacgatggataacggaacatcgcctttagcaactaaagtcacctgaaccac

SEQ ID NO: 22799 - DNA, 569 bp, Setaria italica
  Peptide Sequence Number=SeqID_88773
gttgttgtagtgacagcctcccactccattgatcatacgctaaccactgggcatcgtctaaacgattgtgcatgatgatgagcaggccggcttgcgatgttggcgttcgtggggttctgcgtgcaagacaagtcggcgtaccccggcacccggccgctggagaacctggctacccacctcgccgacccgtggcacaacaacatcggcgacatcatcatccccagaacgatctacccttgagctgagatgattgtgagagaagaggatgagacgagacaggagatggggctgtgctgggagtgtggatgatgttctatgtgtgtgattggttggttactgggcactgcctgcgtgcgtgcaggaactgtacaacgaaacaaacgacggcgactttccggccggccggggaacccccttataatgtaaagcttattattattaagtagcggctacccttatgaatccacccaagttttgtgccaaaaccaaactatagctttgctatgttccccattgttttgccggagggcaaatcagaggaagttcagcgtgtgtttgatttgggatca

SEQ ID NO: 22800 - DNA, 601 bp, Setaria italica
  Peptide Sequence Number=SeqID_88774
gatcgcttcctggccacacgcgacgcgaggagaggaacgcttcgctggcggcacgaggtggcggcgtggcggcgcgaggtgacggcatggcggcgtagtacatcttcgacggccaccaccgcgacaatgactgccgccttctcgctgatcccaccagcaccattaagagttggggaaggtgaaccacccccttcttcttgggatccggtaccaactccaatagttctgcaatgaatatctcattgagagatcgtattagaaagaggagggaggaagaagatgatgacatgatgatgtttctattccctgccttatatctgatgggttctgctagagaaggagtaaagaagaaacgtcatacatcagaagaaacaggagaggttaaggttcgtcgactccttgagggacatatcaagaactgtcaagttacatttaggatggaaccccacatcttcaaagaggtggagacttatcttagaaggaaaagactcgttgttgatacaaggattacggtggaggagaagttaggtttcttcctatacatgttaagtcgcaacgcctcatatgaggatcttgcagtgaccttttgggcacagcaacg

SEQ ID NO: 22801 - DNA, 355 bp, Setaria italica
  Peptide Sequence Number=SeqID_88775
catccctcttggatcggttcctggccacacgcgacgcgaggagacggacactccgttggcggcgcgcgagacggcgcgagctcgcggcgtggcggcgcagcatctccaacggccaccaccgcgacggcgaccgctgccttctcgccaaatcgaagaaagatggtgcttggtcgagcaaggttctttagtacaagttattatgaaagaattgagatattgagttgacctagtgaacgtactggaaatagctattagttctagttcatctatgtaatatatccagaattgtttgattgatctgactatccagaattgtaatgttaaattttcaacatgattctatgcgatcataatg

SEQ ID NO: 22802 - DNA, 1166 bp, Setaria italica
  Peptide Sequence Number=SeqID_88776
cgcgaggagactccactggcggcgcgcgaggcgacgaggcggcggcgcgaggtggcggcgtggtgacgcgaggtgacggcatggcggcgtagcacatcttcgacggccaccaccgcgacagcgactgccgccttctcgccgatcccaccagcaccattaagagttggggaaggtgaaccacccccttcttgggatccggtaccaactccaatagcgatggttggaaaaggctccccaaagctcaatgtgattgcaagggggtcgccaaagttgagtaggttcctgcctacaacaagtgctataaaaaagaagccttctcctacatgcagtggggcaaagaggagtggaggaaaacaaagagcggattggaacccaactcttgagaaatcacttgttgaaattctgcatgagtataaagatagtggctatagaagtgacaatggttggaacactgaagggtggaacaagatggtgaaagagttccatctgagaaacaagtctgtctcgtacacaaaggcataaattcaagataaagaatgtcagcttaagagagactacaaaatgcttaaagcggcaagaatgcaaagtgggtcaaaatggaatgagcaaagaaatatggttgaaggatcagcctcaatgtgggagaacctcatagtgactttccccaaaatcaagaagtttcaaaataacaaggcaagctttccactctttgatgctttgggagaactctatgatggtcatctggctgaagggacatacaatttcacttctattgagtcagaacatgtgccaagaagatgaagaatccgatttgatttggcttaggaatgagatggtctagcagcactcaaacgacaagtgctggtgagggatttggagtcggtgcttcaactgcatcactaagaagcataaaatgttaacagagaactagtggttttgtttctatttggttgtactagtctatttaattaggacaagtgctggtgagggatctggagtccattttggttgtactagattgtttaattatgacaagtgctggtgagggatctggagtctcttttatttttgtagcatctgcagcacaaagaactggcaggtgagtccttgccgctttgtcaggtgaccatttcaggtgaccatgcaatggtggttctattctgttt

SEQ ID NO: 22803 - DNA, 492 bp, Setaria italica
  Peptide Sequence Number=SeqID_88777
agatcgcttcctggccacacgcgacgcgaggagaggaacgctccgctggcggcgcgcgaggtggcggcgtggcggcgcgaggtgacggcatgtcggcgtagcacatcttcgacagccaccaccgcgacagcgactgccgccttctcgccgatcccaccagcaccgttaagagttggaaaaggtgaaccacccccttcttgggatccggtaccaactccaatagtgatggttggaaaaggctccccaaagctcaatgtgattgcaagggggtcgccaaagttgagtaggttcctgcctacaacaagtgctataaaaaagaagccttctcctaaatgcagtggggcaaagaggagtggaggttcaccacgaggaaaacaaagagcggactggaacccaactcttgagaaatcacttgttgaaattctgcatgagtataaagatagtggctatagaagtgacaacggttggaacactgaaggtggaacaagatgg

SEQ ID NO: 22804 - DNA, 1890 bp, Setaria italica
  Peptide Sequence Number=SeqID_88778
cgcgacgcgaggagaggaacgctccgctggcggcgcgcgaggtggcggcgtggcggcgcgaggtgacggcatgtcggcgtagcacatcttcgacagccaccaccgcgacagcgactgccgccttctcgccgatcccaccagcaccgttaagagttggaaaaggtgaaccaccccccttcttgggatccggtaccaactccaatagttctacagtgaatatctcattgagagatcgtattagaaagaggagggaggaagaagatgatgacatgatgatgtttctattccctgccttatatctgatgggttttgctagagaaggaggagtaaagaaaaaacatcatacatcagaagaataggagaggttaaggttcgtcgactccttgagggacatatcaagaactgtcaagttacatttaggatggaaccccacatcttcaaagagttggcgacttatcttagaaggaaaagactcgttgttgatacaaggattacggtggaggagaagttgcgtttcttcctatacatgttaagtcgcaatgcctcatatgaggatcttgcagtgacctttgagcacagcaacgacaccttccatcgtcacaccaaccacttcttcaagaaggtcattctcacactttctcgtcgtttcctccagtcccccgatcctaatcaagtgcatcaaaaaatccaagataatcctagattctatccattcttcagaattgtcttggtgccattgatggaactcatatccccgtttccatatcccctgagaagcattctccttttaggaatagaaagggcacactaagcattaatgtgatggtggcatgtgattttgatctcaacatcacttttatttctagtggatgggagggatcagctacagattctagagtgctaagatcagctatgagcaagggcttccaggtacctccaggcaaattctatctggttgatggagggtatgcaaatactccatctttccttgctccatatcaaggggttcgataccatttgaaagaatttggagctggacatcgaagaccacaaaactcaaaggagctcttcaaccaccgccacgcactactgaggaaccatgttgaaaggactttgggagtgcttaagaagcgcttccccattctcaaagttgccacattccatacgttagaaaatcaagtaaaaatacctatagctgcatccatcttccacaatctaatccaattacttcatggaaatgaggaatggttggatcatcagccggataatatcgatccaatacactttgtttctttacccaatggcgatcaaaacaatgactcaggcactgcacaaggcaatgctttgagagataccatcgcccaagaaatgtgggttcaataccagcaacatgtaaattagttttcatgaattaataagcttgtatcatgaataatttgatgaataagttaataagcttgtatcatgaataagttgatgaataagtttttctttgaaaagtgatggttggaaaaggctccccaaagctacaaatgtgattgcaaagggggtcgccaaaagttgagtaggttcctgcctacaacaagtgctataaaaaaagagccttctcctaaatgcagtggggcaaagaggagtggaggttcaccacgaggaaaacaagagcggactggaacccaactcttgagaaatcacttgttgaaattctgcatgagtataaagatagtggctatagaagtgacaacggttggaacactgaagggtggaacaagatggtgaaggagtttcatctgagaaacaagtctgtctcgtacacaaaggcacaaattcaagataaagaatgtcagcttaagagagactacaagatgattaaagcagcaaatgcaaagtggg

SEQ ID NO: 22805 - DNA, 1674 bp, Setaria italica
  Peptide Sequence Number=SeqID_88779
ttcctggccacacgcgacgcgaggagactccgctggcggcgcgcgaggcgacgaggcggcggcgcgaggtggcggtgtggcgacgcgaggtgacggcatggcggcgtagcacatcttcgacggccaccaccgcgacagcgactgccgccttctcgccgatcccaccaacaccattaagagttggggaaggtgaaccacccccttcttgggatccggtaccaactccaatagcgatggttggaaaaggctccccaaagctcaatgtgattgcaagagggtcgccaaagttgagtaggttcctgcctacaacaagtgctataaaaaaaagccttctcctacatgcagtggggcaaagaggagtggaggaaaacaaagagtggactggaacccaactcttgagaaatcacttgttgaaattctgcatgagtataaagatagtggctatagaagtgacaatggttggaacactgaagggtggaacaagatggtgaaggagttccatctgagaaacaagtctgtctcgtacacaaaggcacaaattcaagataaagaatgtcagcttaagagagactacaagatgctaaaagcggcaagaatgcaaagtgggtcaaaatggaatgagcaaagaaatatggttgaaggatcagcctcaatgtgggagaacctcatagtgactttccccaaaatcaagaagtttcaaaacaacaaggcaagctttccgctctttgatgctttgggagaactctatgatggtcatctggctgaagggacatacaatttcacttctattgagtcagaacgtgtggaagagccccttcaacaaattgatgttgtagaggaagaagctgaggaagaagccctataggaaatttatgagatacgtgatgaagaggatgaagaaaaggatgcaagagataaagaagaggaggcaagaagtggacaacgaagaatggttgcatcaagaaagaaaccagaaaaggaaggacaaagacctaagaaagagtgcaaaaaattgaagctaatgatggagagattccttgaaatgaggacaaagcaagcagaagatgaagctcaacagctagcaagagaaaatgagacaagagaaaagaaggatgctaaaggtgatgaatactccatcaaaaagtgcatatcgattatcaacacaatggaagtgaccaaataggaaaaggctaaagcttatgcaatcttcaccaagagcaaggaaaacagagagacttttatttgtgctagtgaagaagatgaagaatccgctttgatttggcttagaaatgagatggcctagcagcactcaaacgacaagtgctggtaagagatctggagtcggtgcttcaactgcatcactaagaagcataaaatgttgtcagagaactggtggttttgtttctatttggttgtactagtttgttcaattaggacaagtgctggtgagggatctggagtcttttggttgtactagattgtttaattatgacaagtgctggtgagggatctggaatctctttgtttctacagcatctgcagcacaaagaactggcaggtgagttcttgccgctttgtcaggtgaccatgtcaggtgaccatgcaatggtggttctattctatttcagagccatacaatttcactgtggtattgttgttcatcttctgttgtag

SEQ ID NO: 22806 - DNA, 1682 bp, Setaria italica
  Peptide Sequence Number=SeqID_88780
ccgccgcccccgccggcggcggcggtggagaagccgagggcgacgctgcggctgagactggtagagaaaggcgtggtcttggaggtggacgaggtggagagggtgcgcagggagagcaaggtggtgaggaaggttcttgggggacgaggcggagaggtggcggtggaaggaaaggtcgaggtggagtccttcagggaggcggtcgagatgatgctggaagacgaagacgagaccgctgcgatgaggcggctcgctcgtggtggtgtcgcgcgtgccatcggcgttctcgaggtatccttgtcacttctgtttgacagaggagttaacaactgtctaatgtatcttgaggctgttccatggaatgaatctgaagaggacatcatcaagcaattgctttctcagcattcttcgtacgaagcagctttcagaaatctgctggcaaggttacaaccacaaagacccacctcctctgcagaactggtagttgaactagtcgattccatcacaaaggggaccaacaataatgctcggaaagagctgcggaatttagtcaatggtatcctgtcaaagtcctctgtctacataaagggcgataaagagctggacaagaggagcatttactgtatctgccattcttgcctgaattctctggtgggattgtttgaagaatcttcggatttggtccatgctgatgaaagatccatttcttcagtcggaaaaggaccacttgagagaatctacaagctagttgaggacatcaactggttgctgcagattctaatagacaggcagatgggagaggaatttgttgatgtatgggccaacaaaaagaccctaagcagcatgcaggagcgggtgtcaccaatgatacgtcatgagctgagccggatttcagcgacaatttttattgccatggggagtgggaagctccattgtactggggataaacggttcagcttctttcaggcctggttcaggccaatgctggtagatttcggttggctccggaggtacccgaagggcctcaatgtgacgaccctggaggaaggaatcgggcaagcgctgttgacgctcacgttggcgcagcagcaggtgctgttcatggaatggttcgaggctttcagtgggcaaggccgggagtgcccgaacctgatgagggccttccaggtctggtggcggcggtcatttgtaagatccttaggtagcagtagctgagtgggtttcagttctgcaattcatcatctgaatgtgtgcatgcgtatgtgctttgtttatgctgcgtgatacatggtatggtatagctggctgtgccaggtttccctgacgaaggctgggctgatctgtattcattagctcaccagagatgtaaggaaaacattctttagttcctccatgtggggctgaaggtatagtatatatctgctgtgacggttgagaagctgcactggatgagtagtgttcgtgcaatctgtttaataagattcaatgtgatcaggactagcggcccactggtgctctggttgcagcttgcagaacaaggacagggtgtcctctgtcctgagccggagatgatggagctttcctgtcttggctatggtctgcttgctctggctgttaacaacagagatccatttcgcttgagtgaggtatcatctgtatatatcactaccggtgtaaatgtc

SEQ ID NO: 22807 - DNA, 1406 bp, Setaria italica
  Peptide Sequence Number=SeqID_88781
ctggccacacgcgacgcgaggagacggacgctccgctagcggcgcgcgaggcgacgcggcggcggcgcaaggtggcggcgtggcggtgcagcacatctccgacggccaccaccgcgacggtgaccgttgccttctcgccaatcccaccagcaccattaagagttggggaaggtgaaccacccccttcttgggatccggtaccaactccaataggaaaacaaagagtggactggaacccaactcttgagaaatcacttgttgaaattctgcatgagtataaagattgtggctatagaagtgacaacggttggaacactaaagggtggaacaagatggtgaaggagttccatctgagaaacaagtctgtctcgtacataaaggcacaaattcaagataaagaatgtcttaagagagactacaagatgctcaaagcggcaagaatgcaaagtgggtcaaaatggaatgaacaaagaaatatggttgaaggatcagccacaatgtgagagaacctcatggtgactttcctcaaaatcaagaagtttcaaaacaacaaggcaagctttctgctctttgatgctttgggagaactctatgatggtcatctggctgaagggacatacaatttcacttctattgagtcacaacgtgtggaagagccccttcaacaaattgatgttgtaaaggaagaagctgaggaagaagccctataggaaattcatgagatacgtgatgaagaggatgaagaaaaggatgcaagagataaagaagaggaggcaagaagtggacaacgaagaatggctgcatcaagaaagaaaccagaaaaggaaggacaaaggcctagaaagagtgcaaaaattgaagctatgatggagagattccttgaaatgagaacaaagcaagcagaagatgaagctcaacagctagcaagagaaaatgagacaagagaaaaggaggcaagagataaggaggctgctaaaggtgatgaatactccatcaaaaggtgcatatcgattatcaacacaatggaagtgaccaaacaggaaaaggccaaagcttatgcaatcttcaccaagagcaaagaaaacaaagagacttttatttgtgctagtgaagaagatgaagaatccgctttgatttggcttaggaatgagatggcctagcagtcgaagaagaatcgtctgctgcattgtggcgtaggcttctcaagatgatcaccctgatgtgcttcggtgtagtgcaggagatgtttaccttcttgggttctaatttaattttcagctcgtcaagactctggtcatgttcatacatgtaatttaatttttacctcatcaagcatggttttatgtaatgtgaggataatcatatgttgctttgtgactgagtatttttggcaacttaacggttta

SEQ ID NO: 22808 - DNA, 2102 bp, Setaria italica
  Peptide Sequence Number=SeqID_88782
taaacgtgatggtggcatgtgatttcgatctcaacatcacttttatttctactggatggagggatcagctacagattccagagtgctaagatcactatgagcaagggcttccaggtacctccaagcaaattctatctagttgatggagggtatgcaaatactccatcttttctcgctccatatcgaggggttcgataccatttgaaataatttggagctggacatcgaagaccacaaaactcaaaggagctcttcaaccaccaccacacactactgaggaaccatgtcgaaaggactttgggagtgcttaagaagcgcttccccattctcaaagttgccacattccatacgttggaaaatcaagtgaaaatacctatagctacatccatcttaaacaatctaatcccattacttcatggagatgaggaatggttggatcatcaaccgtataatatcaatccaacacacgttgtttctttacccaatggcgatcaaaacaatgactcaggcactgcacaaggcaatgctttgagagataccatcgcccaagaaatgtgggttcagtaccagcaacatgtaaattagtcttcatgaattaataagcttgtatcatgaataagttgatgaataagttaataagcttgtatcatgaataagttgatgaataaattttttctttgaaaagcgatggttggaaaaggctccccaaagctcaatgtgattgcaagggggtcgccaaagttgagtaggttcctgcctacaacaagtgctaacaaaaaagaagccttctcctaaatgcagtggggcaaagaggagtggaggttcaccacgaggaaaacaaagagcggactggaacccaactcttgagaaatcacttgttgaaattctgcatgagtataaagatagtggccatagaagtgacaacggttggaacactgaagggtggaacaagatggtgaaggagttccatctgagaaacaagtctatctcgtacacaaaggcacaaattcaagataaagaatgtcagcttaagagagactacaagatgctcaaagcggcaagaatgcaaagtgggtcaaaatggaatgaacaaagaaatatggttgaaggatcagcagcaatgtgggagaacctcatggtgactttccccaaaatcaagaagtttcaaaacaacaaggcaagcttttcgctctttgatgctttgggagaactctatgatggtcatctggctgaagggacatacaatttcacttctattgagtcacaacgtgtgcaagagccccttcaacaaattgatgttgtagaggaagaagccctataggaaattgagatacatgatgaagaggatgaagaaaaggatgcaagagatgaagaggaggcaagtggagaacaaagaatggttgcatcaagaaagaaaccagaaaaggaaggacaaagacctaggaagagtgcaaaaattgaagtcatgatggaaagattccttgaaatgaggacaaagcaagcaaaatatgaagctaaacagctagcaagagaaaatgagacaagagaacaggaggcaagagataaggaggctgttaaaggtgatgaatactccatcaaaaggtgcatatcgattatcaacacaatggaagtgaccaaacaggaaaaggccaaagcttatgtaatcttcaccaagagcaaagaaaacagagagacttttatttgtgccagtgaagaagatgaagaatccgctttgatttggcttaggaatgagatgacctagcaggctataccagcttcaagatggcagaagatattgacgatgatgaggatcagtactatgaaggcactgcatgaagtaaaactcttttcatgaatcgaagaaagatggtgcttggtcgagcaaggttctttagtacaagttattctgaaagaattgagatattgagttcacctagtggacgtactgaaaatagctatcagttctagttcatctatgtaatatatccagaattgtttggttgatctgactatccagaattgtaatgttaaatcttcaacatggttctatgcgatcataatgtatttttctttaaatggacaagtaaacttgctcctaaagt

SEQ ID NO: 22809 - DNA, 2668 bp, Setaria italica
  Peptide Sequence Number=SeqID_88783
ctatttagcttctatctgactataaatttatatgctttagttctgcaatgaatatctcattgagagatcgtattagaaagaggagggaggaagaagatgatgacatgatgatgtttctattcccttgcctttattattcttatgggttttgctagagaaggaggagtaaagaagaaacgtcatacatcagaagaaacgggagaggttaaggttcgtcgactccttgagggacatatcaagaactgtcaagttacatttagaatggaaccccacatcttcaaagagttggcgacttatcttagaaggaaaaggctcgttgttgatacacggattacggtggaggagaagttgggtttcttcctatacatgttgagtcacaacgcctcatatgaggatcttgcagtgacctttgggcacatcaacgacaccttccatcgtcacatcaaccacttcttcaagaaggtcattcccacactttctcgtcatttcctccagtcccccgatcctaatcaagtgcatccaaaaatccaagataatactagattctatccattcttcaagaattatcttggtgccattgatggaactcatatccctgtttccatatcccctgagaagcattctccttttaggaatagaaagggcacactaagcattaatgtgatggtggcatgtgattttgatctcaacatcacttttatttctagcggatgggagggatcagctacagattccagagtgctaagatcggctatgagcaagggcttccaggtacctccaggcaaattctatttggttgatggagggtatgcaaatactccatctttcctcgctccatatcgaggggttcgataccatttgaaagaatttggagctggacatcgaagaccacaaaactcaaaggagctcttcaaccaccgccacgcactactgaggaaccatgtcgaaaggactttgggagtgcttaagaagtgcttccccattctcaaagttgccacattccatacgttagaaaatcaagtgaaaatacctatagctgcatccatcttccacaatctaatccgattacttcatggagacgaggaatggttggatcatcagccggataatatcgatccaacacactttgtttctttacccaatggcgatcaaaacaatgactcaggcactgcacaaggcaatgctttgagagataccatcgcccaagaaatgtgggttcagtaccagcaacatgtaaattaaattagttttcatgaattaataagcttgtatcatgaataagttgatgaataagttttttctttgaaaagcgatggttggaaaaggctccccaaagctcaatgtgattgcaagggggtcgccaaagttgagtaggttcctgcctacaacaagtgctataaaaaagaagcttctcctaaatgcagtggggcaaagaggagtggaggaaaacaaagagcggactggaacccaactcttgagaaatcacttgttgaaattctgcatgagtataaagatagtggctatagaagtgacaacggttggaacactgaagggtggaacaagatggtgaaggagttccatctgagaaacaagtctgtctcgtacacaaaggcacaaattcaagataaagaatgtcagcttaagagagactacaagatgctcaaagcggcaagaatgcaaagtgggtcaaaatggaatgagcaaagaaatatggttgaaggatcaacctcaatgtgggagaacctcatagtgacttttcccaaaatcaagaagtttcaaaacaacaaggcaagctttccgctctttgatactttgggagaactctatgatggtcatatggctgaagagacatacaatttcacttctattgagtcagaacatgtggaagagccccttcaacaaattgatgttgtagaggaagaagctgaggaagaagccctacaggaaattcatgagatacgtgatgaagaggatgaagaaaaagatgcaagagataaagaagaggaggcaagaagtggacaacgaagaatggctgcatcaagaaagaaaccagaaaaggaaggacaaaggcctagaaagagtgcaaaattgaagctatgatggagagattccttgaaatgaggacaaagcaagcagaagatgaagctcaacagctagcaagagaaaatgaggcaagagataaggaggctgctaaaggtgatgaatactccatcaaaaggtgcatatcgattatcaatacaatggaagtgaccaaacaggaaaaggccaaatcttatgcaatcttcaccaagagcaaagaaaacagagagacttttatttgtgctagtgaagaagatgaagaatccgctttgatttggcttaggaatgagatgtcctagcagtcgaagaagaatcgtctgctgcattgtggcataggcttctcaagatgatcaccctgatgtgcttcggtgtagatgcaggagatgtttaccttcttgggttcattgtggtgtaggcttctcaagatgatcaccctaatgtgcttcggtgtagatgcgggagatgtttaccttcttgggttctaatttaattttcagctcatcaggactctggtcatgttcatacatgtaatttaatttaagactacatcaagcatggtttatgtaatgtgaggataatcatatgttgc

SEQ ID NO: 22810 - DNA, 1713 bp, Setaria italica
  Peptide Sequence Number=SeqID_88784
atcgcttcctggccacacgcgacgcgaggagacggacgctctgctggcggtgcgcgaggtgacggcatggcggcgtagcacatctttgacgggcaccaccgcgacaacgactgccgccttctcgccgatcccaccagcaccattaagagttggggaaggtgaaccacccccttcttgggatccggtaccaactccaatagtgatggttggaaaaggctccccaaagctcaatgtgattgcaagggggtcgccaaagttgagtaggttcctgcctacaacaagtgctataaaaaagaagccttctcctaaatgcagtggggcaaagaggagtggaggttcaccacgaggaaaacaaagagcggactggaacccaactcttgagaaatcacttgttgaaattctgcatgagtataaagatagtggctatagaagtgacaacggttggaacactgaagggtggaacaagatggtgaaggagtttcatctgagaaacaagtctgtctcgtacacaaaggcacaaattcgaagataaagaatgtcagcttaagagagactacaagatgattaaagcagcaagaatgcaaagtgggtcaaaatggaatgagcaaagaaatatggttgaaggatcagcctcaatgtgggagaacctcatagtgactttccccaaaatcaagaagtttcaaaacaacaaggcaagctttccgctctttgatgctttgggagaactctatgatggtcatctggctgaagggacatacaatttcacttctattgagtcagaacatgtggaagagccccttcaacaaattaatgttgtagaggaagaagctgaggaagaagccctacaggaaattcatgagatacgtgatgaagatgatgaagaaaaggatgcaagagataaagaagaggaggcaagaagtggacaacgaagaatggctgcatcaagaaagaaaccagaaaagaaaggacaaaggcctagaaagagtgcaaaaattgaagctatgatggagagattccttgaaatgaggacaaagcaagcagaagatgaagctcaacagctagcaagagaaaatgagacaagagaaaaggaggcaagagataaggaggctgctaaaggtgatgaatactccatcaaaaggtgcatatcgattatcaacacaatggaagtgacaaaacaggaaaaggccaaatcttatgcaatcttcaccaagagcaaagaaaacagagagacttttatttgtgctagtgaagaagatgaagaatccgctttgatttggcttaggaatgagatggcctagcagcactcaaacgacaagtgctggtgagggatctggagtcggtgcttcaactgcatcactaagaagcataaaatgttgtcatagaactgttggttttgtttctatttggttgtactagtctgtttaattaggacaagtgctggtgagggatctggagtctattttggttgtactagactatttaattatgacaagtgctggtgagggatctggagtctcttttgtttctgcagcatctgcagcacaaagaactggcatgtgagttcttgccgctttgtcaggtgaccatgttaggtgaccatgcaatggtggttctattctgtttcagagccatacaatttcactgcggtattgttgttcatcttgtattgtagtaagaaagcctttttcgctgtagaaaaaaaaaacaaaaaac

SEQ ID NO: 22811 - DNA, 628 bp, Setaria italica
  Peptide Sequence Number=SeqID_88785
ccccgagaagaagaagtaccccggcggcgccttcgacccgctcggcttctccaaggaccccgtcaagttcgaggagtacaagctcaaggagatcaagaacggccggcttgcgatgttggcgttcgtggggttctgcgtgcagcagtcggcgtaccccggcaccgggccgctggagaacctggctacccacctcgccgacccgtggcacaacaacatcggcgacatcatcatccccagaacgatctacccttgagctgagatgattgtgagagaagaggatgagacgagacaggagatgggggctgtgctgggagtgtggatgatgttctatgtgtgtgattggttggttactgggcactgcctgcgtgcgtgcaggaactgtacaacgaacaacgacggcgactttccggccggccgggaacccccttataatgtaaagcttattattattaagtagcggctacccttatgaatccacccaagttttgtgccaaaaccaaactatagctttgctatgttccccattgttttgccggagggcaaatcagaggaagttcagcgtgtgtttgatttgggatcaaatgagatgtgttggattcatcctaactttaaaaaaaaaaaaaaaaaa

SEQ ID NO: 22812 - DNA, 1282 bp, Setaria italica
  Peptide Sequence Number=SeqID_88786
caaaatactacttggcagcaggcctgtcaaatactccatacgtcaagtaacatatgcaatcattctaacaacactgcaacatgagagcaggtttttccccatggtggccagattggagcatgaaaaccagcatccagccatcattttatcggacttaaaacagaaacaaaagcgtgcaacaacaaacatctaaggtacgtaattaaacagcaacaatgcagcatcgtccagtgatgacgacgttggaggtacgtatactaggggatagctatcgaaatccaggaacattggctcggatcactcccaaacatcagcggatgcaccaggtcgggagcttggatccatcttactgaccctctccggattccttcggggcagcagcttccttgatctcatcaccgccatcctcattggtgtcagatgtccatagggtcaggttgtcacgcaggagctgcatgatcagagtgctgtccttgtaggactcctcacccagactgtctagctcagagatggcctcgtcaaaagcctgcttagcgaggttgcaagcacggtcaggggaagttacaaggaatactacaataagtaagaacactgagaagttaagcgcgagaccaagcctgatgggatgggtaggagccagatctgccagagcaatatcctgggcagctttgtaagcattcatggtgctctctgcagcttccttcctctccgcacctgacttgaactcagcaaggtacctgtggtagtcgcccttcatcttgaggtagaagaccttggactcggcggcgccggcggaggggacgaggtgggagtcgaggagcgcgaggatgccgtcgcagatgcgtgcgagctcggcctcgatcttggagcggtaggcgcggatggaggcggcgtgggcctcgttcccgcgggccctcctccttctgctcgatggaggagatgatccgccacgaggccctgcgggcgccgatgacgttcttgtacgcgacggacagcaggttgcgctcctcgacggagagctcctccccgcctccggcccctcccgccagaccgggccacgcgctccatgaactccaccatctcctcgtaccgctcagcctgctccgccagcttcgccatgtacacgctctcctcccgcgtcggctccgacggcgacatggctgcgggctgggtggcggcaggggatcgggatcgggggagggaggggctctcgccggcaacaggggcggctacagggatgtgggggcgggcgcaggggatctcctgtgtggtggaagcgacg

SEQ ID NO: 22813 - DNA, 909 bp, Setaria italica
  Peptide Sequence Number=SeqID_88787
atacacaaccacagccacacacgcgatcgatcacactggtaaaagctctgcttagctcggagcttcagtgctcataacacacacaggtcggtcaagctcggcagccgcaactcagcaccaatggccaccgtcgaggtccaggtcccgaccgccacgctgcccgtcgaggaggctccggtggtggcggagcctgtccctgtccaaccagccgtcgtcgccgaggaggccccgaaggaggaagccgctgctccggtcgtggaagagaccccggccgcggaggcagctccggccgagccggaggccgccaaggagcccgaggcggaggctgcccctgccgagactgatacccgggaggtcgaggcagtggctgctccggccgaggcagaggccaaggaggcagagcccgaggcggcgccggccgagacggagaccaaggaggcagagcctgaggcggcgccggccgaaggtgagacaaaagaggccgagcctgaggctgccacggccgaggttgaggccagggagaccgagacggaggctgtcgcagccgagacggagacgaaggaagccgagcccgtggcagctccggctgaggccgagaccaaggaagcagagcccgaggcagctccagccgtggcagagaccaaggaagcggagcaagacgctgcagcgccggctgaggccgagaccaaggaggcggagccagctgctgccgaggccgaggtagaggccgcaccggtggtcgacaccaagcccgccgaggcagaggcagagacggccgccaccgaggccgaggcgaaagaactggaggccaaggaggaggcagcgcctgctgctgccgccgccgctgaggaggccgcggcgccggcagaggccgaggcggcagcagcccctgctcctgtccgtaggtct

SEQ ID NO: 22814 - DNA, 207 bp, Setaria italica
  Peptide Sequence Number=SeqID_88788
gatgaacggatcatcaacaagccttcagttttacccctgacaggcttgattctaaatagatgccatagggttcaagaacatggtggagcaattcttaaaatttttttggcatcataatttgcaccgaggttaaaagtgggtctgaatcatgcaataaacttccattgaagtttagatgtcatggcaccatggcttcagtccgttgta

SEQ ID NO: 22815 - DNA, 625 bp, Setaria italica
  misc_feature (608)..(608): n is a, c, g, or t
  Peptide Sequence Number=SeqID_88789
tacagaaaaccagcagaactccatccaaaagcatgctacaaagtgcaaacgttagctgatcggacagtttgccaagttggcagacgacacattgttatctgggcgatgacagcacatgcaagatcaaactgcaaaatgcccatcagtggtcggtaaataaaggcaccatgatccaagaacctaaaaaactaccgctatcgcctgttcctaagttgcttgctgatggcacctgggactatggttgcttgagacacccctcccctccagcaaccccatccacggaggtggagctgtgagttattgaactcagctgagatggttgacaaagaagttctgcttccgcgtgccgtgcatttagaggaatgtccagcagcaagtcttgatcagagtcaccattgccatactgtggagggaccaacaaggataacttttctgggggtagcataaataagctaagtgctcctccagtgcaggttgaacctttggtggcatagccagattttagcatagatgagctcttaaattgagaagccaaatccccagactttaaaactcttttaggagtcctcatggtaccctctagttctgtttcactctgaatgtgggtntcacgggatcttttgag

SEQ ID NO: 22816 - DNA, 525 bp, Setaria italica
  Peptide Sequence Number=SeqID_88790
taaaaaggggtcacaacggggtggatgaaagaggactaaatccctcgaacccttttatcccggtttgtaataccaaccgggataaaaatgggggtctttttatccctggttggtgtttccaactgggatcaccaaccgggataaaaaggtccccacgagttaatataaaagggattgcatcccctatatagttagatgtgttgtgtaggtgggatggcaagaaagctatgcgcgaggctggaggtcgtgggtttgaatcccacgcagcgcgcgcacgcgcatatttcgcgtgaaaaatggtgtgacttgcgacgtgcgcatgtgggggggcctcccaggatttctttttttttatagcgcctggcgtggtgacctatttttgtcccggttgagtgacccgggacaaaagatcctccttttatctcagttggtttatcccggatggattttcaatagatttgcaccctaccaaccgggactaataccgaattctttaccagtgtcccccccccccccggccacaca

SEQ ID NO: 22817 - DNA, 594 bp, Setaria italica
  Peptide Sequence Number=SeqID_88791
tagtaagctcccaaacagtccatgcttgccagtgtccctgatcaagatatgttatccccactagatcaccagacaaattgaacaatggtgatcctaagtaagcgtactcatgcatatcgcaatcatgaaatagaactctgcaacaaacatctctgtttattgaagaagaaaaacattattaattttatttaaacgacaatattacataatgtgataatatatgagagatcttacattactgaacctctgcaataaccggttggtgtaatatacccttctctagggaaaacaaatgaatgaacaggatcaccaacttgaacagactgagtctcaaacctgactgcttttatatagccattttcacttggcttagcagcaaatatatagaaacctcccgcagatttaatgggcttacgaacatcaagttcttgttcgtatcctgtagcgtttgggaagttcactacaaatctttttttcatcccaaaaaatttggaattcgctgctatgacagcagacccatcatcttctattgaaagaataatgccagcaataaccataaaccgcttgtcctccggcttcggcttccagtcaaaa

SEQ ID NO: 22818 - DNA, 1422 bp, Setaria italica
  Peptide Sequence Number=SeqID_88792
catttagcaaacattatatacacattaactgataaaaattccatcattgtattgtaatagaaattgtttaacatccatgaatgtgaaaagagttcaccagatcgcatcacattaatacctcatagcagtcaacagctcggcgggataaatggttcctaaaaaagtcacataatagttcaaaaatcaaacctaaatcaacacgtacactagtaggctgcaactcaaactccacaaccgcagctgcctgagacttcttgagatgcgtgacatcttgcatatgctgctgctcaggctatctcccaccaatagtcagccctgctcctagatgttttattcttccacttgaggttctgcccctgcaggttcttcaattcccttggaaacaatggtacttttccattttttaaaagtatctagtagctcccaaacagtccatgcttgccagtgtccctgatcaagatatgttatccccactagatcaccagacaaattgaacaatggtgatcctaagtaagcgtactcatgcatatcgcaatcatgaaatagaactctgcaacaaacatctattactgaacctctgcaataaccggttggtgtaatatacccttctctagggaaaacaaatgaatgaacaggatcaccaacttgaacagactgagtctcaaacctgactgcttttatatagccattttcacttggcttagcagcaaatatatagaaacctcccgcagatttaatgggcttacgaacatcaagttcttgttcgtatcctgtagcgtttgggaagttcactacaaatctttttttcatcccaaaaaatttggaattcgctgctatgacagcagacccatcatcttctattgaaagaataatgccagcaataaccataaaccgcttgtcctccggcttcggcttccagtcaaaagatatacgcacaattgacttacggacctcctgctccatgaaacaaatacgagccccggcgccaatctacggaagaggagaagggagtgaggatggcaccggccggccggcgcaaggtaaacaggagctgctcgccgctgtgaataccgcctccctccgcagcgtgccttggacaggcgcgggatggcaagggggcagatcgtgccctcggagatcactgaatcagccgtcgattcgtcatgcggcgctcgtactcttgccggcttcaggatccgctcctgcccccgggaacctcgccctccaaatcccgccgtgcgccgtcctgcagtgcgcctgacggcgctggatctgaaggaccaggacagggatggcacaggcaggaggatgagaaacggatccgaggatgatggccgaagagcaaggcagccgccgcccgacgcccacggcccaccaatgaggagctgaggagcagtcagggaggagagggatgagattctg

SEQ ID NO: 22819 - DNA, 1265 bp, Setaria italica
  Peptide Sequence Number=SeqID_88793
caaaactttatttgattgaacctttatgcctactttatcagcttatttgactatccactttatcagctatttgattctccactttatccaatatttgcttctccactttatccactacttgcttctccactttattaactatctgcacatagaaattccagtttggatcactctccgtgatggagttctgaccaaatgggttatcccggacaaaattttgaacattgtctgcagaagcaattctctccagataaatccgaaggtctccatcaggtcccaaggaataatcatccctctcgttacggtaactgtagggttgggggaagatggcagtgtttggcgggttgcgtagagccttgtagggtgaatcatccactagtaatgtatttgaaggtgaaaactctccctgctcccatgggagagtaggctcctccttgttccacaacttctttagttccttcagcactaatggtttgtgcttattatcaattgtgttgcaccccgtaacagtgcaatgagacatgtcccaacaaaatagtaggtacggcttgagattcctcataaggatatcaacaaccgaatcgacattttcccttttccttgaagaccatattcctagctcaaaattctcgaaacaaaatctcagaaaatcatcacagtatggtcttctaaaaaccagtttgccccgaacctttgcatgtgccttgtgtgcattgtgggtatcttggtttatatccgcgagcaaaccattaagatccaatatcagaagtttttcctctgaaatctcaccagcgatcctcttggtgaataaatactcttgatcttctctttatgtgcctcaactagacatgaagcacatatgcagctaagatcatgaaaacctggccctctgatggatgaaccccgctttctttttctcttccgtctctttcttcctgcagagctctcctgcaataagctgctgttctcggagcagttctctatcaaaacatcagcaacgtttgcatttatgggatccatattaacatcagcatgtcctgatgcctctattccatctgcacagccattttcagatttattggacacaattttattcactctaacaacacccggcgatgcctgttttgactctggttgctcctgcatctttttctttcttttcctcttcttgcgttttggagtaccctctgaagctgaaacaacagtgccagtggcttcctccttgagcattacaccatccttcaccttggcctcctcctcatcat

SEQ ID NO: 22820 - DNA, 880 bp, Setaria italica
  misc_feature (323)..(323): n is a, c, g, or t
  Peptide Sequence Number=SeqID_88794
ctggccttggcactgtatactcagcattgacagtcccatgagatgatcccttctcacccaaaggtggttccaattgattctgcgatgaagataacttgctgacagaatcttcttcacattgattagtcttattgctatctgctggctgtgaagggctgctaacttttggccgctttggtttgatcccaacaatgtgcttcaagagatcctgttgccttatatcactttttaggcttaggttcaacacgaagagccactgggacagcaggtgtagaatcagctaagattgctgctttgtaatgtcagtgttaaggaagcaaagngaggaacttatacatcatgttatctgttttccactattccaaccaaatgaatctgaattgaaaatatgtgaaagtttcatgctaagaaagatcaattgaaccatattatattctgaagtgtataacaggaaaagcgaggttatgatatttaataaggatatcttaaaggcagcaaatgcccgcttctccgtacgacggagaagacgctctgcatcttcctcagcttccatttgctctttcaggtaaagcaaatcatcgctatccaatgctcctcgtccatgaaggtagcctcccctctcaccagcaacttcttgcatctgttggtatcaaccgccgagtagagagccaaaatccctttgcaaccatgcgctggaaggtgatgtcctcatcatcgatcttgtccttccccttcccaaacttcctatctttggggtcgctgagattggtgtactcgcggacctcgcgcccggacatggctggggtgcctggggcagacgaccggcgggggcgaaaccctaaccctggctccgagcggaagcttcgagactagtccaggg

SEQ ID NO: 22821 - DNA, 998 bp, Setaria italica
  misc_feature (1)..(52): n is a, c, g, or t
  Peptide Sequence Number=SeqID_88795
nnnnnnnnnnnnnnnnnnnnnnnnnnnnnnnnnnnnnnnnnnnnnnnnnnnnttttttttttagttggatagcagcaacactaaagcagcttttcattgaatcctggtgcaaagcatagcccaataacagtacaaaaaacctaatatacaatctacatgtggccttagagattacttctgcgacttgtttagaatgcagaaatctcacaggaaacagttcagttcccacggttggaaactttacacatcctaaatgagactattcttcatctgaactctcgtaagctaaaccaagcaagcttccagctgtgttctgttgcttagccaccgatggctcatctggccttggcactgtatactcagcattgacagtcccatgagatgatcccttctcacccaaaggtggttccaattgattctgcgatgaagataacttgctgacagaatcttcttcacattgattagtcttattgctatctgctggctgtgaagggctgctaacttttggccgctttggtttgatcccaacaatgtgcttcaagagatcctgttgccttatatcacttttaggcttaggttcaacacgaagagccactgggacagcaggtgtagaatcagctaagattgctgctttcttaaaggcagcaaatgcccgcttctccgtacgacggagaagacgctctgcatcttcctcagcttccatttgctctttcaggtaaagcaaatcatcgctatccaatgctcctcgtccatgaaggtagcctagactctcaccagcaacttcttgcatctttgcaaccatgcgctggaaggtgatgtcctcatcatcgatcttgtccttccccttcccaaacttcctatctttggggtcgctgagattggtgtactcgcggacctcgcgcccggacatggctggggtgcctggggcagacgaccggcgggggcgaaaccctaaccctggctccgagcggaagcttcgagacttagttcgtcgtcgt

SEQ ID NO: 22822 - DNA, 733 bp, Setaria italica
  Peptide Sequence Number=SeqID_88796
tccacatggaaagttatcctcctcgagtggctgctcacccgtgattcgaccacctcctcactgtgcacgacagagtgcgtggaccgccttggcctcgtctgcacttcagaaactgcagtgttggagctggtctcatcgttctcaccttcgtgctgtgtgagtgcactttcctcctggatgaacatcttcagcctatccacaagaaaacccacaaactccttgggctcctccagcctgtcactgtacccataacgtgccacgcatcggaacatccgctgttcccttgggcccacctgccggaagaggaacctctccggaggaaccacgtgtgggattggcaggtgcttgattgacatgaacacgaagatggagtgaacagatggtatcttcttgatcagccgagggaacactgggggtataccctggatgagctcagtgtacaggagtcccactcctgggatccgccgcacatcattcttctcgaggagggctttcatttcattagtaggcacaatgtgctcgagctcatgccagtatctcttgacatggacatagtgccatgtcgccataaggctcatcaggaccagcgagaaacagaatggaaggtatccaccatcgatgaactttgacagtatggaggagaggtagactacttctgtcaaactaaatacgacgtagaacagaaggatgaagatgacgtgtttcttccacacaaggagcatcacaatggttg

SEQ ID NO: 22823 - DNA, 450 bp, Setaria italica
  Peptide Sequence Number=SeqID_88797
atctttctgctatccaactgtatgcagatccatccagacctacttcaagaactagttaattttctcgcttacttaaggcgtcctggggatgaaagtgatggggaatctatggatactagcagtgaaagcagcagtgataatgatgttgaccggctacgagtctcatcagtggaagctacacatcggctggaaaatggtggcctacaaagtgatgattgtgaaactgacgcatcttcaagttttccaatatttgagtatctggagagggatcctccatatggtagagaaccgctgacagacaaggtatcagctcttgcagatagatgtccagctctgaagacattcaaaagctgtgatctgctgccatctagctggatgtctgttgcatgatagatgcctaccagttgcaaatgcctaacaatggcttgcctgcgtatgctagaatttcag

SEQ ID NO: 22824 - DNA, 788 bp, Setaria italica
  Peptide Sequence Number=SeqID_88798
cgtggctgtggctgcgtcggcggatatagacagccggatggattccgacgactcctcgtcgacgacgtcgtcgaagccgtcggtggcgtccacggcgacgacgacgacaaacaccgcgggtgaactgaatgtgatcacggcgggtgccgcagcggcagaggaggcagggaatttggagagatttcttacctccacgacgccctcagtacccgtacagtacttgtccaagacaagcctaaggatgcggcgaagtagtgatgctatggattcacggccttatttctgccttggagatctttgggaatctttcagggaatggagtgcttatggggccggtgttccactagttttaaatggcagtgactccgtggtacagtattatgtgccatatctttctgctatccaactgtatgcagatccatccagacctacttcaagaaacagtgaaagcagcgttgataatgatgttgaccggctacgagtctcatcagtggaagctacacatcggctggaaaatggtggcctacaaagtgatgattgtgaaactgacgcatcttcaagttttccaatatttgagtatctggagatggatcctccatatggtagagaaccgctgacagacaaggtatcagctcttgcagatagatgtccagctctgaagacattcaaaagctgtgatctgctgccatctagctggatgtctgttgcatgattgtgacccttctacgccagcatgtcctggatttgggggaatcaaccgcagcgcaaatgcaacagggaaactatcg

SEQ ID NO: 22825 - DNA, 268 bp, Setaria italica
  Peptide Sequence Number=SeqID_88799
ggtagaatggcgactccgggatgaggcagcagtcgacgtcgcggctggcgagagtggcgtacatggcgatgaagccgctgttccggcccatgagcttgacgacgccgacgccgttctcggcgctctcggcctcgacgtgcgccgcgttgatggcgcgctgcgcctcctcgacggcggtgtcgaacccgaacgacttgtcgatgacggcgatgtcgttgtcgatggtcttgggcacgccgaccacggcgcacctgagcccgcgccgccg

SEQ ID NO: 22826 - DNA, 897 bp, Setaria italica
  Peptide Sequence Number=SeqID_88800
gaagatggaaggagcccaagcatctgggacacttttactcatgcagggaggatgccagacaagagcacgggcgatctgggcgcaggcggctatcacaaatacaaggaggatgtgaagctgatgagtgatactggcctggaggcctaccgcttctccatttcttggtccaggcttattccaagaggaagaggacccatcaacccgaaggggctcgagtactacaacaacctgataaacgagctagtaaaacggggaattgagatacacgtgaccctgtaccacctggatttcccccagatcctggaggacgagtaccacgggtggctgagccccagggtcgtggaggacttcgcggcgtacgcggacgcgtgcttcagggagttcggcgacagggtgaagcactggaccaccatggatgagccgaacgtgatctccatcgccgcctacgacaacggcgccttcccgccctgccgctgctcgccgccgttcgggatcaactgcaccgaggggaactcctccgtggagccctacatcgtcggccacaactccatcctggcgcacgccgccgccgtcaggctctacagagaacagtaccaggctacgcagaaaggcgtcgttggcatgaacgtctacagcatctggaactacccgttctcgacgagccccgcagacatggcagcaactcggagatcaatggacttcatgattggctggatcataaaccccttggtatatggagactatcctgaaaccatgaagaggatagttgggtcccgtcttccgaaattcaccaaagaacagtctgagatgatccgtggaacggctgatttcattggcataaaccactacacctcagtgtacgttagcgaccgatcgaacagcgcagattaccgggcc

SEQ ID NO: 22827 - DNA, 311 bp, Setaria italica
  Peptide Sequence Number=SeqID_88801
gtcggcgcggtcgtcgtgccggactgccgcgcgctgccggcgcgtcaggaggcggcgctcctgccgcaggcggtccgcgtgcccaactgaccgccgcctcgccggagtggaggatcgtgtgtcgaataactccagcctcctccattgattactaggagtgcgtgcgtacgtgtacgtggctcgctcgagagctctgcagtagcgtgagggagagattttccttgaccgaatcacgcaggaattctgcctgcagcatgatgtgctgcttgactgcgtcacctcaaactgaaagccttttaagcgtgtaccag

SEQ ID NO: 22828 - DNA, 450 bp, Setaria italica
  Peptide Sequence Number=SeqID_88802
cgtcgcggatgttgttggccaccagcctcgacctgtcactggcggcgttccggagggccgtctggtacctggcgtcgatctcgccccggggcgcggcgaggcggtccctgaacgacgggtagtgcgcggagccgatggcgtgcgcgccggagagcacgacgagctcctcggcgtcgaacttcttcttggcgaagttcctcttgaggtcggcgaaggagaaggtggagcccgggagcgtgtcgtcggcgtccttggcgcgcgagacgacgccgtcgcggcggcccgacggcacggcgtagtcgatgtgcccgtcgctgaggtaccgggtcgcgtcgcgggccgcgaacgcgagaatgtcggcgcaggagaccacgccggggtacctggactcgagcctggacttgatccggtcgatcacgtcgaagccacggaggccgatgctggagccgg

SEQ ID NO: 22829 - DNA, 318 bp, Setaria italica
  Peptide Sequence Number=SeqID_88803
cgaatcaatagtttgatcaatagtttccgagtacaaggacgaaccctatacaccaggaggccggagcgctgacccacacctagggccacgccgctggcgaccgggcggcggcgacggggacgacgaccgcaatgggcttcgagcgtgtggagctgcggtgccccagggccctcgacccccaccagagctggacgctcggcgacgtactcgccgagctcgacgcgctggatgccacccgccgcgccgcgccgcctacgcccctgaagcaagcgccggattgggctagtgacggcggtgcgagagagaaggcctttgtga

SEQ ID NO: 22830 - DNA, 365 bp, Setaria italica
  Peptide Sequence Number=SeqID_88804
ggggtaggccgacggggcgcgggtaggcggggatcttggcgtaggcggcgctgccgccggaggaggagggtgccgggtaggtgtacccgccgccggcggggcggaagaggccggcgcgacgtaggcgggtacggagccgtacatggcggcggggggagggggctgggcggcggcggagttgcgcatggtcgggggagatcggatttgctggagggaggaggaggttggggaaaggtggggagaagaatacgacgcggccacgcacgctgagctggtttgagtccttgatttacccacgactcgagggagggaattgggatgattgcgcggcggtgtgattcgctggaaaaagagaaggaaacgag

SEQ ID NO: 22831 - DNA, 348 bp, Setaria italica
  Peptide Sequence Number=SeqID_88805
cgccaaacatgatcaaataacaattgcaaacaaaaagaagtaaattaaacaatggtttagggtagttaaggtaacattctaacacgttgctgttactgactgttgccacatcgtaccatgacggttccatttttgacctcataagaccaagccaccgtacagcaggtcatagttgacggctgacgcgccatgggcatgaccagccgtgaacgctacgcatccatgcgtgcacgaaccagggactgccacctaataatcttcaggattggggtccctgtcgtggccattgcttaggctcagctgaagctagcgattagatagggacagtgacatggcgaaatggaacgg

SEQ ID NO: 22832 - DNA, 909 bp, Setaria italica
  Peptide Sequence Number=SeqID_88806
cctcgatcgctgagcagccccacgaggctgagtttcttcagactgctgtgctttatgatcagcttctggtaactaggctgctgctttttctgggtaggcaatttagagcagaatttgatccccccagttagatcgccgaagtatgatctcccatcttcaggctggggtttagcacatatgctcctgccacagtccatgagtcgaaggagtggcaattgtgctgcagccacctggaccccagatgaagtgatgtttgggcacaaagccatgaggaggcgggttagggtgttagggaatgcattgcagatcatcccaagcccattgtcagtaatgctagacccgcttaaatcaagcaactccaagcttgcataagaacgaacaatagatgcaacagctgcatctgttatttttgaaccgagaaccaaagacagcatgcacaggcccctgagattagcactctctagagcaaacacagcttcattgcataagcgaatcgatgagatgtgcatgtttctcaagtttgggcaggtccggcccagactatccattagagcaaccagatcggtagaatcattattttgtttgggaaagtccagtgagagctcattcaaattagggcagttcatgaccgctttggtaagggaacaaagacctgatagccaaagggttgaaaggcttgaagagctaatattcagaaaaccgagactgctacagccatctaatttaagaactgagagcgatcgcttctctgaaacaaacctagatagctcatccccagatatcctgttgactgcactattagccatgctaatatccagggtttgtaaattagggcaggaaaatgccacgcatgcgatcattgtggcatcaacatcgctgtccattcggagcacgagcctcgccagccgg

SEQ ID NO: 22833 - DNA, 619 bp, Setaria italica
  Peptide Sequence Number=SeqID_88807
ggctgtgtgcggcgcacgagagagggcggggaaggcgcggctcgtgcctcggtcggaggtggccacggtgaggcatagggaggagtgcagatccacgtgtgagaggagggagaggaatcacatgttttaacggagtaacgaaggaatgctagtaaaaattgacggcaatggcacgtaggggatgaaaaattaaaatcaatggcacttaagggattgctatattttcaatggcacagaagggacgactaagtttggatggtatagagggaattttctctaaaaaaacatccagtggtgtgtattgtagactctgttaatattctctgccctaattaaactattgagctatgattttgaggtgaagaaaaagaaatggcatatgagttcgtgcttataaaagcaatgaaattatattagcatcactgatactgatactgtcaaccagcataatattgcctgacctaactcaactattgagctatgatttgaggctaaaagaatggcataggagttgatgcctatgaaagcattgaaattgtattagcataactgataatactgtcaaccagctgtatttgctgtagttagatagtaaatggtaatttgttctattgtgttg

SEQ ID NO: 22834 - DNA, 245 bp, Setaria italica
  Peptide Sequence Number=SeqID_88808
tgctcattgatttgcatcattttatttaggctaactacttctgttggcacctgatgctgtggttgtgataaaactcagggactgccagaacttgatgtaaggataaagtggcctaatgatctctatctgaaaggattaaaagttggcggcattctatgtacctcgtcttatgaaccaaaagtctacaatatctgtactggtattggtttaaatgttgacaatgagaagcctaccacatgcttgaa

SEQ ID NO: 22835 - DNA, 890 bp, Setaria italica
  Peptide Sequence Number=SeqID_88809
cccctaagcgaccatcaaaacggaatcctggggctcttggagttgctctaacaacaacagcgatagtaatgccattccccgtgcgcctcacgccgccgtctaccggcgccgccgcggccgcagccgccgtcggggccgtgctcgccgccgtcgcgctccgccgctacctatccacttcccgccctcggccatccgcctcggtgaccatgtccgcgctcagcagctgcagcagcaccgccggagccgccaccacgctcgtggcgtacggcaggtcgccgcaggaccaggagctcctggcctccgcggccggttccgtcgccctgggggagggcgtgtcggccggggagttcgccgtcgcgctgtcctatgagggcgcggggttcgacgcgggcgcgtacatgggggcgctccgggcgcggcggttcgggaggtggatgctctggtcaccgaggattggctccacgcaggacctcatcgcacagaacttcgcaaagctgccggtgggcgttgtctgcgttgctgacgtgcagttcaaagggagaggacgttcgaagaatgtgtgggaatcaccaccaggttgtctcatgttctctttcacatcacagatgcaggatgcacggaagttgccccttatgcaatatgttgtctgcctttctatgaccgaagccatcaaggaactatgccgtgctaagggactgccagaacttgatgtaaggataaagtggcctaatgatctctatctgaaaggattaaaagttggcggcattctatgtacctcgtcttatgaaccaaaagtctacaatatctgtactggtattggtttaaatgttgacaatgagaagcctaccacatgcttgaatgctgcacttcaagaagcaaatgttatatca

SEQ ID NO: 22836 - DNA, 1373 bp, Setaria italica
  Peptide Sequence Number=SeqID_88810
taaagtcttgtccggttgggtcgtttgttcttgtcgtttgtcttgtacgcgcttgggcgttgtctgcgttgctgacgtgcagttcaaagggagaggacgttcgaaaaatgtgtgggaatcaccaccaggttgtctcatgttctcgttcacatcacggatgcaggatgcacggaagttgccccttatgcaatatgttgtctgtctttctatgaccgaagccatcaaggaactatgccgtgctaagggactgccagaacttgatgtaaggataaagtggcctaatgatctctatctgaaaggattaaaagttggcggcattctatgtacctcgtcttatgaaccaaaagtctacaatatctgtactggtattggtttaaatgttgacaatgagaagcctaccacatgcttgaatgctgcacttcaagaagcaaatgttatatcacccagattgaaacgagaagacatactggcatacttcttcaataaattcgaaaatctttttgaggtcttctcgaatcaaggatttcaggctcttgaggagcaatactataactcatggctccatagtggccagagagttgtcgtccaagatgcacatgaaggccagtctgtagacagtgtcgtcactatccagggtttaacaccaactgggtacttgtatgctattggtgaggatggcaaaaactatgagttgcacccagatggcaacagctttgatttctttactggattggtgaggagaaagatggaagcttagggcaccaatacaatacatagataggttcaacaaatttgtacaagtgatagatgtttaagaatggaatgagaacatgtaagcatcagcgctgccacctgcatccctttgtgtgcttcaaagcttgttctttgaagaaatagaagaaatattgttgtggaagttctgcacagctgctttgagatcctctcaagcattaagaattgctccagccttccacttcagcctccgagggctctccagacgcaaataaggaagggagcaaccaggactaaactatgggcatgagttcagacgtcaggagggtaaagccgcaatagctgaagacccttgaataaaccatagcaagaaaactatgaagcgcctctgctctgctgctggaacttcttcgacagtgttaagcctggtgtatatgcatcgggttctgtaacttaaacattgcaatagttctttgttcttagtgaattgagttgcagagctgtaaagatttatagtggttattctagtgacttgtgttggaaactgtacttgcatggaagcttaacttgttttgactttaaatcatatgaaaggagatcacatctttatattaacaaaaaaaaaaaaaactaaagagact

SEQ ID NO: 22837 - DNA, 314 bp, Setaria italica
  Peptide Sequence Number=SeqID_88811
ttttgggaaggttgggttgatcgcttgatcggggacaggagaatggatgatttgggacggggctgttaaggctcttctgcatcttctaaatcgagataatgtcatttctgttcgtgaaagtgctgctgatgctttggaggccctgtcttccaagtctagtattgcaaagaaagctgtggtggatgcaggaggccttcctattctgattggagctgttgtagctccctcaaaagaatgcatgcagggtgagacatgtcattctctacaaagccatgctgtccatgctttatcaaatatttgtggtggaacaactt

SEQ ID NO: 22838 - DNA, 452 bp, Setaria italica
  Peptide Sequence Number=SeqID_88812
ggaaccatattctgcaccaaaaatgtttatgggtgcatttttttttcatcgttggttgtagacaaatcagcgttgcctctgctgtactgtttgacaagttagattatttgtagacaaatcaatggaactgtaacactcagtatgcgcaaaggttaaaatacgtgaaaatatgtaaagatggtaggcggaagttgacttttagattcgtccctcgtatggataaatggaggttatagttgcgtaaagctcgttaaatttattccgtttgatcactagtgtatcgttgggagtttgggtcacgaactcatggatgcggcatttttaaccgcgctcagctacagtagtcgcggctacggttgctgagttggtctcgttgtcagagttctttttttcttcttttcccctttccaccgtgaccccatttctttttcatggatgcggcattttaaccg

SEQ ID NO: 22839 - DNA, 428 bp, Setaria italica
  Peptide Sequence Number=SeqID_88813
gggctcgtggcggcaggtcgccgcgatgccgcccgccatgtcgcacgccttccgcggcaccaaggccgacgtcaactgcgtcggccacggcgaccgcgtcatagtctgcgtcagctccggcgacgccggtgccagcggctgcttcatgtgcgacgtcaggtccaaccggtgggaggagctccccccgcgcgccggcgggggcgaggaggcctccacgggcttcgtggccgcgctctcgttcgagccaagaatggaggccgccgtctgattcaataggagcctcatcggagtttgctggttccctccgtgttattatatttttttgaaacgaatcctccgtctgattcgttagatttgctaatctggcatccctcatgccgagtgtacgtagtgatccatgattgttcatgtgaatcgtgctcgcgatt

SEQ ID NO: 22840 - DNA, 2623 bp, Setaria italica
  Peptide Sequence Number=SeqID_88814
ttggagatgactgaggttgaagaatccgtagagggagcattgggtaatgacgatgggcagctactgcttgatgcgatgatgaccaacttcacggggctgattgatgatgttggtgctggcgtggtaccaccgcagccttgtgtggtttctggaggcgagctgcagaatagcaaggcatctgaggatttaaatcaatcagtaggtcggattgaagacggagaacctgtgaccaatttagatcatgagctgaacggtgatggtggttttgaggaaggagaaattgagggggagtttcaggctttggattcagaagaatccggagattccgagctcggagacaatgatgactctgaagagaaattgggtggtgattctgttagcagaggctcaggggcgaacaaatcttctgatcatggcacacagtttgggaatttgcactcaacacctgcaattataggaaatggtcatcttacactgaacaatgatggtgtcaggggtggtgcacaaatatctgttaccagggctccagctgtcagttatgatgaaattgtggattggaatgggactccacttcctgataatatggctcccaaccctgggaagaaaagaaaacgctctatgacagaagagaggaaggctaaaaagacagaaactaaaagaaagaagcgagcacagcaacggatagctgatggagtcaatagaccaaaaattcaacatgttaagaagccgtcctaaccttccttcgtccttgaccatgggaagtgccaacagggaaataagggcaagttctcccatgattggacaccttcaacaaaatctaagccctgcaagcattttgcgtgtggttcttgtttgaaaggagatgattgtccatatgatcatgagttgtcaaagtatgaatgccataactataagaacaatggcatgtgcatcagaggtgatagatgcaaattctctcatgtgatgcaaactacagaaggtactcccacacaagatgcaaagccatctgatgcttcactggcatatgagaaaacaaacctcagagagcatacaagcagccagaaaacctcaacagttcataatggtgaacctgtgacatctgctcctaccaaacaacagtgttccatcctaaaaaatctggctggcttctcgatcaattctcaaaatgtgtctaatcgtattccaaagggtgtacagtttcttccgattgataaaagtggatcaaatttgagcagcctccgcctgggtgctttgtctattgagaagcctaggaatgcaaatgccactcaacaccagtaccttagagaacatgaagcagaaaggcaaaagatcgccaagcaaaatggccagggatcactgcttgatgagaagaattcatcaaacgaagcaactgtgcatccattttcagacccaaaaaaagctactttacctattagttctactgcaacatcagtacatactcagcctgaagtctcagaggcctctaggattttgcaggagttcttgtttggtgctggcagttagcggaaaatagcctgaagtctcagtgtgctctattctgccttttgatacctctattttacacatgtttgtgttatatagtaagtcgatacaaattttccggttttagtttacatggattgagttcatgcccatgattatgccactcttctgatactgtgcctccattttccttatcacaactgcacattgtaagtttattctacacagatacatttcattctagtacgaaaattagttcacgaaaggggctattgaggtaggtgcgccccaggcgctggtgctagttatatggagcacatagtttctcacagtggatgtggttactggttgatgagcctccttgagttggtacttgcctgaattaactttgacttcaattgtagtgaactgcactttccaagtcattcctcagttaagacgtggactttatactttgcccatcatgcaatttatatgaatttgaacataatattgattcatgaatcaactatctccatgttcttgccttcattttggttgatatatattatattgactcgtgcataactcttctgatcaaatgttttttattcatggtggctatcccatgaacgacaataggactttgtagttgattccttgtgaatattggtttaatggtgaatttatctgcaggtttggcacagaaacctggcgtgattcatttgtttagatgtcatggagaagttgaattccaattcacgagatagcgcaatggggcttgaggtgtcattatttgattcctaacaaggactgttttgtgaggcacctctcctgtcaggaagcccagattccaccatgcaagagctttacctcggttgccacatgagaatggcaggcacctagcagggctgccatttagtcttggatcatcatcatgattccgggcacatctgtggcagacttatgggtccttttgtggcgaccaatattagcctggtgcagtgcatggtctggacttgcatgcacacggtactcccaggatctctgatcctatctctctgtgttcagaattacttgtgaactagctggagactgtggtatgccacgtcagattcgtggagggccgacggtagtgagg

SEQ ID NO: 22841 - DNA, 151 bp, Setaria italica
  Peptide Sequence Number=SeqID_88815
ggggttgctgcacatggccaaacggtacagagtgcacgtgagaccattatggaggaggcatggcaaagtggtgcgttcgagggtagaaaggctagctgtccggtgacttgtgttgtactgtcgtctcgtgaaaatcttggtctcctttttg

SEQ ID NO: 22842 - DNA, 429 bp, Setaria italica
  Peptide Sequence Number=SeqID_88816
tgtttttgtttgtgaggattctaactaatcaagaaacgagaaccaatcttttgaactgtcaattctcaatagaacatgttctgacttcactgactcaatacacttcatcagaacatcttcactggctcaatacacttcatcagaacaatgtaaaagtttgataatctgtttaacatgtggcctaggcttatggacatttatcataaattgtttgatgtttgttagcttaaaattgaaaccaacgtcaaatattaggggtgggaggagtatttatcaatgttattttgtattttctgttttgagcaataaataaagatgatctatcatctgtattgctagcatctttcaatgctgttgtctgatgattttaatttgtttcagcattgttcatgtattaattgtctataagtgaaatgtgtgtatggcgtt

SEQ ID NO: 22843 - DNA, 270 bp, Setaria italica
  Peptide Sequence Number=SeqID_88817
tttttttttttgtaagaacaaataatcttaaaaaattatgtggtcatttgatcaaacagatcattgctgaacaacatacaaacagagttcaaatgtatcacaaagtttcatttatgatcaaccgtactttaagagaacaagaaccacagcccagaacaacaaaagctgatgaagaatcagacgcctgctgttccacttctccatctccactgaccaaaatccccatatcgccaagctcacacgagtgataagaaaatatcgccacacctg

SEQ ID NO: 22844 - DNA, 448 bp, Setaria italica
  Peptide Sequence Number=SeqID_88818
gcaaggacgggcgaccacatgggacttgtctacgagtacatgtcagagggcaccctgcatgagcagattgcaggaaacggcagtagtagaagatgcttaacctggacgcagaggcttcgaatcgcactcgaatcagcacaagggctggagtatttgcacagggggtgcaatccacctctcattcacagggatgtgaaggcgaccaacatcctgctaaatgaaaaactagaggccaaaattgctgactttggattgtcgaaaacttttaatcacgacagtggcatgcaagtctccacatactcacttgtcggtacacacggataccttgatccagaatactatgcaacacaaaagccgacaacaaagagcgacgtatacagctttggcgttgtgcttctagagctggtcacaggaaaaccggccatcgtgcgtgacccagagcccaacc

SEQ ID NO: 22845 - DNA, 299 bp, Setaria italica
  Peptide Sequence Number=SeqID_88819
atgccaacggctgggctcggtttcttgctcggcgctggcacttgtggggactggacctggagccgccgggcatggaaaggagaagctcctgatctttgggcccaggtgtcggtgccatgggtaggcccaccggcgcatggacggcacctggcgggaggaaagcgaccagatgtgcggcgcagcagcagccagcaggtcagaattcagagcacacctgctattattctcctcttctttgcagcaaaataaaaggaaatcgggcaaagcaaaggttaactttttttgaaacaggagggttt

SEQ ID NO: 22846 - DNA, 517 bp, Setaria italica
  Peptide Sequence Number=SeqID_88820
ctgtcgtccatgagccagcagagtatgctgtgcggcggcagcccaaagagcatgaagaacatggaaggagaggaggtggaggaggacgcgtgcagctgcaggatggggcagtggatcaccacggcttcagactttgtggtgttggagctgtaacccgatgttcatccatcaaggaagatgtaagcagaggaagggaggcagcaatggttggctcagcaacatcaagcctctctctttctcagtttctcgtaaagaggatggatggattgaacagctgctgggcagcgcggtgctcaatcttttcattccgctgcccccattttcgtactcggctaatctattgatagatatttccttgccaattagggattgattgattgattgagcatgcaacagcagcgcaaaattctgtgacgggtatagtactgtatattttgttgccttctctatgcagggatgaaaccgaattcggatggtggtttgtgtgtgtgtagggatgcattgctactcatttcca

SEQ ID NO: 22847 - DNA, 885 bp, Setaria italica
  Peptide Sequence Number=SeqID_88821
tgaagcttcggctgcataataagagaaaggaaaccgttaagttttttgatggctctgctctttgcttggtactttggtggcttcatctgaagggatgcaataaaactgaggtgtttggggtagcagcagcgagcctcagccctgaggtggcattaggatgggtcatattgccgagcctgccggcgctgtagtgatcggctgcaaagtgctgccgatcttcaacgagcatggcatagttgagggtgcagtgaagaagatggtgcacaggatcgacggcaagaaggcagttgcacgggtgaaggagcttctgaagctggctgctcaggccagacctcatggcgccactttcagtggcaagaaatggaagaaggttctgagtttccacgcaagggacggtgctgcagctgcaaagggagggcggcaccaggaaaagaagcagcagcaggaggcgagcgacgagatgagctgcagctcgagcaagctgagcttcaagtgggacgcgggcagctgctcgtcagcgtcgtcggttgcatattcaccgttgtcgttgatgtcggcgccggcaaaggcgtcggagcaaacgccatcgaggaaagactactacgcgtcgaggctgtcgtccatgagccagcagagtatgctgtgcggcggcagcccaaagagcatgaagaacatggaaggagaggaggtggaggaggacgcgtgcagctgcaggatggggcagtggatcaccacggattcagactgtaagttctgtttgctatctattatcttaatacaatagtgtttaaaggatccaccacagagggtcaagaaattaccacgttaatccaaaacagagaagaatatgaaccgttggatctaacggcctagattaatccaaaa

SEQ ID NO: 22848 - DNA, 188 bp, Setaria italica
  Peptide Sequence Number=SeqID_88822
cgagcgtgcggtcaaggcagcgggcccgctcttcacgctcttgggcttcctcgtcttccccttcgcgtggggcgtcccggagtccctcgtcaccgccgagctctccgccgcgctcccgggcaacggcggcttcgtccggtgggccgaccgcgccttcggcccgctcgccggctcgctgctcggcacgt

SEQ ID NO: 22849 - DNA, 292 bp, Setaria italica
  Peptide Sequence Number=SeqID_88823
cgccgcctccccccgactgccctaaaccccaccgggaccgggagctcccgaccctcaccgccggttctcccacccctcgccttgctcctctgcacgctgtttacagccgtcatctctgggggcactcttcctactttttgtgtcagtattttgatgtggattgatggccagtaatatgcagccttctgggccgcctcagcctcccaggcctcccatgatgggttctaacgctcagccacaaaatcttggaccaccaatgcctatgcagtttaggccagtggttccttcgcaa

SEQ ID NO: 22850 - DNA, 321 bp, Setaria italica
  Peptide Sequence Number=SeqID_88824
cggggcgcgcagtcgccgcgccgcgactgcgcgaagcccttggcgtacccggcgatctgcgggctccagaccagcggcggcacgccgacctcccgccgcgcctcgttgtgcaccgacaggatctcggcgaccgtggccgcggcgcgcgcgcggcggccggcgtctaggtccgtgccgtagctcccgtcgtcgtcgttggtggctgcggcgctgcgtgtgcacagtgcagcagacagggctaggagcaacaagatggaccagagggaagacatccttgttctagccatgatttggttgttgaaagcaattcttttgatggga

SEQ ID NO: 22851 - DNA, 478 bp, Setaria italica
  Peptide Sequence Number=SeqID_88825
aataaactggaggcagaaacgaaggaagcatctcaggttgcgacaatggcatcgtcccctgctgcgaccgcgaccgcgaagccgatcgctctcccgccggcgccaatccgcggcggcggctgctgtttctgggcggccagtccgagccccgtcgcggcggcgcggctcagggtctccgcctccgccgcctcgtcggacgtgccggatttcctctcgtccaattggcttgaaacacgaaagagaaagcccttcggtcccaggttgaattttagtgcagaagaagcagtggaataccaacttgagtccttaaaatacaatgatcaacaccgccaagattatgggatagaggtcatgtaccggtttgcaggcttcgacccctttgaaaggtcgacttactttggacggcagtttgatcttggacagtttgaacgcttccggcgcttgtttcaccattcagcttacagagtgctgctaggcc

SEQ ID NO: 22852 - DNA, 1359 bp, Setaria italica
  Peptide Sequence Number=SeqID_88826
tttttttttttttttttttggttctaagaaaatgattcgcactccactatttgctgacctgaatataatggtacatttgtcagattccagaacagaatgttcagaataaccgaagataacaatgaccaatgaatccactttatcttcagccagactatatatctttgctatgagtaaggtccagaaccatatggtacaagttcataaacgtacaatatgcatacaactctacagagtgggtaaagaaggcaacatcagctaagtatttagacaatgccagaagaaagcacaacgctgccacaggaaagtgaacatagccgcaccggtcccatctacagtttatgtacatctatcaatcagctaaacacaaggccacgtgcattccttgcatgaacagcattctgtacggatcagtctcacactaactggtaatctcagcttctaactggttgcatcctggaagaactcagtggggattgatggagggcagtacttctttgcaacaaatttgtacttatgctgactgtacttttctctgattgcaggaagatctcttccagggccaaaacagaagagccggtgtagtacccttacacaacaacgcaactcagatggtgtgtattgtgtgtagtaagaaagcgaggaattccatgggttctttgctggcttaaggataaacctcgccaagaaaacagaagaggcagctaccagcgaaggtagatagcaaagcaaactatactccagaagcgacagctcacagatgtagttggctaagaactcaagatgcatagttgggtccttgtcaaacacttgagcagcatctacaaatccccttaaaaaaacattttggtgtaggtaccgtcatctcaaacttcaagtaattcaggatagaagcttccatttccaaaacctcttccttagtgtatgaatcgtcagtaacatagcagagctcttctacttgaggtgggcatatttcttcatacttcgcagctataagtaagcaggcaacaccaagtaattgcagtctgttccgactgatctctttgacagaaagatagcggtcaatgtaattgactgtgaggtataaggtttcaggaacaagacgatattcttctgtgacttctacaagccagtctattaacaccgccctcatggttgtgctcatatctgtctgagtggtttccacaaaatttgttgagggcattttactagtctcagcctctcgcaagttctcgtaaatttcataggcaagtgttgcacaaagttgtggatcctcatagttgttgtcaaggtcagagatactctcagctttcatagggctaggactatgtttcctccagttgaatgctgcaacttcca

SEQ ID NO: 22853 - DNA, 934 bp, Setaria italica
  misc_feature (914)..(914): n is a, c, g, or t
  misc_feature (919)..(919): n is a, c, g, or t
  Peptide Sequence Number=SeqID_88827
tgaaaacttcaaagagagaggagcggtcagtggtcgcctcgccgccacgcacccaccctcctccccggcgcttcgccactccgccatgcttccgaggccaagccagagaagcatcttccacctcggggaggagggtggctacgaccaccaaggcgccgacgatactactactcgccaccaggaagggcgcctagaccatgggcggcaccggcgaaagcgagacgccgtcgacgacgccggcgttgggctgcagatcctggtccagcaccaccaccacacgcgggcgccgtcgcactcgcacatcgtcctgaagcaggtggtcctgccgacggcggcggcgcggcaccgccgtgggccgtgcggcagcttcttgagggcctgctccctctgcctgagggagctcagccccaacaaggacgtgtacatgtacagaggtgaccagggattctgcagcgaggagtgccggtgtcagcagatgttgagagacgaggcgagggagcacgaggccatgatcaagaaggagcgcgtgcggcgaggcttgcctcaccatctccgccacgggccacggccggcgccggtggcggcggcgatccgcggcacgccgaggagaccagtcgcggtagccttctagcagataggctagcatccggggtcgatgcacagagagatggccactactctttgtataccggtgatggtgtgatatcgatccttgcttacagagggatgttctatggagaatacaggggaaaaccgcgaattctacaatggtgaaggcgaaagaactgcgtgtcttgctgtttttgtgtaatctgagatgtaaactaaaggcaatcagggaaagatatgcagagaatcacatgaaagtcaaagtgactgttttcagtgtaacaaaaaaaaaaaaaaaaaaaaangagangacaagcacagagga

SEQ ID NO: 22854 - DNA, 400 bp, Setaria italica
  Peptide Sequence Number=SeqID_88828
acgaaagcgagcccgcccgcgcggtgcctgcctgccatcgggtgatcggggtcggggcatggcacagccgagggccaacggcaccggcgcgagagcgagctgaagaataaaacttgcttgctccgtgctcccctaccctctccacgcccgcgcgcggcgcacctggcaggcagcagcgcgtggcggagccgaaccgccagcggggaaggtagggagggcacgcacgcacgcgcgcgcacgactcctcgtgcaaactccgaaccaccacccacctcgcccccacgttccccttactcccgcgcggttgccgaccggagcggccaaggtgatcgatcgagctcctgcgcgcgcttgggtgtgtccaaactccaagccaaaccaagccaggagtgcacgcgcg

SEQ ID NO: 22855 - DNA, 648 bp, Setaria italica
  Peptide Sequence Number=SeqID_88829
gagaaacgtcaaggatgccgctcgtggaggccgagaacctgaggcaggaggcgtacgaagagactcgccggcgtcagatggccgagcgcgagctcgccgaggcgtccaagatggccgatgacgcagagaggtcgtaccggagagaggcggggcagcggaaggagatggaggacacgctgggcagagagcgcgcggcgatggagcacgacaggcgagagctccacgacatactggacaagatacgcaaggtggacgagcggagcgccgagctggagctccagatcacaaactcggagcgcatgatgaccgacctcgaggccaggctctcggagtcgtgcagcctcctcggcacgctccggccccggcaagcggcgacgacggcgagggaggaggaaatcgacggtgagcgccagcagctggtagtgggagcggcaagctcctccttgcggcggctcggttacgcggagctggacgaggccaccaatcatttcgatgagtctgcaagggtcgacggcggcggcggcggcggccggggcaaagtgtacagagcggagctgcgcggcatggcggtggccgtgaaggtattgggccgcgacgtggccgtggacgaggaccggttcgcccgtgaggtggaaaggatcagcggcg

SEQ ID NO: 22856 - DNA, 751 bp, Setaria italica
  Peptide Sequence Number=SeqID_88830
aaataactttatacagtaccttatcccaactattgccaagaaaacaacttagtccagttattttacctgtgcttggaatcccagccagtgctctaaactggcattggaactgaacctggcttgtgctcctttttttttttgctgtgtctggtctcccagaactatgcggtgctgtgattatcatttggggtaactgtataagttgtaattatcagtttactgatttatatcaattaacattgttcttgtttctgatatagtattagttagtttcatgcaaccttttatcattttccttgtggggaactgcttgttggagtgcactgatttaaatagaaggttttaaaaatttctgggtatgctaactggattaatttaggcaacttttggtttttattgcatattttgacaagctgttagcttcaagtactttactgatattcttttggtgagcatgaacacagtgcaaagtatgtatgcaaacattcatgtgtaccacgactgaagtgaagtgccgggagcacgccgaggctaagcatccaaagtcagacgtgtaccagtgcttcccccatttgaagaagtgaaagcctgtacaagcagccagggtgccatggccatgaagttcaaaaaaacgtgtctgtcagctgtgcggtttgatcaccgtcagtataggggctccccgtacgttactgaggagttcgttccgtggtatctgtcgtctatcatgcgtcctgtcctatgttaactaacc

SEQ ID NO: 22857 - DNA, 526 bp, Setaria italica
  Peptide Sequence Number=SeqID_88831
cctgcaaagaaaaagaatagccatccgtcgcgagctgatgatcacctcgaaaacttcttccttgcagtgcaagatctgcatgcagactttcatctgcaccacctctgaggccaagtgcaaagagcacgcagaggcgaggcatcccaagaacgacctcttccagtgcttcccacacctcaagaattagtaagcagcagcatatgcctgctctgacaagaagcgtatgctctttcatcaaaaccacagagaggagaaaactttcgtgatccgcaagtagtattgtcatcatcaccatgtattatgggtctgaactgctgttgcagctgctgcttcggttgtgtttgccccatctatatgtaatccttcgctgtcagcctgttgcgctacaacatcgattgtgtgtggatttgtgaatgcccgtgcttgctcagtaatttttttggcttcaagtgtgctgcacgcttcatggattctaaaatcgtttcaccaagatgtcagggttccacagcacagaagacagtaaatt

SEQ ID NO: 22858 - DNA, 651 bp, Setaria italica
  Peptide Sequence Number=SeqID_88832
aggaacgccgagaagaacaaggccgccaaggggagccagcttgataccaacaagaaggccatgagcatccaggtaccctatctagatctgcgcttgaggttttatgttttggtgttttctagtggaatttctttatggattgatagggtagagcgtgcttataagattagtctgatggtttagcggctgctgttgtgacctaggttgcccttttctacaatccttaccattaggaactaggaaggtgaatttgatgtggggatgctataaccgataaagtttacatgattggatctgtgttatgcgactattaggtatacaccctgcaaatcagtgactaaaaacgagatgatttgtagatttataaccaagaacaccgataattcaattgcctcggttatgtgttagtaacttattatctgattgaaaaaggctacatatctgactttgttatgaccccagcctaaactaccactggcgtttggactcagctgcttgctctgcatgcagtcaaatggaagtcggatgtatccattgtgtgtatactgtatagaactacgctctgatttaggccaacgcttgctgccactctacgagtagagggggaggggatgtgcatcatgattcatgacctttccctgatgagtcagg

SEQ ID NO: 22859 - DNA, 610 bp, Setaria italica
  Peptide Sequence Number=SeqID_88833
cgccaaccccccaaccctcctcgcagcctcggagccggaagagaaccaccaccagcaccagccatgggcggcggcaacggccagaaggccaagatggcccgcgagaggaacgccgagaagaacaagggccccaagggcagccagctcgaggccaacaagaaggccatgaacatccagtgcaagatctgcatgcagactttcatctgcaccacctctgaggccaagtgcaaagagcacgcagaggcgaggcatcccaagaacgacctcttccagtgcttcccacacctcaagaattagtaagcagcagcatatgcctgctctgacaagaagcgtatgctctttcatcaaaaccacagagaggagaaaactttcgtgatccgcaagtagtattgtcatcatcaccatgtattatgggtctgaactgctgttgcagctgctgcttcggttgtgtttgccccatctatatgtaatccttcgctgtcagcctgttgcgctacaacatcgattgtgtgtggatttgtgaatgcccgtgcttgctcagtaattttactgtcttctgtgctgtggaaccctgacatcttggtgaaacgattttagaatccatgaagcg

SEQ ID NO: 22860 - DNA, 425 bp, Setaria italica
  Peptide Sequence Number=SeqID_88834
gtggatcatggcgcgggagctcgccatgggcttcatggcgggcgggtacttgacctcgaagcccttctccaggtcgccgccgacggcgtcggagccgtagaagtcgtggtcggcggccttcttcctggagagccggcggccgcagagccggcccacgacgcaggcggccacggccaggacggagatcaccgagagcaccgcgaagaccgggccgaacgagcccttggacgacgcggcggtggacgggtgcgcgcgcaggatggcgttggaggaggttgggtagtacaccgtgggatcaggcaaggaagccatctccttccttccctcagcctctcagctctctcgagcagccaagctactctgctctgctctccctcgaagaaacggtcgctcctctgctcgcgctggtgagcaatggtctgacc

SEQ ID NO: 22861 - DNA, 361 bp, Setaria italica
  Peptide Sequence Number=SeqID_88835
agcgtgcccaggacgacgccgatgccggagccccggagcgcggtgagcacggacgtgtccgggtggaacagccgcacgtagctgatgttcttggccacgtacatggagatcacctgctccggcgccggcaggttgttggcgaccatgccgtagttcacgccaatggcaccctcagctcctgcattcacacatccaggagtaagaattactactaggtcgaatcatcaaaagtcaaaacgtaattgaattcgatattaatcatgaatgtccctttccactaattcattcatcagatcagttggagcaaacttgcaacctacaaactgttaccaactagcttatccctgaacagtgaagggag

SEQ ID NO: 22862 - DNA, 1186 bp, Setaria italica
  Peptide Sequence Number=SeqID_88836
atgatcccgccgtgaagtcgacgtggtagacctcgctcatgtccggctggaagagcccgaagtgctgctccacgccctcggtcttctggttctcgttgaacatggcgaacaggtatgtctccacgggcttcccgggccgccgcggcgtgccgccgccgacgtgccggaccacgttgttgttgtacgccgccgcgttctccacgctggcgccctcgccgccgccggacggccatccggtctccgacaccaccagctccaggccctgcaccccggccttctccaccgccgcgtgcgtcgcgtccacgatcgcgtcgaacatgttggtgtacaccaccccgccgtccgccaccgacgacgacgacgcagcgccggagccggccgccgacagcagcgcgtacccgagcgccacctgcccgccgctgttcgagtaggcgaagtacgggtacacgttcaccagcagcggcgcgttcttggacgacaggtacgagacgatcggggccatcaccggcgccgccgcctcggagaacgcgccctgggacggcgggtacgacgcgcccagcacggccgtcgccacggccgtcgtgacggcgacgccgctcaccccggcggaccggagcgcggactcgaggttctgcatggccgggagcacgtgcgcggcggactcgcccgggatgacctcgttgccggcgttgatgtaccggaactggacggcgccggcgaagggctggacgttggtggcgacccacgacgcggcgaaggactggtcggacgccaggcgctggaggtcctcgttcagcgtgcccaggacgacgccgatgccggagccccggagcgcggtgagcacggacgtgtccgggtggaacagccgcacgtagctgatgttcttggccacgtacatggagatcacctgctccggcgccggcaggttgttggcgaccatgccgtagttcacgccaatggcaccctcagctccaagaaagcctgccaagcagagcaagaagccgcaagctagaacccatggcgcagccgtcttcttcacaccggcggcagcagccatcatcctcgctgcaccaccgcaagccagagcgatcagaaacctctgtctctctctcttctctcccttctgaaactctcctcttcctgaactctgatgcctgaactgagcccgaactctgcacctctgttt

SEQ ID NO: 22863 - DNA, 559 bp, Setaria italica
  Peptide Sequence Number=SeqID_88837
aactcgttcatggacatgagcgcgttcccgtccatctggtgcgccttgcggtagaaggccgccgacgcgtcccacccgaacttgccctcgaagaagctgaagtggaggttctcgttcaccacgtcccacgcgatcacctgaccggcgtaccgggacatcaccgacttgatgcgcttcgccgtcgcctgccggagctgcgggtacgagagggactgcacccacccgggctgctggctcggctggtcccagaagatgttgtgcccgcgcacggcgatgccgtggctcttggcgaaccggagcatcgcgtcggggacggagtagtcctcgcggccctggacgcgctccgtgctgtaccacttcatctcgttctcgaaggtggtcaccgtgaaccgcgacgtgaaccactgctggtacgccgggctctgcaggatctcggcgctcatggctgagcccagagggaagccgctccggacgtgctcgatgcgtacctgcgcgccgggaacaggcttgccggcggagtcgcgggcgcggagccgcaccgtcttcttgcgcgccgaac

SEQ ID NO: 22864 - DNA, 252 bp, Setaria italica
  Peptide Sequence Number=SeqID_88838
aaacacaatgcccccaaaaactactgcaaacaaaagagcctcagctatcatttaatgagaaacacagagatgccaaaaatgcatatgatacttcaacaatgaacattgaagttcagccacaggaaaagctcaagtaacaggtgttatgagtaatttgtgagcaaagtttcaaagaagatgtttggcttaaatatcgggtgattgtatgtagtcgcataggtgttcaactaaacaaattgaatcagttcgttg

SEQ ID NO: 22865 - DNA, 461 bp, Setaria italica
  Peptide Sequence Number=SeqID_88839
gcgacgccgtggttgagcgacatggccacgaagacgccgtcggcgagctcggtgacctgcgccgccagaacagggagggacacgtccgtgcccagcgccccgttcaacgggaagagcgaccacaccacccgcgggatgtataccggcgccgtgatatcgcggacagtgacctccggcgccacggcgtggacgaactcggcgccctcgccgttgcagcacagggagacgacgatgcccggacggggcacgccgccgtcggtggcctcggcgacggtgaggcggccggccagagggtagaatcggtcgagggcgcgcgcgaaggacgaggcaaggctgtcgacgaggtgcgccgcttctcctccctgtttggggcttgggcagcaggactcccttctggatgtgatccaccgtgatcacgccgagatcccatggcgtcaggtgcatgatctccggctccggcg

SEQ ID NO: 22866 - DNA, 624 bp, Setaria italica
  Peptide Sequence Number=SeqID_88840
tttttttttactacaacaaacaactcccttcgccgccgccgccgccgccggcagagactgccgccgggcggtaagcagttcagcacatgcccctgctgctttgtgctaagctactgacagacagagcgaaaggatcaccaagactaatactgacagacaaagttcaaatacacacccctacccttactatggcgcgtcggaggaacttctagcaacgacaccgcgttctggtacagtgaccttattacaacacaacccgcacaagataataagaccgatcgctcctccgaccaaacttcccggctcgccggcgctaggagaacttgaacagcatgtcgtgccggtacgcctgcccgggcctgacgatctgcgaggggaagttggggtggttcacggcgtcagggaacccctgcgtctccaggcacaccgcgccgtactgcccgtacacctccccgcccttgcccgtcacgttgccgagccagttgctggtgtagagctgcacccctggctggtctgcccacagctccagcacccgccccgactgggggtcccagaggcgcgccaccttccggaacccaccgcccccgtccaccgcgtagttgatgtcgaacccggccatgccgg

SEQ ID NO: 22867 - DNA, 476 bp, Setaria italica
  misc_feature (1)..(23): n is a, c, g, or t
  Peptide Sequence Number=SeqID_88841
nnnnnnnnnnnnnnnnnnnnnnncggttcgtattaaaacattagtattggcaaattgacttcagatcagatatttttattgtgtctcagcctctcaggctctcagctcccaggtgacagtcgtctcgatagtacagcagccagctagaacgagaacttgaagaccatgtcgtgcctgtacacctgcccgggcctgacgatctgcgaggggaagttggggtggttcacggcgtcggggaacccctgcgtctccaggcacagcgccccgtactgcccgtacaccttcccgcccttccccttgacgtccttgaggaagttgcccgtgtagaactgcaccccgggctggttcgcccacagctccatcgccctcccggacccgccgccgtcccggaccacggccaccttccgcagcgccgccgccccggcgcccccgtccacggcgtagttggtgtcgtacccgtagatcccggccttgcc

SEQ ID NO: 22868 - DNA, 439 bp, Setaria italica
  Peptide Sequence Number=SeqID_88842
gaccttaatgcactgcattgttgcggtatcatactttgttttgtcggggcactcggtgcaatggtagcttcccacagtgttattgcataatagctctttgcagattccaggtgtagttttgcactcgtcaatatcttggcaaccgtttgggacatagggatttccatgaaagccatgcatgcactggcaccgataaccattgttcttgtatttccattgttcttgtacatcatataccttataggttgagtcgttgaaatccaagcacatactgttgacgctaacacatccatatgcagacacattcttctgcgcctgcaggcagctaagattgtcgatggtccagtgcatagattcggaagtcataaagctactgtagacacgatggtccagttcaaagattgggatgtcaataaaaaactagcaatttaatgtcaat

SEQ ID NO: 22869 - DNA, 289 bp, Setaria italica
  Peptide Sequence Number=SeqID_88843
cgacatctttgaagcttttgcttttggaggtccttctcttagttgcgtcctcaggggcgccggaggggcggtagcgcggctccaatggtcccatcggtgctcgtcgcgccgccgctcacgcttccctctcctgagaaggaagggaagggaaggtaatcacccgccgtatcgccgcctcggcctcggccgctgccgccgccgttgcgccgcttcacacccggctcaatccgcgagagggaggaaggcgtggctgcttcgctggcgctcgcgcgctttctctctctggaag

SEQ ID NO: 22870 - DNA, 619 bp, Setaria italica
  Peptide Sequence Number=SeqID_88844
gtgctattaaaattcaagagtccaactttgagatcttgattcccactttttagatttctcaatgctctatatacatcctcccactgaacatcaacagatgacgcatatcgtgggtcagaatttgttttgtcccacatccagcctacatccacataccgggaggctgactgcaattggtgctcatataaggttggggttatgagggtaagaactgttgcagaaatgatagctattatcaagattttcaaagatttgaacttgcaaccacagttcttttcaaggaccagaacttcaaaactttcgacatctttgaagcttttgcttttggaggtccttctcttagttgcgtcctcaggggcgccggaggggcggtagcgcggctccaatggtcccatcggtgctcgtcgcgccgccgctcacgcttccctctcctgagaaggaagggaagggaagaaagtcacttcccgtatcgccgcctcggcctcggccgctgccgccgccgttgcgccgcttcacacctggagaaattgcaacacgaagcagagcggcaatgtcatgtgaaacatgcaggccaccggaaccaggacaagcgccctagtagcaaacaacaacagaaata

SEQ ID NO: 22871 - DNA, 462 bp, Setaria italica
  Peptide Sequence Number=SeqID_88845
ccctgagatctgatggttcaacttcgatggtggttgtactccaaaatggctctggtatgggaatttggtcatgggtaattaagttcctggacagctcacccagttgctttacagccttatcacagcatccaaaacagcctctgctctgtttggaaggagtttgaacatgcacacaattggcgataagaaaaaaaacccaaagtgctaaagttacgaaaacacattacaagcatgacacagtccagaggcaggcaaggtaaccttccacttccactagtgggtgaaacaccgagaccacaagaacactgcaaaatctattcccaccgagacacctactagctaacaagtagacatttgatggtaaaattgcacctactagctaacaagtagacatttgatggtaaaattgcagggagaaggcatgccaagtgctaatcaagtagtcgctaatcagcgacaaca

SEQ ID NO: 22872 - DNA, 291 bp, Setaria italica
  Peptide Sequence Number=SeqID_88846
tcggaggcaccgccactgtcgccgaactcctcggggagtgctgccggagagcgcgttgtacgacagatccaggtactccagtgtctggtacctcgtccatccgctcaccgccgcgccggagtagagccgcgtgaagtcgcagctcttgagggtcggcacctgcagcagccgctccggccggatcccggcgaactccagcagcccgccgacgcccttgcacgagttccccacgttccgcacgaacgccagcgtgttgccggacaggatcccgctcagcggcgtcgacccgag

SEQ ID NO: 22873 - DNA, 524 bp, Setaria italica
  Peptide Sequence Number=SeqID_88847
agtccccgaagtagcgctcgtcgatgggagagcccaggcggcggcggaagtccacgggcaccaggaagttggcgtcgccgccggcgaggtcccggaacttggcgcgagcgacggatgtccacaccagcgacgacacggcgaggtaggtgcttggaggcttgtccgcctgctcgccggtggtctggctctgtgcccgtatgtgctgcttcactaattggatctcaccagcgtggatcagaaaggttctcctcaaacagtctggtggcaagcacgaagacgacgagctgatcacgggcagcgccggcacaactgtacgcaggatcttgcgggcaagctcatcggcttcggggtaccgaagcggcgtccggtcaaacgccggcggcgcgaggtccgccccggcccgcgacggcgagacctccatccgcgacagggctgcccacgccctcatgaactgccacgcggtagtggccgtccgccacggcgtggtggagggccaccgcgaccaccgccgcgcgcccgacggc

SEQ ID NO: 22874 - DNA, 1811 bp, Setaria italica
  Peptide Sequence Number=SeqID_88848
ggaatggaaagggcagcatattttatcagcatgcatcatatttcgtacagaattttcatttcacttcactcatacatttatctggactgaattccagtaatctaaaaaaaagtagaaagcagccctttcattcttgacaactagtgcagaaaactgaaccggaggttcaatgatcttgcattacgtgatcaaagtacattacttttccgcccttttcaattgcaactctgacagtagaatgcaagaatatcatgaatatgaacctacaatacatccctacttacatacaaaatcgtctaagatcagtctgcatttagctggtatgtgtcacaaggttcccttcatccttgtgctacttgttttgctgcttgctgctgggacaaatcagtcagtgacaaaggagttagtggcggggaagaaatatcactgccatctctgctatttctagcctccaacaatctgttcacagtgatgatgggtatcctctggctatttgagggtatggaatagctgcgagtgagggtagcaggtggtagtggaagtggcgaggggctttgtgatgccgtcggcgatgcacgggctggtgctgcaggaatttgagtctgacgttttgataccagaggaccagagtaaccgaccaagccagaaggtctgagggactccacattggctggaggcctaggaagctcatgaagttcgctgatctttggtgattttgttgaatgccgcaacatcttggggggaacttttggggacacagatgatgtctgccgagaatgactttgagggtttcctggcatcacatgatgttgtgccatgggtgacctgcgatcgttcagagaagatggcttgcttaaccctggtttgcttggaattggaccagaccaagattccctcttcatcttcttgtaatcagaaactgactgggagaacgtcgacatcccctcagtacttgatggcattttcacatggccactcggcctaaacaatggagatgaatgccacagattcgttgccacatgaggtttactttcaaactgttgcgaatgatgtgatctgtgagcacctactgttctgggggttttgtcatcaactggggttgggagtttgtacgaatgtttggctgaagatggcttcatttgccaaaacctctcagaaggatctggtaaattgcccgcaaaaattggtgctgaatgtgtgttaaactcaggcttcacttgtggagttataatatctcccttgttttgtttgacctcttcctgcttgctttcttttattggctgtggggaattcgtcacatctcttttatccaaatccattgaacctcttgaagcaagaaaatcttgatccttgtcatttatttcatagtcaaaactaaggtcttcatcgtcactgcaaccatcctgttcagagctgtaatcgccgttgtcagatgcatcatcctcaagaccactgaactggtagtcaatgtgctgtttctcagctattgcttttacatgaggatcgagtgcttcaagacacttcaaccctctcctgaaaaagcttaactgagcggcatgatggcgagaagcctgtgttaaaagactatggaactgcccttgcctcaatgattttaagcgaaatatgaacagtgctgcatcttcttggtactcggcaaaagaactttgcagttgctctgcagaatatgattcaattttggaatgccttgactttccctttccctataggatgtcctcatagcttcatatgcatctcttttcatgtcgcattgctgcttcatttcctctactagtttgtagctcactactcac

SEQ ID NO: 22875 - DNA, 659 bp, Setaria italica
  Peptide Sequence Number=SeqID_88849
ccaatatcttccacactaatggcaaaaatcagagctaccagtaatagggaaacaaaagcaaccaaattatcttcatcaaataagaaatctatttgagatgaaaattgaaacagatggtaacatctgattgtgtacttgacagaaacttagacaatgatgccttatgctaatttcaggttatgcatgaatttagcatgcaccaaaagcaacagtatacgtacaaacaagaacaacgtgatgcccattgtccattgtgtgatgcttattgtttcatctccttgctctcttgctcaaccatgtatgctttcttcatttcttccaggactgaatcatttgtgaactgatgaaggcattcattcaactcttttgcttgtttacggcattgccataccacagaaaatgttcttcctctagcacactcagcatactttgaacaataaaaatcacattccttaagggccttttgtttcattttgctgcgcaaagcttcctcgaccttcttcttgacgtgattctccctagcctcctggaggtaccccatatcgccgccccgatggtaccgaatcggactgggaagggatggatcgagcagttggggttaaaccctagcgcccttggaagggagcgcggacattgacggcaagattttctctctcccc

SEQ ID NO: 22876 - DNA, 234 bp, Setaria italica
  Peptide Sequence Number=SeqID_88850
atatctgtggttagatttaagggacctttaatttgatcctgcgcaggtaaatcaggatgttatgaagcatgattctgttttcgggaatgcctcgcctatgaggcagattcttgggcacaaacatgataggctcaggaaggtgcagatcaatggcttctgctcagcaaaaagcatggttgagctaacttgtcatattctcgagaatgcaacatcccttgaaagtcttacagtgga

SEQ ID NO: 22877 - DNA, 416 bp, Setaria italica
  Peptide Sequence Number=SeqID_88851
ctttggtttcgtttctggatgcttcacctgccttggagacctttcatcttgagtgtaaatcaggatgttatgaagcatgattctgttttcgggaatgcctcgcctatgaggcagattcttgggcacaaacatgataggctcaggaaggtgcagatcaatggcttctgctcagcaaaaagcatggttgagctaacttgtcatattctcgagaatgcaacatcccttgaaagtcttacagtggacaccatatttgctgggttcatcggtgatgatgttcgtaggtgttttctccaaaagaaaagtaaatgccgttccattcccagggatatgatcttggaagcacataatgcactcagggctgtcagtagcttcatcgtgggaagagtacctcctgcaattaagttaaatgtttggag

SEQ ID NO: 22878 - DNA, 552 bp, Setaria italica
  Peptide Sequence Number=SeqID_88852
tttcatccatccgagagtcaagtgcagcagctatgttttccaaatgagaagggatttgcagtgatcattttgcagcaggaagttacatgctggctgtgggcctggatgttgtggagatgcaagggtttcctctgtgcggtgctcaatctcattctgtgtaaagaagagaaagcatcaaggacaggggacatatggatactgccaaagcagcagcaacaacacataaaaagggaacaattctatctgttaagaggtctcaaggaagagacggtttcaataccaacaggcaacggctttaaaattacatttgacagaaaatagttttctggtgtatagatacatgagtctcagtgatggtcagcattaagcttacatataggttgtaaaattattttgcaacagtttcatagtttactctcagcaacacttgtggagtctttacaaggcacagaaaggatccgagcaacactgttgtagaagatgtgctagaatcatgtctttggacagtcacatttattgtacgattatattcttcaggcttactagagtcag

SEQ ID NO: 22879 - DNA, 1119 bp, Setaria italica
  Peptide Sequence Number=SeqID_88853
aaccaaaacatgactttgcacctctccttgttagagcttttgcacttggtacaaaaagaaccgtcttacaccgaaggcggcagtaacgaaccagtatgctgcttccaatctggcagtcaacatatttgtcctcaaaagaggatttttgtcatgtacattctgtcagaaagggttgataatgcctacaattttgtaattctgttttcaggagctttgcacgaagacgcatcactggtggcaaccgagtcatagatgacaaccaaatcatcacaaaccgatggggctccctcagccaataaatataagattttgaaggctccagccaatgaagatcagaccttgaagacttgaatggaccgatataaacaactatcaaatcttcatatggttctcacctccattgaccatcataatgcatatccacggcggcatcaatcgaattgtaatgcacgaagtcctgattttcggataaatggttgttctgtggcccatttccattgggcaatgagttcatgggacaataccctgaagactgactcaaatgattcgagtggaaattttgctgtaaagggcagggaagagcatttgagatgccagcatttcttgtctggtcagtttcatccatccgagagtcaagtgcagcagctatgtttccaaatgagaagggattgcagtgatcatttgcagcaggaaagttacatgctggctgtgggcctggatgttgtggagatgcaagggtttcctctgtgcggtgctcaatctcattctgcaagtatgtaagtacagcagcaacaggcacctctgaagcttcttcatgctgactggacaaccatcgatagacattttccatggcccggcgctcgcccgcgaggaaggacgccttctggtgcgccacggcatgcgtgtacacctgggacagcgcgttcgcggcgccccggaacgccaggtgcatctcctcctccacctcttcctccggcctcctcttcttcgccgcgttcgccgccatctaaggctctcccccaccccctgagccggagagaaggcggcggcaacggcgacgggcagggaggcgggggagcaatcgcgtgcgaagcggagaggtgtggcgatggtgtcgca

SEQ ID NO: 22880 - DNA, 285 bp, Setaria italica
  Peptide Sequence Number=SeqID_88854
attcaaattcccgttccggaactaagaacatggcaaaacttgcactgattaaccgcgaacagaagcgtgcagacctggtggagaaattcgccgcaaagcgtgccgctctgaaagcaatcatcgacgaccagtcgaagaccgaagaagagcgttacgaagcacgcctgaagctgcaggccctgccgcgtaactcggcgccgacccgccagcgtaaccgctgcgccatgaccggccgtccccgtggcactttccgtaaattcggtctggcccgtaccaaactccgcg

SEQ ID NO: 22881 - DNA, 235 bp, Setaria italica
  Peptide Sequence Number=SeqID_88855
caacatatcagcttcttggtgctgcgacattgccctagctagaagcaagggatagccatggctactgtttccaagcttctgcttctcctgttttacagttactgttcccttgttgctcatgcaggagacagtccaagctacatcactggttctatcaagactgaagccgtctgttccgagccgaaaggttcagtatatatattgtcgaagcatacactgcacacacgcttaaaag

SEQ ID NO: 22882 - DNA, 704 bp, Setaria italica
  Peptide Sequence Number=SeqID_88856
gcttcttggtgctgcgacattgccctagctagaagcaagggatagccatggctactgtttccaagcttctgcttctcctgttttacagttactgttcccttgttgctcatgcaggagacagtccaagctacatcactggttctatcaagactgaagccgtctgttccgagccgaaagccgctccgtcgagttctgccggcgccacggtaacgctgcaccatcggcacggcccatgctcgcttacgcccacgaatcagacgctaaacgtagagaagatcctcctcagcgaccagctccgggctagcaacatccagcggttgctctccgccgccgcgaacgccaccggcgacgcccagaaattggaagccaccctgccgaccaccctgggagccgccctggacacgctgcagtacgtgatcaacgtcagcatcggcacgccggcggtgacgcagaccgtcatgatcgacacgggcagcgacatctcatgggtgcactgcaagccgtgctcaccgtgccacgcccaggtggacccggtcttcgaccccagcgagtcgaccacgtactcccccttctcatgcggctcggccgcctgcgcgcagctcggcgtcgacggcggcgccgccggctgttcgggctcccagtgccagtacatcgtcaggtacctcgacggttccaacacgaccggaacctacagctccgacacg

SEQ ID NO: 22883 - DNA, 395 bp, Setaria italica
  Peptide Sequence Number=SeqID_88857
taatattctgtttcatcctatagtatgagaacgtataaagacgactagatgaggtaagctgtgaaaacttttaccaccaccaaagctggtagctggaccatggtaccaatgtaccatctgatctacccagagctggaattccaccatgctctgcgtctgctcattcaagtcaatccaggggtgtcaggctcatcagatatttatattcctcgacagcttttcagaacatgttctcctgggcggctgtcgtggctttagccgaatattccaaccactaaaattactccgcctcactcatcagctccagctcaaacatggagggaatccccctttttcctggaacaaattcaaatgccagccatggacgaccagtcgacccacctagtgccaatcgg

SEQ ID NO: 22884 - DNA, 647 bp, Setaria italica
  Peptide Sequence Number=SeqID_88858
cgcggacggacggaaccaaccagggtgctcgcaacggctgcatctgcacagcagtaatttacagggaaacagcaacatctcttgaaaagagaagataatttcccgtggaattcacggattcgaatgaaacgggaggcgactgagttgaaagctttttgcatgggaggcaggggaccaggcctgatccctgatgagcacgagcacgagcagcggcccaggcttttgatgatcgctggaggccaaaggacaccagctcgatcaactgagcgccagagcccaccatgtttgatcgcagctgcatacggatttcccatcaagtactacgtccttgtcaagtttgtcatgtattccttccttccccgcctggctggagctgtggctttctacagcgcccagcaggatcatgatccaactgtaaccaatgtgtatcaaaacaacttcagaattccactgacacaatggttcaaaaacaagaaggaacagagaactgcacttgaatttgaattcattaacatgaattaagagacaaatctacattctgaagagactcaaaacctgtgggtggtgagttgctgagtgctgacccatttgctcaagtggtgccatgcatgcccccagtgccacatgaaaataactactcgtgctgg

SEQ ID NO: 22885 - DNA, 409 bp, Setaria italica
  Peptide Sequence Number=SeqID_88859
tacctaatccatgatcccgcgactgataatttccggtgcagaccaagacgcctacgactacgagaatggcgagtcggaataaatagaatagctagcccaaagctataattacatggtggctgtaccgtgttgtaggtgcatgtgcgcgcgcgcctagatgactagatcctgggatggtgctacagaaatagtaatgactgtcggaccatcaccgccgatttaaatgctccacaacccatctaacttaaaaccggccgccggttggtattgtaactcgacgggatagcatcaccgctagactttaagacgcaccggcggtggaagtgggttgcagacctgaaaaaacagttgaatggagttaaatttgtctcgcgtccgacacctaaaccaaaaaaaaaaaaaaaaacaa

SEQ ID NO: 22886 - DNA, 250 bp, Setaria italica
  Peptide Sequence Number=SeqID_88860
gtgggggcagctcgtgctctggcaccggcagctccggcacgggcaggtgcggcgggaactccggctcctcctccttgggcgccgccgcttcctccagcgtccgcgccgcgctgctcatctgggcggcgcacgagagcagcagcgctaggaggagcgcaagggagggcacggaagttcgcgacgccatcttggaccggacggctcgtacgatctgtgggttcgagcttgggtgcgcgttagaacgcaggtg

SEQ ID NO: 22887 - DNA, 412 bp, Setaria italica
  Peptide Sequence Number=SeqID_88861
tttagttttttttttttttttggtcgtcggacgtgtccaaaggatgcatttttagttaccccttcaatcggagtgagagtgaggttccagggtaaggaaaagaatagaagaaactaaggaagcaaaaagggacaagggtaaaactttacatccctctcattcttgctcatctatctcactcgcagccaacaccacacaagtaaaaaggaccaatgcaccacggagtaatcagctttacaaaaaagggatcaatcaggaggaaaatctgcaagctactatgtgacagtctcttaccacaagaagctcctgctccattagcagtttcagcacagcctcggcaggcccctgccgccggtctggtggcaggaggcggcgccgaaggaggacttggcccttggccatcttggacatc

SEQ ID NO: 22888 - DNA, 481 bp, Setaria italica
  Peptide Sequence Number=SeqID_88862
attcaattatgaataccgttctgaacttaattaactaattgaattttaccttctttttatctccccatcttatatgggggcttatcccccatatcatatatttatatatggggtatatttgatatataaattgatttaaatggaaagccttaaaaaactcttgttttatccacattagacaaaatgaactaaaaaagaattccacattagacaaaatgaactaaaaaagaattttgaatttcagtatctttcagtatctaagtataaatactaagaaaaaacagaaagaaggattgatttgcggcaatagatgtctttcacatacaactagaaaaaaataattccccttttaaatggcagttccaaaaaaacgttcttcgatgtcaaaaaagcgtattcgtaaaaatctttggaagaaaaagacttatttttccatagtacaatcttattctttagcaaaatcaagaccattttctagcgg

SEQ ID NO: 22889 - DNA, 282 bp, Setaria italica
  Peptide Sequence Number=SeqID_88863
gggggctgtcgcggccggcgggggcgaggacgcggcggcggtggcggcgacgatggaggagtcgccgccgtcggtgcgggtgaacatctccttggggaggaggaccttggagacggcgaagacggcgacggggttctggtcgaagacggtccgcgtgatggtcgcctgcacgacgccggtgtcgatggcgacggagccattggaacgggtgatgttgagggtgaagcggccggcgttgctgaactcggtggcgagcgtgggctggacggggttcacgatcga

SEQ ID NO: 22890 - DNA, 981 bp, Setaria italica
  Peptide Sequence Number=SeqID_88864
attctagtaagctgaatatggaaatggctgaaaatattttcgatgaaatgataagcaagagctataaacccgatctctatacgtatcgtgttcttattgatgggtcatgcaaggctgcaaatgttgaccgtgcatatgcgcatctgacagaaatggtaaacaagggtttttgttccatccatggtgactttttctaacttaagtactacacttgcagtgaatcatcggatttccgaagctgtttccgttattcacatcatgctgagaataggagttgttcccgaggttgttgataccatcttaagtgctgataagaaggagatagctgcaccaaagatacttgttgaggaattgatgaagaagggtcacattagttactctacttatgaagttctccatgaaggggtcagagataacagattaactagaaaagctcgaaaggaaaagttcatctagtgtgtttacttcacatcagtaaaaaatcatgccagtaagccgaagcagcttcgatgttcctgaacataagatctgcttatgctaatagttcttgtacttctgtacttatttgctcagaatatggagtctatcgagacatttctatgtatgttttgaaggctcatggtagttcaaggcactcaatgtttgaagtcaatgttggaaggcatgcattgctcataagaagtacttgtgaaattgtgagtaattggccatgttctatgtcttgcttacaaatttcatggggagtgccctaatcccctctatcggcttatttgaatgcagtccactcgaggctgctgtgctcttctgagttctgactgagcttgtgacaagattctgtccacctctctgttgctgcttgtgcttctatatgttttctctgccatttgataaagaaggatgacaggcacctcatgtttctcaccagcagtttttcagagacacaagggctgacctggggtgatgaactaaatttccaaagga

SEQ ID NO: 22891 - DNA, 493 bp, Setaria italica
  Peptide Sequence Number=SeqID_88865
ccacggcgaaccttgtgccgccgtcggaggtcatggtgctcttgaaagggttcacgcggtaggtcccacacaggttcgtcttgtcggacccgcagtagacacattccctgcactcgccagtgaagatggggatgacgtggtctccaggaacgaggtcttccactccgtcgcccacgctctccaccaccccggctgcctcgtgaccgaagatgcgaggaaacttgcgatgcatctcggtttctcccttccaggcgctgaggtcggtgtggcagatggaggtgaagagcaccttgacgcgcacctccagccgccccggcggcgccacctccacctcctccagggagagcggctcgccagggccccacgccaccgccgctttgcatttgatgggcttcccacgggtgccggagccgccgttggccaagctgccgttgccgttggccgccgctgctgccatggtgccgtccatcggctgggttcttctgactcttct

SEQ ID NO: 22892 - DNA, 235 bp, Setaria italica
  Peptide Sequence Number=SeqID_88866
gcgaggtggaggaagaggcagaggaaggcgcaggagagcacgatggggtcggtgcagagtgtggcgagctgcatggtggccggtgggcggtggcgcgtagggaggaggaagacctgccctaagcttctccctcgcgcgcgcacggcggcttttatatatccgtgctagctgatactgctagcgtgcaagctcgatctgataggtttggttcaggttgtggctcaagatatcgatg

SEQ ID NO: 22893 - DNA, 296 bp, Setaria italica
  Peptide Sequence Number=SeqID_88867
tttttctaaacaacaagagagttttgattcctgcaagcgatgctgtccagtttttgaaaacaagtgaatttacagagttagatggatttggatcccatggccatggatggatgctacgtacgtcgtggtcaatttacagtgtgtcctgagctgcatgtgcctctacgtgtcgagctcgagagggtcgggcgacggcgaggcggccttcttgccgggcttccgtcggaacggccggcacgccttgacgctgaggtcgacggcggcggcgagcgcgacgaacatggacggaacgtaaa

SEQ ID NO: 22894 - DNA, 1813 bp, Setaria italica
  Peptide Sequence Number=SeqID_88868
agtcctatgcatatttacttgaagaaatgaagtcagcaaactgactgcactgagatacaaaagtgggagatttaagcaaaataaactcttctcttcttcagggtgtgagaaaatgttgactgactatcaaattcacacaggtcacaaaatgaatacctttgaacctactccaacagctatgatacacgcacaccaacttccaacgaacgtcgttctcagcaaaatgaaacaaaaaaaataagaaaaaaaatatatgtaacacgtccccttacagtgattcattgctgtcatcactttcttcacacaaaggtacagattggattataacccgagctccagaaggaagcctttcttcgatcttgatcaggtccttctcctcgtggaatgactctattctcgcagaggatagtttacctagtgatggatcagtcatcctattgcttgcactctttgatgaacccagtggcgaggatctagcactatattcttgtcgactagagctgttcctgacgtcagagacaggggagagtattgttccatttctcgattgcttacatgatataattctgatagtctgtgggagacacctgaaactgcctgactcaacagagctttctgtatcacttttggaatgtgcttctctataaaccctatcctcatcataagatgatgagcgtttgagtgcgctgattcctctcccagactcatcctgcttcttggtctcgaccaagctcccgctgaaacattcagactctggagctctcatcccgattgttcttgcgttacaagggattttgtcaaggtgtcgcaatgccacgggagtagagaacactggagaagggaactcaacttgtgtaaacctaggcctgtaggttgggatgatcccaaagcctcggtgttctttcacagatatagatccacaagtgataagctgcattagcaaattggctggcttgagtttcacacccatcgggccaaacatatgttcctcctctagtgttctaaagctacttctcctactggcttccgctcttatcagggactccaaggtctcaactctgccacctggcgaagcatcagaagaacatacccctggcgattctcgaacgatttcaggtccctctggcgataccaatgagctcctttcatggcattcttgaatctcagcatctgatgtaccagcctccatggacattcccgtcacacgagtatccttctcaggaacatatctctcactatcatctgtttgcgtggcagcgtcctgagctccgacgggtttgcagactctgtactccgaaggtcctggggagcttgcctctgataatggagcatttctccctgcaggttcaggggactggttgcctgatgagcctgaatgcgtagtccggcattgctcatcctcgtggttggtcgaagccgacgatgatggcagcaatgttgactgtccctgttgctgtggccgtggagtagcgggcggaggtgagatatctttgacgacggcagacggagatgatgaggaggagcatccttcttgtgaacctcgcgactgaggggactcttccttggggtgcttgaggccctcaacctttgggttgctggcaccgttctgctgccgatctggcggcggcgagcggtcaaggagctcggagcccttgaggatgtactcgttgccctgcgcggggagcacgagatcgtcctcggacaggtcgtgccacacgaagccgttcttgtagctcctcttgcaggaccaggagtacatggaggccatgcccttccccctcagcacgttgaggcggttaatcacatctcgcag

SEQ ID NO: 22895 - DNA, 362 bp, Setaria italica
  Peptide Sequence Number=SeqID_88869
cgccgcctcgagcgcgaggttcttgtgctccgccgtgcagatgtgggcggcgccgaggctgccgtacacgccagccttggggtcgccgtcgaagtggcccagacgcatgcgggtggtgaagaggttcttcacggccttgtccacgtcctgctgcgtcagctttcccttctggatcgccgacgtgacgtactgctggatgtaggggccgcagtcgatgtccaatccggccttgagcgtggcggcgacggtgtcctcggccgtggggcggtagaactgcgaggctttcatgatggccacggcgtcgcagtcggcggcgacgtagccgttgaggccccagctggacctgaaggtcttggtgagca

SEQ ID NO: 22896 - DNA, 520 bp, Setaria italica
  Peptide Sequence Number=SeqID_88870
caccgctaacattccgctgcctatatagccaaacggcctccaagccattcccctgcgtgcgagcgtctctccctgccgagcaactaaacgcaacgcaagcgcacacacgtagcgacgcgcgtggccgtggcgagagggacttgcaggccaacaagctcgagcagcctgcggctccgcgcagctcgcttctcctctgcggcgctgcgcgtgttctctgtttgggggagcggcagaatcggtgggagtgagtggatggcagcagccgggaggccgtcaagaactgcgcagtcactgccagctccgtcctccaagcttaccgccgcctgcttcttcgtcctgctcctgccattcctcctcacagagggagtggcggtagccgaggcgctgtcgatcggcgtcaactacgggcagatcgcgaacaacctcccttcccccgcgcgggtgtcgtggctgctccgttcgatgcggatcagcaaggtgaagctctacgacgcggaccccaacgtcctgcgcgcgttcc

SEQ ID NO: 22897 - DNA, 618 bp, Setaria italica
  Peptide Sequence Number=SeqID_88871
ttttttttttagtcatggaaagtggccgccgccacgaacaaactagcatagtaacacacacacacacacagcctagcatgacataacagggcatactagcaacaaagcgaggaaaaaaggaccgaagaacacgacgacacgtatgtccggaactacaaaagaatccctagatctctctaccagtacagagcaccacatggcggccaccaccagcacgagggaggaagaggcggtcagttgttgaacagtaatagcccgtgctagtgctgctaccgccgctaacaccgatggctgatcgatcaaaacccggcaggcacctgcgcaccgccgagacgggaatccgagcgccgcgctcagcggaagaggacggcggcggccaggacgagcgcggcgagggcgtggcgcccggacgcgaccggcgaggcggcgtcgttgtagtccggggcccgtgccggctcctgacgggccgtacgcgcccgtgccgccgaacggtgggctcagggtgctgctaccgggggtcgtgatccctgcgccggcgccggcgcctgctccggtgccagcaccggtccccgcgcccatgccgccggtgcctgctccggtgcccgcgcccgtcccggc

SEQ ID NO: 22898 - DNA, 926 bp, Setaria italica
  Peptide Sequence Number=SeqID_88872
gaaggtgaaccaccaaagaatgacttgctgggcatattgctggagtcaaacatgagagacacagacgagaatggccagtccagcctgggaatgacaatcgaagatgtcattgaggagtgcaaggtgttttaccttgctgggatggagacaacgtcagtgttaatgacatggacaatggtcttgctaagcatgcaccgagagtggcaagaccgtgcaagggaggaagttattggcctgttcgggaggactaaaccagaatacgagggattaagccggctcaaaacggtgaacatgatcctgtacgaggttctccgattatacccgcccgccgtcgtgttcagccggagaacctacaaggagatgaagattggaaatgtcacgtatccagctagtgcattcattgagatccctattctttttatccaccacgaccctgacatctggggaagtgacgcccacgatttcaaaccagagaggttcgctgaggggatttcgaaggcgtcgaaggacccaagtgcgttcctaccgtttggctggggacctcgcacatgcatcggtcaaaactttgcgcttcttgaggccaagatggcgttgtgcatgatccttcagcgatttgagtttgagctcgcgcaatcctatactcatgcgccacatacggtgatgacgttacgtccgatgcatggtgcacagattaagcttattagggtgatctgatacggcaatcagttacttgtttacaattacttgcaatgttacctgttgatgtaataaagctataccgtagctatgtgcattggaaataaattaatatcttagcaatggtttgtcaagtaaaaaagaaacttggtcactttgtaacatattgggccattcaagcttcagattgattcctagtaaacaaaaaaaaaaaaaaaaaaaaaactaaa

SEQ ID NO: 22899 - DNA, 836 bp, Setaria italica
  Peptide Sequence Number=SeqID_88873
gctcagtgtcttttacgaacaaattaaaacgatgtgctcatcatcgcattacagtacaacatcaaaccgaatagttttaggactcccagtgactcggtactgcacttctttcataatgatcaaacgaccacagctagcttaccagctttcatcttctaacccgtgcctgacaaggcaccttcaagatgacttgaagaagggttgcacggaagactgatatataccttcctccctttccagtttcccaatcagtatttctgtcaacctcgaggttagtcaacttgagctctgcacatgacactagcttctcgagctctgctgccctcagcataagatgtccatggcgacgcagcagcaatatacgtcaagagcgcgatgagctgactacatcttcgtccaccaattggtatgaacaaatggatggttgatacacatctctattacgcttacaaaatattaacagcaggtaatgagtgtgcgttgtcatcacctaggccctgacagctccactgcattaagtgttgtaaagctcaacccgacaaacaactctgctgttcgatgcgggcctatctcgacgtcctgatcatctgctaccttgagccactcctcccatctctccacgaggccaccaccgctttcaagcatcgtcaccacctctgacatcttaggacgttctatgggatcccgctgcgtgcagaggagcgcaatctggaccagggattccacctcaacttcgtagtagttgtttcctagatctggatcagggattaggtccagtttcttctccttaatcaaccccttgacccgaccaagcagcatggcatcttcacccttgg

SEQ ID NO: 22900 - DNA, 381 bp, Setaria italica
  Peptide Sequence Number=SeqID_88874
cgtacgcgcatcggcgagggtacctgtacaacgtgcagtacttcgtcaagtggcacggcggcgccggcggcgaggaggaggaggggcacctggggtgggtgagaggggtgcacgggttcatggcgccgtacgtgagctcggggccgagagcggcgtacgtgaacttcagggacctggacctgggaatgaatgtggagggggagacgagctacgagaaggccagggcgtggggggaggtgtacttcaggggaaacttcaggaggctggccatggtgaaggccgaggtggatcccgagcaggtgttctggagcgagcagagcatccctcccctgtttgtggagaggcagagtgagagtgggcttgtttcggacacctgatttg

SEQ ID NO: 22901 - DNA, 267 bp, Setaria italica
  Peptide Sequence Number=SeqID_88875
cgcagaattccgccgaaattgtttcacttatcggctactgatgcctatgcccccgcgtgattgaaaacgtagattagatacatttcgaatagttcacctgatggcctttggttgcacactgaatgctgatggtaaattccgcggtcctgctggacctggttaacggcttctgtcttggtttgtgttgttagatcatccctatgtagatccagtgtgaacatgccttgttgagttttgtagtactctttgcaatgaacatatctgcct

SEQ ID NO: 22902 - DNA, 686 bp, Setaria italica
  Peptide Sequence Number=SeqID_88876
tttgaagtcctgacagcatagaataactagttcagtgacaaatgattatcagagaattaaaccacacgtcttaagaatggaatatgtaccttgaattttgcaggaaaaccaagcttctggatgatgcgagcatactttctagctgcaagtttagattgttgttcactttttgtctccagtacagaccatttttccttgatgcaaatatcaatgctgtagttttcggttactacttaataccgacatgataaccgcagcaaaacgcttggggttatattctgcattccgcgcttgaagggctattgctttgaggtccaatttacattccaaattgaccgtcgacacaatattctggagtgtggggacgatgccggaggggtgcttggtcagatccaccggctggctcccctccaacgccggctccgccatccacccccaggaacgatcccccaacaacaacaacaacaacagagggtcaactcaaatcccgctcaacccggggccgattcgcgcgggaacgggaggccgttggggaggggatcccgcggaaaaaatttcgaaatccgcggtcttttatagagaagatcggggagcggaggcgggggtggatccgggctgcagccttgcgaggtctccgtcgaggagcggggaggtggtgggtaggtaggtggaggcgtgcgcggcgc

SEQ ID NO: 22903 - DNA, 1098 bp, Setaria italica
  misc_feature (1)..(40): n is a, c, g, or t
  Peptide Sequence Number=SeqID_88877
nnnnnnnnnnnnnnnnnnnnnnnnnnnnnnnnnnnnnnnnttttttagcaacagtccatgaaaaagttctattcttttagtatcgtataacatgtcagggagtacatacactgcattgccttttaatcatcagaaacattcagaaaagacatccacgaatctgcacaaccattcgaaaagccaggacaaaaacttgctttccagttttattgccatttcgtagatcatcgcaagctacaactgatttccaagaatctgcacaaccaagcgcaatccgtgacaaatacttgaaccgttaaagacatgtgtgccacatcagagctcaggagattgatgtgcagcatcatgtcctccaggcctcccagtcccaggtccagattatatatgtacacttggaagttggagctggcagccagcaataacatcctcccattctgcatttctgctttacttgcagtaagttatcattgctggacttttctgaactctgtgaggacaggataaatattttcaaaggatgtgtacgtctcatctctcaccttagctccagtcagaacaatcttgcctgaaacaaaaatcagcaggacaattttcggttgcttcattcgatatattaagccagggaagagctctggttcataacttgagaaagcaccatgagagtatgcaagaccctcaagcctgatcgggaatttgacatcacaagacccaacaatgttctgaattttgaagtccttgaattttgcaggaaaaccaagcttctggatgatgcgagcatactttctagctgcaagtttagattgttgttcactttttgctccagtacagaccatttttcctgatgcaaatatcaatgctgtagttttcggttctcttatccgcatgataaccgcagcaaaacgcttggggttatattctgcattccgcgcttgaagaagtacattgctgaaacaacatatgcagcataaaaacagaaagcatgacaatgaaatcacatatgtaagaactgaatgcgatgatgagctaatatcaagtatcccgtatcactatttcctcaaaaaagtattccatatcagtagacatgcagacatagtaaaa

SEQ ID NO: 22904 - DNA, 511 bp, Setaria italica
  Peptide Sequence Number=SeqID_88878
gttcaactaagcagcttgtttgattctattgtcagcaagcttgcttgtctcgatcaaatttcttgatgccaacaatatcttagtatgtttatagatcactctggcattcagaaagaagagaggtttgtccttccttaaaaaccttaacatggcaaagcgttcctccagtttcatctgcaaaagttatctttctttgtttccttggcacttcaggatgtgaaacagcgctcttctttgctaggctcaatattttacaaaagcgattgcagtctttgttcattatcgacaaccatttcctcgtagtcttctccacttctaatgcatcttcagaggcagctctgatctcagcaatgttagaattaggaagtagagaatatgcttctgacgacaaactttcatccactatacttttcatgtgcttcaagctccttataagttttgcagctatgttttctatatcatgcatctgtctttgagaaaactcaacagctttctcagtgtcctaagtact

SEQ ID NO: 22905 - DNA, 1353 bp, Setaria italica
  Peptide Sequence Number=SeqID_88879
caaaaatgacattggagcacgcagaatgctgtcaaacatcttcgtgaaaaatatctgagccgttttaagtccaaaaaccgtctcaagaagactcttgattacctcgagaaccattgaaaatacagctatggctacatacactccaatgaacaacgatgggtcaaatggaatactgcctgacaattcatacgatagccaatagtcgccagccaaatcagaacattgccacaccaatgcaaaggcaaacatgcccacaaccccccaccaaccccaagcctctgtcatgtatagtttgtagacttgccaacttacttgaccaatctccctttcctcttcttctataatcttagaagtagctgcctttatgtctggtgtgacaaccaccttctcaccttttccaatggatgtagagcgaagggaagggattctaacaactgcagcaggctgagaacgttcagttttctctgcttgctgactttgctccatcagctccaatgaactgtcatgagcagcaacaagagacgcaaaatctgagccagcctctagtagttcatcatactttcctgactgctcaatcataccatctctcatgacaaatatattatccacattatgcaagaaatccacttggtgtgtaacaagtatgatggtctttcccttaagtgtgccccttagacactccttaaagatatttgaaccagtatgtgcatcaacagcactgaagacatcatcaagaagatatatatcacaattttgataaactgctctggcgagctgaatacgttgtttctgtccaccactgagattgattccccgttcccctatttcagtctggtccccaaattccatcatttccaaatctttttccaggcagcaagaccgtataacctctgtatatctttcagcatacatcggttgtccaaataagatattctcttgaatggtaccattttggatccaagcagtctgtgcaacatatgcagtgctcccacataccctaaccgtgccagagatcttctccatctcccccattatgcaagaaagcagcgatgacttgccggaccctactgtcccaaccactgccacaagctcgcccctccttacctccatattgatccccttcagcacagtctccaacactggtatttcctccacatctttctgatcctcgccttcaccaccttcatcaccgtcctcaccttctttactctgcttatttcccctcatgtcccacgcaaaaatcccgtcacgcacctccacgaccagagcacctgtaccaatgccagtgccctccacgtgctccactgacgagtcatcaagctcggcatcaagcaggtatctgtcaagcctgcc

SEQ ID NO: 22906 - DNA, 196 bp, Setaria italica
  Peptide Sequence Number=SeqID_88880
aactagcaggcccgtcactccgtcagggcaaacccaggaaatctgcctgaattttagaagcatcagcggctagcctaagccctgcttgcagatagagccttggctagtcaaacgcgacggagtagtaggtgtcgtacgtgcacctcctcctggcggacatgagcctgcccagcttccgcttgcagagctcgaacct

SEQ ID NO: 22907 - DNA, 311 bp, Setaria italica
  Peptide Sequence Number=SeqID_88881
ttgcgctctgtgttgagcagactcagagacatctcccaactgggtcctccctgcagggacggtgtcgctgctgccggagagccaatcgttcctgcaggtgaatcatgggcatggtgatgatcagcttgggaaactagtatgttgcttgacaacgaaaatcctagtagtttaggagttcgtcagagaatcagactggtggttgcagggcagcagggctagaatatcagcaattgtttgcagagctaaatgcaattatccaagcgagggacatgcttggccttatataaaataaaataaaactagcatctatc

SEQ ID NO: 22908 - DNA, 735 bp, Setaria italica
  Peptide Sequence Number=SeqID_88882
aaaaaactaaggttgtggtacaaaatcataactgttaattttaattttgaagtgatagatgtctttctctgtatagtattcataaaatttccttaggtccatgtttctatgtatgattaactgaaattttcatattcttatacaacctctaaatgaaatagcttccgttatatcctactctagctttttgtaacttttggaggaggccgccactaaatagcttagcccgctatttaagacattatgagaccactctggtatttcaggttatttgtggtcccagagtagtcccaaagtgatattttaccatagtacccatgacctataatctaggttatacaatataggtggattataatctcaaacaaacaaggtctaaaatagttgaaatggaactttcaacatcgaatgatattgatgcgcgtgaatgtattctcatggaaatgttcttaatcgaatgatattttcttatgaataataatagctacatgcatttgcgtaggcatgttcgtaaaaataacgacaatttagtacatggatttgctcgagtacgttcacctgtgaatacttgtgatgacatgcagcttgggaagagcaagagggacgtggccagctcgctggagtgctatatgaaggagcatggcatggcagtggaggatgcaatggcggcacttgccgcgatggtggagcaagcggggaggaggatcaaccaggcatgtatggagttgggccgcg

SEQ ID NO: 22909 - DNA, 251 bp, Setaria italica
  Peptide Sequence Number=SeqID_88883
agcagagcagccgaggtgggggggagaggaggagagggaactgagccgcgcagcctctcctcgcctcatccgctctccacgcctccccctccccctgccattccacttgccggcattgcctgttctccactccagttcccccgctgcgcggctcgagggagggagatagggttgcacacgcccagtccagtctccaattctgccacggctgccaaggagtaggcgataggaggaatgctgctgctgtgatt

SEQ ID NO: 22910 - DNA, 339 bp, Setaria italica
  Peptide Sequence Number=SeqID_88884
gccgcggcgacgccagcgtcaggtacccggtcttgaagtcctgcatcaggtcggcggccgtcgacacgatgctcatcatcacaccgcaggcggcgagccccaccaggacgccgccgtgggacgcgccggcccacgcgccgaagatgaagatggcgagcttgccgtaggtggacgcgagggaccagtcggtgaggccggtcccgtaggcgttgcagaaggccagcaccggtgcaaagatgtaggcgaccaggatgtagtaccacttgagctgcgggaagacctgaggaagggtgccgatggagatggcggcgacggcgacgtaccctccataggcgacac

SEQ ID NO: 22911 - DNA, 547 bp, Setaria italica
  misc_feature (9)..(9): n is a, c, g, or t
  Peptide Sequence Number=SeqID_88885
gcggccttnatggtgcctgcaatggcatccggtttgaatactagtaggaagatggcatatggaccttcccgtcttcccttctcgcccttgccaagatcaagccaccaatctgcatgaagttcacacctggaagctagagaatttggaaaataatccaggaatggagaacgggagatacagtccagggatcagtggtgatttggaattgtgatgcagtaaatttctcaagccaagtttcggtgatttgcagcaatagtcgttgttttccaaaggtgtaactcgagattactagagctgacgtgttgttgtgcatgacccacggttgtgttttgaaagggtgacgattgcagtgcggctaaccattctaattgatttggttgtgctcgtactttgtaaccacgtatgtgtgcatatcctgggcgaatattatgttcgtgcactgtttgacattgtgaagtgatattacttgaaaggatttatatgcgtattagtattgacaccaaatacattacggaatatcttttggattagacttaaaaaaaaaaaa

SEQ ID NO: 22912 - DNA, 536 bp, Setaria italica
  Peptide Sequence Number=SeqID_88886
accgaccaatacaaagacccctcagctcgcgccccatggacccgccacgccactccatggtcccctccttcacggagccgcgccgcaagcgcccccgcagcgtcgccgtcccgtcctccgtggagcagctcaagaggccgtcgcggctctggagccccgccgacgagctcgtcatccttcgcggcctggccgcgtgccgagccaagcgtggcgttctccccggatccatgcatgacattgctaagttccacggccacatcgagagcgagctcagtgttcaggtaaccgtgacgcaggtcagtgacaaggtacggcgtctcaaacagaagtacaacctttttgcatcccgtgccaagaatgggagggatccagacttgcccaccccgcatgaccagagtgtctatgagcttggtaagagggtttgggggacaactgatattgctggtggaggaagtactgctggtgatgggtatgagattagtggtggtggtggtgagagcgaagaggaacgtgagattggagagagtgatgaggat

SEQ ID NO: 22913 - DNA, 262 bp, Setaria italica
  misc_feature (237)..(237): n is a, c, g, or t
  Peptide Sequence Number=SeqID_88887
gggggggggaatggtcagatgcagaggactatcagcatcatcccagtcatcagatttattttagaaactatatgaggaaccatattttttcagtgccattctctaaaaaagcaaccatatttcttaacaaaaaggggaaatcatgcgaagggaagcacagtaaatttgctggtacattgttgattgggccctaattgattccttagcgaaagtcagcatcttaaggggggggaaaanagaacaaataaagacagcaatagaa

SEQ ID NO: 22914 - DNA, 534 bp, Setaria italica
  Peptide Sequence Number=SeqID_88888
catgatggtagtcggagcactgtcctctttatatttgttgtacgctccacaagttttttggcctttcctggtgttttgggctggcctggttcttttcatgagtttgcgtatgactgctggatttatgagattgggatggagagcaggaccatggtggttttttgcaccagaaagaacctagatacaagttacattcaagaaaatgttgatcacaggagctgattagcctaatggcgagattaggatgcagaaggggacttatgaaaggcgcattatgatttcaaaatatatttacttagcattatgttgacttctgtgtatgtttccaaccattaggtagtttggaacttacagttcaagagtaaaggtacattggacaaagttcacttgtaggtctcacatagatgatgagtgttcagtattatcttttatcttctctgtgcttgaatttgaaaaatgtacatagaacattgcagacttattttagacagatctggtagattcaagcctttacagttcctattaaaaaaaaaa

SEQ ID NO: 22915 - DNA, 645 bp, Setaria italica
  Peptide Sequence Number=SeqID_88889
aggagtggtgttttgtttgttagtgctagccagccaatcaatgccctagcttttatcttcgatggacttcattacggcgtctcagacttctcatactcagctttctccatgatggtagtcggagcactgtcctctttatatttgttgtacgctccacaagtttttggccttcctggtgtttgggctggcctggttcttttcatgagtttgcgtatgactgctggatttatgagattgggatggagagcaggaccatggtggtttttgcaccagaaagaacctagatacaagttacattcaagaaaatgttgatcacaggagctgattagcctaatggcgagattaggctctcaaagagaaggtgtgtgttgagtattatgttttcaaaatatatttacttagcattatgttgacttctgtgtatgtttccaaccattaggtagttttggaacttacagttcaagagtaaaggtacattggacaaagttcacttgtaggtctcacatagatgatgagtgttcagtattatcttttatcttctctgtgcttgaatttgaaaaatgtacatagaacattgcagacttattttagacagatctggtagattcaaaccttacagtccatacaccagacaagttttgcttg

SEQ ID NO: 22916 - DNA, 1249 bp, Setaria italica
  Peptide Sequence Number=SeqID_88890
cataccctcctaagcatcacaacttcattcgtagctgaagatgtttcaaaacatgattcttcacagcctgcttcaggaaatatatctagcgagattggagaaagaaagaggctgccgtccatatcttctgctttactcctggcagctgcaattggtgtcatcgaagcctcggctttgattctggggtctggaatactcctcaacattatgggtgtctcccaagcatcttctatgcacaatccagcaaggttatttctttctgtaagagcacttggtgctcctgctgttgtagtttctttggctattcaaggtgtatttcgtggactgaaagatacaaaaacacctctactatacagtggtttgggcaacatctcagctgtggttctacttcccttttttgtgtattccctgaaacttggattaactggagctgcacttgctactattgcttcacaatatcttggtatgttcctacttctctggtctttaagcagaagagcagttctactgccaccaaaaatcgaagacctagagtttgttgggtacatcaaatctggtggcatgctgttagggagaaccctttcagttctgataacaatgacccttgggactgcaatggctgctaggcaaggtgcactagctatggccgctcatcaaatatgtctgcaagtatggctggcagtatcattactttcggatgcattggctgtttctgcacaggcgttgattgcaagttcgtttgctaaacttgactatgaaaaggtgaaggaggtcacatcctatgtattaaagacaggagtaattgttggtattgctttagcagttcttctgtctgcctcttttggtagacttgcagaagtattctcaaaagatcccatggttatacaaattgtgaggagtggtgttttgtttgttagtgctagccagccaatcaatgccctagcttttatcttcgatggacttcattacggcgtctcagacttctcatactcagctttctccatgatggtagtcggagcactgtcctctttatatttgttgtacgctccacaagtttttggccttcctggtgtttgggctggcctggttcttttcatgagtttgcgtatgactgctggatttatgagattgggatggagagcaggaccatggtggcttttgcaccagaaagaacctagatacaagtactactcacactgagtcggagaagttagaatacaacaaggaagaactaagaattaagacctaa

SEQ ID NO: 22917 - DNA, 235 bp, Setaria italica
  Peptide Sequence Number=SeqID_88891
ttccttggccttgccataccgatctatcactgatttcatgctggtgctagagtactcatagaggcggccggtgctggagaaaatcatgaggccgacctcggcgtcgcagaggatagcgagctccttggccttcttgaagatcccgttccggcgcttggagaaggtcacctgccggctcgtggagttatcaatcctgcggatcacaatctttcccctccccatctctctctctctc

SEQ ID NO: 22918 - DNA, 557 bp, Setaria italica
  Peptide Sequence Number=SeqID_88892
gtgtgagatcccggtaagctagcaactggtgtcaaaagcttcaatcttcctggggaatatctatcccttgcagccttaatcttttctaccgcctttgctaccctatcaggactgaaactgttttcagttgacaagaaatccatgaggccctttgagtcaggtgaggtccacatgaaatctggaattcctgtacaaacattaggttccttaaacaaggtccgaacttcctggtaaggccagtcttctggaacactgaatctcgtctgtttaagattttgcagaacttcttctatgcaaccatgctgccgaatgagtttcaaggctctttgtcccccaatacctttaatattctcacagtaatcgcatccactaaggatgcacaagtcaatgaattgatccatcgtgagtccaagttcttccaaaacctttgacacttcaaattctgtcacaggagatttcttataaccaaggtcagttaagtgacgaagaaaccttcgagcaccaaaagtcagtgagtccatgtcctctgaagctacagcatagacctggtgagtttc

SEQ ID NO: 22919 - DNA, 371 bp, Setaria italica
  Peptide Sequence Number=SeqID_88893
taggtacaatacaagtaaataagaacaacaatacatggttacgcgatggaatgactctagtgctggagcctgaagctactaatgatattgtagggcaaaggatggaaggagcaatcggatgcttggtcaattcatttccacttatgtatattctgaataaattgattgtgaatgtattcagcgacgcgttgagtacggattagaagtagcagcaataggaacaggaagacttcttttgatcatactgaactgtacagatcattccacgatccattgtaatgcaacttatcttcattgttcagcaactaaactgccacataggtaggtctattacaattctgcttctatttgtcttgaagcgaagaatgttt

SEQ ID NO: 22920 - DNA, 2168 bp, Setaria italica
  Peptide Sequence Number=SeqID_88894
cgatacaattcttttcttctccgccgagattgcgtccgcgcttccgcttcctccataaagtccagcacctcctcctgctgcctgccgtccacgcgacgctcctcgggcccgtcgccttccatcgacccggaaatcgacccaccctctctgacccgagccggagatagttgcggcggggttccttcttttcagaaagttccgagcccaagactccaggagccgcgcggcgcgagcgagcggagaggccctcgctgctgctgcagtctgcaggtgatacttttatagtctttgctaccttcaaacaatggttaatatgagggacaacgaatcatcatatgaagcgcaaatggaggagccattagggagggtgcggatactttcttatggttctgggcatatgcttaatgatatcacatcgtcttgttggtttacctacctgcttgtgttcttgactgaaatgggacttagtccacgcgatgctgctgttgtcatgctttctggacaattggcggatggattcacaacaatctttgtcggggaactgatggaccgttttgggcatttcaaactgtggcatgcgggaggatctattttagtggcaatttccttctcatctgttttcggtagctgtgtcccttgcaaacttatggggactaattcatctactttggagactgttggatacagcacatttgcctctatctttaatgttggttgggcagttactcaagtcgctcacatgtcaatggtgaactgcatgacatcaagtccaactagccgggtttcacttgtaagctgtcgtaatgccttcacaatggttgcaaatcttagcctgtatggcattgctttgctgatatttactctattgcattcagtgagcgtaatagttcagtaccggtggattgcttatgtgtccatttccatcggatcttgttttgttgtcatcttcttagttggaactaaggagccagggtcaattcagcaccctatggataagaacctttccagaatttcatgggcctactggttcaagagagtattatactaccaagttgctcttgtctatactctgactagattggtgaccaatgtctcacaggcatttcttgctttttatgtgatatatgatttagaaatgcctcagtcctccaaagcattggttcctgctattatttacgtctgcagtttgatagtatctgtaatattacaggagactagatggtcaagttggcgtctcaagctttacttttcagctggagcggtgctttggatattgtcaggtcttggaattgttcttctaccaagcagattgaacaacgtcatgtatgccatttcaatcgtaataggagctgccaatgcacttatgacagtgacaagtattagcatggaaggtgttttagtaggagaagatctaaacggttgtgcttttgtgtatggctcattaagttttgttgacaaaatttcatgtggaatagccctatatatactcgagtcctatcaaggaaatacccatatcacaccaaatgtagggacagcatttggctattcagttacaagacttggcttgggcttagttccagctgcctgttcactgctttcagcgatagtagcttataccatggacctccctgatactcggcgaagacctttggtggagccccttctagcatgattttgctggtggcactgctacagtttgactgtcaacatttggtcatcagtaatagacacatggttacgcgatggaatgactctagtgctggagcctgaagctactaatgatattgtagggcaaaggatggaaggagcaatcggatgcttggtcaattcatttccacttatgtatattctgaataaattgattgtgaatgtattcagcgacgcgttgagtacggattagaagtagcagcaataggaacaggaagacttcttttgatcatactgaactgtacagatcattccacgatccattgtaatgcaacttatcttcattgttcagcaactaaactgccacataggcatatattgctcattgctgagcggaaagaatgtttactctagttcttgttttataggactgtaatttcgttgtgatcgcagaatatacaatgtacatataacggatgaaacaatgtcacctatggtcatgtaaaattatttctgatatt

SEQ ID NO: 22921 - DNA, 560 bp, Setaria italica
  Peptide Sequence Number=SeqID_88895
ctgaaagcgagggaagttggctagagttctctcgtgaggagcggagaaggtgagggacggagagatggccggaggtgccattgttccgactgatggccccgccacggactacggcgggagcctgacgctctcggtgttcatgacctgccttgtggctgcctcgggtggcctgatcttcggctacgacatcggcatctctggcggcgtctcggagatggagccgttcctgcggcgcttcttcccgcacgtcctgaggcggatggcagaggccaaggggaacgagtactgcatctacgacagccagacgctgacggccttcacgtcgtcgctgtacgtggccgggctgttcgcgtcgctggtggccagccgcgtcaccaaggcgatgggccggcaggccgtcatgctcatgggcggcgcgctcttcttcgccggcggcgccatgaccggcgccgccgtcaacatcgctatgctcatcgtcggtcgcatgctgctcggcttcggcgtcgggttcaccaaccaggccgctccgctgttcctcgccgagatggccccgtcgaagg

SEQ ID NO: 22922 - DNA, 741 bp, Setaria italica
  Peptide Sequence Number=SeqID_88896
ctttccgaagggtggtcggataggttcttcggttgtcggtaggccttagctgctcaacggagacgtgcccttgcttcatcatatagctccatctatctatcatgaggtaggagaaagccagcaagatgacctcaacggtgaggaggccagtcaagagcctcacgctcttggtggttttctcatggtaggtatgaaggccaatgtagacgttcacgatgcccgtggcgcagattgtgattccaaggaaccaatggaagaagtaccaaagactcctcacctttacacctctttctggcctgaagaatccgataattggctgaagccacatgactccatacagtgccaatcctactctttggtgactgttactgaatgagttttcaaagttcatcaaggacagtaccgcaccgcctgtagcaagaaggacagctgcaacctgtgaaatgacatggcaatagaagaggagtcgaatgcatccgccattacgggatttgcttgacatcctgactagtattatccctaatggcatcaagaaaccgaacgaagtccaatggaacaatgcgtgtagcttgagctgaaatgatactttgggtgtcatctccaaaggattcccggtcttgttgtggctctgattgagagtctccatggaattcgatgcgccatcggacggcacaagaagcgaaagaatcacaaagcttgtgcgcacaaggagcagccttctcccagacgctagcatttgtg

SEQ ID NO: 22923 - DNA, 530 bp, Setaria italica
  Peptide Sequence Number=SeqID_88897
ccggcaacggccgcaagcggttgctgccccaacgtcgaggaaaattgaggttcttcaacctgccgatctccgcgggtatcgtccccgagagccggttgttgttgagccggagccggtagaggttggtgcagttgccgatctccggcggtatgaacccggagaggtcgttgtcgaggagcagcagcttggtcaggttctgcagcgcgaacagctccctcgggacgggtccggtgaagttgttgtacgagaggtccagcgactgcaagccttcgcactgggacaggctcgccggcacggggccggtgagccggttctgccacgcgtagaacagggtcaggttgcgcagccgcgggaagtcgatgccgatctcgccggagagctcgttgttgtccacctcgatgtcggtcagcgacgtgcagttggagagctccggcgggatgacgccggtgagcttgttcgtgctgagctgcagctgctgcaggttcggcagcgtgccgaagctgctcgggatgggtcccgtgagcgagttc

SEQ ID NO: 22924 - DNA, 169 bp, Setaria italica
  Peptide Sequence Number=SeqID_88898
tgaactgcagtggcgagcgctgagaacgggcaagaaaaagtttcccgggagaaaaccatccagtgtctgaaccattcagctgcgcatttgggtcgacgccagacgagcatggtaaatatggatctttcagctctgcattcgacccctcaaccctcattggggaaaaaag

SEQ ID NO: 22925 - DNA, 198 bp, Setaria italica
  Peptide Sequence Number=SeqID_88899
tggaagacggatctttcatgataaccagctgccgtggagtgcaaacctcacctgcaatatttaatcacaagcaataatttagtgaaaagatcaacatgttattttcctaggataaaagtgcataactcatttccagacacgtggcattactaaaattgtaattttacacttataagcaagtcagagaaccattatgag

SEQ ID NO: 22926 - DNA, 469 bp, Setaria italica
  Peptide Sequence Number=SeqID_88900
tgggggaaagaactacttgttgatgaggttgattcaggggacatgtactatgtatttctgggtaaagcaagatcaattcattccacacgagcaggagctgaattgaagatctgcgatgatggactcggtggagtttgtgttataacctctccttctgcagtgctcggagcttcggcatcatcattctgtccagtgggattgggattggcgttggatgcttcctgttaagagaatcccccctttctgtgaggaggaaatcattgatgaatttttatgtggaactgagaaatagtagctggagtaccatccttccactgcacttatggggtaacattatgagtacactagaccactgatagaacatttatataaatgagggagagatgaagtctttatagacaatacactattgcagaattgccttttgtgtaacttattggttatgttcttcctctgatctacttctgct

SEQ ID NO: 22927 - DNA, 923 bp, Setaria italica
  Peptide Sequence Number=SeqID_88901
agccaagtgctggatgaaagaggcgcgcgagctatcctatgacatcgaggattacattgacagatttgtgttttctggccatgttcaaaccatcggacctagatgccgccgaatcagccatattaagatcgctcgtcttgtagagacgaacaagaagctcattcgacgcaaacgggttgccgccatgatctcggatttcagaatctacacccaggaggcgattgaacggcacaagaggtatgagctcgattgttccaacttcaggcgcagatttgagcccgcggggcggcttccaacaacatacgaagagaaggccgatataatcatccattgcgggatgaccaagtttatggactcgctggataacggcagggatgagcagctcaaggtggtctcagtcgtgggatctggaggaatcggaaaaactcatttgttactgtgctgtacaaaaaactcaaaggcattttgattgtaagactttcgtccgcttgacccgaaaacctgatatcaagacaatgctgcgcgacatcctcacacaagttcagcggcagcagccccaccatgaccatggcgaggatcccgaccttattggcaaaatcagggaacatctacaacataaaaggtacacacttttaccgttgttatcacctacgtgtgtatactatttctacctatggttggtaaatccatgagaaagtattgaacacccatgccgaatttgtgtcacaaacccaaggaggctgacacacccactagaatcctaactaacagactatcctcggacctcagttctctacatgttttttagggggaaaaaaaagacaaattccaaactatgcataagcatttcttcaaaaaaaaagcataagcaccaaggcacccatcccatttttattgtagtgtttatcagcttgtatgctaag

SEQ ID NO: 22928 - DNA, 521 bp, Setaria italica
  Peptide Sequence Number=SeqID_88902
gcttatactctctgattgtaacgagttctttatatctgcagtgaacacgtgcttattgtacactgaagcccatttatcccgatcttgaaacaacttgcgaacccactcattgtttcttagattataatcctctagcatagtactccatcctagcaagaagtcctcttcttcctcatattcatacacacatttgctgaaatcctttgcaaatgtcttagaaccttggaagatgtgattgaggtgattaacagcattttggtaaacttgccatggacaatgacaatgagttgtacctggccatgctgctgttatggcagccgcagctgccattgattgatcagacaagactgtttttggctgctttccaccagtggcaaccttgaatgtgtcaaacaaccaattgaaagactccatcgattcatcataaagcaaagctgcgccaaaaatggaaatttgcttatggtgattcactccaaggaacagcattaatggccttccatgtgaatttatcttgtaagttg

SEQ ID NO: 22929 - DNA, 1238 bp, Setaria italica
  Peptide Sequence Number=SeqID_88903
aaaatattacatggtacatttctgcagcggaagtgattgagtagttgttctttcctctttacaaagatacaaacgcacgcatgctcataacttattatttttaccatccagaagtcaagggaagtttcattccttataacatcaaacaaacttcctactgcaaaaacataatgataccaaggtccaactaacagcgtctaaagtttctagaaaactagctggattctacatttctgatgctacacaaacatacattatataatttacaagagaaaagatattttaaaactgatcaattggaccagttgggacaaagctcagttccatttttgcatcaaaaacctgctccattgttaaggtgaaaatccccgatgaactcttgcggctgcatcccaactaaaggggtataaccctgatttccttgtgaatctccatgaagaccttgctggtggaagctagatacagaggaatcatggttaggctgattatttgtttgcatgtgttggtgatctataaatggccccagaccatttaaagaagagcttggagtttgtgaagatccatcattaagaaattcttgatttcctgtatttgcagactttgcgtccttcttccatcttcccaagaaatattttgtggtaactcttttttatttctgaagtcaagaaccttcaacacatgacagcactgaatacccattgattcaaactttttacagctgcaaacaacagagaaatcactggattcaaacttgacatagtgctccccaggtttatccgttactgctactctatagtctgatgcagtcccagcctcgccacaactataaatcactgaatccacaaacatctcaaactctctgcgaaaaatttcaaagaccactggtgtgtacatgctagcagcttgccttagcattttggatggaggtattctcggaaaactttggcttgcatgaaaatcagcttgtagctcggcatatcgatgctcatccagtactttttcaaaatgcttgaagaaagatgacaaatcaaactgtggactcaagatattttttcaagacactgcttatactctctgattgtaacgagttctttatatctgcagtgaacacgtgcttattgtacactgaagcccatttatcccgatcttgaaacaacttgcgaacccactcattgtttcttagattataatacctactaagactaaattaaagttaaacttaacctaaattaacctaa

SEQ ID NO: 22930 - DNA, 735 bp, Setaria italica
  Peptide Sequence Number=SeqID_88904
atggccggcgcgcccgtcggaggccccggcgcgcctcgacatgctcccgatgccgtccctcatctcctttagctgccccacaatgctcttgagagacattgcagcttacggcaagttcctttcgccttcgccgaaagaaacagctagtgctccatggcaagatccgccataactagcgaatctaacccacaaaaattgcaggggacagctcataaagtagttgacatcactcccgcatctaccccccaactaaaaaagcttgactttcttcaacagatttgaagcacgggactcccaagaacagctcaagaagcccaaattttgggcgggtttgtggagatggcgagcaaagatcccacctttcttcgtgcggcggctcggatctggaaggaggccgcaatgcagcaacagggagccggaaaaattgagccccctcttcacttcgatatccccaggatctattttcttcagctccgcagctcgaaagaccaaaactctccgctcaagaacagatcaaggagccccacttgcgcatctgcgaaccgtttccatgggattttcccagctcctgctccttctccccaggagctccagatcctcttgcctccctctatacgctgtggattttggcttccaccttccaggctctatccctctccgctctccagtgccgctcccccctctctctcctcactgcagctcttgtgaattagttgtcgtacttgtagttcggta

SEQ ID NO: 22931 - DNA, 119 bp, Setaria italica
  Peptide Sequence Number=SeqID_88905
taggaagagtaagtgtttgctattagtttcaaagtttccgtgcagatatgtatggtacattgcatatggcttgtaattatactgttggtttatgcaggtcactaactatccattcacat

SEQ ID NO: 22932 - DNA, 462 bp, Setaria italica
  Peptide Sequence Number=SeqID_88906
ggcgggcatgtggatgctgagcagctcgtggaaggtggccaccgtgttgttctcgttgatgccattggtcgtgccgccatcgccaacgtagtgcttcgcgcatgccgcgacattgcgctgcccggagacggaaggagctccaaggcgtccgttcgccggaatctctccttggaagcctgatatgatggatgtcatctgctggacgagcttggggtcctcgctgaagctctcatagcatcggccccaccttgggtctctacacaccgcaatacatggcgcgaagacatatgggattccagtggccctgacctcaagagcaaccgctgctccaatcttctgcactagctctggatctctggtgcaaccaaggccgatattgtgggggaagatagtggccctgtagacgttgttgtggccgtggacggcgtcgatgaccgtagagcatggggatcccgaggcgcg

SEQ ID NO: 22933 - DNA, 278 bp, Setaria italica
  Peptide Sequence Number=SeqID_88907
ggcggcggcggagaggtaggcgcgcgacgcgagcgcggcgaggtccgtgattgagtaggacatgggcggcgccggcgcggaggcgtcgaagggcggctcccacgcgcggcgctcgtcgcccgcggtggcgtcggcatctggcgctgcggcggaggggtacatggctcggaggctgcgggcgaggcggcggaggcggcggcgcggggagaagggcatgcgccggcgttgacaggccgctgaccgggcgaaggcctgttccgctccgcgaccggtcagtt

SEQ ID NO: 22934 - DNA, 317 bp, Setaria italica
  Peptide Sequence Number=SeqID_88908
atgatttctttttgactatattatggccattactattctgtttcttttcagatctcatataatctacttggatagccataataagctattatccatctctgctctccaggtccagtaaaaatggtaaaggcaagggtggtgcagaggctgggactgccccaaccactgaacagctgcatgctgttgttagcagcattttgaaggaagttgacttcaacacagtaagcaaacgataatgttttgaacctggtccattgtttctgttgctatgtatcctgactgattatgcttttgtgtaggcaactctggctgatatt

SEQ ID NO: 22935 - DNA, 223 bp, Setaria italica
  misc_feature (150)..(223): n is a, c, g, or t
  Peptide Sequence Number=SeqID_88909
tcactgcacatccgatgcacatccgatccacggcatcacttctcttcatcaggatcacccttgtaaaactctgtatccttctgaattgctcctgttttttgcagttcttaattccctcatgatcgtgaggttttagccccaaaaaaaaannnnnnnnnnnnnnnnnnnnnnnnnnnnnnnnnnnnnnnnnnnnnnnnnnnnnnnnnnnnnnnnnnnnnnnnnn

SEQ ID NO: 22936 - DNA, 462 bp, Setaria italica
  Peptide Sequence Number=SeqID_88910
tttcatccatcacattccagacaggacaagtaacaaattgtacactaaatccttgtcctggatatccacacttaatttagctaagctatcaaccatcacgagtaaaatctgatgtgcttcagttataactgctggtactggagcattggaaatgatatgcccaaaagctcggtacagtgccaattttgttgtcattgacgttgcttccttgattttagagaggaagatcggcatcatgattgagaagaaacgctgcttatataatggctttattcttgcatgaaattttttatttaggcagacttctgaatcactcatcattacatggaatgcaccagctgcggatgttgcaatagaagtatttgatgaatcattgacataagattcttcctcgtgggatggaatagtagccaaagtctcatctgagcattagacactttaagtctagtaaactattcgtaa

SEQ ID NO: 22937 - DNA, 834 bp, Setaria italica
  Peptide Sequence Number=SeqID_88911
aagcaagttatgaaattggaactgctgggttcaactatatgttaagggttgctagatcacttgaaggagctgttgtcaccaatatttctaagactaatggaggaatggaatgcactgaacatgtagcccatttatttgagtgctactccggtcaggtccttccttggttgtttacttctggtggtatcaatgaacttgcattgagctttgcgatgcatcttttggatgagatcaaggacttaactatgttagatagaattggttcacagggcctccttgactcactaatggcaggaatgaagcttttagttggagtctgtacagtggagcaacaaacacggattgttcagaaagcatatagcatggtatcatcagtgatcccactgccgttgaaatcaatgacatatcatcttttgtctgcagatgagttagttccttcacacactgttcaagaaacagctctggttggcatgctttcatcggttatagttggccttcggcctcaaacacctgcaccagatatgtggatgatgatcaacctctttacagtctttctactgaatgggaaactgccagctgcttatgcattagcttctgttttcaataagtatctacacaatccagagttctcacacgagaatcaactggataaaatacttgatggtattcttgagaggtgtttctcaactgtattagccagcaaccactcaaagataccccactcttctgttgacacctcaaatgatgctaatttcttagacgtgttgtctggaaatgtactttctaagatcgatatcttgtctggcttagcctggattggcaaaggattactta

SEQ ID NO: 22938 - DNA, 534 bp, Setaria italica
  Peptide Sequence Number=SeqID_88912
cagactgcaatccagagaacagggctagtccaagacagctgtttaactgggctctggaaccggcggaagatgaaattctcgacaagttatatgagcttgggtacagggatgcagctgtatgggctgagcagaattctactgagttgacttcgaagaatgatcaacctcttgtcgttgattgaatcaagagaatcaaatacctttagttctatacttgatatattgtaaagatggcactgcctgtctatgaagaatgaaggtggcaatgtactgcattgggttccatggatttgttagggagaagcaaatgaaaaggcaccccagtcattaggtgtgtcaatgatactggaggcaagttggtattagggtttacaaactgatcagcataatcaaatgtatatattgtaggcaacgaggtataacctgagaacttgttctgtaatggcacaggggagtgatgtttgcgccttgtgaacagacaactccagcaaaaacaactttcaaaactccacttgttatgtaatgttgtattct

SEQ ID NO: 22939 - DNA, 442 bp, Setaria italica
  Peptide Sequence Number=SeqID_88913
gcaccctttaaccttagctggtaatacatggactgtgtagaggtgcctctgaatgtgttattttatttttgccgttgtgtggttcatatctagcagaccatgttggtgtcctaaccagagcacatcactctgaattttcagtagcctgaagataattcaccttcctagtaacattgtgagcaaggagcagaggaacccaactgaatcactgtagtacagcgataatttcttctaatgtcagtagctgaaaaaatggcagttatgttctgaaccgacaagacgcaagtggatattcattcagaaatcgttactgcagaaacataagcaaggaaaccaggagagcattctcaccgatagatgaagatgtcactgccatagccaagttgcttgttgcatgcgtggcaagagctcatgaagccactcgccacagccgcaaagccgc

SEQ ID NO: 22940 - DNA, 1839 bp, Setaria italica
  misc_feature (1)..(72): n is a, c, g, or t
  Peptide Sequence Number=SeqID_88914
nnnnnnnnnnnnnnnnnnnnnnnnnnnnnnnnnnnnnnnnnnnnnnnnnnnnnnnnnnnnnnnnnnnnnnnnggggttttttcgttaacttttcttcaattactttggatccactctgggagtcacatgaacaaacacagaactagaatgggagtatcagaacttgcaactaaaacgggaaagtcgcatgaacaagaagtccagatcatcaatctgcaacctcttacaaaagtgggcgccaaaggtctttaatccgcaaaagactaaatcattccctcctccatgaccaaaaacagcatgcaatctcgcaaagatgacacaacaaaaggaagaaaaagaagcaaaaaaacttgtctcagttattcaggatcatcatgccttctcctccactaacatcctcttttcgttcatcgtctagcgcaaattgtccactgtttcgtcgaaaagcatctcctggtaccggcactcgctgctgcagaatgctttgtcacctcgatagatgaagatgtcactgccatagccaagttgcttgttgcatgcgtggcaagagctcatgaagccactcgccacagccgcaaagccgccatcgccagcgccggcccctttgtccatcttctcgacgagcacatccccgcagctctcgactatgcagtcgtcgaagatgtgcatggtcctcgggttggggccccgcgagatgacgcaggtgtagtcttctgacatggccatttccccgggcgccacggccccggcgaacacccgagcggacggcgagctgaccacctccggcaggaacctcctggcgggcgacagcaccgccagctgcgcgtcccggttcttggcgccgaactcgatcggggaggacaccagctcgacggccctgccggaggggacctggatcctgagctgagacccgaacaccaccttgccgccgcccggcttggcgtccccgtgatcccggagcacgtcggcgaggccgacgccggccggctccggcgcggcggcgggcgtgtccgcgtggtgcgctcgcctgaggctccgctccgacaggaacgggggcagcgcggagcagcagaactgcttggtctcgaggatggaggtggggctcatggccgacgagggcccctcggaggagccgtccgcctggggcagcgccatcgccatgaacggcctcggggcagggaacaccggggcagctgacgacgaagaagaaggatgcctcggcgactgggcggcggtggccgtggccgcgggggctcagccatgagcccacctgctcctccttgcttggccccgccaccaaccgctcctctcgatctgctgcgcagcatcgcagaaagcggccctccttggttggatcaaactccggtagtgatggccggccgctcctaccacggccgcattgctccccggcctcggattcgatcggaacccaaacttccacccgctatttcctcttcccagcaacgcgcaagaacagaagccggccggcgacaggctctgatcagcgaatgggaaaggaaggtccctaacaagaacgaagaaggaagagcacacaggtatcgatcaacgaaaccaccctgagtgacggaacccaaaaacctcgccggaaaccgccgtccggatcggaaaacccccggaaaggcgtctgctcgatttctgcggttcttgggtggtggggtggggtttgccggtttgggtatttatacggctgggaggctagactttgatttcacgactaatctttcctttcccccggggtaaatggggagaactgttctcgaggagggaggagggggtttcttcttcctccttccacctctcgctctctctgtttcccag

SEQ ID NO: 22941 - DNA, 306 bp, Setaria italica
  Peptide Sequence Number=SeqID_88915
cggtcccccaaacgtaggaaccaatcttcgcccggccggaaagattctaacggaactccactagagcgagagcagagcagcgccctgccgaaggccttgaactgcctcgcggcagcggcggcaggcggcgcgccgcccggcgctcggctgcgctgcgcagggagccaagacaagctctggactctcagagacgccccgcgcgcccggaggcgggagtggcaggacgctcttggccgccctctcgtagcgccagcatcgaggggagcggtgatcgccgccgcggcgaggatttcggcggcggcggcg

SEQ ID NO: 22942 - DNA, 509 bp, Setaria italica
  misc_feature (492)..(509): n is a, c, g, or t
  Peptide Sequence Number=SeqID_88916
gacgaagactgcttcgatgacctgtgcgaggagatgagcaggatgaccgtggtcgatgaagaggagaggaaggcagggctgccacagttcgaggggaggcacacccggttcatctacaacagcgacgacgagatcgagcgggaggaggtagcggatgcagctgaggcgagggcggagctcggcgcgctgatgctcagggacctgccggtgccggaaggcaggcacctgcgcttccaggaggacgaggaggatgaggagtgaagcgtgtcagttgtgttcggattcgggtatctgcagtggttgtcattccctgacaccagccaaacattcttttgggggttcttctctgtttctacattctgattctgtattttgattcgtgtctcagttcttcggagaacacaaattaaattgtattgccaattcaactcttctgaaatgcaagtataggccccagttactgaataaatatctgttctatgtacaaaacgnnnnnnnnnnnnnnnnnn

SEQ ID NO: 22943 - DNA, 322 bp, Setaria italica
  Peptide Sequence Number=SeqID_88917
gcgggcattgttttggtccttgccacctctgcgagtagatccgctgctatagaataaggatcagtttcaccatctctcgaattaaaaacctgcagcctctcgagggttgatgtgatgagaggattgaaaccatccattgtgaaattacaaccacatagtagtagtctggtaagagatgtcagatttgagaacagagccatagacagagtgcttggctcattccaaagatcgagttcctcgacctgaggagggaaaagattgatgctcttagctgcttgcagcatggaccaccgggacaatagcatgttgcaatcgtctatgg

SEQ ID NO: 22944 - DNA, 552 bp, Setaria italica
  Peptide Sequence Number=SeqID_88918
actgcgacgacacagcggccgctgtggttagaggcgatggggagatccttagccaagtggtgtcttcccaagcagatttgcttgcaaggtatgggggtgttgctcctaagatggccgaggaagctcatgctcttgtgattgaccaggttgttcaaaaggccctcgatgatgcaaaattgtcgggaagtgatctttctgctgtcgctgttacagttggaccaggactgagtctatgccttagagttggtgttcacaaagctagacaagtagcaaaatcatttggcttgcctattgttggagttcatcatagggaggcacacgcattagtttccaggctagtgaacaaggaccttgatttcccatttttggctcttctaatttcaggaggacacaatctccttgttcttgctcatagccttgggcaatatgttcaactggggactactatagatgatgcgattggtgaggcgtatgacaaatctgcaagatggttgggccttgatatgcggaaagggcgggggtcctgctcttgtcttgcttgctctagatggt

SEQ ID NO: 22945 - DNA, 1209 bp, Setaria italica
  misc_feature (1193)..(1209): n is a, c, g, or t
  Peptide Sequence Number=SeqID_88919
aagaacaaaaagggacgtagtaactacaatgcagaactacctcaacataagtcccttaagaatttatgctaatttggcagaaaaactagtgtgatgagaagaaatatccttgtttcctgaattctttcatattgttttaaggtatctaacaagttaatctgttcaggaggacacaatctccttgttcttgctcatagccttgggcaatatgttcaactggggactactatagatgatgcgattggtgaggcgtatgacaaatctgcaagatggttgggccttgatatgcggaaaggcgggggtcctgctcttgaagagcttgctctagatggtgacccgaatgctgttaactttagagtcccaatgcgacaacataaagattgcaatttttcttatgctggtctgaagactcaagtcagattggcaattgaatctaagaatttatgcacagatgatattcccatttcatctgcatcagaggaagacagacaaacaagggcggacattgctgcctcttttcagcgagttgctgtgttacatttggaagaaagatgccaacgagcagttgaatgggcattgaagattgaaccttcgatcaaatactttgttgtttcaggaggtgtcgcatcaaacaagtatgttaggactcgcctgaatcaagttgctgagaataacggcctacaactcgtaactcctcctccaagcctttgtactgacaatggcgtcatgatcgcttggactgggattgagcactttgttgcaggaagatttgaggacccacctgctgctgatgagcctgatgatatgcagtatgagctgcggccaagatggcctcttggtgaagaatattcggaaggaagaagtgttgcacgatcgctgaagactgctcgggtccatccgtcactaacgtcaatgatacagggctctcttcaaaagtagttcagttggaaccaatcattggtctcagctgctttgtgccgtggagtcccccttcgtcttcagttttgggttcacgattcatcatagctgaccattatttgtattcgctgaactgcagctgcaaaggagctgaactggtttagttgtatataagaggcagtacaccgatccagtgcaattaaaaatataaacatattattgcatcatttttttctactgtatataaaaattgcttctggaacaaaaaaaaaaannnnnnnnnnnnnnnnn

SEQ ID NO: 22946 - DNA, 179 bp, Setaria italica
  Peptide Sequence Number=SeqID_88920
cgggagtcgggtgggagggaaggaggagagaccgagagagtcgcgggcaacgcgaacgaactggtccaccgcctcctcgtcttatgagggcgccatgggcagcgtggctgcctgctctgtgcctctgtatctctccccctctctgtcaagtctcacctgcctcgcgcatgcagggaggg

SEQ ID NO: 22947 - DNA, 698 bp, Setaria italica
  Peptide Sequence Number=SeqID_88921
atggcatgttcagaggcgctgctgaacttcaggctctcttgtgacataaccttcttttccggtcgaggcacacgtcctggaagccgtttggcagacgctgtgatggtgtcagggaagttcaccttggctttcttgccgcgtatgcgtcgggctgccacgttgtatgctcttgcggcctcctcagcggtgttgtaggtgccaagccagactcggacgcccttgcatgggtctctgatttcagctgcccatttgccccaagggcgccgccggatcccccggtactgggtctttcgcttcctgcgggcgactttggcagtatggtcgttgaatttcatgaaaatggaactgtttatttgaaaatctttttcctcatgtccaaaatccacctcctccacgctactgcaatcctcgaaatcctcaaaatcagcctcaaagtcgtcgtcatcggcttcatcaaactcccaagaactccttttctggttctttccactccttctgctaccactctctgcccataggtcaccagcagtgaccgtgcgcctcactggtgaatagagatcactgagaatggcccctccacacatggcgttagttttacccaaggatctgacaatggagatgggggatacaggggtgggtggtagcttttgctaatggcttagtgctgttaagtttgtgcttgcatatttgtgctgcaa

SEQ ID NO: 22948 - DNA, 450 bp, Setaria italica
  Peptide Sequence Number=SeqID_88922
ttccagcagcttcttggccttttcgttgaagcaaccgacaacagccgacatctcattcagaagagatggaaagaaactcccatcgcacacagagcaatgcccggggcagcggtcggcggcggcgggggagccagcggcggcaccgtcatgggagcggcatttcttgagcatcttcttgaggcgcttgagccccacggcggggagctccgcctccatccccttcatgtacgtcgcgtacttcttggcaaacttcatgtgaaacttggtggttggctggggctctggctgagcaagggatgagacgcgagtaggaggtggcgggatcagaggagtctcgtaggatcaacggggagcggatgggattgctgcggatgcttcggatatgatggagctcgagcagaatgcatgccaagatagggtcgaggaaaagggaggtcgcccacgggctcg

SEQ ID NO: 22949 - DNA, 316 bp, Setaria italica
  Peptide Sequence Number=SeqID_88923
tcgagttgtatatgtcaatagcatagtgcatccttccatctctacctgacttttgtggcaaccagatagtaggttctggcctcctgcctgagtgcctgaatgctgggctggtgatcatgacgtcacaaatcacagctgctgatatactggaatggtcatgtctgcaggatctttcccttgtactccctctgttccaaattataagtcgttttgccttttttaaattcataagttttctaggcgtatagtaaaaattatgaactttaggatgcaaaaaaacacttataatttgggacagagggaatacagtttatct

SEQ ID NO: 22950 - DNA, 774 bp, Setaria italica
  Peptide Sequence Number=SeqID_88924
cttttattgcatacagtttttacttggcagcgacaacaaaacgacaaggcaagatcaccaaattccagatggctgcaacctgcaagcgcactgaatctgtgaatcatggacaaagcaccaccaagatctagtctttaccgacgtcttccacagcagcagcagcgccggcggccggatcatcatcagtaggcgcatctcggggatctgcatcctgacacttaccttcatcgttcattgcaggcgcgatggccactgcatctgtctcttcttccacaacagcagcaggcgcatctctggcatccgcatcctgacattgttcatcgtcttccacccaaaactcaacggggggcaccaccacgtccttgtagctgcagacgtagggcgcgtcgctgccgtggtacgtgccggtccacctcccctcgtcgatgtcgctggcgtcccacacggaggcgtagaggcgcatcggcttctccggccacggctccccctcgcggcgctcctccctccggatcagctcgccgtcgacgcgccactcgatggccttggcgtcccaggcgatggcgtagtggtggaagccgtcggaggggtcgaaggggagccggtggatctgctccctgccgccgccgcctccgacgtggtagttggtctggagggcgcgcttgtcgttgccgaggaactcgaagtcgatctcgtccatctccctgcagccctcgagggaggagaggtagaggttgtagttgagccccgaggcgtcccccgcgggggcgcggatgg

SEQ ID NO: 22951 - DNA, 1008 bp, Setaria italica
  Peptide Sequence Number=SeqID_88925
tttgttttttttttttttttttagttcgtcctcaactacgattagcattggaaatctgtgggtgcttaaaccaactcatatagccgtctccgttacattccattgtacaagcccttagatgagacgtgggccgcaacgaaaatgtcgagaccggcgcatgaatccagggaaaatctcgcaccaatccgcccttttcagctctggatttcaaggatcaacggtgctttgctccctggcaaaggccgccgatgttcttaggagtatattgttacacaaagaggcgtaatcgagtggagggcttgactcttgacctccaccatgtccatgtaggtagatgcagctaagaagaggagaccggacgagcccgcctcctcagctcttcaaaggcgtgcatcgcttcacagtcgagccctccagcaaactggtggaccctgtagatgaagcgcacgctctgcgcgaccagagcagcctcgttcccagccgtatccctgccatccagttccttgaggaccctcttcgtgtacatcttcgccaggttcaccgatgccaacctcatctttgcagcaacccctgaatcaagcatccagtaagtcgggatcctcagctccttgtaggacggcatcgccgagctcctcagattcaccagcctgctcatgctcttctccaatttgtctagcaacatggagatcttcctgagagtggcgtcgcagggtgaagggctgccagcgtcgtcgttcaaggaagagatgtctgttagaaggcacttcagatgccggtattcggatgctgcttcccggagcgcatcggctttcctctctggccagttgaagtgcttcaagacgggtctcgctccactaagagtagaaagttgttgatccagccagtccacaaaggtaagcacttgctccacgtcggtgtaggtgctagtgtggattttctgatgagatcttcaatgagctctgcttttgttcgactatctgctttgatcgctaacaggtgccgtggacg

SEQ ID NO: 22952 - DNA, 244 bp, Setaria italica
  Peptide Sequence Number=SeqID_88926
gagtgggaggtgcggctggcgatcgccgtcggcgtcgccgagggcctcgcgtacctccaccacgactgcgtgccgggcattatccaccgcgacgtcaaggccgagaacatccttctcggggagcgctacgaggcgtgcctcgccgacttcggcctggccaggttcgccgacgagggcgccaactcgtcgccgccgccgttcgccggatcctacggctacatcgctccggagtacgggtgcatga

SEQ ID NO: 22953 - DNA, 632 bp, Setaria italica
  Peptide Sequence Number=SeqID_88927
ctccatctttcacctcacaagctctcacaagtcacatcacctcctcttgacaccaccagttcaccacttgatcgatcaagctttttcgtctccgtggccatgtcgaacgctagcaccgagaagcaagcccaagcgacgtcggcggcggcggcggcccagagccagaggcccccggcggtgtccgcggagatgcagaaggtgttctcccgcttcgacgcggacggggacggccggatctccccctcggagctcgccgcggtcaaccgcgccatctccccgccgccgacctcgtcgcacgggggccgggaggtggcggccatgatggacgagctcgacacggaccgcgacggctacgtggacctgggcgagttcgcggcgttccacgcgcgcgcctgcgcccgcggggacgacggcgagctcgaggccgagctccgcgccgccttcgacgtctacgacgtcaacggggacggccgcatcaccgccgccgagctcggcagggtgctcgcgcagatcggggaggggtgcagcgccgaggagtgcgagcggatgatcgccggcgtcgacgtcgacggcgacggatgcgtcgggttcgaggagttcaagaagatgatggcgcccaaaggcggcgcccg

SEQ ID NO: 22954 - DNA, 811 bp, Setaria italica
  Peptide Sequence Number=SeqID_88928
gagcgggctcgggatgcttccgggaagccacctcttggtggacgacgcggcggcggcggcggcggccgggttgagccgcacggcctgcatccgctcggacgaccccgcagggagctcccacgcggccgcctccgccatgtcgcggcttgtgtcggcgtcgcagatcgggcaggtgccccagagcggcgacgaggaggcggacttggaccgcggcggcgcgacggcgaacacgaactgcgcccacccgttctccgccgcctccgtcaccagccgcgggtggtccgcccactggaacgggccctgctgcgcgccgccggggccccggtgcctcacgtcgacgcggtggtggtgttggtgcagctgctggaaccggagccccacgcgggcgctggctgtgctgtacctcatgttgagcttcgccagcccagggctcgccgttggctccacaccagccgcgggggcaacttccgggagctccggcggcgcgttgcggggcgagctccgccgcctgtacacaaggaacgcgaccgcgaccagcgccgcgatggggagcccgacggcgagcagcagcctgagccacagcaccgccatgacgcgcgcacgtccctgccgccgccactcactgggggtatcgtcgcaggtgcgccgacggagaggtggacatggacatggtcacgatgctcttggggggtgcggctgcgcggccggttgattcttttctgcgtgctgttgttgttgcgttcttggagcggttggtttggtggagggtctcggggaggccggcgcgggcacggaacgcggaccggctcaa

SEQ ID NO: 22955 - DNA, 711 bp, Setaria italica
  Peptide Sequence Number=SeqID_88929
caccgctggtctgggtggcgcgggtacgggtgctgccgatgtcgccgagggacggggtacacgcgtctcgcctgttgctccaacccagccagggagcgagagcgagagagagagcagggcgaggacgctcaccacgaccgcggctgaaccgctgatgacgcctccgcatcgacaaatcttcgggtatgtaccatgcagcgttgctcttctgaattgtatccttgtacagctaactgtatttcattttctcgatccaactaggcacataaagtgaaacgtgaatttggataatctgttatgcatattgcgtgtaacaagtttgactctgggagttgaggttgctgagagacagagacttcagcgtctttgacggcgagctaatttgagtattgtgagaattatttttcttattctgatttgggcattggtagcttatttttatgaggttttgctttgacaggagagctgtttagagcacttggtgcgtttcctcgcagttttgtgataggcacttttttagtggatcctttcatgcttttccaatgccaactttagacttattatatctttgtatgtcacaaattttttatcttcctcttttgggtgtttgggtggaccttttgatagttgtgtgcataatgtgctatctggcttttatttttcatccctgtatgatatcaacttttaatttgaagcaagtgtgcttgtcga

SEQ ID NO: 22956 - DNA, 513 bp, Setaria italica
  Peptide Sequence Number=SeqID_88930
cagcccgcgccggcgagcgacgccgtggcggcggcgctggacgacgtgttcctgccagacctcgtcggcggcggcgagcagctgttcccgtacggcgacttcttcggcgggctgcaggacagggcggccttggagctctcggcgtgctacttccccaacatggccgagatgtggggcgccgccgccgcctccgacgccaagccgcagggcctctgcaacaccttgacataggagaggccggggaaagcccgtacggctcgtgggattgttgcgcgagaacttcaaaattgctccattgattctctggcgatttgaaagtttgatcggccgcgcgaagctagataggatcgttcttgctctatcttcccactcccctgcttctgttctcatgtctctctttctttttccgcgtggatatggatcgtggccggtattttgatgtgtattacctgtaaattagtatgaccgagatgtgaattatgaatttttcgaaatacgttaaaaaaaaaaaaa

SEQ ID NO: 22957 - DNA, 449 bp, Setaria italica
  Peptide Sequence Number=SeqID_88931
gctacgtctacctcgacatcgggtggatcacgcgcaggctacccgccgccgacttccagtccatccactcctgcgaggcctccaaccgctgccgcctctcctccgcgctcgccgtcgccgccaaatggttccaggacttctttgcccaattttaggggatggggaaggcccagcattgcatgagtttctcagccttcgacaccttgagaggattgtttgagccgtggacaagtgcgctgccgtttgttaagatctctacaagcaatgcagctagccaagctgctgtctcatttgtacatttgttgacgtttgattgccacgtgatcttgtggactctgtatcggctgctttcatcaactttgttggtgttccacacttgaaaacaggaggcaaatatgaaggtgcctgtttacgcatttgttaggaatctttaagcagtaccgcgaaaa

SEQ ID NO: 22958 - DNA, 473 bp, Setaria italica
  Peptide Sequence Number=SeqID_88932
ggatcgatgttccctagagcaatgcctttggcaatatcttgcggtaaccatgggcccaaaaattccaagtcttcagtgaggtcgtgaggcacgcttgacaaatgaataatatcttctgtagcaggatcatagaccctttggaacttaaatgcccagattgccttcttgaagttctcttcatattgaggtggaacagaaacaacactgtacctcaggtgcttgatcaccttctcatgacacttaagcttttggatgagtgcatgagctcgtttcacacccattcctggcaatgaggggagatagtcacaaccacttagaatacacatctcgagtagcatttgccttgtgaatccattgaagtcaagctctctatttcgctgtaatcgtgtaatctgaaattcaactccttgcccaaatttgtccattttgaaaataattctggaacaaccaaatggtatcaaatctgaatcctc

SEQ ID NO: 22959 - DNA, 475 bp, Setaria italica
  Peptide Sequence Number=SeqID_88933
cttttttatatgatttcctccaccaatcagcaaagctcttttcattccttcttggtactatactctctaggccaagaagagctagcagattataccaccattgatgagcaaaaacacagttggtaagaatgtgccacaccatctcttcctcttgatcacacaaaacacactgatcagggtgtgggagtcctctccttgctaacctgtctgcagtccagcacttgttccaaatagccagccataaaaacattttgcacttaggaggagcccaagatttccagagcctgcgccaaggttcaaaggttatggcaccattgaagaaggccctgtaagtggatttggaggaaaaaactccattcctctcatgtctccatatatgtttatcagtgtcctggaccaaggtgaaatactctaataaatcccagatttgaagatattggaccagcccttccaaacagaggcttccttgtatgtc

SEQ ID NO: 22960 - DNA, 303 bp, Setaria italica
  Peptide Sequence Number=SeqID_88934
acgtgttagatttcaagcgcaagggaaaagtccacaagtgatgggaacaatcatccagaataaccaagtaatatttaaactcggaaatgctgacgacttgagacgtccacaagtcacaatgtataagatcaaagttgtgaacaacacgcgaagtggaggcatgaaaaggaagccgaacatgacggctaactgacacgcaagacacaatgaggggctagtatctttattacaaatgggaagcatggaggcaagcttggatagggccttatgaccgggatgaccaaggcactggtgccacagcga

SEQ ID NO: 22961 - DNA, 631 bp, Setaria italica
  Peptide Sequence Number=SeqID_88935
tctgtgagcatgtcgctgcaccagacgagcctgtgcttcgtgtgcagccaccttgcctcgggggagaaggaaggggacgagctcaggaggaactcagatgtcgtcgagatcctcaagaacacgcagttccgacggctctgtaagagatcaggccgcaggattccggagagaatccttgaccatgatcgtgtgatctggctcggtgatctgaactatcgaatcggcctgagctactcggaggccaagaagctcgtcgaggcaaacgactggggtgctctcttcgagaaggatcagctcaagactgaaagggagggtggagttttcagagggtggaacgagggcaagattttctttgctcccacatacaagtactcatggaattccgacaactatgctggtgaagacgtcacgtcgaagaagaagcgaagaactccagcatggtgtgaccggattctctggtatggtgaagggatagtgcaactgtcctacgtccgtggggagtcgaaattttcagaccatcgtcccgtctgcagtgtgttcattgtcgaggttgcggttcccaacaacaaactcatcaagtttgcatcaggtcccaacatgaaagttggcgtggaagaactcctatttgccc

SEQ ID NO: 22962 - DNA, 569 bp, Setaria italica
  Peptide Sequence Number=SeqID_88936
cgccaataaattaagcatgtcaatttttttttcctcctcgtatgtactggtagcgaatttacatttgcatgtcaatgcctccaccccttttcttcttcctttttgtatacaatcatctccgatctgtgtaaaatggaatccaaagcccaaaagaattgaaccaaagaatggggaaaattgtacaggcccccctctacgtcctatctatttacacctcagacgccgccgacgtcaccggcgctgccggcgtcggcccccgttccggctcctgccgcgccatccggtgcagcttggcgaacatgccgaccatgggcgcggtgttgtacgtgcacgcctccgtctgcatgtagttctccctgttgtccctgaacctgtcccggcggtccggcccgccgacgatggcgccgacgagcacgttggggttggagctccggcggccgaaccagtggtcgaacccctgcgtgcagccgatgaactccttgctgtgcttgtacggcacgatggaggcggcgcggtggtgcacccggttggggtacttggggccgtacccgaccaggtagctgacgccc

SEQ ID NO: 22963 - DNA, 615 bp, Setaria italica
  Peptide Sequence Number=SeqID_88937
ttttttttttttcttaataagaaagagtttgctatattattggagcaacaagatgtatttacaaatgttacgacaattgttcttaccattcaactcccaagaacaaacagctaaatcctgaaaaatctcataccatacaagtactgctattggcgtgcaatcaatgagtgaggtttctcacttctgtgaaacaatggaattgcatccaacacctaccacaaatccaccttgttcacatttgcatcaggccacccagctgtgctgttgagatggaacggcgcctcgccctccgccgctcgtactcagggtcatcagtgggcagctcgtaccggcacaccgggcacgagttccgtatggcaagccacggcccaatgcaggctccatggtagaaatgcgcgcacggcagccgcgtggcgagctccccctgcgcgatcccgtccttgcacacggcgcacccctgcgcagcctcctcccctcggacggccaccacctggagccgctccaccgccgcgcgcgccgccggcggggctccacccaccgccgcgtccgccaggtgccccggcagcacctcgaactcgtcctcatccagcggcaccgggagcagctcccagcccg

SEQ ID NO: 22964 - DNA, 2130 bp, Setaria italica
  Peptide Sequence Number=SeqID_88938
ggattgattctttttctccaaatgaagcttctagaaaagcattaatgctgtgctacagcaatcgtgcagctactcggatgtctctgggtaagatgagagaggccctatctgattgtcgagaagctattgttatcgattccagctttctcaaggcacaagtcagagctgccaactgcctacttgccctgggggatgtggaagaagcacaaaaggcttttgagatgtgtttgaagtctagtcatctatcaagcttggaccataaaattttagaagaggcttcggacggtctacaaaaagctcagaaaatatctggttttattcatcagtccaaggagtaccttatgaagaaggcatttgacaagatacctagtgccttacaaatgatctctgatgctttatccataagtatttattcagataacttgatggcgatgaaagcagaagcactgttactgttgcagcgatatgaagaagtaatccagttttgcgaagaaactctttatgtagcagaaaacaatagcctgtgtttgtgtcctgagaagcattcagaaagcaatagcttggacaataatacttgctttgtgaagttgtggcgctatcatcttattgctaagtcgtatttcttccttggaaagcttgaagaggctcacctgttcttaaaaaagtatgaccaaataaaagtcatggaatgcaggtgtgggaagcaatctcaggaatctatttcatcattctccatggcaatatctgaactactgcagcttaaagctgctgggaatgaagcatttcaatctggtaaatatttggaggctgtggaacattacactgctgctttgctgagcaatagcgagtcactacgctttttagcagtctgcttttgtaaccgtgcagcggcgtatcaagcaatgggtcaaattttagatgcaattgcagattgctcactagccatagcccttgatgcagattatgctaaggctatttccagaagatctagtttgtacgaactcataagggactatgagcaggcagaaaatgatcttcgtaggttaattactcttcttgagaaacaactgcaagaaaatatgtccatgccatcagagaaggtagagagtatccgtagcaatctgaatcgagccaatcttcggttttcttctctggaacgggatgccagaaagggggccccattaaatgtgtatatgatattaggaatcgaaccttcttcctctaccgtggatataaagaaggcataccgcaaagcagcactaaggcatcatccagacaaagccggtaaatttcttgtgagaagtgaaaatatcagtgatgcaatatggagagaaatcacaaatgaaatccgcagagatgctgattatttattcaaaataattggaaaggcatattctatgctttcagaccctacaatgaggagggagtgatggagcctgggaagtggagtgatagtgcaagcagtgcatatatgactggaatagccagagtaatgaaaaaatgatgataggacctcttagtgagagcattggatcatcaggtggcacggcaaaggtcgtatcatactggagatgccctacatgaacttttgtgcgctctcacaaaggacaggatgccactggccttgttcatgcctcatcattaatgtcagttctggtgtgtctcaggattgcactttgcagaccgtatcagtaccattacccctatgaagttcttggtgttaatgcctcaccagtcatcactgatgtcagttttggtgttcattgggttctggtgtggagagcgcagagtacatgaggcaagcttttgtttgtaaaggtgttgttcatatatctgatgttgtgcatagtgtcttggagcagtttggtttttggaatggaatcaacaagactggaatactgtaaatagaggcatacgttttctgtaccctgcccccgtagtgtggcggaagcatgcggagggtgacagaagcaaatggtttttctaaatgttgtttgtagtttacagttttgtataggaaaaggcaggatttgtgtatcccttttcttttggtcttccatacaattttttctgttatgttttttttggggtctggctgttgttctgaaccgaggttaattgattcttttg

SEQ ID NO: 22965 - DNA, 396 bp, Setaria italica
  misc_feature (93)..(93): n is a, c, g, or t
  Peptide Sequence Number=SeqID_88939
cacatgtttggtgtgctcctcttttgtttcctttgagtgaattagggttcatgctttggggatgagtttactttattggcaccttcgcatgcngtttccttgcttttctttttgttcatgctacaaggtgcaatcggaatcacgagactttacatctcatgataacacatttcatagggtgggatatatgtatttccaataccagggcccatcagttcattatagggtgccaaactctaggacctttttcgcattttaaatcgtgtagaaaagttggagatcttgtgcttttatgtggttctagaattgaatgtttcattgattctatgagttctaatatcaatcctatttttgttgcaaagagcaatgccacaagttctagaaccaaagcttaaa

SEQ ID NO: 22966 - DNA, 482 bp, Setaria italica
  Peptide Sequence Number=SeqID_88940
aatagaactaggtagactaccgacggcgacgatgccggcggcgggctgctgtgcttgttctgcagctcgcggttcgacgccgatagctccctcttcgcgcactgctccgcggagcaccgcttcgatttccacaggattgtgaaggagctgcgtctggatttctacgggtgtatcaggctcatcaacttcgtccgctccaaggttgcagagaataaatgctggagttgtggccaagcattctcttccaacactgaactctgcagccatttgcacgcactggagaattacctaattgagggaaaggttccatgggaggacgatgtgtacttgaaacctttcatggaggatgattcccttttgcacagtctgttcatggatgacgatgaggaggatgaggaatgtggaacatccatggaaagaggacagtgttctgcaggtgacagggttttagctgaaccactggggaacaagctgagcacctt

SEQ ID NO: 22967 - DNA, 269 bp, Setaria italica
  Peptide Sequence Number=SeqID_88941
attggtggatgaggccgaaagtgtaagcactgcagcagttgcatactcctgcaaattcagatcacttgattgcaagtaaccaagcaggggctcaagtgctccagcatccactatctttgttttattcctctcgtccctgacggcgaggttgagcagcgcgaggagcgcagcctccccggcctcggtgggcgccgccccggcgcggagcatggcgacgagcggctcgaccgccgcggccagcttgcggcggtgcctggcggaggccctgg

SEQ ID NO: 22968 - DNA, 790 bp, Setaria italica
  Peptide Sequence Number=SeqID_88942
ttcaccatctcagcaagcatcttcttcgccttgccgccacggtcttcaccatctatttgggaggcaatgttggtcactatgttctcgagcgtgtctggctgcagctttgatcttgaatacggggagttccgcagcaagtcaagaagaacatgagccttcattcgagacttgggtgtgccatgtactgtgagctcgagaagaccaggaatcgccccctcatttagaatgaggtctctgtatttactgcggtcgctctcgcacattgttaggagtgctccaacagcatgctctctgccctgaagggagccttcctcaagtacctccactatggtcagcactccgccttcctcagatgtcaaggccactcggcattgatcaaatgcaagcaacgactcaagaagagcacagcatttgtcggctgtttttgaggacctcttgccacccttcagtagctctatcaaagggggaatcggttggacagcaaggatggcttgaaggttgtctgtgattgtggagaggttgtacagagccatcacggcgtcattcttggcttgtggattcccttctttaaggactttcacaagtagaggaattgctcctgaagaacttatgataggcttattggtggatgaggccgaaagtgtaagcactgcagcagttgcatactcctgcaaattcagatcacttgattgcaagtaaccaagcaggggctcaagtgctccagtaacttagtaggaattaccattcctctcgtccctgacggcgaggttgagcagcgcgaggagcgcag

SEQ ID NO: 22969 - DNA, 284 bp, Setaria italica
  Peptide Sequence Number=SeqID_88943
gtccgcgtccatccaccgcccgtgggaagggaagggaagggaagagcagcgagcgtcgcaggcatcggctccgcctccgccccgcccgccgccgccgccgcctcaccggcccccctcctcctcatcccccgatccaatccccgatcgccgaccctcgcatcgcctcgccgcgcggcaatatttggaacccttgtcaccgatcgcctcatgccgtaccactgaccgatcccgcccccggccccccacctccgccgccgccgttcgctcagtcgcctccgcctttt

SEQ ID NO: 22970 - DNA, 509 bp, Setaria italica
  Peptide Sequence Number=SeqID_88944
acaataggtagacttactaggaagaaagggttaattgtaagaatgcaagggattaccatttggttgtgtcattcttgggcaaggctggcaaggtgagggaggcatatgatgtgctcaaggaggtgaaaagaaagagactagatcctgatgttttgtcgtataatgctctgatggaagcactatgtagaaatgaccttcttaggccagccaagaagttgtgggatgagatgttcaccagtgggtgtagcccaaatctgcatacatacaatatactcattacaaagtttacagaaatgggtgaaagtgaagaggttcaacagctgtttgatcatatgttccagaaaggagtggctccagatggtgcaacttacacttccttcatcactatgttgtgccagaaaaataaatatgaacaggccctggagatatttaggagatctttgatgcaggatgctgaagtggctagttcagtgttgagtatgtttatccctgcactctgcaaactaagg

SEQ ID NO: 22971 - DNA, 2483 bp, Setaria italica
  Peptide Sequence Number=SeqID_88945
cgtcagatacagacctgaagatatgggatataaagaaaaaaggatgcattcacacatataagggtcacagaggagcaattaaaaaaatcaggtttactcctgatggacgatgggttgtcacgggaggggaagatagcattgtgaaggtgtgggatctgacagctggaaagcttctacatgatttcaagtttcacagcggacaaattaactgcattgattttcatcctcaagaatttttgcttgcaacaggctcagctgatcggacagtgaaattttgggacctcgaaacttttgaattgataggttctgctggacccgagggtactggagtacgttctatggtcttccacccagatggtaaaacccttttctgtggattggaccaaagcttgaaggtattctcttgggaaccagtaagatgccatgacgttgttgacatggggtggagcaatttggctgaccttagtatttatgaagggaaactcttgggatgctcctaccatgaacgccgtgttggtctatgggctgctgatatatcactcattggaccctatgctcttggtgtgttgcccaaagcaaatttctttgctgagctagtgcagtctatggatgataatcctgtgaaaccaattgatagcaccgcaaattctagtcctgctttagcaatgacgcaaccaaaaaattcatacaaagtcaaggaggctgggagtgctgaaagcagggttcgtggctcacatttaactccagcaagtacagataagatcaagaaagataggagcagtattccacgaagacctgattcatcttttagatcatctattcagagttctaatccaatgaggcgtatgaagcttgctgatagtcctttcaccaacccaaaaacatcagatcgtaattttggacagaaagatatttcattagcatctcgtacaagaatacccaataattcttctactactaagaaaggcaatcttacagagtcagcatcggtgaaagatatttacactacgccgcaggctgtttctgcacctgttgttgtacccagagacattttagaggacaaagcagtaagcagtgttcgtagaggaactggaggcacaactgcagccccagatgctgtccgggttcctgttcacagaagaaaaccttcacttagtggcactgctgctgatagtgatagctcagtaggatccacaatcactgatcctgacgtttgctcagagggtttgtcaagcttaaaattctcctttggactatctccatattataaaaaagaagaaaacagtgaggtggatagagaagatattgcacatatagcaaaagagatggatagaacagtattgctggagcatcctctgcagtcaaatgatgataagtcctttgaatcaccatgctcaacaacagagacagccagggttaagtacgtcagaggagttgctgtgccactggggaaaacaaagtctcttgttgagagatgggaaaagagggagtcttctagcaatgattattcaccacaaactgattcttgtggcgatcgggcattgaaaaatgacagccctccagcccattcagcagaaccaagtgagacatatgaaaaggatttgtcaacagtggatgaagtaatgactcctgtcaatttagtgctgaaccatgatgaattcataaatgctgtaaaacttcggctgacaaaactggagatgatgcggcatgtctttgagcaaagtggtatcaaaggagcaattgctgcagtgggaaagctgcctgacaatgctgttcaagctgatgttgttagtgctctcaaagggaagcttgatcttttcaacctggagattttctcaagctttctacctattcttgccgggttattgtgtagcaagactgaaaggcatgctactgtttctttggaaatgttgttggatcttataaagatttttggaccagttatacactcaacattatcagcaaattcgggcgtaggagttgaccttcaggctgagcagaggttgcaacgttgcacacgatgctttaaccatttgcaaaagattcaacaagttctgcatccgttgataatgcggggtggtcaatcagcacaactcgctcaagagctaagtctctcgttgcaagacttggtggtgatctaaaacaagtcgggtgaagttcatcccatacggcagagtagatacaattctttttggcgagaagtacccacggttgtgtagcttgtaattttgccatagctttgcaagtgggtcctgcgattgtgttttgacttgggctggcattcggcctttgttccctgttgtatatgtagcctggctgtgcatcagtctgtaattagccacatttgctgtatgcgcagccctgaacagagagtcagagattagtggaaacaggaaaggaaacaattagtaggggaaaaaacagtttcttgcggcctttggcggtatggcccatatatcatgcgatgattgtttcctttcctg

SEQ ID NO: 22972 - DNA, 801 bp, Setaria italica
  Peptide Sequence Number=SeqID_88946
aatatttgtttgataggtaccaagtggatcaaccaagttatgatgatagattgagatacttcaatatattgtttgagtcattactctctttccaaactgaggaatcaagaaacaagtcgaagaaacagaaatccgctattgatcttcccaaagctccaaaggaagtggagggcccaaagatttcagagctaaaggctaaggcagaagctgagcagcatgctgttcgtcgaatgaggatgtgcctccgagatatctgtaaccggtctgcagtgtactcctttatgcagcttagttatttattgtcaccaattaataactatagaggcagttaaaagtttgttatgatatttccaaatcattaaacctgctttctaaagtttgataaaaaaggggattctgttatttgagagggctttttaaaaatattttcctttctcttttcattgaatattcaatgttttttttgcagatagctcgttttttatcttctattgcataagcattgttgcactagtagcttgtcacagtattgttgattttgtttctaaaacctgatagaactaatggtgtggctgcttgtcttttcagcattttatacaacaaaaggttcaatgtgtttcacttcccagtatcagaagaggaggtacctgactatcgatcagtaatacacaagcccatggatatggctactgtcttgcagcgggtggactctggacaataccttaccagagcagcctttatgaaggatattgatcttattgtcttgaatgcaaagcttataatggggacactacaatggat

SEQ ID NO: 22973 - DNA, 2628 bp, Setaria italica
  Peptide Sequence Number=SeqID_88947
ctttcctttgtctgtatcctagattttttgtcaaactatcacattactcctcctagaggagttctgctttgtggccggccaggtacaggaaaaacattgattgcccgtgccttagcttgtgctgcctctaaagccggccagaaggtcagtttttatatgcgcaaaggggctgatgttcttagtaaatgggtgggagaggctgaaaggcagctcaagttactttttgaggaagctcaaaagaatcagccgtccattatattttttgatgaaattgatggcctggcacctgtgaggtctagcaagcaggagcagattcacaattcaattgtttcgacattgcttgctttgatggatggtcttgattcacgtgggcaagttgtcttgattggagcaactaacagaattgatgccattgatggagcattgcgtcgacctggccgatttgatcgtgagttctattttcctttacctggctacgaggctcgagccgaaatactggatattcatacaaggaaatggaaggatcctccaccaaaggaactaaagatggagcttgctgctagctgtgtgggctattgtggagctgatttgaaagcattgtgtactgaagcagctattagagcatttagagagaagtatcctcaggtctacactagtgacgacaagtttgtcattgatgttgattcggtcagtgttgagaagtaccactttttggaagctatgtctacaataactccagctgcgcataggggatccattgtgcattcaaggccactttcatcagttatcgctccctgcctgaagaggcatcttgataaaataatggaacggatttctgatattttcccttttctttcatccgtagatgttagcaagttctctgccctttcttatggatcttccatccctcttgtttatagacctcgccttttgatatgtggtggtgagagtgttggactggatcatgtgggaccagctgttttgcatgagcttgagaagttttccgttcactcattgggactgccttctcttctctctgatccaagtgcaaagacacctgaagaagctcttgtgcatatttttggggaagccaagagaacaaccccatccattctctacctacctcagttccatctttggtgggatacggcacatgaacagctcagggctgtgttattgactctattgaatgagttgccatccaaccttccagttttgttgctaggaacatcatcagtggctttcaccgacctcgaagaagagtgtgcttccatattcacttctcgcaatgtgtaccaagtggatcaaccaagttatgatgatagattgagatacttcaatatattgtttgagtcattactctctttccaaactgaggaatcaagaaacaagtcgaagaaacagaaatccgctattgatcttcccaaagctccaaaggaagtggagggcccaaagatttcagagctaaaggctaaggcagaagctgagcagcatgctgttcgtcgaatgaggatgtgcctccgagatatctgtaaccgcattttatacaacaaaaggttcaatgtgtttcacttcccagtatcagaagaggaggtacctgactatcgatcagtaatacacaagcccatggatatggctactgtcttgcagcgggtggactctggacaataccttaccagagcagcctttatgaaggatattgatcttattgtcttgaatgcaaagacttataatggggacgactacaatggatctaggattgtcagtagagcatgtgaactccgagatgtggtgcaaggtatgttgtcgcagatggacccatctttggtgtccttctgtgataaaattgcttcacaggggggaccactgcaggttgtggatgatgaagatagctctattcttcaagcagcacctgttgctcagctcgtttctggtactagaataagtgcaaggcttcgcaatgtacagccagaagtaaacctgtcacaaagttatgaagtgctaaagcggcaaaagaaaagctcagaaaatgatcagggcatgactaaagatgcggctgcaagagatgaaaggtctccagaagatgtagatttatcaaaaccaatttccccagaagaagctccaaaagaaccagattcaaatggcactctgaaagaaaccgacaattcaccagctgaagcaccagaagtacctgctcctcctgaacccatggagactgacagcagtgaagttgccaccaccttgactactggtgatgacttactcgggcagctagaagccctaaagcaacgcttcatggagctcacggcaggctatggcgtgccacagctcgagaggctgtattcccggataatgaaaggcgcgatagagttgacaagtaaagaaagcaatgaagatcatagggggttagttgttagatatttgttgacatttgttgagaacagcgacaatttttaactccgcgtaataagattcttgttttccatgtgtacattctctttggaacgaaaaatagtggatcatcttgggagatatccccgttccatgccctgtaacaaaaatgtgccaaatgctcaagtgtcagtgacacaattttgcaatgaatgatgtagcaagtgcacattttgt

SEQ ID NO: 22974 - DNA, 144 bp, Setaria italica
  Peptide Sequence Number=SeqID_88948
ctggttaaaaactgcatcatcataagcaggttcatgctgtctggactgcatgaacctgcaccatccaacccaagcaaaccaaacccacccagttaaaactggtcagctaaaggttagttttgtaaaccacaccaaacagcctta

SEQ ID NO: 22975 - DNA, 489 bp, Setaria italica
  Peptide Sequence Number=SeqID_88949
ctattagctcctttccttctctcaagcatgtggaaatgaaaggccagagagttgcagaaagcaaagtgcagaacttctcccagttagtaacatccacaacatgttctggtgggctacctagcacgcttgaatagggttgccgcaggaaacccccttctgaaggtttccctggctgtgcaactggaggtttttgagcaacaacctccttaagtagtttgcacatgacaaaaaacaggtgatggaaagtatgaaaatctgccaaaactgatctcgttcccaccagttgaactgcatatcttagacccagaaaaacagcagagagtgaagatgcactcgagcacaaaaattgaagcccagaagtcagaccccgtgcttgggatacatgttccaagatagccctcccaacttgccgcacatcatcattattatcaactagcaccaatatcaagtctttctcccatcattggttcccaagtccattgcttttgg

SEQ ID NO: 22976 - DNA, 1225 bp, Setaria italica
  Peptide Sequence Number=SeqID_88950
cccgccgccgcctttctccaagtcgccgggctccctgctgctgctctccaagtcgctcaccctctactgctgagctgagctgagcacccccggcggttgctgtcgctcggctcatgggcggcgtggcctcgtcggcgagagggggacggggaggtgacggcacggtgctgggggacttgccggagagctgcgtcgcggaggtgctgctcaggctggacccgccggagatctgccggatggcgcggctcagccgcacgttccgaggggccgcgtccggggacggcgtctgggagtccaagctgccgaggaactacgctcgcctcctggccgctgccgcggccggcgttggaggagagcggcaggccgccgccgccacggcgcttgaggcggagacgctgcccaagaaggatgtgtacgcgcggctgtgccgccggaaccgcttcgatggcggcaaaaaggagttctggctggacaagggtggtggaggtgtctgcatgtcaatctcgtcaatggcactttcaataacgggcattgaagataggagatattggaatttcattcccaatgatgaatcaagatttcacacggttgcttatctctcacaaatttggtggttcgaagtcagaggggaggttgaattctgcttcccagaaggtacttatagccttttctaccgtgttcatctaggccgaccattcaagcggcttggaagacgggtttatagctcagagcacatccatggctgggacataaagccagtgcgcttccaaatgtcaacttccgatggacagcaagctcaatccaagtgctattttactgatccgggtgtctggatcaatcaccatgttggggactttgttgtgaaggactcgaacaaaccgacaaacatccggtttgcgatgattcaaattgactgcacgcacacgaaaggaggcctctgcgtggattcagtggtggtgaaaccgcagtacctcacgcagcaaaaagcacctcggcgttttgtgtagatctgtcaaacaagtggtattgatacacttagagatatgcatatgctccatagtttttgttctttatacagaagtgtggttgcatttacacaaaattttccagtcctgtaatgtaactgaaggggcaggtgatttttggttcctcttgtccctcatgctacacatatgtaaattgtacccttttgaactttgaaatgtatatctggtgttatttcttg

SEQ ID NO: 22977 - DNA, 507 bp, Setaria italica
  Peptide Sequence Number=SeqID_88951
gggtgagtggacggcggccgctgctggcgcgacgacgtgcggctgggccggcgacgaggatagcttgcggcggcggagcgtgccggactgctcgcgctgcctgcgcgccgcgaggacgtgccagtggttcttgacggcgttgtcggtgcggccggggaagaggcgggcgatgagcgcccacttgttgccgtaggcgcggtgcgccgccagaagccgctcctcctcctcctccgagaaggcccggcggttgatgcgcggtccagctggttgaaccaccgcagccggcagctcttcctgctcctgccgtcgagcttctcggcgatgaggttccagttctgggggccgtgctgcgccacgagctccttgagcttggcgtcctcggcgggccgccagtggcccctcgcgcagagcttcccctgcccacggccgcagctaatctcctctgggtcctctacatggccgtggtacaccttcctccgtaaacgtacggtcctttgttctttcttt

SEQ ID NO: 22978 - DNA, 449 bp, Setaria italica
  Peptide Sequence Number=SeqID_88952
ttttctatgccaatcagaaaactgttgttcactgcaatacaagttcttgaattttctactgaaaaagtgaccctcacctttatgttctaagtcttaacaaatgggagaatgggcaataatcaaatatacttacccttggtttctgctagattgtagggcatgtgtagatttaggttctcaatgtacctagaactattatttggaacaaggacacgtacgtcctgctatccatgtgcattattcttcacttaacgcagtggcatgttccctgcaaccttattgttcatgatgtgctgattataaatgctataccatctctttttcctgaattggctcgtaagtcataacttacagttaatgtttaagtcttcatctttggttcaaaatattacatatttaactgattctgtgaataagaattttcatcatttgagcataaaacgacaaag

SEQ ID NO: 22979 - DNA, 1293 bp, Setaria italica
  misc_feature (1273)..(1273): n is a, c, g, or t
  misc_feature (1283)..(1293): n is a, c, g, or t
  Peptide Sequence Number=SeqID_88953
gattcgtccgtcctggacttcctcccgctcgtctacttcggctccctcttcgacgtcaagcagcagggcgacttcgtcgccacgatggtcgcgcgcacgcacgagcgcaactgctgcatcacctatgactacgtcacggatgatgcggcggacctgctcgcggagaccgatctggacgcagtttctgcccttgcatccctcgccgcgtcgcgcccagcttctgcggctggagtctcccaccgtgacgccctccaggcttgcgcccatcacgcccgcctctggctccgccgtgcggatgagcccatccaccctgactccaccgtcacatatgctggggtgagggaaaagctggagaagatcatgtcattggactactacacagcacagccagatataagggcggcagaggctgtggctgctgcagtggggaattatggagcaggaggcgttcaggcccaggagagcatggttgtgtcacctcaggcttcagaagaagcagaggagagcctggctgttgaaggacataagggtgagaaggaagaacctcaggctacagaaatctacattgaccatcaggctcctgcagttgatgctcaacatgtggatgatgatgcgctggtgaacccaactgatgaagccccttcagctgaggcagagcaggagaggtttgatgctgatgtggaggatcaggaacaaaaagaccaacagttcatccagcggcggtcttaccagaaccagcgtggtggtggtcgtggtggcaggaggggctaccctaatggtcgtggaggacgtggaggccgaggtggtgggtaccagaatggccgtggtggaggtggtgggtaccagaatggcggcggcggcggcgggtactactacgaacaaggatactacccgccaaggaactacagcaacaacaacagaggccgtggtggtcgcgctgggggtggcaactcttactacaacaaccacggtggaagtgggcagggaggtggccatgggagggttgagctgggtgctaacgcctagctcgctgactgttttgcttgagtgagggagggggagccattttgttattatagaactaacttagcctggtattacgagtcaccgttgggccccatctgtgagttattttgctacaccaatgactgcatatggttggtaggtaatcgttcttggtgggtcggtaatgcggaagtactctgggaaagtagtttgaggtcatattcttaagttacctcttcatgtgttcatatgcccttaaaaaaaaaanaaaaaaaaannnnnnnnnnn

SEQ ID NO: 22980 - DNA, 2369 bp, Setaria italica
  misc_feature (2299)..(2369): n is a, c, g, or t
  Peptide Sequence Number=SeqID_88954
taacggtaacggtacggcggcggcggctactcggccggcgggtgggggaagtccctcccggcgatcctccaagtcgctgctgcctgcacagtcgagctcaaatggcaaaagaacaggatggatcctccaagctccgccacccagaattccaaaggatgcgtgtaactctcaccataggcgtcataggcctctgtgttacatcatacattcttggtgcttggcaaggcacctccaacagcatcaagccatccttcataagcaccaaaacccgatgtcatgatctggcacgatcctctggtgctcgcctggatttccaagcccaccaccaggtcgtcttcaacgaatcgtcgcttgtgctggaaaaattcccatcttgccagctcaagtacagcgagtataccccttgccaggacccgaggagggcaaggaagttcccgaagaaaatgatgcagtacagggagaggcactgccctaagaaagaggacctgctccggtgcttgattcctgcacctcaaggctataagaatcccttcgagtggccgaaaagtcgggactatgcttggtacaataacattcctcatcgggagctcagtatcgagaaggcagttcagaattggattcaagttgagggagacctgcttagattccctggaggtggcaccatgttcccacatggtgccgatgcttatattgatgacataaatgctcttataccattaaatgatggcaacatccgaactgcacttgatactggatgtggggttgcaagttggggtgcctatcttatgaagaggaacatcatcaccatgtcatttgcaccaagggattcacatgaggcacaggtgcagtttgcattggagcgtggggtaccatccatgattggagtgatggggactgaaagaatcccatatcctgctagagcatttgacatggcgcactgctctagatgtttgatcccatggaataagcttgacggtgtctatctaattgaagtagacagagttcttagaccagggggctactggatcctctctgggcctccaatccattggaagagacactttaaggggtgggagaggacagaagaagacctgaagcaagagcaagatgagatcgaggacttagcgaaacgtctctgctggaagaaggttgtagagaaaggtgatctttctatatggcagaaacctaccaaccatattgaatgtgttgatagtaggaaggtctatgacactccaaagatttgtaagggcaatgatgtggattctgcttggtacaagaagatggaaacttgcatatctcctcttccagatgtgaagagtgaagatgaagttgctggtggagctcttgagcaatggccgaaaagagcatctgctgttcctccaagaatatctcgaggtacagttccaggcctcactcctgagaagttccaagaggatagcaagttgtggtcagagagagtggatcactacaagaaattgattccaccactgggcaaaaggcgatacaggaatgtgatggacatgaatgcagggatggggggttttgcagctgcattgatgaagtacccactatgggtgatgaatgtcgtgccttcaggttctcctcgtgataccctcggtgttatttacgagcgagggtttattggcacgtaccaggactggtgtgaggctttctcaacgtaccctaggacatatgacctcatccacgctgataacgttttcagcagttatcaggataggtgtgacataacatacatcctcctggagatggaccgaattctaaggcctgaagggactgtgatcatcagggacacagttgaggtgctggggaaggtacaagctattgccgaaggcatgaggtggaagagccaaatcatggatcatgaatccggtccgttcaaccccgagaagatccttgtggcagtcaagacttactggactggaaagcccgctcaaaagcaataactccaggcttggtacttctttatcagcaaaatttttgacatgacttgcctgcaccgccatcacgctttcggttcagtcttggttgccgattttctcctagtttcagggtatctgtatatagaaggcaatgtgaggtatgtagttgggataggtgccgaacatcttcattagctgcgttgagtgtttgtaacactttgcaatggtgtataagatgatgtttactcatattttgatgtgctattgcatcaaataagccaatgctgatgtgaaacaaggagattgtaactgacaatatgttcctgttaaaaagtaggataacaagaatttaaacggtnnnnnnnnnnnnnnnnnnnnnnnnnnnnnnnnnnnnnnnnnnnnnnnnnnnnnnnnnnnnnnnnnnnnnnn

SEQ ID NO: 22981 - DNA, 1012 bp, Setaria italica
  Peptide Sequence Number=SeqID_88955
atatattccgaaagcaacatacatattagacaaaggaaaggaaggcactatcaactatagccactaaccaacagaagcatcatatcacatctgtgctgaaagccatatatcaagaaaaaaaaactcactatcaattactcattacgcagtcaccaacagaaagaattaaaaaaaagcatactctcatatgcctagcttcaagctctccaagtaccttctgccttctagctttgcagcaaaatagcccttggtgaactcaacactatctaacaccttgtagtgcgcctcgtccgtcttcaacagctcctgaagcgggccaatggtgcagccaaggtggacgctatggaatgttgcaatcgtaatcctttccttgacagggtttattactgccctgtgctcaatactcttgtacttaccattggtgaggatctcaagaacatcccctatgttgacgacaagagctccaggtatagccttcacgggaaaccatttgccatccttcctgatttgtagtccttctacatcatttacttgtaggaggaatgtcatgccaacaccatccgtatgcggcgacagacctaaaaccttgtcagcttgactgcagggagggtaatagttgatcctcatgctctgaggcagacctttgaaggtgccaaggagtgcctcatggttaactccaaggttgttggccataaacttgaacaattgtgcagatacatttgccagccccagtgagtacctatccagtgtgtccctgaatgtggaaggctttgtaggccagaaggccagactcctttcctcaacaggccgtgtggcaaggaacaacaaatctacccaatccagcttctgttccttggagaaaacaaagtggtggccaaacccttgtatgccatttggtggaattgccactgccaacttttcctccagtggaaggttgaagaactctgtgatgtcagccttaatttgctgtagcaattctccattgaacccatggttcactagctgtgagtct

SEQ ID NO: 22982 - DNA, 587 bp, Setaria italica
  Peptide Sequence Number=SeqID_88956
cgtccttggttggttttatgaagatagccgcatcatcagcgtacatggagatgctggtgcgtggtgtgcggccgcctagtgttttgagtaatcccattcccgtcgccatttgcattagttggtacagcgggtctattgccaagatgaagaggaagggagagagggggtctccttgtcgtagaccccgcccatgcacaattttgtctgttggaattccattcaggaggactttggaggttgacgtggccattaatgccgtgatccagttacgccatcgtgcagggaatcccctatgttgcagcaattcaagtaggtagtcccagcggacggagtcaaaaggccttggagatgtccagcttcattagcagtgttggtgttcggtttctgtgaaacctcctggccatgttccgaacatacaggaaattgtcgtggatgctccgcccttttatgaaggcactttggcttggcgagatcaatttgtccatgtagggctgaagtctggttgccaacactttggtaataatctttgctatggcatggataaggctgatcggtctgaaatcgcttatggtttcagctccatcctt

SEQ ID NO: 22983 - DNA, 312 bp, Setaria italica
  Peptide Sequence Number=SeqID_88957
aaccgctttgcaactgagtctcgtgatctgagctggattcagtcctccgtaggtgtttcatcacctcatgctgataaaactcagaagggaaaagtgagaaaagggagtgtgtataggagggctattgccaatggtattacagagattctgtcagtctacagatcagctgtcctacaggttgagcaaaatctgctgtcagatccattgcctatccttgcgacggtaactcacgggctaaataagtttgaggttcttctgcctccactgtacgagcttgttatggaaatagagcagaaagatatcaggggtgga

SEQ ID NO: 22984 - DNA, 285 bp, Setaria italica
  Peptide Sequence Number=SeqID_88958
ccgacctaccgtccaacttgccgccctctcggaacacccccttgcgcgcctccatccagtctaccagctcctcgaaccgctccgaccggaacacctccgcgatggccgcgcccgccatcgccgccacatcggccagcgtcgccgacgacacggcctccacggccgcctcccgcgacgcgtacgtcaacacgttgccgaggtaccggcgcacggtgcccgcgtcgtacctggcggggtcgaggcggggccgcccgtcgacgagccacgccatgcggcagtgggtgt

SEQ ID NO: 22985 - DNA, 1288 bp, Setaria italica
  Peptide Sequence Number=SeqID_88959
gttgtaaagttcaaaattaaacgtttcatgatttcagaatagttatcgcataaaaattgaacaatacttatacacctgagacatccataagttacacatgatgtgacaagtaaattaagcactgttgtgtcttgcgtccatgagcagattatccctgactagccaaggactcgatcagaagctggtagccctcaggcaccctgctctgagtttttacgcatgcagctagggtaggcacatctgcctttacatctaggaaagtagcaatcttgagcagcaaatggaagtccgagatccgcctcacaaatgtcagatgctttgtccggtccaggtggcttctcagcgcgctcatccctacaggactgccacgattctctatcggaaagcctactgagagtggaccctggtgatcagagatcttgacggggacaaggaagaagtcattgtccacctccatagtatccttaccacctgccaccacctccttccgcatcttggacaggcggggatcgtcggtatccccaacctcagtttccagaacaccatccttgaagagcttgacacaaatctcactcatctggaaggcctcaaagtgcacatcgccggtaccgtcatcccccacctccaatttcactatggcagtgatccactccgggatcccaccctcggcctgcagctgggccgcctgcacaacctcccggttggacatggtgtactcgccggtgtcgctggccttcctccccacggcctgcgtgaacacgaggccgacccggcgcatcccaagcccttcagcgatggcatcgacacgggcctcctcgtcggcgtccctcatgaggtggaccacgtcctcggagccctgctgcggcggctcgtagatgaagtcgacgaagacctccttggtctcggcgtcgacgcggccgtaaaggaagcccgcccgcttgacgccgaaggcgagggactcggcgacgtagagctggaacgcgttggcggcgtcgcggtcgaaggaggcggcggcgcagagcgcgttctcctggcgggtgacgcggatctggcgcgcgatgaggtcgtccatggtcatcttcttgccgaaggagccggcggaggagagcgccttgggcggcggcgggcgggcggagcgcgcgtcgggcgggtaggcgaggtagacgaaggcgccgttggcgaggcggagcgaggcgagctgggcggccgggtcggcgaggagggggacggcggaggggctggggaggaggagggccggttcgagggagagacgctggagcgtgacggg

SEQ ID NO: 22986 - DNA, 392 bp, Setaria italica
  Peptide Sequence Number=SeqID_88960
acggcgcgctgagcagctgcgacgacgagcacgggctcatcatccccggcggcggcttgcatccctttcggtaggtggtgccgtcgtcctcgacgacccatcctgcctcgcggcagagcgccttgagcacctcgttgttgtcgcagtgcttggggagcttgtagttgccgagcgcgcggagccccgtgaagatcttggcggcgatggcccggcgccggcgctcgcgccgcttgttgttctcccgctccttccacgtcggcgtgcgccccagcccgcccgccgccgccgcccccgacgtcatgctggctgccggcatgccgctacctctcccccctgcgacttgccttgttgcctcctctttctttaatggcgaggtggtgggtggcgtactg

SEQ ID NO: 22987 - DNA, 558 bp, Setaria italica
  Peptide Sequence Number=SeqID_88961
acaagggcacatgaatgccacaggaatctcagctactgctgaaggatgacagaatttcttcaacttgtcttagggtttcctgcaagtcaccctttttccttgcatcttttttctttttcgtttcttgataaagagaaaaaaggaagaaaaaattaaataaataagttaaccatttgcttaggctagaacaagttcagatccctgaaagaggatggatatcatctccagaggaccacggtacgatctctgaatcccttctctctttctacaaacactgaacccataaaatagaggagcaccgtccaaataaatatgaaatgtaattcccaggcgaataagaggcactgactcttgcagaaagatcaggagggatcagcacgggtctttgaactcccaagggtgagctccagctcgtgctcatccgaggcgcactcctcgtgtatccgttccccctcccatgccttcaccaggccaggtgattgattgttgccattgggagcagcagcaatggcaacaatcaattggggtgccgtcaaccatctggacgtcatgatggat

SEQ ID NO: 22988 - DNA, 1112 bp, Setaria italica
  Peptide Sequence Number=SeqID_88962
ttggtactagtagttggtaactatttctttgtaggttacttggtctaacagttcctgacttgcaaagatcaggagggatcagcacgggtctttgaatcccaagggtgagctccagctcgtgctcatccgaggcgcactcctcgtgtatccgttccccctcccatgccttcaccaggccaggtgattgattgttgccattgctgctgctcccaaaggcaaagtcatctggggtgccgtcaaccatctggacgtcatgatggattggcacaccacccatcaccggagaacatgttccactctgtccaggggtgcacattcttgaggtactggcaacagtctccttgaaaataccgaaaggattcggtgccacaaggctgtaagttggagatgaaggaccagcagatgaaattcgaaaccctgatagccatgttgggtctggagcaacctggtgcccagggcttggcggttgggagttgggaagagatgcatagtttgatccacacccagcccatggtggctgaacacttgggttctcccagtcggtcttgatgcgaggtgtgcgagttggggagctggatggtggtgttactggtgcactgatggagccaccattgaagtagagatgatgaagctgtgggaacttggaggaggaggcaattgaggaactcgaggacaaattcttcagccatgggataagagagctgccttcgacgccaccaatgaagttgttcccaccaagagtgatgtgagatgaggatccagagcttggaaaggaggaggatgcagggctcgggttgtatgaagcccttggactgggttgatatgaagagcaaggacttggtgatgcagatcttccaattggatcatgacgctccgctgctgttggtttacatcccttgcggtaggtagtgccgtcgggctcgacggtccaccccgcctcgttgcagagcgccttgagcacctcgttgttgtcgcagtgcttggggaggttgtagttgccgtaggccctgaggcccgcgaagatcttggcggcgatcgcgcggcggcgtcgctccctacggcggttgttctcgcgctcccgccacgtggggacccgggtgccccgagcccgc

SEQ ID NO: 22989 - DNA, 2257 bp, Setaria italica
  Peptide Sequence Number=SeqID_88963
aagacacatggctatcacatatacaggttcctcacctggaattttgatgcaagaaaatcaatgtaaatagtagaatatgtctgcaccatgtgttaacctgatgctgaaaatctggaataaggatatcctaaaaaattgtaacctagacttgtaaacacattaatcagcaaaggcaagacagaaccatagaatgagccataaaatgtacacactttcgacacaactacaacgacaatagtcatatcaaggacaactggagctaatttacaagggcacatgaatgccacaggaatctcagctactgctgaaggatgacagaatttcttcaacttgtcttagggtttcctgcaagcaccctttttccttgcatcttttttctttttcgtttcttgataaagagaaaaaaggaagaaaaaattaaataaataagttaaccatttgcttaggctagaacaagttcagatccctgaaagaggatggatatcatctccagaggaccacggtacgatctctgaatcccttctctctttctacaaacactgaacccataaaatagaggagcaccgtccaaataaatatgaaatgtaattcccaggcgaataagaggcactgactcttgcagaaagatcaggaggggtactttttgtccgagaactaaaaatgcttcacaggtttctgaatgacttctgacattaatttacaattgtcacgacaacagcacagggggagcttatgcgacacccaaccgagatcaccggctgtgcagggcaccgggctacatctgagctcatttcgcccgaaccaagcccttcacacctctaggctctatccctctccccttgcataaataaacaccacaattatcatcacaacaagtgaagctatctgaatggaaccacacaattggtctccattacgaactaatcaacaacaataagaaaatacactaaaaacaacggcaacaattcctccaagttagcgatgttaagcatcatcagcgcctgccctagagcttcagggtcagctccaggtcgtccgatccagagtcctcatggatccgctcgccttcccacgccctcaccagcccagcagcctgctgcgcgccgttcgtgctgcttccgaaagcaaactcgtcggagacggcatccatcatgtgaacatcagagggtcgtggcatgcctgggatcgcgggagagcatgtgccgctttgccccggcgtgcacatccttgatgagttgccaccaactgagatagattctttgaagacgctgaacggattagtggatactaggctgaaggtaggggaattcggactggtcgatgagatttggatactggcaagccatgcagggtcaggcgccatcgaccgaccaggactgggcggggtggagttcactatagaggggctgtttgcgccgtgccatggaggctggacagctgattcatcccaatctgtcttcatccgaggtgtccgggcagatggtgagcttagtgggggagttactggagcactgatggagccaccatggatcaacagtggtggtagaagcgggtgcttctttgatggagtaccgttggacaatgtcttgagccatggtaggatagggttgccatcgataccattagccatttcattaggagggaggaagggagaagatgcaccgctggggaatgaagaggaagtagggctcgcattgtatgatgcccgtggacttagttggtaggatgaacatgggcttggtgatacggagcacccaattgcatccatgcgttcttgaggcttgcttcccttgcggtaggtggtgccgtcgggctcgacgacccatccggcctcgttgcagagcgccttgagcacctcgttgttgtcgcagtgcttgggcagcttgtacccgccgtgcgcgcggaggcccgcgaagatcttggcggcgatcgcgcggcgccgccgctcacggcgcttgttgttctcccgctccctccacgtggggacccgggtgcccccgagcccgccgccgccccccgcgccgctcgtcatcggcggctggccggatctcgcggatctgccccgcacccggcctccttgcggccgctgctcgcctcgcctcgcccgctggctttgtttattatttctggggtggaattggggaggggcaggaggagaaccggaggagagggaggaggaagtagtagtctgaacgcagccgctgctactgccgctgctacgctgctcctattgtaaacccagctgggggagggagtg

SEQ ID NO: 22990 - DNA, 211 bp, Setaria italica
  Peptide Sequence Number=SeqID_88964
gctaaagctctagtgtgcccaaagaaaaatagcaggagagagtagcacaaatttgagatcagatccaacatgagccttcaggccgagccactgaacctcaaggaggcgacagtcacttgcatcccgaggctgcgcggcggcggcggtggccggagatcccgccggggatccgcggcggccacccaggtgtctatgctggaccgcgtccgcg

SEQ ID NO: 22991 - DNA, 423 bp, Setaria italica
  Peptide Sequence Number=SeqID_88965
ctctgacacagtgacatcatgaaaattttctacgtgatccaaatgcttcaacaactactaatccactacattaacaaattgctactaacaaactactaagtaagaaaacattatctttaccttctatcctccctaataaacaaagctactagtatttacagtctgcagcgtacagctcatgcagccatcttgcctgccggtttgcttccggcggcggcgatcagcgccgtcgtcttctcctggagctcgcgcaccacctccgccatggacggccggagcccgtggccgtcgctgacgcaccgcagcgcgagcgccgccacagtcgcagcctcgtgggtgtcgtactcgtctcctagcctccggtccaccacgtcggctactttccttcggtgagtgtcggcccaccgcggcggcgagccggca

SEQ ID NO: 22992 - DNA, 776 bp, Setaria italica
  Peptide Sequence Number=SeqID_88966
tgctaccagcgggtggccggcgagctcggcggagcggtggtggtggtgcctcgggcttggcaccacctgcgcgtggcccgtgagctccatggacctgctgctcctcgggcttggtgcgtggaccgcaaaatccagcggcggcttcggcgacaccttggtgtcgccgcgcgcccacttcttggtgctgcgccgccgcgtcagcgccttgatgagctcgccaaccttgtcccggggtgtttggtcggagctcaggtcgatcgccgtctccgccttctcgttgtcgacggcgaccttagcgtgcgtctcttgtggcacttccgctgtgagggtggtgctcatggcggcgggcacggccgcctcgacgtccagcgtgttcccctcgtcgtggccggctttcttgaacctcgccgtcgtggccaggttgtcgacggcgctgacgacaccctccgctctcgtgcagatctctagcaggagggaggcggtggtgaacaggggcagcacctcgatgagcggtggcgccggttccggcgcatcggtgctctgctcgtgctctgcatctgcgttcgaggagtcgtcttcttccagtagcgcggcgaggcatctcagctcgtctctcagctcctccgccgccctgttcatgtcgcccacgacgagggcgagacggccggaccgcgtcatggaggcgatggagccggaggcctcgcggagcacggcggcacaatgccggcccagggcaacgcaggcgccggcgaggtgcttcttgacgtgcgccggtt

SEQ ID NO: 22993 - DNA, 520 bp, Setaria italica
  Peptide Sequence Number=SeqID_88967
ctccacaccaagcgcgacacgaagccagggacaagcaaacaagccagagcctaaagctagccaagggatctctcacagctaccggtctttgtttaccgctcgagccagtaaacgtttcacgagctagcctctcgaggctctcgagctagggaccggaggttggcggtggtagattactggttgctgctcgatcgagaggttagtgtccatggcgccggtatacgccgcggaggccggcaccaacgggtccggcgggctgatcctggacccggcggcgcagcggtcggcgctcagccgcggcgcgtccgcgctatccacgcccaagtcgccgccgccggcgtacgggagcatcgtcaccgtgctcagcatcgacggcggtggcgtgcgcgggatcatccccgggaccatcctcgccttcctcgaggagaagctgcaggagctggacggtccggacgcgaggatcgcggactacttcgatgtgatcgccgggacgagcaccggcgggctggtgaccgccatg

SEQ ID NO: 22994 - DNA, 697 bp, Setaria italica
  Peptide Sequence Number=SeqID_88968
cccgaatgtctccacactttgcgcagctttgatcccagcaagcagtcggtggctaacacatgggcccttggtgaattgttgaacctaagggttcttgatctgttgatcgctggtggaagctttgccaataaaggtgcacacatggatgctcttatgtcctccctggagaagctaatcagttgcaatctcaagacactatccatcatcgcacgggacaatgtgggtcgtcacggcaggtggagttctttgtgcttctcttgctctcatctcgagcaactccacctattatacttcaagatccaaaggatgccggcgtgggtttgccaactacgcgccctcagcagcctgaaaatcaaagtcggggagctgtgcgaggacgatgttgctgttcttgcagggttgcctgtccttgctcgtcttgttctggacgccgaggttgttcctgccgaaggggtcgtcttcagtggtggcacggcattcagggtccttggttacttgagagctccctacgtggcagaagcgggcgtcaccttccaggcaggatcgacgccccaggtcgaggtcctcaggttgctggtgagggcgagcgatgtgcagcggcgtggtgtcaagcttgccggcatcgagcacctaacaaatcttaagcaggtgctcgtcaacttacgaaatggcgactgtgacgaatcagaggtgccgg

SEQ ID NO: 22995 - DNA, 1035 bp, Setaria italica
  Peptide Sequence Number=SeqID_88969
ggaatcggattcccatatgggacaccggatcaggttccggactcggcttcgatcgtgtggcgggagccgtggctacctcatttaaggacgcgatgggattctactaggcacttgcgagaagaacaacccgtcgcgccacctttgtaaggccaaaccccggaggtgctgcacaatcccacgcctgtaggggcttcttggtgcaattgccagatatacttcctcagtcaactgcagaagaggtacaggatgcaaaacccatcaagcaactcagactccacttttgagctggaaagtgctctgccaatcctggttcatgatccgggaactcagcaagttgactcccagacgctgtacagcatctccaagcagtccctgttcgctcacgcgatcgatggagtgaaagactaccgctgctttgagaccccccaaggctgggtgcttgccctggacagagcttccctgcagacattcctatggcgcccccaagacagcgaaaggattcagttgccggcggtggaggaggacttccccagccgatgcaagtgtttgctctctgatgtgcccactgcctcaagttgtgcagtattagtccttgatcttgacgacacccagatgtgggtctgccagattggagcaagcaaatgggactcctgcagctacaccctcaccatgttcgatgcacgtgacaatcctcgggagaggcacatagcgagacgtcatggtgtcgctgctgttaacggcaaggtctatttccagcttacaggctacgagctggggataattgagtttaaccctgatccaagccttgcgaccattgaggtggacatggtcgacttgcctctgagcatgccaatgtgctcaacttacctagttgggtcctacggcgagcttttccttgttgttatcttcttcgacggcgacaacgtgcacaaaattgccgaattcgcagtgtacaagatggatttctcggtgccagcttggtgcaaggtggacaggattggtgatgatcgagtctttctctaggtggagatagga

SEQ ID NO: 22996 - DNA, 180 bp, Setaria italica
  Peptide Sequence Number=SeqID_88970
taaagataagctccagtaacactagattttaaagctggatttagaatcattagatgaataacagtacattattgttgaatttcaattctattaaaatccatcaatgaataactgcaagaagttaaaaagttgaatatccttagtgaaggatcaaggaacatcaaagtcgttgtagtatag

SEQ ID NO: 22997 - DNA, 413 bp, Setaria italica
  Peptide Sequence Number=SeqID_88971
atttgtttttgcagtcaccttccctgtatcagcagagatgaaggacagaaacagtttgtcccatcctgttgatggaatatttgtagcatggaactgcagccggaatacaaccttgactttggtcttttcaatcttccattttggtacccttgacattgtgacagtataatgacaattcccaaagaagttttgcagtttaaatgtctctcaagtgtagaaggatcaacattcttccttttgtcttgggtttcggaagatcagcttccctcttctgcctttctcggcaacagcagagcacccgaagcagctccccccgcgctggagcacgccgccgacacgaacagagtctccgccgcgccccccggcgccgcggagccgccgctggtagctcgggtttaaagggtggttaggcc

SEQ ID NO: 22998 - DNA, 567 bp, Setaria italica
  Peptide Sequence Number=SeqID_88972
gcggtatatttggactagtatcgccccaccttaggcctagaaaacccttcatgatgccgatgaccgtgcctcggcgatcggggaagttctcgacggcgcagactacgtcggcggtgttgaagaaggtctgcgcctgcgcggcgagcagcatgtaggcgcacatgagcgggagcggcgcgtgcgcgatcccggcgacggcgagccacatggggatgtagccggcggcgcagaggagggcgccagcgaggagtacgagccaggggcggcgccttcccgcgggcgcccatgcggcgaggaagcccgagaggacgccggcgttggcgccgatgtccttgaagaaggcgacggcgtcgagcgcggactggtcgtagcgctgggaggccttgagcgccggcgagtagacgccgaagcagtaggagctcccggcgcagcactggatgagcgcgctggcggccagcgccgaccagcgcgtccgcgcccgtggcgtcgccatcgccggcggccggacctgcctgattggatggttggttctgtctcctctttttttctgttataataggaaaaaat

SEQ ID NO: 22999 - DNA, 680 bp, Setaria italica
  Peptide Sequence Number=SeqID_88973
aaacaaaattccactgaacaactgaaattatgaaccactattacaaacatcgctctcaaaagatgtctgtttatcatgaaaccagtaagaattttgtagcactaagttacgaaaaagatgtctgtttatcataagtccagcaacggcttcaactcaaaagctaatatgcattgcaaaattccagaccacataaattcatttgtactggcgccctgttgcacctacattccttgccaactgactacttccacctgatctcaggctgctccacgccatcactgaccatgtttaggcacaagccatgctacacaatggtgctagaatctacaccctagccagtggccagtggtacacaccaaacgtgagagtgatgtcacatgtaacaggattgcaacaccattcacagtatgtcaagatcacttagttctttttccttctagtgcaggcaaatggaatggtttgagttgacaatgcctgaattttagttgaaactagtccttttggctctttggattctggaaggatgtaggatgtgtttttcatttacaaggagatctctgctcaactgatcaaatagttaccctgctaatcttaccatagttctgggcattagtccaccaaaagattaccaataaagggatcagacactgctctgcctacatgtatataaaatggaaagg

SEQ ID NO: 23000 - DNA, 455 bp, Setaria italica
  misc_feature (269)..(269): n is a, c, g, or t
  Peptide Sequence Number=SeqID_88974
tattcacccagtagctgcaccactagatgatcctgtgcaaagtgactcatgttgtcagctggggacctgccttcaagttccgagttctcagcagcactggaaagaggggaagccgcgtcatgtggatcctccggagactccactaaaaagcaagctacacaactcactctggatcaggtcctgcgctcatcaactgcgggcactgaaggaaatgaaccaccagttgttgatgtggaagtattaccggtattggagatgcagtccaaagngtcttgctcagacctgggctcaagatcaaatgggtgctcaatagatatatcatgggacgacagcatgccacaggaatcaggaccatcagcaagagaaaaaggacaaggtcgtttagctccaagtactgttcggttcctcgtgcttccggcatagggtgcatcaaatgttcacatgagtcacaatgg

SEQ ID NO: 23001 - DNA, 617 bp, Setaria italica
  Peptide Sequence Number=SeqID_88975
tgttacctaactactactaaacctacgtctaaaaatttggtctaattctattgtaaaccttctaagtctaagttgtacggttgtagtcattacttcttggtattcaactaccggccgaactctccactaaaaagcaagctacacaactcactctggatcaggtcctgcgctcatcaactgcgggcactgaaggaaatgaaccaccagttgttgatgtggaagtattaccggtattggagatgcagtccaaagagtcttgctcagacctgggctcaagatcaaatgggtgctcaatagatatatcatgggacgacagcatgccacaggaatcaggaccatcagcaagagaaaaggacaggtcgtttagctccaagtactgttcggttcctcgtgcttccggcatagggtgcatcaaatgttcacatgagtcacaatggttagagttgttaaccacgggctgagatgcaacctcatccaccccacaaaatattgtttcagtatcatccaacgatactccatcctcattaccatagccagcagttgaatctggcagcaaaccatcttcagcagcagtacatagaagattcgttgaggaacatctgatgatcactactcac

SEQ ID NO: 23002 - DNA, 1914 bp, Setaria italica
  Peptide Sequence Number=SeqID_88976
atctagttcaaataatgtgctgaatattctgctttaccaccgagtggtttagcatctcaattctcgacgtggctcgaaaggaactcagaactagctaaatcttgcttgaagatacaaagagctaaaaatacacaatttttgtcctcaaacaaagttcaataccaagcgtctaaacttgcataataaataccttatgagatgaactgatagtgatgcaatgaattggtgatatagacacaaatggggcagcaattatttgtcattctctctgaaaccggcaaattagttttcagcagaagctgcttggttgccgacagggaatgctggtaaagtttcactattttcttgggctggagcatctgcatttgcatgcctcataaactcctccggggacatgtgagtgccatggcaggcacatactatcttcacctcatttctaccaaacttgtatgttacacctgatatggttctgccatttggtccagtaccagtggtagaaacccaaggaagatcaggataggatccagaccctccaaatttgacatttggtgcgatgcctggccttatagcagaacccataagagggagcaccctctcagccttcttctcatcttccacgtgagcggacgaagaagcacctgcctcttggggtctcttgccatcatcagcttgcttggaacctgtttgctcagctttgtcttttacagtaaaagaagacaaagcctgaggcggagcaccaaaagcccatgaacagctcgtttcaagtgttggtagctggactgccggataaccaaaagcaacctgagaggcactattcattgtctggacagctagtccaccgtttgtaggtggcctcaactgcactggacataccgggtgaaaattcggtgcattagttatggtaggaggaccagaaacctgcgcttggacttgataaggcacggccactacatttgatgcctgcatagataatggattcccaggtggcagctttcctgagctcgactcacttcctgagaaacttggctgcctctttccttgaaaaccaacggcagcatcatcagcggatcttttcctatcggatgctttgttaacaacagagcccttagcactgtcttcacgctgtgcaaccaaccaagaatttgaaccttctgcttctgactctgcaacatcctcattttcaccagttgaaccatcatcagtactaattgagataggtgcatttttcgcacccccgtcagagctcttactgaatgcatcaggctggtcaccagctgtctgatgcttcttctgaaagctcatctcttcagaaagcaagttgcagttacttgagactggcttctgttcctcagaattatttccattgttatttggcatcctcccatcttgatacctgggaagctgaggctgatggctcactggttcggcggatccatctaccactggagcagaggaactccctggttgtccccagaaattcccaaattgtggtgcaacagggctgtgcctctgtttactgttgtgttcttggttctcagggtttgtttgataatactttccaaaaggagcatcaggagtttgtgaaccacctttgctactgctttcttccacttgaggttctgcttttggttctagaggagcatctctagccttagccttcccagatgatccgcccaaagagaggcccaaactaagctcaaggccattctcctcgtccatttccagttattggttaattctaatgatatgtatgcctagttacagactatttcttcaacatactaaggatagcatagaccacactattgtatagtccttgacattcaaaccatcatcctagtggatactcatcgccggcgctgggcccgacgaagaggatggcgccgctcacccagttaattcgtaccgtaccta

SEQ ID NO: 23003 - DNA, 1057 bp, Setaria italica
  Peptide Sequence Number=SeqID_88977
cgtcattggcacagattcattttatatccaaaaatctatatccagcacatcaaaagctaatgatttagtttctgcaggttgtgagcaattgcttttgtgttctctatcagaagaatataatactgagaaacatatcgttgaagcagactccatcagtgaagttaactcattatttaagtgccgcatggaggaagtactagtgcagtccatttcagagtccggtattgatcaaccattgacaggtaaacttgaacatgaattgaatggtactctatgcacagaatctgcaatgccagcaattgaagcaagatcagtagaagaattgaattcacaatttgttcagctcagcggagaagcattagaatgtgctacttctgattccagttgtgatgatgaacatatccaagatagatcaagtgaagcattgcctgtggaaaatgggcatacttcagaattgccaaagaaagattgccattcatatccgactcctgataatccagtggctgtgaatgtcaaatgtaaatcgaaggagctgttaactgaaggtagtgagcttcctgttctagaagccagatcggttgaagagatgaactcactgttcaggcaactggaagatgaagcgtcagctcaggtgcctcacagcccagatctcatggttggtgaacataatggagatattgattctggtgtgctagttcctgatgcgaactctagtgaaggtatcagttctgcttttgtgcacttaagcaacgatgatgaaaagataaagattcctggagatggtgaagtaatcctgggttctgtggagctaaactcaggactgcatgtcatggagaccaatgctctgaatggcgacgacacatccggattcgatagtacttaagcgattgagatcaaagaatcacttgaaagggcttaagcttctattactgaagggcagatcacagggtgcagcaacatcatctcctgggaaatatcttttggcctttggagaacaattaatcaacatgtccatgttcatagcactccctcttttgcttactctgttcatactgct

SEQ ID NO: 23004 - DNA, 277 bp, Setaria italica
  Peptide Sequence Number=SeqID_88978
ccgccgatcgggtccgcggccgcgcgtcccctccccgctcccgccgcggggaaccgaaggctcctcccgctccggcccgcccgcacgcctcggggtcgtctccgcgcgcccagcgacagtcaatatgtcactcgatgttacgcaagttctcttaagcgcgcaatctgctgatggcgccattaggaagcatgctgaagaaagcctcaagcagttccaggagcaaaatcttccaggattcttgctctccctctcaactgagttggccaatgaagagaaa

SEQ ID NO: 23005 - DNA, 3945 bp, Setaria italica
  Peptide Sequence Number=SeqID_88979
ctccatcttgtggattttcgtactgatgaactatctattttcgtgattggtattatacaagctattacctattttttgttcctcttttttaactgttttaacactaatacatctggtactgataactctctccattttgcttttttttttctaacttttacattgtatagcaattttagagtgtcttgtttggctgttcaaagagcagttttggtttgccttgctaggctttacaataaggatcaatttattatagtctaatttttattgaagggagcaatttttctttgctcatgcatatatctgattcctcactgttttgttattcacagagtcaatatgtcactcgatgttacgcaagttctcttaagcgcgcaatctgctgatggctccattaggaagcatgctgaagaaagcctcaagcagttccaggagcaaaatcttccaggattcttgctctccctctcaactgagttggccaatgaagagaaacctgaggagagccgaaggttggctgggttgattcttaagaatgcactggatgcaaaggagcaacacaggaagagtgagcttttccagagatggctggcactggatgctggtgccaaggcgcaaattaaaggattgttgctgcaaactcttacatctcctgttgctagtgccagatctactgcttctcaagttatcgccaaggttgctggtattgagattccgcagaagcaatggcctgagcttataggatcattgctctcaaacatacatcaggtccagccaaacgtcaagcaagcaacgcttgagacgcttggctatttatgtgaggaagtttccccagaggctgtcgaccaagaccaagtcaacaagatccttacagctgttgttcagggtatgaatgcttctgaggcgaactctgatgtgaggcttgcagctacacgggcattgtataatgcattgggctttgctcaggttaacttctcgaacgacatggagcgtgactacattatgagagttgtttgtgaagcaactcagtctccggaagtgaagataaggcaggctgcctttgagtgtttggtggctatctcatctacttattatgataagctggccacctatatgcaggacatatttaatatcactgcaaaggctgtgaggggagatgaggagtcagttgcacttcaggctattgagttttggagttccatatgtgatgaggaaattgacattctggatgagtacagtagtgaatttacagctgattctgatgttccttgctactattttatcaagcaggctcttcctgccttggtaccgatgttgttggagactcttctgaagcaggaggaagaccaggacttggatgaaggtgcttggaatcttgcaatggctgggggaacttgtttgggcctggtggcaaggactgttggagatgatattgttcctctagtgatgccttttgtggaggagaacataaccaaggctgagtggaggcaaagagaggctgcaacatatgcttttggctctatcttggaaggcccatcagctgataaactggctcctcttgtaaatgttgcattgaacttcatgctgtccgcattgatgaaggatccaagtaaccatgttaaggacacaactgcttggactcttggaaggatcttcgagtttcttcatggctcagcgcttgaaactcctccaatcattacggccgagaactgtcagcaaatacttactgtgctgcttcacagcatgaaggatgtgccaaatgtggctgagaaggcatgtggagccctctatttccttgctcaaggctatgttgatgctggatctgcgtcgccattatcccctttctttcaagatattgttcagaaccttcttatggttactcacagggaggatgctggagagtccaggctgcgcacggcagcttatgagactctaaatgaagttgtcaggtgctccactgaggagacagcccctattgttatgcagttggtacctgtcatcatgatggaactgcatcagactcttgaagccgaaaagttgtcaactgatgagagggagaagaggagcgaactgcagggcctcctttgtggctgcctgcaggtcattatccaaaagttgggagggatggagtcaaccaagtactctttcttgcagtatgcagatcagatgatggatctatttttgagagttttcgcttgtaggaacgccacagtgcatgaggaggctatgcttgctattggtgcattggcatatgcagctggcgcaaactttgcaaagtacatgccacagttttatcagtatttggagatgggacttcaaaacttcgaggagtaccaggtatgtgccattaccgtgggtgttgtgggtgacttgtgtagggcacttgaagacaaaattttgcccttctgcgacggtatcatgacccagctcttgaaggacctatccagtaaccagttgcacagatctgtaaagccaccgatattttcatgctttggggatattgcactggcaattggggaaaacttcgagaagtatctgatctatgccatgccaatgctgcaaagcgcagctgatctatcagcacatactactgctactgatgacgaaatgcttgactacaccaaccagcttaggaatggcatcttggaagcctactctggtattcttcagggattcaagagctcacctaagacacaacttctgatgccgtatgccccacatattcttcagttccttgacgctctgtacaatggcaaggatatggatgatactgtgatgaaaactgcaattggtgtcttgggagatctggccgacacattgggcgttcatgctggccctttgatcaatcaatcctcctcgagcaaggcgtttttggaggaatgcttggcatcagatgatcctcaggtgaaagaatcagctgattgggcaagtatagcaatcacccgtgcagtttccggttgatgtcacaaggagtctcgagtctgcacttgcatccatccacatgtcatcatgtctgggtcgtcggttgcatcatgtccagacctgctctttggagaagtccaacatccttgcagcagagtcagagggtcctcactaactcatgcatcagtacatgtgtcagcccgtccttttcgcccccacgagaaaagagggttcaagttggccgcctgctaactttttcaaagggcatctgccgccttcatttcttattggaggtgagatgagtgtcgcctgacatgctgacagtctcctcggcatggcacgcctatggtctgtggcctatcattttcccctgcattcatctcatgcatcgaactctggtcggatggtcactcgggacaaaaggcccagttgcttgctgctgctccagtaagcagagcagcaggcacgagcgaattgtcacaggattattttgtattgttcagggcggtcaagtccattatgtcaagacataccctccctgctggttgctattagcttgtttttttctcctagcattcttttcccctttgtccacttgcattgtcttgcatttcattcttggtcctgttttgtaagagttctttttttctgggcaaaacttgtgtcctgtccggtctggaaccgcacgctgtttgtacaagtgcagtccctgcgtgcatatcagtttatttccaggtcatgggagcagcttttttcagttttgtttttggttatctacatgctgctccatttgggtttatctgaagccaggctggtgaagaaacatagttatactagagtggtttttgcggggggcagaggcagttggtcggagttggatttggtttatgaattgtatactatgatggtgtggggctctgcttcctgctacccaacaacgtgtcatatcaatttgttgagcatatgagaatatcatgatgcaatgtgatatggtctttacgaaaatttaaaaaaaaaaaaaaaaaa

SEQ ID NO: 23006 - DNA, 351 bp, Setaria italica
  Peptide Sequence Number=SeqID_88980
ccgaaagtgaagttaggagacaagatcactgcgctgcaacagatcgtttcaccatttggaaagaccgatacagcatcagttctgtatgaggcgataaattacatcaagtggttgcatgaacaagtgcagttgctgagtgatccatacatgaagacaagtagtagcaaggactacaatgcatggggaggattggataggaaggagaagtcggaggcagagatggacctgcgaagtagaggcctgtgcttggtacccgtctcatgcacgcctcaagtgtacagggataacaatggcccggactactggacgcccccatatagaagctgcttatacagatgaatttattagtaa

SEQ ID NO: 23007 - DNA, 270 bp, Setaria italica
  Peptide Sequence Number=SeqID_88981
ttagcatctcgattcaatgcacaatccaaagcagataaccacgactctgctgatgctgtaaagtactctttcgaatgtattaacattcgaatttgtgaaacatcagagaaatctatcccaggtaggggggtcagctgcatcttcacagatcctgctgaggcatattttctgatcgctttatgagtttcttttgagaggcctgaggtttcatagattatttctcttggagaaacctgcaccaacaaagcccccaaagctgcagacgaatca

SEQ ID NO: 23008 - DNA, 244 bp, Setaria italica
  Peptide Sequence Number=SeqID_88982
tcctgtagcctggaattccctgaacaattcctctgctaccttagcaagtgcatctgcggaaggtttccgtggaccaatagtatttattaccttggaagcatattctgttgtcgaatgcaatacccaagattgtctgttgggaggtacacaagcacgccctggcttactgctgtcacagtaggcccaactcagagaatcagaattgttgaaagagaaaccatgaactggtaccatagccaatggc

SEQ ID NO: 23009 - DNA, 1610 bp, Setaria italica
  Peptide Sequence Number=SeqID_88983
cttcaaatgtaatggtaataatcacacatccacaaaaaaaagacatcaactcatgcagctttatttcttattttgtatcaaaacattaaacaaataaagttgaacaatgaagatagattgtagtgcctgatcgatttgatcaggtcatgtaggaacaaggttcaaatcgttcgttcgttaggatgcctctgcatacatcactgcacttccacttgatacctcggcgctaccttatcctatttccatacttctgtcgctccattccatccccgtattcccaatggaacttgattctttatttctgtaacaattacgtagagagttggaggagagatgcagggggtgttgttggttaaacatacaactcacaagcctgatggacagtttaaacatcccaggattttcgaagctcctctcatggcactaaggactgctccttcgacacttggacttgcacagaaatcaccacaaattgccaatttcgtgcttttgtcccaaatacatttatcatctccacctacagcaatggctgggaaagcaccaccccatctgtgagctttcataaaaattggttgtggaatgctcaatcctgtagcctggaattccctgaacaattcctctgctaccttagcaagtgcatctgcggaaggtttccgtggaccaatagtatttattaccttggaagcatattctgttgtcgaatgcaatacccaagattgtctgaatatagacaaaaagtacattgaacgaaattatatgacactgaataatgtatgtgtacaaaaacaaaaaaagacacgtacctgttgggagatacacacgaccgtagtggcttactgctgtcacagtaggcccaactcagagaatcagaattgttgaaagagaaaccatgaactggtaccatagccaatggctctgagaatgctaccataagagcaaaacagggtcgaactgggatatcttgaaccattacagacagccgtggaaataatgacaagtcaagaggcggtggtcttccagtcaacccagaaaatcttggtgatgccacattcttgtctgttgctacaacataatcaaaatggccaagatctttcccatccaagctagctagtgaccatgaactcctatcttgaagccaatccatcttaccaacagtgcaaccaaatttggcctccacaccatcctctaaacagagtgatttgcatatcgagttcatggctggcactcccacatacttcttagttgatccctccttctcgaagtcagtgaatttgccggtagccagatcaaagcatgcgaacgtggccttccactcggcgacgatcccgcgcgcctcccacccacttacgacccgcgcaacctcgtcgttggtcacggtgaagtagggcgcaccgtggtcgaagcgaagctccgtgccgtcctccatcgccgccctccgctgcgacatgcgtccgccagcgccgcggccagagtcgaagagcgtcacggccacgccgcgcgctgcgaggagcgatgcgctcacggcgcccgtaattccgccaccgatgacggcgacattagcggcgacggcggcggagctcatggctcgacgcttcccgacggctggcacc

SEQ ID NO: 23010 - DNA, 247 bp, Setaria italica
  Peptide Sequence Number=SeqID_88984
gagcgctcgtcgggctgcgccgccacgctccagctccagacgtggcgtgccaccggcagctgcgacacccacaaggtctggatgtaccagaacatggcctggcggcttccgccgcccaccccctctccctcgggggtgcagaacacggtgtccagccgttggcaccgctcgactcggcaccacaacaacttggcccagctcaagatagctgggaacggaattccggtgatggacgcgctgtcgtgca

SEQ ID NO: 23011 - DNA, 523 bp, Setaria italica
  Peptide Sequence Number=SeqID_88985
ttctaaattagcatagagggaattggctctataaagaaaggtaaaacaacaaaactgctgttacaaccagcgcagcagaggcagagagaaccaccaccaagaaataatccggttagcctaagtgattatatttgcaaacttattcagtttggtcgacttccatggcttcaactgagtctgtcagaatctctcttaacttccgcctcctttctttcgccaagctaatgcactccttaatagcttccatggaagtcactgcacctccaagtttttgtattgacactatgcggtctgaagaatctacaacaacagtcacataggtctctattactgattcctcttcagaagttgggtccgccagaatactatccttgtgaagtgcacatgtaagggaaaatggaatgttgccaagtgtaagcttcctcttttctctgtttaccaattcgaattttgtctttccttcattgcctccaacagtgaatagtctaccatcatcaccaatagaaactaaaggaatctccaa

SEQ ID NO: 23012 - DNA, 416 bp, Setaria italica
  misc_feature (28)..(28): n is a, c, g, or t
  Peptide Sequence Number=SeqID_88986
atgggcgcggaggcgaggcagctggagntcccccgcatcgacttctccggcgtggacccgtcggcgccgggcgccgggcagtgggcggcggtgcgagcccaggtggtcgacgcgctcgctacgttcggctgcttcgacgcgcactacccggcgctcaccccggacctccgcgccgcgttcttcgacggcgccgtcaagaagctcttcgcgctccctgacgacgccaagcgccgcaacacctgcagccccgacaggcccctctcggctacctcggcagcatggccgggttcacgaacgcctacgaaagcctcgccatctcggaccgcgtcgaaccagagcgcgtccgagccttcgccgacctcatgtggccgggcggcgacaacgccgccttctgcgaggccgtccatggcgcggcg

SEQ ID NO: 23013 - DNA, 117 bp, Setaria italica
  Peptide Sequence Number=SeqID_88987
accaaaggacagataaatgcttgtcaagcttctattgcaaccaagaacttgcggtagaagcttagacaaggcatttatctgtccttttgttccgcatttacccgggacgggaactta

SEQ ID NO: 23014 - DNA, 465 bp, Setaria italica
  Peptide Sequence Number=SeqID_88988
ttctacacgcagcatgaaagtctccaaggcaggagagggcttccaggaaagaaaccaaactgaagtaatcctggcggtagagttgtacatccacaagaaaaatgtccaagtacttgagaaggaggaacttgctagacattattggagtcttgaccttctgaagaaagagaccaaaagaatgaatcaagctaaaggcatgcatgcatatcgtcactgtatagatcataatttcaaatcaactgaatggcataaacatagcacatacctcacaaatcgattccacagtaagtctttcaactgctggcataaagcaaggaatctcggcacgagcatgacagagtgtgtttggtttactacctatcatccgtatgtgtttgacttctgctcctagagaaatttgcattaggttatccccacagtcaaaagtggagagctttggagccctaatctctattacttgcagca

SEQ ID NO: 23015 - DNA, 1860 bp, Setaria italica
  Peptide Sequence Number=SeqID_88989
ctcaatacttcaaacagatcaaccaatcaagcgttagacgttgtatcatacctaacagcacagcttaagccagtgtacacattctttacgcagaactgaacaaaaacgtcataacacaagccttcaggcaaatggcagtgtcattacactatgggatcttaaacactggatccaaataaccaaataatatacgacaaatcttggaagataatccttagcccccgcactggcagcacggttccaatgccttgaaatttgttgatgagggcacaatcccctcaatgcatctgttcacagcctcaagagctctctgtgcctccatcagcccttccttcgacatatgctcgcacttgtcggtctttgtagtcctcctgccacaaccccatgcagtgtccagtgtcatgcacacaagtgctgatgcattgcgaacaatgtggcttgttaattcaatcaggctctttgcagagctaaatccagtcatcatcacgttcttcagattgtaatgcaagcattctggcatctgcctcaaatgcaattgatccttgtcaagatctttaagaactgaatcacttctcagcacataaccggtttctacacgcagcatgaaagtctccaaggcaggagaggcttccaggaaagaaaccaaactgaagtaatcctggcggtagagttgtacatccacaagaaaaatgtccaagtacttgagaaggaggaacttgctagacattattggagtcttgaccttctcacaaatcgattccacagtaagtctttcaactgctggcataaagcaaggaatctcggcacgagcatgacagagtgtgtttggtttactacctatcatccgtatgtgtttgacttctgctcctagagaaatttgcattaggttatccccacagtcaaaagtggagagctttggagccctaatctctattacttgcagcattttacattgtgtcacatggaaatgattaaggtgatgcaacacacatggtgctttaaagcaaattaaatcattgcacttataaattgacaaccgtgctaaagcgaaacaattggaaacaaactgcccgagttcctctccggtaatgcggacaaaggacagataaatgcttgtcaagcttctattgcaaccaagacttgcggtaggatgaaatgcgcatgaagtaaggcgaagagattccagtgttgctcctcctatctcattagataaaagaaaaatcgggaagttatagtctgccctcttattaaatacagccatctccaatgcaagctcttcaatcccaggtttgacagcaattcgaagccatttatcaaaatatgatgcatcaatatttgcacaagggtacagttgaagtatgagcaccttcatcccaaagccagaatggttttcaagaacatggttaattttattgacgaaatggctttctattttatcttgtctatattgttcatcttccaaagctcgtgtgtcctcatccaaatgcatgctgagcttatcataacctacggttttgttattgaataaaagcctgggataccgtctccaggaacgtagatatcgacgagagacacaggcagcacgggcagcatcttcaataggtaagtaggaaaataagttatcaacaatatcctctggaagcctgtcaagcatgaaatgtcccatcacttgcaaacattgctcatcttgtgaggtgtgaccttgcaaactagctgatgaaggctctggctgcagctcccgctttcgacatgttccggtgtacatctccgcgctctaccttgtcgacgccgacgcgaaggaaaccgctcctcggttaaggggctcccgcggctcctcctcctcgtttcccacccgtgccc

SEQ ID NO: 23016 - DNA, 363 bp, Setaria italica
  Peptide Sequence Number=SeqID_88990
cccacatcagtaaataataacagaagcagctagttaaagaaaaaattggatgatcttgaagtgtgaaccgacgaggcgacctagctgtggacatcttgacaagtatgaattctatcttgaagcatatcgcatcgaaatgcagtaccctgccactagctactcgtacattgtcagcaccatctacatatctaaggccgtttgaattattgtgcagaggctggaaatagtaagacatttgaaatagaggacaaggtgacgataatagggaagaaaaaattgtaacagcaggaggacgtcagtggctctcatctagtgtgtacgcgtcagctgaccaaaaagggaaatttacagcagcagcagcag

SEQ ID NO: 23017 - DNA, 352 bp, Setaria italica
  Peptide Sequence Number=SeqID_88991
atggacctctacgcacctctcatctgtggcaacgggactactagtctagtctcaagttgagaggcagtctatagtaccacgaggagcagccgcatcgcggattcgcggtcgccgccgcttccactccaagtgccaattcaattcatacaaggtaattaacgttcctccttttcgctcctgatcttctttgcttccagtatgtactatatagcttgcttgagtaataaaacttaatagcaggatggccgtgtgctgttatgatgaaatattaagaatgttattttttaaaaaacttaagaagttcttttaacttattccaatatatttttcactgcactcaacaatagatact

SEQ ID NO: 23018 - DNA, 406 bp, Setaria italica
  misc_feature (386)..(386): n is a, c, g, or t
  Peptide Sequence Number=SeqID_88992
gaattcagaaggcagtctataccaggaggatcagccgcatcgcgggttcgcccacaggcaaattcgtataaggtaaacgggaccatggaccatatatgcgggttcaggtgcatatatggaccatggacctctacgcacctctcatctgtggcaacgggactactagtctagtctcaagttgagaggcagtctatagtaccacgaggagcagccgcatcgcggattcgcggtcgccgccgcttccactccaagtgccaattcaattcatacaagtggaacacgccatgagagatgtgaaaaccactgacccgaagatgtcagaggcgaccaaagtggagtgcaacaccccgacgatgttcgtcgaggccaaagtgcggatccgtttnataaaaaagagaatgggcag

SEQ ID NO: 23019 - DNA, 817 bp, Setaria italica
  Peptide Sequence Number=SeqID_88993
ttactccacatgctgaatctccctctgtgacaataggaggcctaagctttggggtcgggagggcagtcattgctcttcctgagggagggggacagtgtattcaaactctcagatgtatggctcatcttccctactgtggaagctgttgaggccccagatatcacagagctcatgctgtccacagagctgctaggtgaaatgattggtgatgcacggtcagtgtgacccctagctgcaatcctgttccccgatgatcttgatgggacagttttgctgatatcagattttgacgatgaacgaacagggaccctctgagcagtcctattcttgttgcttagggttgttcttgtttttgcttctggtccagtatccgtcgaaacaccatgggaagaagctgtagttgatgtgaaggcacctgatttcaagattgaactggactttgtacccccactaggccgcacactagctgaagtattggcagttttgccagctgcttgcctattgacagcacccccagtgctgcttcttttgtctgaagtagcagaagcgatagcagtgttagttgacgacctcatcatagcaactcttggcagagccctaggaggtttttgaggatgttttttgcttctgtagctcctggcaaattcactcttgcagctgcagactcttttgagttgacttgggacctctgtttgacaccaccaacaccttggctcgttgaaacaggggcccttatcttagtctgaggcatccgatcaaccccttttctagctgcaatacgaggcacatttgctgttggccttttggggctttgatg

SEQ ID NO: 23020 - DNA, 350 bp, Setaria italica
  Peptide Sequence Number=SeqID_88994
ctcctgccggccggcctggaagaggatcgatcagcaagctagtagccaaggggccagtaggaacaaaaaaacagccgcataaatccatcccccttctcgcagttgcaggccggctgccgttcgagagccaaacttcggagacccccggagctgatctgacctctctctcctcctcttctcggcgctgggaacgccatggctcagcagcagaagaacgcgcacgtcccgaagttcggcaactgggacaacgatggcaacgtgccgtacacgctctacttcgagaacgcgcgcaagggcaagggcgccggcggcaagatgatcaaccccaagaccccgcgagaacccggagg

SEQ ID NO: 23021 - DNA, 397 bp, Setaria italica
  Peptide Sequence Number=SeqID_88995
gggccgacggtcagggagttctcggtgaacgtcgccggcggcacgctggcgatcgcgttcacgccgacggggaaggtggcgttcgtcaacgccatcgaggtcctgtcgcaccccgacgacctcttcgccggaccggcgcagacggtgagccccctgggccagtacactgggttgtccacgcaggcgctggagacgatccacaggatcaacatggggtctcccaagatcacgcccagcaatgacacgctgtggaggacgtggcttcccgacgacacctccctgctgaacccctccctcgcggtgcacaaggacgtgtcgcccaagaacctccagcgcatggcgggcctcgccagcccggaggcggcgccggacatggtgtacgcgacggcgacggaga

SEQ ID NO: 23022 - DNA, 432 bp, Setaria italica
  Peptide Sequence Number=SeqID_88996
cttccatctctccgacgtcctgcacgtccctggcctccccgtcggagtcgtcctggtctccgtgacgcagctagcgaaacgcggctacctcgtcgtgttcggcggcggccggtgccacgtcaaggaccagagcaccggtgacatggtggggaacggccggttgcacagccaagatggcctgtaccacctcgagttcctcaagatcccgcccgacgacacaacggacaccagggttgaccctcggcaccaccaccgatcccgaccatcagatcgcggtcctcggtgagctgacccaacgacaccaggttcgtagtgagctccggaacgtaccagacagcagcagcatgatctctttgtcatccatgccatgataatacactgtactgtgcgtctgtgcatctacctttgttccttcagagtttacaaacactg

SEQ ID NO: 23023 - DNA, 311 bp, Setaria italica
  Peptide Sequence Number=SeqID_88997
gcatatataaacgccgtacgcttacacgacgcatgacacgaggcatggcatcagacgacgcgacgccgccccgttccggcgagccaacatcaggacggctgctcctccgccgctgtcgtccccaccctccccgggaccgtgcgcgctcgcctccaccttgcaggagcaggacccgcgcggcagcgggctcgtcagggccgggccgcgtgcacgtcggtgataatcagcgccggcgccagccgccgccctcggcgcgacggtgacagagctgttgctcaccgtccacggcggcctttcgatcgccggcgcgg

SEQ ID NO: 23024 - DNA, 526 bp, Setaria italica
  Peptide Sequence Number=SeqID_88998
aacgaccaaccaccaacacaagatcgctgggccaaacttagcacaagcgccttttttcctggactcagagagtgaccaactgtacattgttgaagacccagttgtcacggtggagctgaagccctagcgttgtccttagccagcagatgcatccacctggtgccacaactgtagaagaaattcagtttgcactggagcagcgcaactcaaaggcgaagcagcaacacggttttgagcagttcaacagattgtacccctgcaagaagcaattgtcatgcctcaagatgttcagacagtgagaggaggaacataaggatgatgaacaagtccgaggtgatcatcccagaggtgacgggcatctagcaactcatttgcggagtcttaacttttatttttactttggccacattttgtatccttgatcagctcatagtggtggcagtggatgaatcgtgcacaaagttcagaagctgtgcatttcttcgatctctgagaaaaaaaggttcaggcaagacgagcaattgga

SEQ ID NO: 23025 - DNA, 196 bp, Setaria italica
  Peptide Sequence Number=SeqID_88999
agagaatttgttcttgattacatataaagagaaagagattccacgctttgacgcattgtatgctggataaagaaattccaggctttgacacattctctgaagttacaattccccttggcatgcttccatcatttagatttcctaagatagagacccagttcagtatgttatcaatctgcaataacctcatcttcta

SEQ ID NO: 23026 - DNA, 180 bp, Setaria italica
  Peptide Sequence Number=SeqID_89000
gggcggcggcgtcctcctccgcgacgctgtccacacggcgctgtacacgatctccgtgcgcatgtgctttggcgacggcgtcgccacgcgcgacgacgtgcgcgccatgcaggacacgctcagggagttcttcgacaacatcgtggaggccaggggcctcgcggcctcgagggtggcgag

SEQ ID NO: 23027 - DNA, 504 bp, Setaria italica
  Peptide Sequence Number=SeqID_89001
tctgatggaattggcaagattacgccagaccttgcaatggaagttgctaagacgctgcaactgacagataatcccccatccgcttaccagattaggtatgcagggttcaagggcgttatagctgtctggcaaggagaaaatgatggtatacgactttccctgaggccaagcatgcacaagtttgagtctacccacactgtgttagaggtggtctcatggacaaagtttcagccaggattcttaaaccgccagattattacattactgtcctccttgaatgtcccggatgctatcttttcacaaatgcaggaagccatgctatctaatctcaacaatattttgtcggacactgatgtcgcttttgatgttgtaaccacctcttgtgctgagcaaggaaacaccgcggcactgatgttgagtgctggcttttcacctggaactgaaccgcacctgaaagcaatgctcttggctataaggtcattacagctattgggtcttttggag

SEQ ID NO: 23028 - DNA, 280 bp, Setaria italica
  Peptide Sequence Number=SeqID_89002
gctctccctcctctccccgcgccgcgcccgagaccgaaacgccaagaggagcccggacaagccactccgctccactccactcccgctgctcgaatcgcacacccacgcgctcgcctcgtcgcgcgcactcggggcccggccgaggaacggagcgggggtgcaccgcactgcagcagcacggtgcacgacgacgccaccggcgcgcgcgcgcgtacaggcacgtgtgttggtacttgacacttgctccgcggcaattccgagcaagggggatggggagcgc

SEQ ID NO: 23029 - DNA, 423 bp, Setaria italica
  Peptide Sequence Number=SeqID_89003
gggataaaatcgtatcgatagattgatattaaatttgcttttaaatttataccagttaatgatgtacttttaagaggaataaatagtcaaaatccactttcaaagactttcacataccgaagtagtatgacttatatggatggatcaagggagtacaacttctatttacaacactattaatcaaattaaatgaaattagggtgaattgaaaaagattagaaaacacagaaatagggaacaagattagaaaacacaaagatcacggttttagagcctcaaacaacaccatatctgatttattattagttagtacaaagtcagatgtaatctgatgagccgcaaatgttaaggttatttaggtttgaaaaatcaaacgttggaagctcctaaaacgttgcgtaaacataaaaaggataaccctct

SEQ ID NO: 23030 - DNA, 185 bp, Setaria italica
  Peptide Sequence Number=SeqID_89004
aaaaatattcataaagtagtctactcttttgaaggacattagttttacatacgactagtgaactgatgcaataagttcatttacagcttagcatatttatttccaagaaaaatgtcaaatgaatttcattggtgaacctgcctatttcctaacaagcatgcaacagttaggtatgtttttgaatt

SEQ ID NO: 23031 - DNA, 1132 bp, Setaria italica
  Peptide Sequence Number=SeqID_89005
tactggctcaccctcgacctcctcgcctccgagcagggcgcgcccacgccctgcgccgccgtgcgtgtgccccgggccgccgacgccgacgtcgtcttcgtgcccttcttcgcctcgctcagcttcaaccgccactcccgggtggtgccgcccgcgcgggacagcgaggaccgcgcgctccagcggaggctcctcgagttcctcgccgcgcggcccgagtggcggagggccggcggacgggaccacgtcgtgctcgcgcaccaccccaacgggatgctcgacgcgcgctacaggctctggccctgcgtcttcgtgctctgcgacttcgggaggtacccgcgcagcgtcgccaacctcgacaaggacgtcatcgcgccgtaccggcacgtcgtcgccaacttcgccaacgacaccgccggctacgacgatcggccgacgctgctctacttccaaggcgccatctacaggaaggatggtggatccatcaggcaggaactgtattaccttctgaaggacgagaaagatgtgcatttttcatttggaagcgtggccggtaatgggattgagcaagcgacgcagggatgcgggcttccaggttctgcctcaacattgcaggcgacacgccgtcctccaatcgcctttttgactctatagtcagccactgtgttccagtcatcatcagcgatgagattgagctcccgttcgaggatgtcctcgactactccaagttcagtgtcatagtccgtggcacagacgcagtcaagaagggatttctaatgaacctaatcacagggatcagccgagaagagtggacacgcatgtggaacaggttgaaggaagtagaaaagcactttgagtaccagtacccgtctcagaccgatgatgctgtccagatgatctggaagaccatcgctcggaaggtgccctcaatccgtctgaagatcaacagactacgaaggttttctcggtttgaaactaacaagacagatgagggtccatctcattcttcttcttggctacagaatcaggctccttgattttgaactagaaaactcaagttcgccaggtttcaatcctgtggaaaaagactgagcctgaaccgcgggatggggacaaatgttgcggctgctga

SEQ ID NO: 23032 - DNA, 1761 bp, Setaria italica
  Peptide Sequence Number=SeqID_89006
ttttgtttttttttttttttttagtcatttcaaacagcaccaggcagcaaacaagtctataacaatcgaaactgtttacaacaaaatttgttttcagcaggttgttgtcctccatccaagaggaaaggaacccacccaggtttcagagaattatctttttttgttctcgcagcagtaacgagtaaaatggcataatggtttgctaacatcttccacggctaaagagcaaccatgctaaatccagcgcacgtgcttccgggatcaggggatttcaccccttctaaatcttctacgcgactacgccccggtgcatacacgcgccataagtttgggacaagatttatgtacattacatccaaaggaaatgcttgcatcatgcggctcaggcactcttcacatatgacacaacgactgtgatatcgtcaagcttcccaccatagtaccggtacccagcttcttgagcagctgatgcgaatggtgattgcctgttcttgtccgtagctctttgtcgagccagagcagcaattttctgtgctgcaatctgaggctcaagtccaaccctaagagcttcaacaataacaccactaatctcattgttgtataaattgtcaaaaagtccatctgtgccagcaacaataacatcaccaggagcaaccggaaagtggaaaacctgagcagaacttggaagatcactgccacccccactctcgagctgataagtaaaattgaaatcatgctgctgtgaaggtgatctgagaacagtgcgaccatctctgactactacgaagccactatccccaagatttacagcatggataccctggtctttaagagtgatgatacaagcagtagatgatcctcttgctttggtgctcgtataagccttctccaaaactcttgatggatcaatggtcccctctggctcatctttgatagcactcattgaatttctcatgagctccttagcataaagtccagcatcaacaccaaggtctgcccaaccaccaacaccatctgctacaccaatcacatgctcatcggtgctaatgaaatgagcatcctcaccaccagttgcctccttggcagggtgaggcaagtaacaagagcctgagaccagcttcaaactttcagaagtaggtgcttttccatcagatgtaacagttgagtcatccatcttctcatcgagtgacaattgatgctctgtcgctccggtggaatatggcgccacacatgacgagctgaagtctctagcccatggctcaactgcaaagctcaatttccaacttggtccaactgcatttgtccagaatgacctattcccccacggctcacagcacttcaagcttgcaccaaacttcttgcaagactccaaccctctatacctaaaagagacatctggccgaggtgcactccccaccgatcccatggctgcagtacgtgtggagcgtgtccctgcagatggatccttgtccggttggcgcttggtggcacccagctcagctcgccggagagcatagccacaggcagccatgacaatgccacctctctgcagcaggccctgccctgcgcagggagaccgaacgcaaggggcccggtggattgcggcgaagaaggcggagggcgcgcggcggtccgtggtgtgcaggaggcgcgcggggtaggtggagagaaggaaccacgtgttgccgaagaggaagctccggccgccgcggccgaggggaggttccttttgggaggagagatggacgccgcggccaccac

SEQ ID NO: 23033 - DNA, 727 bp, Setaria italica
  Peptide Sequence Number=SeqID_89007
acaataacaaggtatactacaacaccgactactagagcatacacatagactgaagtcctgaatttccggcagcttccagcagcaaaagctgtcatgagggccagcaggtccagtatcatgatcaagtgcaatacctctagtggcacacttttcttccgggcagatttattcaacagaaacatgattacaacaatagatgccatgaatgagatagagttgaagcagaagaatatttcgtagcgctgaggattaatatcaagaagaacaggattgcctgccaaatgacctttgttatcagaccacaggacaccaggtggttttaggcctgggttgccttccacatggccttcatcatcatcagaccagaaaccacctggtgggttgaggccagcttggtacgtgatggaggcagctaaaattgcaagcagcatcaaatacttgtgcctctttcgaacatttttctcaggatgaccagagctttcttgctgcttagaagtagttccatgccaggatgactccttaccaaaagcagctgaagcacacgttctatagattcttccagttggccctcttagtccatcttgtgctgaggagagcagaagcacttgagccacaagggcgatcagaactgcaacagcaatgatgatgagataaatagattctcttgctttcctacagcttcctgcagaatacgcaatcaagaggctaaccaagcccaccaccaaac

SEQ ID NO: 23034 - DNA, 241 bp, Setaria italica
  Peptide Sequence Number=SeqID_89008
agggcatcgactgcacgcctcgaggcagtggggcttgcgtgggcagttgcgcactcacaggcgatggcgatggctgcggaggtcgatgacacgacggggcagcagaggttggtggcgagcgcggggaggcacgggcgcagggctggtggtgagcacgggggaggcacgagtgcaggaccggcaacggtggtagctgtaggcagcgctagggttggggaggaccaggagatgcaaccaacga

SEQ ID NO: 23035 - DNA, 512 bp, Setaria italica
  Peptide Sequence Number=SeqID_89009
ttacggttactttacgttaaggttaaagttaatttcttaagttacctatttggtagtccttcgtagtctccgtgtcctccggaaggcacctttgggcaggtcatgaaccactacctgagcctcggtggcgccgtgagccagttcaagacgccgcggttcgtgagccagtccaacagcaagttgctgcagatactgaacaggaacgtcacccagagctacttcagctctgcatatgggatctgatcgttgctgtccacacaagcttactgatagctgaaatgcagttatcttcttatcatcgtcttagatccttttactttgatcacttcatctagtctactgaaagtgtttggtgtacgatccgtcatgttgagggtagcgcaactgtatattgctagtagctcttatatgtaaatatagctgtttgacagtgtgtatagtaatgtagctgtgatgtaaggttgctgcactcctagctacattactatacacactgtcaaacagctatattt

SEQ ID NO: 23036 - DNA, 321 bp, Setaria italica
  Peptide Sequence Number=SeqID_89010
caaagaaaaaccatgtgaaggtgagctgtcggtatctttgaacaaaggtgaaaggaagggaaataaaaagtcgagcacgaggtgagctggtgcccgcacagccacagctagctcagacatcgacgacttggcactaggcaaggaacttgttggttaggtgaagcggcgttttccctgacctgccgaattatctgcgacactttcctgctagcttgtatgaacctgtcaaaggcttggtcgatggttgccaggtcagaggtgccgttagcttggaagtcggaacatggtgaagggaaaaaaaaacggagatatatttctaag

SEQ ID NO: 23037 - DNA, 397 bp, Setaria italica
  Peptide Sequence Number=SeqID_89011
gtatcaacctcatcaggatttcaaccagtgatcctatttcttctggatgagcctgaagagaatcttcaattatcaggcatgacaatagtcgtaatacatataatgaaagcattgtcgagccatcaatctgctgcaccaagtttaattgaagatgatgccctacaagtccttttccacatggttgcaaatggttcgctctctgtattttcgcaattcagggatggtattgttccccttcacacaattcagcttcatcgccatgcaatgcaggttcttggtcttcttcttgcaaatgacaatgggacttctgccaagtacatcaggaagcaccagttgattaaagtactccttatggctgtgaaagatttcaatcctcagagtggtgatgctgcttaca

SEQ ID NO: 23038 - DNA, 358 bp, Setaria italica
  Peptide Sequence Number=SeqID_89012
ggggtgaggatgtaggcgcagccgagcgcgacggcgagcgcgaacttggcggcgccggcgacggaagccatctctgatgggtacggaagaagctgtgcggattcggaagtcgggggaagagcgaggccgccggtgccgtggtacggggcgcgggccgggagcggtgcgtcaagaggaagaaagccgcctgggagctcgatggatggacgatggagtggctctcctcttcgagccgcgcttgctgttgccgttgtgtgagcggaaacggaggagaaaagcagaggaggcaaggaagggaggcggcagcggtaggccgccaggcgggccaatatcatatgacacggcaagttgccaagcg

SEQ ID NO: 23039 - DNA, 475 bp, Setaria italica
  Peptide Sequence Number=SeqID_89013
cgaggacaggaaggcggaggagtgggcgagccagctccagtgctggtcgctctacttcctgagctgcctcgcctccagggacctgtcatctcatgccatgatatgccaggacgccgtgttcctgcgcgagctctcccggatgtggggcggcctggcgaacggcgactctccggccggcgtcgggctgctgcgccttctctgcaggagcccagtcggccgcgccgccatcgccgcgtgccgcgacgcgctctccagtctctgtgacctcgcgcgctcgtccgacgactggcagtacatggccgtagattgcttgctcctcctcctcgacgaccgcgacacatggaacgccgttgctgacgccacggcgccgtgcctcgttgacttggtcgatctccggcacctcggtccaaggcgacggctaggcgatgccattgcaactgcgctgctccttgatgacagccgtgaagtaggtata

SEQ ID NO: 23040 - DNA, 250 bp, Setaria italica
  Peptide Sequence Number=SeqID_89014
tgcgcgcggaggaagtccgccaggtccgacggcgacagcaggttcgtcaccgccgtgccgatggtcacgcccacgtacggctcgccgctccccgccgccgacaccagcaccggcgagcagtgaagagagaggagcaagaaggggatgagcaagccgctgccgctccctcctctgctcctgctccccattgggagtgtgcgtgcgtgccctgccgctcctcctcctgctcctgccggtctcggggattgct

SEQ ID NO: 23041 - DNA, 538 bp, Setaria italica
  Peptide Sequence Number=SeqID_89015
tctccgactcagtgtgagtagtcgatgcctcacgctacaaaggtttccgcaagcacgcagcaagcagaaatagaggctttggtgatctggaggatggtctcactgccaagactagaaacttccaaggaagacgaggatgatgacgtctagtcgtgcgccagcatgttgtgagcaggtcaacaccggctcggaggaggttcacagctgcctgaaaccagtgagaacacccggcagctcggatctttgatgtctgtgctttgtaacatatttcacgggatgcactagttggtagaggactcgtgaaataatagggtgccaggaacctaggaaaaaaattgacagcatcgttcgctctgctgaggtgcagacgagggacgcaaacatgttctatttgtaccgttattattatacggattattagggaaacaacatcggtgcaactggctgttgactaggatttctttgtcgccatttctgtatgacgaggtatacaatgatcattgttttgggggctttacaacgttagaaaaaaaaaaaa

SEQ ID NO: 23042 - DNA, 658 bp, Setaria italica
  Peptide Sequence Number=SeqID_89016
atccctacgtggactttgtggtgtcatgttcagtatagtaaagagccacactcctgtttccacttgtttacaaagaaaactagtattgttatacgttgaactcttttacggtacacaatactaccacttagtgatatatagtatagagaagatctagccgtccattattatgggtaatttagtaattactacattgtaaaaagtgagattgcaaatggaattatcttgtagactttatgctagtgtcaaaaaaaatattatagtgatgttattttgtgttcttttaccatgatactcttatactacctatactactcatgtatactacccataccacaggtgaagttttcagtagtatagaattaatcttgaccatcagatgtttttatactagtcctttttgaacactagtatagcctagtattgtgtaccatagaagagctctatatgttgcataacatggaaagagtggtgtcagtaccaactggatgccatatagctcagttttcagtattggtagtctacacagcaactactgactattaaaattggctacttggatatggctttagcaaatgtagtctccatgggcttgattatttgattaatactgttcaacgagtcaatataggagtaatggcttagctaagccactcat

SEQ ID NO: 23043 - DNA, 798 bp, Setaria italica
  Peptide Sequence Number=SeqID_89017
aacgtctacgagaacctgccggagttcaactatcgcaagggtaagttcgaggtcgactatgagccgaccatcctggagattgactgggcgcacgagttcatgtaccaccgggtggtgctctcggcgagcccctccgccgggcgcgcctgcatcgtgctgctcctgcacatgctgcatggcgaggtctccttcgccaggctcggcgacgaccggtggacgttggtcgcgcggggcgagggcacgggcctccaatggaggtagggctaccgcgacgccatgtacagtgccgccgatggcttgttctacctgctcggatgtgatgcctccttgtgcagcttggaccttaacgggtcctcgccggtggcctgcaagatcatcaacgatgtgccaaaatcgggcaccccgaccaagtacaaccttgtccagacaccggcaggagacatcttgcaagtttggaggttgagggattatgtcgactcgctaacaccggcgggcattccaccggaatacatggaggacgaaggggacctggggaacccgctggagctgaacacctttcatctgcaggtctacaaggttgacctccatggactgagggtggagttgatcaagagcttgccagattatgcattgtttcttgatttcaatggctcgatgtgcctaccagttaaggatttccccgggttaaagccaaattgtgtttacataaccgatgacttgatggagtatgtgaattgtaggaagaataaccggcgacaagttggtatttagagtatggcagagcaaagcatgtcgaag

SEQ ID NO: 23044 - DNA, 1317 bp, Setaria italica
  Peptide Sequence Number=SeqID_89018
aaaataagggaaataaacggttaagaatagtagaaacagcgttattgggaatcctttactgcaatcttgtcatgtgtacactctggccgtgccctcagctgctcagcagggtcgtggtttgaactcgaatggctccaatgacacaacacctacagatgcacaaaatgaaggagggaacaatgcattcaatgcaattgaaatagcttctataacttctgcaacagccattgtttctgtcctccttgcactgatcgtgctcttcatatacacaaggaagtgcgctccccggatgtcagctcggtcttctggaagaaaggaagttacaattttccaagatataggtgtgccgatcacttatgagactgttgttcgagccactggaagtttcaatgcgagcaattgcattggaagtggaggctttggagccacttacaaagctgaaattgcacctggagtgttggtagctatcaagaggctctcagtcgggagatttcagggagcccaacagttccatgctgagataaaaaccctagggagattaaggcatcaaaatcttgttaccttggtaggttaccatcttggcgagtctgaaatgtttctcatatataactacttatctggaggaaaccttgagaggtttatacaggagagatccaagagaccagtggactggaaaatgctgcacaagattgcattggatgttgcaaaagcacttgcttatctgcatgatacctgtgttcctcgtatccttcaccgggatgtgaagccaagcaatattctgttggatactaacaataatgcttatctctcagacttcggactggcgagactcttgggaaattcagaaacacatgcaaccactggcgtagctggaacatttggatatgtcgctccagaatacgccatgacttgccgtgtttcagataaagctgatgtgtatagctacggcgttgtcctgatggagctaatttcagacaagaaagccttggacccatcattttctccctatggtaatgggttcaacatagttgcttgggcatgcatgctgcttcgtcaaggccgtgcacgggaattctttattgatggtctgtgggatgttggcccccatgatgacttggtagagacattgcatttagcagtgatgtgcactgttgattcgctctctattcggccaactatgaagcaggtcgtccagcggttaaagcaactacagccccaattcgtgaacatcgatagagataatttacggtacctaaacttaattagtaaagtactaaggttacgttacctaagtacggtttaaaagtactaaactta

SEQ ID NO: 23045 - DNA, 119 bp, Setaria italica
  Peptide Sequence Number=SeqID_89019
attacctcagcttgttggtgtgtttaagacagccgtgtaattacacgtacataacaacttagctaccacggtaagtggtgaaggaggaagtgctctgccgtctggttctcttttgcatt

SEQ ID NO: 23046 - DNA, 405 bp, Setaria italica
  Peptide Sequence Number=SeqID_89020
ctgaaatcttgttgctgaacgacggaggagctgaaacatccttccacatctccagatgaacttcgattccagaagcaggggatccacgggcaacatccagcacatgggttgtaatggggggccgacttcggttggagctacctgtaatgtcaggagctttattggcacaaggctgggggagagctccaagatgtgctccaataatccgtatgcgatctgctgctttatctgattggatgttgggggctttagtagtagtagagggaacagtcggctctgatgagaaaagctttgcaagacgcagttcagttatcttaagttcttcctgtgctgcagcctcaagttcaacaattggcctattcacataacgtctcttaagctcagccaagacttcaggtgcagtcc

SEQ ID NO: 23047 - DNA, 766 bp, Setaria italica
  Peptide Sequence Number=SeqID_89021
tgacggaggagctgaaacatccttccacatctccagatgaacttcgattccagaagcaggggatccacgggcaacatccagcacatgggttgtaatggggggccgacttcggttggagctacctgctgctttatctgattggatgttgggggctttagtagtagtagagggaacagtcggctctgatgagaaaagctttgcaagacgcagttcagttatcttaagttcttcctgtgctgcagcctcaagttcaacaattggcctattcacataacgtctcttaagctcagccaagacttcaggtgcagtcctcccagacgcgcaaatcatgaacacgaagccgaatttctccctgtacttggcattccactctgccagctcctgggaagtcgaatctgtggctgtggagatagctgccgattgttcttccttgctccacttggagacggagggggaggtggttccgattgccgggtgcgccgcgaaggcctcgagccatccgttgacatcgacctcgttgagccagatgcggcgggcggcgaggagggcgtcggcgagggaggtgaagggggaggcggccgccatcgcggcggcgaagcggcggctgccgttgacgcgcagcacgtcctccacggtgagaggcgtcggcgtcgccatctcgccggcggccaattcgacagcgcgcgggggcgtgaggggatgcggtggaggtggttctggtcagtcgggcctcgtgactgatcccgcgaggtggctttgcttgctc

SEQ ID NO: 23048 - DNA, 740 bp, Setaria italica
  Peptide Sequence Number=SeqID_89022
ctttgtagatgcattattgttagtattctatttctattattgagagaaaattcattagactatttaaattaacaaagtgggtaacaataagaagatcttagcactaactccatggacatattcatttgcagcactatgcagtatttcgtaaactgtgattgttaatcaaaatagatcacaaatggtcaatgccctagcatttggagggggagaacaaatgccaagttcagctgctcaagcacggggtacatgatattgatatgaatgaaataacagatctttccggataaggaagaatcaaacagattcaacggtgtttctagtataccactgtatgcaaggtgtgggcctgtgagcataagatggcttgcatacagaattacagatatgtgatagatacaacaatactgcacaaacaaataacgtgaaaaggcagactttctgtagaacctagaaacagatagaatggaattgatacctgctgctttatctgattggatgttgggggctttagtagtagtagagggaacagtcggctctgatgagaaaagctttgcaagacgcagttcagttatcttaagttcttcctgtgctgcagcctcaagttcaacaattggcctattcacataacgtctctgaaatgcagcaggacaatatgaaggtgattacaatgaaagaaataaaaaactgacatacattctttaagttaatcctttacagcgatggaccatgatattacc

SEQ ID NO: 23049 - DNA, 767 bp, Setaria italica
  Peptide Sequence Number=SeqID_89023
ttaagtttaaagtttttttacatggaacaagattattcatcgcaatggaagtgtcaagtttacacggctgtcttaaacacaccaacaagctgaggtaattacacgtacataacaacttagctaccacggtaagtggtgaaggagaaaggggaatgcaagagaggaacatggaagtgctctgccgtctggttctctttgatctcaaatatgatgctgacataagggaagaaccctgcaggcgcatacttgccagtgttgaagcttatgcggtagaaaccaggagcggcattgtcaacaatgtccatcagctgaccgctgcggccatcattgtttgtaactgaagtgccaagagttgcccatccactgaaatctttgttgctgaacgacggaggagctgaaacatccttccacatctccagatgaacttcgattccagaagcaggggatccacgggcaacatccagcacatgggttgtaatggggggccgacttcggttggagctacctgctgctttatctgattggatgttgggggctttagtagtagtagagggaacagtcggctctgatgagaaaagctttgcaagacgcagttcagttatcttaagttcttcctgtgctgcagcctcaagttcaacaattggcctattcacataacgtctcttaagctcagccaagacttcaggtgcagtcctcccagacgttatgtgaataggcgcttcgtgttcatgatttgcgcgtctgggaggactgcacctgaagtcttg

SEQ ID NO: 23050 - DNA, 950 bp, Setaria italica
  Peptide Sequence Number=SeqID_89024
gaagagacgatatatatccagttaattaacaggactaaattagaccaattcagttaccatatacaacctgaggaatcagagctaaaaataacctgagaggcttacaaactgagaggcgaactaacttgtccacataacaatttacatgacagctaccgaactgatatttaccaactgacgaagcgcaagatgtgcatattgtagaacataaatcggcattaacaacacgaccctataaacgacgattcagcagcatagtctatgagctaactatgatgcagctgtagtgaagaagttcaatcagtattcagttatgaaactataaggccccagattcctctccagccaagaacttacgggcccatgattcaaggtactccttacccatgctcatgaaaaagcttcgatgcacttcagactctggcttacaaaggtacattccaacagagagcctatcaggatgagacagtggaatttcttttagcatgtcccataaaggggcatttgggtctgatgttgttggttgtgtccgaaccagttttggagcactgtcacggattcccactaatgtactgttcaatgcgtccatgttcctgccatcacgtggaactagagcctgcagctttggatttggttttgttttgctgatgattttcatcttctttgcgctaggcttgagagcagccattgtgctctcagcaaaggaaccagatggctgcacagatggtgcactagtgtcagacatgacttcacaagggaccccaccgctacttgctgccacctcatgatggttatcttcaccttccaactcaataatatctaagttcgccccatcttgatcccttgtgtctgcaccctgggcaataatattcattgcaatctgggtttccaattcctcatgagaatcatcatccataatagggtctctcatgcaggcagcatccagctcg

SEQ ID NO: 23051 - DNA, 470 bp, Setaria italica
  Peptide Sequence Number=SeqID_89025
agaacactgagcctcggttcggtttcagttggggaagaggagatgatcgtatggctgacaaggtatgatctgctgctccagctagtgtatttatcaaaggagtatatcacctgaccgggaggagagcgcatccttgcggcgaaagtagtatacggtggtgacaaggaaagcagtagttgtgagaaccacacacactaggagcgtaattatgaccgttttactggagacatgccttttcccttcctctgaacttccggatgtgcagttacaggaagtgaagcaactcctatcacgtagcacagcgtgttcttctttcagaagggtcttgtcagaggcacatgtgcagttccatgaccccgttccaccatcctcatcttgttgacagtggcaggacgaagagcaattggacagcaggctgctgttagagttagattcacctagcggatgagctgcacatatacatgtccaat

SEQ ID NO: 23052 - DNA, 1830 bp, Setaria italica
  Peptide Sequence Number=SeqID_89026
cgtgtttcagttgaaagtatgggaattgattgccattggtgttgcgatattcatggcagttctgttcgtcattgtactgtgcctttcgctccgaaagaaaaagaaggcagtgaaagggtttgacaacacttcgctggctgagatccctatcgtgtcaaaggaaatcaacgtggacagagttgatgcgcagagtctacatgacagcgaagtgaccttcaagccggtgcatgataaatatacgcagatgaagggtgctgggaatttggtagagagcagatctgtcgatgtcgatacattcagccagtgcagctccgtgtacaacatagagaaggctgggagttcatactctgaagattacagttacagcagctctgggcctgctaggaaaggcagttcaccatatgcatattcagcatcgccactggttggtttgcctgagttatcacacttgggctggggccactggtttaccttgagggacctggagctggcgacgaatcggtttgcaaagagtaatgtccttggagaaggtggctatggagttgtctacaagggtcggctggtgaatgggactgagattgctgtgaagaagattcttaataatgtgggacaggcagagaaggaatttagagttgaagttgaagccatcggtcatgttcggcataagaatctggtgcggcttctgggatactgtgtggaagggatacacaggatgcttgtctatgagtatgtcaacaatggcaacctagaacaatggcttcatggtgtgaatcaacgtggtgtccttagttgggaaaaccgcatgaaaattctccttggcactgcaaaagccctcgcttaccttcatgaggccatagaccccaaagttgtacaccgagatattaagtcaagtaatatcttaattgacgatgaatttaatagcaaggtttctgattttgggttggccaaacttctgaattctgacaaaagccatatcaatacaagagtgatgggaacatatgggtacgtagcacctgaatatgcaaacagtgggatgttaaatgaaaagagtgatatttacagttttggagtcgtgttgttagaatgcgtgacagctagggatccagttgattattctaagcctgcagatgaggtgaatctcatagagtggcttaaaatgatggttaccaataagagggcagaggaggtagtggatccaaacctcgaggttaagccaccaaaacgtgcccttaagcgggcaatcttggttggcttcaagtgtgttgatcctgatgctgacaagaggccaaagatgagtcacgttgtccaaatgcttgaagcagttcaaaatgcatattatcaagatcagagaaagctcagccaggtgggaagcatggatattgaatcgcagcagtcgctagaggaaacttcaaacaacgctgatgcctgaagctccaattctgaaccggcacagaagaataggacacctgaaatcatctgattacaacattgattcgatcgatgttcggtactttgttagattgagtggatcagatttacagtttgcttatactggaggtggtggttaaatcaattaggaacaagctgctcatttccatttaccccttttcccgggtgtgcttctatactcccctgaaagatttgccttcatcactttactgtaggatctgtgcagttttcctttaggggagcatagaagcatctttttcacctatatttatcattttagtcaccaggagggactaacctcaaaggcatgactatagttaccggattccgttacccttgtatagaggatttatggaaacttagttttaaccccctaaaaaa

SEQ ID NO: 23053 - DNA, 300 bp, Setaria italica
  Peptide Sequence Number=SeqID_89027
ggcggtggtggagccggtcgcgaagagggcgggcgaggtggaggcgttggcgcggagcacggagacgaggcggaggaggttgtcggcgtaggtgctgcccgccgagtagttgccgctctggccgtcgcagaccgcccacggctgcgctgcggcgtaggggatgaccatcaccagcgcgagcgccgctaggtcgactacaggaacgcgcggcatggcgcggcgcccgcgagcgcagcagccggcgcggcgcgggtggaagaatttgtgagattattgcagcaagctacttgttgcatgcag

SEQ ID NO: 23054 - DNA, 2039 bp, Setaria italica
  Peptide Sequence Number=SeqID_89028
cctgatgacaagcgccggcggcatcaaacgaggacatctagggggatggccagctcgggcctcggcccaggccagagacgagtccctcatcaaggtggccgccgacgcctcgattccttcctccaggatggccgcgatcatgctcatggagggccgccgcgacggctccgggtcgatgcacaggttcaccacgttgcagacgatgcccaggccctcctggttcacgctctgcctctgcagcttcgggtccaccagcttgctgaactcctccggctgctccagatgcttccgtgcccagtctaccaggtcccctgtatctttggaagccgaggctctgccgctgataagctccagcaggatcaccccgaacgcgaaggtgtttgcctggacgtccatgaaacgcttgtgccgagaatccgtaacgctgttgacggacccgccatttaccgaggcaagtcctggtttcgtcacaagatatctccacctctccaaatcgattatctttggtgagtaatcttcagtaaggtagattgaactggacgtcagtgcagcaacagcaaacggaggttgcagctcagtgtgcaagtatctgagagcacgcgcgatggcgagtgctagtttcatccgtctgggccaggatagctgccacccttccccatcgtgaagatgctcatagagtgtcccgtttggtgggtactgaaacaccagcattcttgaaaacggctcggactccttgcagtatcccaccatctttgcaacattttcatgactcagcctggccatttctatcacctccttctgaaagtacagctccacatagtcattccagtaaggcactgaaacggacagtgacacaacagcgatctcccggccatccttcagagttcccttgtacacgacagtctcctgagaagatccaattatgttgctgaagtcttcgcaagcttctgaaagctcctgccggcttatcttcggcacatttaccaggaggtcatcatcgattgatattactgtgttctccttccagcttacagctcttgtccatggagaactgttcctggactcagaggatctagctctgcaccttcggaggccagtgatggtacaaagtgttaacaaacaaaggaatgaaactgctgcgatgacttccagaatgagaagccaaagtggctccggcagaccattctcattcttatcagtatggctgtctttgcctgtgtcctgattaattgcattttcacattgctggagtggacggtttgacgtgtcattattctggaagcaattccatgccaagcttgatctttggatttgatttaagcatgtgggaatatctccaaccaaaaagttatatgagagatcaatatcggttagctgagataactgacacaatccaatttgatcattgctgttggcggattccatgttcgaatcattacttgccggaataatccctgtaaggcggttattgctcaaccgtagctcaaggaggtttcccaacttgccaacctcgggagggattgcgccatccaaccgatttgcgtgaaggtctatttttgtgatctttgtcatgtcaccaatctcactgggaatgggccctgcaagttgattggtgctaaggttcagctccataaggttctttagcttgccgatgtcttttggtattgagcccatgaatgtattgtgatccaacacgagtttttgcaaagatttcagggatccgatttctggtgccaagaatccttgcagagatgaattcgacaactctagagtaaccacttgtctgttgaaagccgagcacccgacgccggaccatgtgcagggatccttgtccctggagttccagtccgatagcttcgacagaggatcatcgtagatggctctcttgaacgcaagaagcgcagatacgtcatctgaaacggattcagaattcctgacgagaagcaagcagaggatggagatcccgagcagcctcgccgtcgacatgccgcttcctcccccgcgagcacgacaaaaacccggggaacgaaggacccacc

SEQ ID NO: 23055 - DNA, 1500 bp, Setaria italica
  Peptide Sequence Number=SeqID_89029
gggttcaagaactgcatcccacgttatacacaatcttaccacaaacagcctcaaacctttctccttccagcctcaaacccgataacaaaagcgcctctccgccgccgccgccgacgatggcgagcctcctccggcgatccgcctccccggcgcgccagatcctcctcctcccgcgccacctcgccgccgccggttccgcccccgcctcgtcccgcgcgttctccggctactactctcgcgacgacagcgctaggtacgacccgccgggcacgccggtgaactggggcgtggccatagtcccggagaagaaggctttcgtggtggaaagattcgggaagtacatcaggacgcttggctccgggatccacctgctgatccctgcggttgaccgcatctcctacgtgcactcgctcaaggaggaggccatccccatccccaaccagtccgccatcaccaaggacaacgtcctcatacagatcgacggcgtgatctatctcaagatcgttgactcctaccttgcttcctatggtgcggaaaatccaatttttgcagtcattcaacttgcacaaacaaccatgaggagtgagcttgggaaaatgacattggacaagacttttgaggagagagatgcattgaatgagaacattgtgagggccattaatgaggcagcaacagattggggcctgaagtgtctccgttatgaaatcagggacatatctcctccacatggtgttaaggtggctatggagatgcaagttgaagcagaaaggaaaaaacgtgcccagatccttgaagcagaagggaaaaaacgtgcccaaatccttgaatcagaaggtgaggctggagcggttcttgccttatcagaagcttcagctcgtggaattagaatggtttcagaggctatgacaactaaaggcagtactaaggctgcgaacctgagagttgcagagcaatacgtcagagccttctctcaagtggccaaaaagggcaccactgttctgcttccaagtgacggtggcaatccatcatctttcgtggcccaggctatcaggatcttccagcacctccaggccaacaccccccagatagaagatctggaggaatcagaaggagagactggccctgctgaaacaagtgagatgccaccactcatcccagatgcagatcctggggcaaacttctcgctccaacgccacaagaacaagatttgagttgcactcgagtgcctgaaggaagtccgttttttgtctctattgttctgcaaacatggaagtgccactgataacacctgtagcattagttttctgagtgagagaaagttaatgcgcaactgagaagttaggggatagatgcctaggcaattggtttctagggaggcaaatgcaagaagtttggtgactggagagaaagattcctgttctggagaacattaaacttttgctcgtcttcaatctgatgggaatgaatgcaaggttgggatatggatggtgaagcaagtac

SEQ ID NO: 23056 - DNA, 887 bp, Setaria italica
  Peptide Sequence Number=SeqID_89030
gtaaagatctcgattgaagcatctcgcgccatttttaaggtagaaagattcgttaggttttttccttttactttttttcttttactatagtgtattcgcgtattatttttctccccctccatggattctttcaatgaaaaattgtcttcgatttttttggattttgacttgattgaaattaagtggatgcagtgaaaaaagcagttgaattagactactatttcaatctactaatcgattctatgtagattcaagataatataatagagagaatctaaagtgtggtagaaaaaactatatggagttctttctaccacactttatgattccaaccggatcctttcatttaagacttggatttttattttctttaatccctttttcatttcttcaatgattaattggaattccaattaatcattttggctggctgtttttacataaataataagtaaaaaggcagtaggaactagaatgaacaatgcagtagcaataaatgcgagaatattgacttccataacctctttattttttttttcacaataactcgggatgtaatcccatagagaggaaaaaggggtatcctgtaaatttaaggggaggacttgcattctgataatactgaatcaattcaatattatgaatattggatctatcaaatcaattcatggttgatagtggaataatataacatagcataggaagatcccttatccatactaagaccaaaatccattttttgattggattcgaaactccctctattccatttttcattcttttctacttttgcttttctatatgtataacccaaaatctttcttatcttatccaatttcccttcccttttttttttttttttttttaattcgtttaaaatggtgaaa

SEQ ID NO: 23057 - DNA, 884 bp, Setaria italica
  Peptide Sequence Number=SeqID_89031
ctgctgcgagttgggttgggggaaaaggagtggagcgcctgcgctgcgatggtggagtccctgttctggaatctggggcaccagacccactcccccacccccatattggctgggggaatatttgatactgcacccagtactgaatctttttgcactgaatttcctttaccactttatcatcacttcctttccttcagaccacctccctcggaactttttaaataagatactgggggagatgaaatggaatggaggcaccacaggcagagaggggtcctgccagatctgaaaccggagtgcccgtatcccactccgaatctgcaatagcaatgctccggtagtccggtccagtgccccatccgtcttctaaatttgcattctatttttcactttttcgtcgccttgtactgtactcaaaacaactcccccttttggcctttttcacttttcaattcaggaaactaagcatttgcacttgcgtctacacgggcatcatcctgtggttgcagaaaagtgcaaacattcagggcagttgtgagaacagagcctgaataaacgtaagaaaccaactgaacaaacatgtgactgtaagaagcatccctcaagattcagatctgaaagaacaaacagagcttcaattgccaggcagcaagcagatatgtgatgtagccactggattgaggtatgcaacaacatccaaaggcaccttgtggcaacacagagagcaccgcaacaccaacgcggtatgtaaggaaggatgacttgtaggttggtaataggaccttcttgtgatgttcaaacaagcgaaacaactaaccaggccataacgttttgtgacctcagatgcttagattccgttactgatctcaaccaagctgtgacca

SEQ ID NO: 23058 - DNA, 365 bp, Setaria italica
  Peptide Sequence Number=SeqID_89032
tctcgagatggcattacttgttggtatgagtccccatgagtcacatctctacccagaaggaagattatttgatagacacaattgcattgcatgatgtgatgggcattctacgaccagtgtttgccaatccttcaatctgtaagatcttccatggagctgacaatgatgttcttggcttcaaagggattttcatatttatgttgtgaatatgtttgatactgccaaggcatgtgaaattttgtcgaaaccacagaaatcattagcatatttgcttgaactatattgtgaagtgaccacagacaagacaatgcagcgcgaagattggagattgcgccctctgacaccagaaatgattgagtacgctc

SEQ ID NO: 23059 - DNA, 410 bp, Setaria italica
  Peptide Sequence Number=SeqID_89033
acccttagctagttttttcttattgctatgaatgcatgcaacttttcttaaacaattgtgtttactactgatcttatttcaggcatgtgaaattttgtcgaaaccacagaaatcattagcatatttgcttgaactatattgtgaagtgaccacagacaagacaatgcagcgcgaagattggagattgcgccctctgacaccagaaatgattgagtacgctcgcactgatgcccactatctgttgtacattgcaaattgtttggcatcagagctccatgcaaaagcccgtggtacgttctaagttctatatcaactattctcttcctatagtttgtgctttctttttttgttcacgttcagtatcctcacagtcagtgaatatattatacttggtattatcaacgcggcgc

SEQ ID NO: 23060 - DNA, 526 bp, Setaria italica
  misc_feature (519)..(519): n is a, c, g, or t
  Peptide Sequence Number=SeqID_89034
gtagaagcgccgaacttcgttccaatctttccatcagagattttccagctagttaacttcgtcctgtcatggtgaaagaggaaatgaatgcaaggaccaagttcgttgctatcattcttgtattcgccatggtcgcccatggtttggtgagtcctggcatggggatgctagcgaacaacggtgccggagaaaccaaaggcgtgaaacccacccttggtgttggtggtggaaccaccgtggacaatcaccatgccatccctcgagatcagtatagcaatcatggaggagatgaaggaggtagtggtagtgattcaaacaactagtgcccagttcatgttctctaagttctctatggtgttggtttctacagattcatgtggctgtttgtgtgggagaggaaggttatatttgtgttaaggtactactcctcatgtgacatataacacacaaatatgtatctgcaaccgtaattttggaacgtgacaatatatatactgtttgtaaaaacaaaaaaaaaanaaaaaaa

SEQ ID NO: 23061 - DNA, 312 bp, Setaria italica
  Peptide Sequence Number=SeqID_89035
ttcagattgcttggatccctctcaaagcttgaggagctggacctctctggcacaccggtgaaaattctagacctgaaaaaggagatccaagttcaaaatcttcaacgaatcttcctgataggatgcaagcagctccgttcaattatttggccagaaaaaaggatggaacaactgaggttagtatgcattgatacgcgacaggaattagtgttgacggaaacatcacgtgattctcttgtctgcccagagcaggaaaagtattgccatgcacgtgtttctgtcacagacatgaggttctttcagtcgttggtg

SEQ ID NO: 23062 - DNA, 498 bp, Setaria italica
  Peptide Sequence Number=SeqID_89036
tggataatagagaacggaatctttactacaaaaaaaaaagagaacggaattgttcagaataacggcctgcccagtcccaagatgcaggttgctgagagcatcgattggcccgggcgagctagctaaagcctcctgtttaccgaggccgacgacctcggtcggcaaggccgaggccatttttggtgtcttgaccaatggaaccaatggtgttagatcctcctatcattcctttgagttgcggtagaagtcgacgcaggtctggcagtcgcagtccttgaagcggcaggtctcgcacccgaagcagacgcacttcatgcagccgctgcaggaggtggcgcgggagcagcccctcagcaccttgcggcttgctcgctcttcctcgtcgtcacaggtgaccctatcagttgtcaaatctgtgcatgtccagttgattttggcaagagcatcatggtacacacggcactcttcttttgaccggagccgaaatctcctctcctt

SEQ ID NO: 23063 - DNA, 1382 bp, Setaria italica
  misc_feature (599)..(599): n is a, c, g, or t
  misc_feature (1287)..(1382): n is a, c, g, or t
  Peptide Sequence Number=SeqID_89037
gaagttcggtcccaagaccctgatgaggaccgccgcggtgagcttccgcgtccgcctcatcgcctcggagatcgtccgcgccgtccaccgtggcctcaccggccaccagcgctacgacgcctcctacggagaggacgcatcgtatgggtatggagatatctccgacgaccagaccatcaagaaccgcgacgccgacgctactgccgcgatgcttggtgggtcccctcgcaagaacgcgagagcggctgccgcggcccagagagacgacgaggttctggatgacaggtgggtcaccgagagccggtgccgtggtaaggcccgaggagcgcagccacagacgggtcaccttgacgggctcaattgggaggtgatcgttgtcagagacaacatagtcaatgcaatgtgccttcccggtggcaagattgtagtcttcactggattgctagacaaattcagggccgatgcggaggttgccactgtgattgggcatgaggttgggcatgctattgcaaggcacgccgcagagcagatcacaaagaacatgtgggtggcaatcctacagattgtcatcctgcagttcatctacatgccagacttgntaaatgcaatgtcaacattactccttaggctgcccttctcacggaggatggagatagaggctgaccacattggactcctgctactgggtgctgctggttatgatccacgcgtagccccatcggtctatgagaaactaggaaagattggaggagattcagcactgagcaattacctctcaactcatccttcgagtaagaagagagcggagcttctctcacgagcccatgtcatgaacgaggcactggagttatacagggaagttagtgcaggtcaaggcactgaaggtttcctctagattctgggattcactcctctgcttgttccaaatgcctgacaaaaaggctggtcatcctagcctcattagtggtggcctatgcattttgcatccgagtgattcatgtctatgcctggaagatgaaagaatgtgttttatgtcccttgttattttcagctgttctcttgctgaatgggccctctgcaacaccctaaactggagcatagctgcttcaattgtgattaggaaaaggaaaccaagtatactatctccagtcatattttacttgacgttgcaaagaaaaatatctctggttcttttggttgtctgaaatggcaacttggaccggaggtagtagtccatactgtcaataactgtttgttgacagcatcgtctgaaaaaaaaaaaaaaannnnnnnnnnnnnnnnnnnnnnnnnnnnnnnnnnnnnnnnnnnnnnnnnnnnnnnnnnnnnnnnnnnnnnnnnnnnnnnnnnnnnnnnnnnnnnnn

SEQ ID NO: 23064 - DNA, 321 bp, Setaria italica
  Peptide Sequence Number=SeqID_89038
tactactattattttactattttcttgtattacgcgagctgcgcaaaaagaagacgcaacaaactttcaatgtcagtttcgagtgccctgtgattctttaagcatttctctcaacctcagaacttcgcggcagctctgagaaagctccttcttcaacatggtggatgcctcttggtatttggcgtccatgatcctcatctcatccaccgcttctttgagctgtccgcgatgggcttcaagttgtggttccagccaccgaatctgcatgcgaagctttgtcttctctttgttatgagccacagcatctatttttcattattg

SEQ ID NO: 23065 - DNA, 2227 bp, Setaria italica
  Peptide Sequence Number=SeqID_89039
accggcaaaatgcttctacttctttttcctgctactgctggctcctttcgagccttcagcgatggaggcctccacggaggccacaaggctcgcctccagctgatgccctctcacagccgatctcaccttcctcagaatatgttgcttcatcaccgctctctcagcagactggacgttcttgcacatgttcaacccctggatgtacctcgacaccgcgccaccgaagggctcgccggctttctcaagggccacgagcttctcgacgacctgggaggcgagcatcctctcgatgcagggtttggttccgaccaccgcgatgtcgaccagcagctgcatggctatttccttcgtcttcaaggacttgcggtcgagcaggctcacaagtttttctatggttcccagttgcagaaacctttgcaggacgagggatccaccctttgcaaagacgatctgatggagagcatagtatgcggaatcctggagctcatcgatgttgcactgcatcatgtcgatgagaccgtgaacgatcttaagctccaggaacctgtggacgtatgcctctcctccattgcaggccaatttcatcaccagaaaggcagtctgagtcctgacttggttgctttcaacttccctgcgctgtagcagcaatgccagcctatcaaacagattgctccccaagaggagatcttgcacccttgaatcgtttgccctctcagcaagaggtaataaaccttggatggcttcaattatatctttgttgtctttttgcaggatcttatgaagaatcacctcaaatgattgttgaggctttggtggtggaggtacactttggtcaaacaaaacaaatctttccaaactgatccgagcgtgccatggcaaatgaatcagcactccaggccccatgcacccttgaagtggagcaccaagttcacagaatgtttttagcatgacaatcgagtgatgctgtgagatctcagagccattgcctagaagaacaagaagtttcttgtcaactcccgattcaatcatggtctccacagccttcaactttccaacttttgtcaaagatgcaagagttgtaaacacaatttcatgccagtgttcattttctggagacaagagatctgtcattcggtctattggaattctcgacaaaatttcatcagcaattgtggcatcaacatgctcagatatcttggcaaggacagaagacaagttggctagagttgaagtatctttacatgcgccaagaagatcgattaatttatctatggaacctgctgtttcaagagactgggcaagatttgcgtagtctgcttggaaaaatataactgtaattgccttagtgattgcaaaaatgagatctggagaccctactgaaattatctctggtattcgaggggcaagtattttgctgaacccaagtctgcttgcctcaaagtcagatatggatctgcatgccatgagggcttgagttgtgttgcccaataaaatctcaatctccatgaattctagcagagaaaagaatgatctcatcttctgttcagctgtccctttcacacactctttgccaaaaacaaaaatccaaggagcgactagtgcggcacaatcagaaattgattcagataaaagagtacgaacagcatcatttgttttgttctcaaggtagagtgaaaccatgtcatgcatatggtacaacagttggtcctccagtttgatgatgagtgagccttctactaattttgaaaccacgagagagaacaaactgtcctgcagaagtgctgaccaaatggattccagacaagcctctggaacaggttcttcccaagagatagctgcaagaaccataaaaaatcttcttgaattctctggcattgcttctaagctgtactcaaaagatccaaatatggtcaacgtgctctccacgtctttctcattgacgtatgaaactggcccaggtgcacaagtggcatatgttgagaggttggatattgctttctcccaattttccactctggtctccttcctgagagccttgcccatgacagcaactgtaaggggatggtgaccacaacgatccagcaagacttctgcaacaggcggaagctctccaacgctaagaagactgtgatagagaagaatttccttgctgatctccttgatatcatctttggatatttctaccctttcagcttctgcaatcttcgttattatttgctttctatcc

SEQ ID NO: 23066 - DNA, 757 bp, Setaria italica
  misc_feature (1)..(67): n is a, c, g, or t
  Peptide Sequence Number=SeqID_89040
nnnnnnnnnnnnnnnnnnnnnnnnnnnnnnnnnnnnnnnnnnnnnnnnnnnnnnnnnnnnnnnnnnngggtttttaacgtctccatcagaatttcaggatgaaacagattagtccagggttcgcttgagtaacttaagctgctctcaagttttcacttgccagaaaggtgtagaaaaaagtaattcatagcacttaaatacaatggactgaactgcacattagctttacgtagttgtaatctgctactagaacacacaaacctttgataaatgttgcttagtgttaagtagttaagcgtattcagttactctattccattcgtcaccgataactcttggagggttaggatgtgtcttcacgcatgccaccactttattcaccacggatggtatgattttaccaaagaactctatctccatcagcttcttgagattattgagaccgaagatcccatccttaggttctcgcaggaatgacaatgtcagtctctccaagagtgggagcgtggggaaatattatgcagtcatcagtatatgacttgtgatagaacttgaggcagagcagatttggaaggtctgcgagaactttgatggcctcggcatgtagtaccagtgtttcgaagagtaagcctggacacactttgaagcaacgatatccaaggaggtagattcttcagcttcccgtgaggccaaaaattagagatgagtagaggaggtgagtctacagaagctagaatgttcagtggtgagctatgct

SEQ ID NO: 23067 - DNA, 434 bp, Setaria italica
  Peptide Sequence Number=SeqID_89041
agctgcaccttcctcaaaccgcaccttgttaatgttctccagatcatttaattaacttaaaattgtctgagttttgcatattttaccgtggggaaatattatgcagtcatcagtatatgacttgtgatagaacttgaggcagagcagatttggaaggtctgcgagaactttgatggcctcggcatgtagtccagtgtttcgaagagtaagcctggacacactttgaagcaacgatatccaaggaggtagattcttcagcttcccgtgaggccaaaattagagatgagtagaggaggtgagtctacagaagctagaatgttcagtggtgagctatgctccttttcatctagaatgtgaatggagagcgagcgaagagagctcgccagcttccccaaagaattgacgaatgccttccaattcacttccacattgcg

SEQ ID NO: 23068 - DNA, 655 bp, Setaria italica
  Peptide Sequence Number=SeqID_89042
tacagtgcgccaaatccaggccaggctgcagctgctgctgcaccaattgcagtgtttactggtgtcactgcaatctcgtttgctgcttttcctctcagtaaagtctttcccattgctctcctgcaagcattatcatgtggggcaataggagccatcattgttacccgagtgatccaaaaacagttaggtgagctactgtcttcggaagcagaaaagatagcatctgctgataagtcaaatgttcagcaggttggatttctttcggacattgctggccctacaggagctcaattgcagatcgtgtatggtgtatttggttacctgcaggtcttatcagcatgcttcatgtcatttgctcatggaggcaatgacgtctccaatgccatagggcccctggctgcagctttgtccattcttcaaggtgtggcaagcagtgcggagatagtcatacctactgaagttcttgcttggggcgggtttggaattgttgcaggtcttacgatgtggggatatagggtgatagcaacaattggcaagaaaatcacagaactgacaccaactaggggcttcgcggcagagtttgcagcggcttcagtggtcttgtttgcatcaaagcttggtttgccaatttctgccacacatacacttgttggag

SEQ ID NO: 23069 - DNA, 245 bp, Setaria italica
  Peptide Sequence Number=SeqID_89043
tcgcgtgcgcggtggtcgacgggcagtgctacgcggcgatggacgccgccggcgagctcggcgtccccgtcctcgcgctccggaccgacagcgccgccgcgctccgcaacatgctagcgatcccgcggctgcgcgacgccggctaccttcccttcaaagaggagcagctggatgagccggcgccgggcctcgagccgctccgcgtgcgagacctgatccgcgtcgacggctgcgacaccgacgag

SEQ ID NO: 23070 - DNA, 266 bp, Setaria italica
  Peptide Sequence Number=SeqID_89044
cgtggccgtgcccccgctccccccatcgatctcctctcgctgtccccctaccgcttcggtagcgagcgatcccggctacacgcggccgctcgacgtcgatcaacgccaaagaaagaggggccgactccggcgagaccgggagtcttcctcctcgggtgcaggcttcgctgcagctgcaaatagtccgtgctcctttacccagcgattccttcgagcgcgccctgcccccgtgcttccttcacttgcgcgtctgcgtcagatgcgtg

SEQ ID NO: 23071 - DNA, 683 bp, Setaria italica
  Peptide Sequence Number=SeqID_89045
ttttgggtaacttagaatcaattgcatgaagctctgttgtgacggttgcatctgacatgtctgtcggttcgtcaacggcaacagcataccgtactggtttgattcttgtagatgaggaaaactacactttggtacttactattcataaacatcatgcggatgggtttactggtaaatttattgtctactttggaggagaaaagtatcaaactgaagcctatttgctttcaaggattgttgaaaatgaccttgcgatattgattgttcaaactgataaaaggcatgaggttgtcaaatttagttgtgatcctttaagctatgaagttattttcacggtttgtgcaacgagtggtaccaaattgaatgataaagccaatgcaccactggttaaggaattgaatggtagtcttggtatatataaagggacagtgggaactccatgttgtgatgcattggatgcttgttatgaacatatagttggatctgaaaaatatttccaatttggtttatcacgtcatgatgacattattactttgaagaatatcgatgctgagagacatacagcagaaatagcagtgtcagcacctgtatttcgtttgaatggtgaagcagctggtctgttattttcggagggtggctggaccgattcgaaaattggggctgcttgcaaaaagtatcatctt

SEQ ID NO: 23072 - DNA, 904 bp, Setaria italica
  misc_feature (899)..(899): n is a, c, g, or t
  Peptide Sequence Number=SeqID_89046
tggctcaggaacaacatctgttcccctaaagcgcaaccctggatcccatcctctcagaacactggaattatggggactgactggagatgttattggaaagcttgcctatagcgcactcctaggctttgttgtgtttggcacattaaaattgttcagatttcagttagggcacatgaaatatgccaacccaagtagagagtctgcatccatgtcatccctgaatgaagcatctgcaccagaaggttcctttattaccagcagtgttaggaagcattttgaaaatttgtcgaaattgctttggctgagtgatagggttcattcaagtagtgaagaaagagagagatacccagtgcctaaagataccactgctgcagtttgcaagcaaaagatggatattcaagaagcagaagcacttgtaaaacagtggcaagacatatactctgaagctcttggccctgactatcaaattgacatgctccttgagattctcgacggttcaatgctctctaagtggcaagatttagccttatcggcaaaggaccagtcctgctattggagatttgttttgttaaatctcgatgttgttcgagctgagataatcttggatgaagttggtgctggtgaagcagcagaaattgatgctgtacttgaggaggcggctgagcttgttgatgactcccagcccaagaaacccagttattacagcacatacgaagttcagtacatattgaggaggcagaatgatggatcatggaaaatctgcgaagctgctgtccaggacttgacgtgatttctgccaacagggcaaaaagactacataatcatcagctgataggtcacagggtagtactgatcttgtcagagttccaacatggcaagcaagaaacatattggaaatntttag

SEQ ID NO: 23073 - DNA, 553 bp, Setaria italica
  Peptide Sequence Number=SeqID_89047
gagaatccagaatggataatatatgaggcgaaggagtacccaagaactgacaaaaacaagaaatgaaacatctgcaagcaactcatggccactgtacttggaaatctttccaagctccaggaacacatcagttgcatcatgaatggcaaggacaactgaaccaacccgagcaaatctgaatatgtaagacagtgctatcagacaaacggttgctacatggtgagtcattgaaataccaaagtctgagcgccttgtttcccaaatcaaaagggcaaatattgagtacgtgtaaaaaccagtaacatacatatagaccgccttgagtttaaattttattttttgatctggccagacctgatcacccggtccaacccagaaatttcttgtagttgtgaaccatggctcgttgtatgtcacagacaatgccaatagctccccagaaaggaaataaacgcatttccaagctgattctttaaacttcctgatctttctcttgcctgcatacgtagtaggatcaagcttctcatcctcattcttgaaaattagcttcctg

SEQ ID NO: 23074 - DNA, 370 bp, Setaria italica
  Peptide Sequence Number=SeqID_89048
ccaggttcgctctctcctccgctgtcttcattccccaatcactccgtcgtcatcgtcggcaacccggcctgcaccatcggttgaccttgaccacccagacccagccaaacccagttgcccaagcggttgtttagttcctaaccctctgttaccagtttggccgcgccgaggtagctgtgggatactggggatctactacatctatccatggtggcatggtttctttcgtgaactgtttcggagcttagtcaccgcacggatcgcgtgattccgctcgatttgattagtggtaggtggtaatgcaccggcaccattcgtttctgtttctgataacgcgagcgattggaccttctattctttgcggttgttt

SEQ ID NO: 23075 - DNA, 171 bp, Setaria italica
  Peptide Sequence Number=SeqID_89049
aacaaaagaacaaggaaaatgtcttcagaagatgcagttataaccaattatttaacagattttccttgatctgattagttaagatatgagttgttctacagaacattacgatagaaaatttccagatggatctgcttgaacccatatcatgaacactgcagcagactacag

SEQ ID NO: 23076 - DNA, 227 bp, Setaria italica
  Peptide Sequence Number=SeqID_89050
ggccgtgccatcggtatcagcagcatcagcaggagcatcctcatcctcttcctcggtagtagccccgcgacagcagcctgaccgaaagggatcaaatcgagagcaaaaaatactacgaaatccatgcgtatctctagaagataattgaagtgacatgtccttgccgcctggcgcagcctgcgaaagccgtcgtcctcgcgcagcatgcgtgtcgcccccatccatct

SEQ ID NO: 23077 - DNA, 1036 bp, Setaria italica
  Peptide Sequence Number=SeqID_89051
ttttagaatagtaaacggatggaccgaaaccaaacataagactccccttgaacaagcatttttctggaagctgcttatgtacattttgtgtattgatgatcaagaacactgccatggtgaagcaaagcaagcgctaatcatgctataaagccgtaaaatgcaaacaaacgatttcttttctgtatctacccaacataaaaaagaactgcagttacattctgtggcctatcagattagcgagttcggaagggagaaggtgctgaatagttacaacagttttggcggaggaggcccagagagatcaggttggctatgcttgagcttttgaacccaatgagcaagccagttcttgtgatcatgagtctcctggcagatcgagcttggcatattatcgagtgtaccatctctgtcaagaactgtcttaaacttctccagtatctgaactatttggcagaagtcaggcctcttctccggatgcgaggcccaacattgctcaattagaagtcgtactggcgctggacagctagcaggaatagccggcctcacattcttgtcaaaaacagcaaaagctgcttgaaatggattcagctcttcataaggtattgaacctgaaaacatttcccataagatgaggccaaagctgtagacatcaacttttcgaccatatgctttgtgcttcatcatctctggagccatccatctgaatgtcccggtgtcatttgctagaggatcgcagtactcttcttcacaagctattccaaaatcaacaatctttgcacaaaattcttcgtcgaatatgatgttctctggtttcacatcacgatggacaactccctgcgagtgaatgtatgccatgccgtgtgcgatatccaagctaattgagataatcttgtctagaggaagagctttgtgatcttgcttgtgcaaaaacgctctcaaagaacctccagaaaggaattcagtgatgacgcagaataccggtggactgctgcatgctccaaccagcttaatgacattaggatgatggaggcgtgac

SEQ ID NO: 23078 - DNA, 1034 bp, Setaria italica
  misc_feature (1)..(39): n is a, c, g, or t
  Peptide Sequence Number=SeqID_89052
nnnnnnnnnnnnnnnnnnnnnnnnnnnnnnnnnnnnnnntttttttttttaaaaattttgaatgacaacagctttgcataaaacattggtgggttttattgaacagcaactggaagcaggctacctgcccgagtcacaaataaaatcagcaggctacaaaattatggccatctaaactacaaacagactctacaaacctctggtcacaactcacaagggcacatgttgtacattcatgattctcacagtatcatccttcgtgtcagtgctacagaaaaccgagaacgtcttcccacagaagaactttcagcgctagaatttaaggatttgaatcaactacatctgtgcttaaccagacttaagccagccagagggcctttcctgattttgtcagcacgaggcaggcttttattgtttcttgctgttgtcaaattaaactcagcaggactttccagttcccaccaacagggacagcaggattgaattagaagtgagcatgatcctctctggaatgaacttggatgtaagaatgttgaaacatgagccccttcacaaagcagaaaccccgcgctatttctcaatttgttgtgtggagaccaagcacatggcatgggaggctcctattgcaacagatatgacatgaggaggacccaaatcttcatcaccatctctgaggaaattcaccttgacagggagtggctgaacttctggtagaccagggacgcctaactggcagtctcttgcatttccccacatgtacaagtcacctttctctgatatagcagcagaggtcgatcctccgcaggctatatagacaattcgctcctcagataaagctttgatggatagtgggaccctatggttttgaagggttggatgtccaagttgtccatgcccaccatgcccccaagagagaacttcaccttcatcagtcaaagctaaagaatgatatccaccacatgctacttggattacacggatatttttcagactagggacaagctgtggtttccaatcacttgaattgcttcctt

SEQ ID NO: 23079 - DNA, 248 bp, Setaria italica
  Peptide Sequence Number=SeqID_89053
gcactgcgtgtcggagctccgggaggccggcatccgttgccgccgccgcaacacggaccggttctgggacatcaagttcgagaacggcgagctccagatcccgcgcatcctcatccacgacggcaccaagtctctgttcctgaacctgatcgcgttcgagcagtgccacatcacggacatcgacgccccgggcggcaacaacatcacctcctacgccatcttcatggacaacctcatcaactcggcgg

SEQ ID NO: 23080 - DNA, 422 bp, Setaria italica
  misc_feature (10)..(10): n is a, c, g, or t
  Peptide Sequence Number=SeqID_89054
ttccactagntaagtatgtattcaatacagaggcccatcctcttccagtcatgacggaaacaaggacttacaacaattctgtatagttttgaagtgtataactgttgtatgatcatgatgagagaagtaacggatatatgagaaatatacttgacaactgacaacatagtcggaggagtgaaaatccctttacgtgagcttgaagcaacataggaatcaatcttggaggcaggatcttgatcgtggaatcgtcatgcttgattttgaggatttttggatttttcacttgtatttattggaaggccgtgcaacttttatactctgtacaatctaacttcaaattttgaaatcagttaaaatcagttggctgttacacacttgcactgatattttgtctagaattgtatgatcatgtgtcgtac

SEQ ID NO: 23081 - DNA, 924 bp, Setaria italica
  Peptide Sequence Number=SeqID_89055
gtttgaaatgtatactgaagcaatgagaggggtcaaacatcttcttgttcggaaaactgttccaaacgagttggtctttgttggagagcttccatttggacgaaatggtgattttagtcctaaaatggatcacctggtgtgttttcttcctggtacccttgcccttggtgcaactaaaggtatcaccaagaaaaaggctcttgaaagtaatttgttaactgatgaagacatcgaaaatctccagcttgctgaagatcttgccaaaacatgtgttgagatgtactttgtgacctctactggccttgctcctgaaatagcttatttccacattgagggtaatccagaagggggacctgatggtggtaataaaagcaacaaatatgtcaatgatattataataaaaccacttgatcgtcacaatcttttacgcccagagactgtggaatcactatttgttttgcatagaatcacagaggatcccaagtacagggagtggggttggcagatctttcaggcttttgagaaatacactaaagttgattcaggtggttacagttccttagatgatgtcaccagcctacctcctcataggagagacaaaatggaaactttcttccttggagaaacattgaaatatttgtatttgctgtttgatgaaagcaatactcttccactagataagtatgtattcaatacagaggcccatcctcttccagtcatgcggtctgcggaacaggcttcacattctgtatagttttgaagtgtataactgttgtatgatcatgatgagagaagtaacggatatatgagaaatatacttgacaactgacaaacaataagtacggaaggaagtagaaaaataccctttaacgtagaagacttagaaagacaaacaataaggaaatacaaatactttaggaagaa

SEQ ID NO: 23082 - DNA, 402 bp, Setaria italica
  Peptide Sequence Number=SeqID_89056
cgaacctgaaaatactagagctacgtagtaggcgtctcttactctaaccatgccgcatcgcgctccagcgccggcggcatcggcgtcggcggctcagcaggagggagaaccaacccgatcgatcagccggtcgccccccaccgagctcgcacatctagtaggggctctgtccctgcacgttgccgtgcgggttgtagaggcagacggtgagcgtggcgccggtggcgcaggtggcctgcgcgcagccgacctcggcggtgcggcgccacaccacctgcgtgtaggtgccgcactgccgccccggcgcgcacgtgttgttcgcgtgggtgtagtactggcccgtcgccacccacgacgccaccacctcgccgggcgccgcgcggtagctcgcccacccctggt

SEQ ID NO: 23083 - DNA, 411 bp, Setaria italica
  Peptide Sequence Number=SeqID_89057
tccaaaccctcatttgtcaattgaagggtggaagaaggatcctcatagatgtctgtgtcatcaggaagcacttctttcattactttctttttgcggtacctcgtagcaggctgaggtccactagtttgcctcctttcatactccttccaaaattttagaatcctcaagctctgcttgacattagaagtaatcctaggaggccgtgtcaccttgttggcgcccgcggaggcgccgcccctgacgcccttgccgttgccgttgcccttggccatcgccaccacggtggcggacgcggagtaggcggccgagcccaccatgccggtcgccggtcacgctggtccctgccgtgccccgacctccctctgcggttcggttccgcctgacggcccgcggcgggcgcgaccgcgcgag

SEQ ID NO: 23084 - DNA, 312 bp, Setaria italica
  Peptide Sequence Number=SeqID_89058
tttaggccaatgagagataaggacagatttagaccacgacaaacccgtccaatttcctggccttcttgctgtaaccgccccttgtgtttgttgagcagattcctgccctcaacgtaggcatgtttgagcacctttctgcggcaaagcagtgagacgtctgtgattggcagtttcgcagatctctcaagagcaaattccaattcagagagggccatgtctagcctctcgaggctgtgtccttcggaggccttgcccttgcgctttccaaacacgaagaagatattcttccctctgcctcctgaacaacggctg

SEQ ID NO: 23085 - DNA, 293 bp, Setaria italica
  Peptide Sequence Number=SeqID_89059
gttttatgatacaagcagaagcgtagtaatacctacctacccctccaccaattctttttcccttccagtcttcagattgtttatccacagtaacagcaattgcagaaagagatgtcaatttatcagcaacactattgaatatgctactcatactatcacattgtggctcatactcgaccccaccatcaaaggtgcccttgttaagagcgctacaccacttctgcttgagcttatacagtttcttaagccacttattatcctgcagcttaaaattcatggatcatttgggccca

SEQ ID NO: 23086 - DNA, 244 bp, Setaria italica
  Peptide Sequence Number=SeqID_89060
caactagatgatgaggaagagctccagccgctgcaaccatgcatggatgacaacgtacacgctacctagctgttaatttgttgcatgcgtactttgggtagtacgatagcatacttatgtatacatgcatatacgtatgtatctagctagccatctaattaataaactcgaccccgtatacgtcgtacgtaaaactacatacgtagctaggtatatcgatcgatctgtaacggtatttagtttg

SEQ ID NO: 23087 - DNA, 511 bp, Setaria italica
  Peptide Sequence Number=SeqID_89061
tcctccagcgcggagaggatggggaggtagggcgggagaccggcggcggcgcgcggccgaggccaatgccggtgccggcgccgaacaggtagccgtcccacgacgcgcggggctacgtcccaggagaagcccacatcatcgacggacatgcggccggcgtcaacggagaatcttgggtctgtgtcgcacgagcgccggccgccagcgaactcagagccggctccgccacggtggaagcggctccgccggaggaatgagggcttggacggcttctccggtgggggcattgccgccgccgcagccttgctgccggcggcctcctgcttcttgatcttctgcttgcgcctccacttctgccacttcttgctgaacaccgaggcggcgagccagaagctcccggcgatctccttgaggtccttgggcggcggcttcttgggctgctgcgactgcgaggactcgagatctatgtgatccttcatggccctgacgtcccgcaccgcggcgtaggcct

SEQ ID NO: 23088 - DNA, 247 bp, Setaria italica
  Peptide Sequence Number=SeqID_89062
ctcctcgtcgctgcatccctctgcgcacatgtatcagcggcggcgtccgacacggccgtgttggcggcggagcggacgcggcggaaggaccccctcgacgggctcaggtactacaccggcggctggaacatcagcaacaggcactacctggcgtcggcaggtttcagcgccgcgccggtgttcgtgatcgccgcgctctggttcgtcgccgtcgctgcggccgcgctcgtctcctgctgctgccgtt

SEQ ID NO: 23089 - DNA, 1073 bp, Setaria italica
  Peptide Sequence Number=SeqID_89063
acttcattttgcctgatatattctcatcacatcaggaatttgagtcgtggtttgatttttctgggaaaggaaatgaagaacaccaagaagaaactgaagagaagagaagggttcatgttgtttcaaagcttcatgccattttgcgtccattccttctaaggcgtatgaaggaggatgtagaacagatgcttccacgaaagaaagagataatcatttatgccaacatgactgaacatcagaagcaaatccaggatcatttggttgaaaaacatttgatgactacttgcatgaggaatcagatatcgtattgaagagacccggcatcaggtcaaagttgcataatctattaattcaactgaggaagaattgcaaccatcctgatcttttggaatctccgtttgattcaacaactttgtatccacctgttgagaagattctggaacaatgtggcaaattccagctttttgtcaggttactaaatttcctgctctcacaaaagcacaaggttctaatattttcacaatggacaaaagtgttggacattattgagtattacctagattcaaaaggccttgatgtttgccgaattgatggtagcgttaaattggaagaaaggaggaggcagatagcagaattcaatgacttgaatagcagtatggatatttttctcctgagcacaagggctggtggacttggcatcaaccttacttctgctgatacctgtatcctctatgacagcgactggaatcctcagatggatttgcaggctatggatcggtgccaccggattggccaaacacgcccagtgcacgtatataggctggctacttcacattctgtcgagggacggatcattaaaagagcttttgggaagttgaagctagagcatgtggtgatcggcaagggacagtttgaacaagacagatcgaagcctaatgccttagatgaggccgagttgctggctttgctgagggacgagcaggctgatgaagacaagttaatacagactgacatcaccgacgaggacctcttgaagctgatggaccggagtgacctctgcggcccacctggta

SEQ ID NO: 23090 - DNA, 1754 bp, Setaria italica
  Peptide Sequence Number=SeqID_89064
taggtttacctaatttagtaattgtcgtttttaaattcaacggaattttagtcgattttccttatgtccaactcccagtgatcaatgctgcagaggctattcatgcatttgatccccgtgtgctagagaatgttgatgggggcaagccggaaatgtctatctggagttcgtgttaatagacaaatcattcaattggttcctaatatgaagaagtttcaatatctgctgcggtgtcttaaactatgggcaagaaaaagaggacttcattgccatctacttggattcttcgctggaatccatttggcgattcttgctgcatatgtttgtcgcagacatccaaatgctagtataaatagtctgctgtctttgttctttgaaatttttgttcattggccttggcctctcccagtgagtttgcttgaaccgccagctctttgtcggggtgctgatgggtgctctctcatgcccataatgttgccctgtattccacaagaattttgctcctctagtacgacagaaagtactttcagcaaaatcaaagaagaacttcggcgtggttatgctttgaccaaggataccagaactactgattttgactggagttggctctttgcaccgtttccatatggtgcaagatacaaatgctttctccgcatagttctctctgctccgatggctgaagaattacgtgactgggttggatgggtgaaatcacgattccgcaaccttattctcaagctggagagtcttggtgttttctgcgacccagatccatcggagcaagttgatcataccatcaatgagccaaatgttgtattcttctggggtctcatgtacagaaggagtattcaaatatgctcaagttctctcaaagaagacttcatgaaaagtgtatttaataacatctatggaaaggaaaaatgtgcccattcagatatcacaatgtccattgttgggcctccccagctgcctaaaagtgttttcgatcactcagtttactcagagaagctgccaccacatatgatggcgcaccaactaatgaagcagagctacaatgcagtcagctagggctccaatgtcatattgcccgcgagcttcgtttgtgaatatgagaacagtgagaagccgatgttgaggggttttcaacatcagaactcagaagttttggctgtttttttagatgtaggggcttgttcatgcctctggcacaaggaacgtggaagttttttcatggagctggatgttgagagctggatttttcttcaagcatccagcacaaaatagggtcatccgagcgacttattcctgttctgaggcttgcgcaggtacatgtatattcatgtacacagcatagcaattggtatacaagtagcagggaggtaccatatagctgtatgtacactgtaggtgtaatgtttgtacccagcagcaaaaatgtgtaaattgcttcctgttgttagagatgctgctgggcagtgggcacagatgtggatgtcgatatggaggggttgtgaatggtagctatccattctaggtcaatatgaaagtgttttggatcgatatgatccactttagctgttgtaggatgccaaaaaaaaaagcttttgtctgtcctactgatcaagaattcattgtaatgatcatgactttgaagaaaaaaaattgtgtaaaaacccatcaagtctagtcaaatcttgatgttattgtaaaaaaactaaaagaagaactagaccaaaggacaacaacaggggaat

SEQ ID NO: 23091 - DNA, 240 bp, Setaria italica
  Peptide Sequence Number=SeqID_89065
cggtagctgtttaggatcgcgacaaagaaatacatgcatgtatggattatattttcatcgatttttttatatttaccaccatgtagtgttacaaatatatatcagataaagtattaattatagagtatgtttttttaaaaaaaggaaatgctcagcacaacgtttgagtaaaaccgttggaataataggcccagctaaatctaccaaacctggcgataccagcccactcagtccacccaa

SEQ ID NO: 23092 - DNA, 328 bp, Setaria italica
  misc_feature (269)..(328): n is a, c, g, or t
  Peptide Sequence Number=SeqID_89066
atccatgatacatgataggcaaacttatttgcttctagttcagagtattgagatttgtgctggccgaattggtgaagctgtgtctgtgataaacaacaaggaaagtgatcggtttattcaactcgcatgcactatttctgacagtcttaaccacaaggtgttactattccaggataccgagaagaatgaagtaacaatagattgcattgacaaggaaatccagttgaatatgcaagaagaacttaaagaaaactaaaaacaaaaaaatnnnnnnnnnnnnnnnnnnnnnnnnnnnnnnnnnnnnnnnnnnnnnnnnnnnnnnnnnnnn

SEQ ID NO: 23093 - DNA, 570 bp, Setaria italica
  Peptide Sequence Number=SeqID_89067
ggcggtgaagacgaggtcgacggtctggttcttgagcgcgtcgaagacctcctccttggactttccgagctctgtgacgaggcgcttgagcgtctcctcgatgtcagactcggtggcagcgaagccctcgtcggcgaagtccccgcgcttgagcttgttccggcggaggtgggcgagctgcacctcctccgcgaggtttgttaggttgagcatgttcgagaaggagctcgccacgacgatggcgtcattgggggacagcttggtgagcctggacccgagctcgctcagcttcgcggcgtcgcgatcgcgctcgtactccgccgccacctcgtagcactcctggacgaattcacggatgtttgggccgtggaggtcctggaagatgtcgaggaagcggtcgatgaggagggcgtcgtactcgacgagcttgtcgtcctcggagaccttgccgggtgccaggagccggagctgcgcgtcgatggagtggtgcttctccacgggcttggacgccatggcgtggtgggaagcgaagcgaagctagatgactggagtggagctagatggctgtgg

SEQ ID NO: 23094 - DNA, 380 bp, Setaria italica
  Peptide Sequence Number=SeqID_89068
ccagtcaaagattatttgagcctaaacaaatttgaattaattccatcattcttgatgtagtgttccataaatgatgggcttgaacaattaatgcaatgttattgcggatacggagaaagaggtttaaaacatagagtgaataatgtaacttagtgggtgagaataaacacacaagttgcatggtatattattgattaatcatgcatacttatatgtactttcttgatgttttctcgtctaaattcatattatgctcagggttgtggtaggcaaattgtgtttaaagggaaaatatgatatattgaaaaaagaatttaaatttaatttgtgtccgtgtacaattctatttcatattcgctctatgtgaagagggaccttgc

SEQ ID NO: 23095 - DNA, 465 bp, Setaria italica
  Peptide Sequence Number=SeqID_89069
aaaacggacaactaacttttaaccttggagaggtcaaatgtgcacgatgagttacacgcagctctccaagaagcagcgaggctgatgtctgaacagcagcaagctgatccagcaaacggcaatggtggtgatatttgctcgacgtaggaactgaaatcaccgtgaagcagtcagacgccaaactttgtggcaaaataatgcagcactgaaatccagatttcacattgaggtctgtgtaaacacgtagccaacaagtgaagaaagtctgtgcacacgctgcctccagcttataccattatcctgatgatgagggtcgtttctgcctgtaatagctgatgagaaaagtgaagccaacctgatcagctgggctgtgacctgctgtgtttctgtgtacgctgaacgagtgtgctcttttgctccaaagctcaaaagagagctttggaagaacaaaaaaaaaaaaaaaac

SEQ ID NO: 23096 - DNA, 603 bp, Setaria italica
  Peptide Sequence Number=SeqID_89070
aaattcttgtaagcatagtttattaatgatctgctgcaacctgtgttttcagtttgttctgatttgttttctatttgttctgatttgtcgaaaaacaattcaggattctacgtccttgctaaagtagaagaggctgctgacaagcctatctataaatggactcatcagattgttagtggtcatactcttaagcatctttgtgctgcgatggtacctgttttcttggccctcatgctagccaaaaggactattgagccagaaagggtaagcttactccagaagtggaagatcaagttgattactgtgagagaaagtcggtctgaggatgggaaaacaatcggtgtcgattgcaactacgctgttgtttcaactacacctgaacagtgaaaagcatctagcatactatgtacttgtaaggaaagaagagaaagtggcctgcatccttatacttggaaattcatgaccccagttgagtttcatcgctgctagtcatggtgcctggcaatgttgtagacaacacttaccaaatgttgtgcaataataagacaaataaataaaaataagtaagtaagaactaagaaaaactaactaactttaacccaa

SEQ ID NO: 23097 - DNA, 1440 bp, Setaria italica
  Peptide Sequence Number=SeqID_89071
ttcccttgtgcggaggcagaggcagaggccgaggcggagagagtgcaaaggcgaagtcttggtcgcgccagcgaagcgagcagcccaaacaagaaagagaaacaactccaaatccccacgccgagtcgccgatccgcgctcccccacggcccaccggccaccgccgggcaggcatcctcccgatccgtacctccatcaaccaccgcgcaccagccaagcagcgccgccgccgccggcgagacgccatggacgggagcaggaggaagaagtgggtcgcctgggcggtggcggccgccatcttcgtcgtcctcatgctcgtcacgcccgccatcccgcagaaccaggagtaccacgacttcgccgaccagcgcaccctcttcctaggtatccccaacacgttgaatgtgatttcaaacatccccttctttttcgtgggtgtcacgggcctcatcttgtgccattacaaagattacttcaggctgagctcacagggggagctctggagttggtcactcttcttcgctggcgtcactgctgttgcttttggttcttcctattaccatctcaacccgaatgatgccaccctagtttgggacagactacctatgacgattgcttttacctcgatcatggccattttcatcatcgaaagggttgatgatagagcaggagcaaagtcccttgcaccacttgtgattgctggtgccctgagcatcctgtattggagttactttgatgatcttcgcccgtacgcaatagttcagtttgttccatgcattgctatacctgtgatggctatagtaattccgccgatgtatacgcattcaagctactggttgtgggcagcaggattctacgtccttgctaaagtagaagaggctgctgacaagcctatctataaatggactcatcagattgttagtggtcatactcttaagcatctttgtgctgcgatggtacctgttttcttggccctcatgctagccaaaaggactattgagccagaaagggtaagcttactccagaagtggaagatcaagttgattactgtgagagaaagtcggtctgaggatgggaaaacaatcggtgtcgattgcaactacgctgttgtttcaactacacctgaacagtgaaaagcatctagcatactgtgtacttgtaaggaaagaagagaaagtggcctgcatccttatacttggaaattcatgaccccagttgagtttcatcgctgctagtcatggtgcctggcaatgttgtagacaacacttaccaaatgttgtgcatatagcaataataaatgtgtgctaaaactctctttcccaacctttcccgttttttaccaagacaagatggtaggtctactcatgtactagggtacttttgctggtcagtgaaggggagggaggaggaagaatcacaaagagaccaattgctagtgag

SEQ ID NO: 23098 - DNA, 612 bp, Setaria italica
  Peptide Sequence Number=SeqID_89072
tagtacggtatgctttgtcagcctctctaatgttgaaaaataggccctatcagctcattcaggagaggtgttgctcatgagggaatcaaaattgtgtcctgacttcaaaaacctgaagactctatcccttggtgaatggtgtataactcctgactttgatatattagcacgcgtacttcagagctcaccaaacttggagaacctttttgttcacctcgacatggtcaacaagagcagagtggacttcgataaagggcaagtttgtttgtgtccactaacctgaagaaagtggagatcacatgctgtaagcataataaaatggtcgacatattggcagagctcttccgcgtgaatatcgtaacaaacaagaaggtttttgtccatcacactgcctgcacttgtgatgtcaatagaggtacaggttctcaggcaaagcgcaaggcacaaactgaagctaagaagagaccagtaaagcagataagaccaggaaactgaggaaagcaccagctgatgagggtaagttggtgcgacagtgcatttgtgttggtgaagtcagtgagttgggcagctttttgccgtcccactgtgtcagtgagtttttagtttggcctg

SEQ ID NO: 23099 - DNA, 492 bp, Setaria italica
  Peptide Sequence Number=SeqID_89073
tggtcggcgtcgtccgcctcgtcgtacggcgtctcggagtcccggtttcggctgaacaagggggtgcacctgcggcggcggcggcggcggctggccgacaggggaagcaataagggcagcgccggtgacggcgtcgtgcaggagctcgcgctgcctctcgggatgtccttcgcggcggtgcttgcccaggttctgaatagatgcagtggttctggaggaagtttacagcctcatgtcctctcaaagatgtgtacctcagctgtgaaggagtccttaacaaatgtacgagcaggccagttcttgttcacatctccttttccacttcccgtgagcttcctatatctgacttctgttgtgctgtagatttatggtgacagattcgagattttcattagaaactttgagaaatcatttggtagtacattgagaacccttcaccttatcagtgagacccctgcctatgaacaagatatgcctcaatgttttaccagg

SEQ ID NO: 23100 - DNA, 1096 bp, Setaria italica
  Peptide Sequence Number=SeqID_89074
gtgaaacaaacgcgggcgcggcaccaacaacaaaacaaacgcaatcgcgccgtgctccgcgcgcggctcgagcgaataaaccctactcccctctcgctgcccagcgggccccttcccgtatggacggaggggcccatgccgccgccgtctcgggcggctcgtcggaggccggcggggcgtcctcctcgtcggcgtcgtccgcctcgtcgtacggcgtctcggagtcccggtttcggctgaacaagggggtgcacctgcggcggcggcggcggcggctggccgacaggggaagcaataagggcagcgccggtgacggcgtcgtgcaggagctcgcgctgcctctcgggatgtccttcgcggcggtgcttgcccaggttctgaatagatgcagtggttctggaggaagtttacagcctcatgtcctctcaaagatgtgtacctcagctgtgaaggagtccttaacaaatatttatggtgacagattcgagattttcattagaaactttgagaaatcatttggtagtacattgagaacccttcaccttatcagtgagacccctgcctatgaacaagatatgcctcaatgtttttacaaaggtggtaattctgtacctgaaatcaagttgagtggtggtgattcacaaagttggatacatgatgtccagaaagatacacccttgagctccatggataatcagattattcttcatgctggtgtcaatcatcagctggcccaccttactcatactagatctgctccaggaattgatcagtgtgttcttagtgtattcgagagatctgtcaatgagcaagctcgttcaaatgagctcaaggaacttgatataggacttaaattgagagaattggagttgaggaaatctcagttagctctcagctccgatgcaaacgagttaaaaaaggttgaaattcgtttgggatttcagaaagtctctttcaaagtggagaaactcgagactcaaatggaggatacaagacaagcagaacttctcaggaagcttatagatatgcttcttactgctgtggtacgcatgtctgtatgttttggatatggaacatatatttactcgtaacagca

SEQ ID NO: 23101 - DNA, 416 bp, Setaria italica
  misc_feature (10)..(10): n is a, c, g, or t
  Peptide Sequence Number=SeqID_89075
catcctctgngaaaacctcgagttgtttatggaaatacctcattaaatcctgactttaaaagcttccatctgccttgcaatgccacttttaaccgttgcctcgacaacatgatgaacatattcttccaaattctcaacgttcaaactatcagagctgcttcctgatgagagcatatagtctggatatcctgggagagcaaaatcaatagcaagatcctctattctacaacctcgataagtcaaatcagacataatctggcagtcccttgtcaaatttgactctgcatattttctccgacaagcaatcgcttgaaactccatatatgatatccagttatttgattctgaactggcaatatcccttatggagtttcaagcgattgcttgtcggagaaaatttgactctgcatattttc

SEQ ID NO: 23102 - DNA, 2233 bp, Setaria italica
  misc_feature (8)..(8): n is a, c, g, or t
  Peptide Sequence Number=SeqID_89076
ggtcacgnaaccacacttttagaaggcacaatcaggcttcaggagacgctttaggcggcgcaatgaggcttcagaaggcgagcatctaatgaacagtgttgttttcatagataaaacaggcactttgtatcaggcacgcatatgtacaccaaacgtaaatctgtagcgaactaagctgatggtcgccatgtgcgaccaacacacacacacactacttgtctgcttaacacacctaaaacctagtatgtacagagcagggttagttttttttttcctcctaaaatcagctccaccagatcatcgtgtcagctaaaagagcagtgaaccaccctgatttacaccgtgctttccattcctacgagatacttacaatgcgtgtggcatattgttgtggcttatccgttaggataggtggaaggaaccctggccttccgtgatcgcgtagatgagtttctccctcatcttttcctttgaagagtatggaggtaacttaagatagttggcacaggtcatcacgctcggcaggtcattgtcagcatcattgctgttatgctttcggacaaccgtgaactttggatttagtgcggccaagccacctgggggaagccgaggtgaacctgttataaattgcaagaaagctctgcgttgatgggatccaaactcttggacgatttccagcaaattaatgacaggagggctgctggaagtgtaaccatgatcaaatttgatgtgatccacaagtttcccaaaatcccaagtatcttgttcaccacagagtaatcgctctagctcatcctctgagaaaacctcgagtttgtttagtggaaatacctcattaaatcctgacttaaaagcttccatctgccttgcaatgccacttttaaccgttgcctcgacaacatgatgaacatattcttccaaattctcaacgttcaaactatcagagctgcttcctgatgagagcatatagtctggatatcctgggagagcaaaatcaatagcaagatcctctattctacaacctcgataagtcaaatcagacataatctggcagtcccttgtcaaatttgactctgcatattttctccgacaagcaatcgcttgaaactccataagggatattgccagttcagaatcaaataactggatatcatatatattaagctcctgtccaaggataagcttgtagaatgctttagaaaatggaatgtcgagaattctgccatctttaattgcttttgcaacaacctgaccaagtaggtggaattgtttgcttacttcttgaaaggaagcacagtctgcggaagtagaccaaggtctaggaaacagtcctttaggcgcaaccacgaatctagaaacatgagcatcatcagtaccagcttcacaaggaagctcccctctccacatgcctagaccggacttctgaaattcatgacttatcaatgtatagaattccattgtaggacctaaaccagtacccacttcctctttatattctacttcaagtagagcattgctcttagcatacgacttcatcattttagcagctgagaccagtatatcatcgcgatcaactttgaactttttacgcgagtgggaaggtcccctttctgtcacagtattaacaattgcatccataatatgtccatgatggtttttcaaagagccaaatgctgttagttggaaatacttccatcttgcctcaaacgaaaacaagaaagggcatgcagacatcagttcagtgcaccataaaggcaggcagctagacctagaaaccaatggatcatgcatttgttgctccagtttatctgtcagtttggcactgacaaactcctgatgaggaatcgagaaaactactgccttcagatcatcaaggttagttatctttccatgggcaaaagaatgggttctctcatcagagacgaggtggaaggaataccggtttaatccctctaaaatgtgtaacataaacaatatgtcatataatggatttgatctgtcaagtttgcaaggaagtttaccaagcaacatactagaaaagaatgggagcatcttccatttaaacccagttgtgctgtcattttctgaagatattgcagtagtccctttaagagaatctgcctctgggttaatggctgttctattagcctctgggttagcagctgttctgaaaattatgtcatgtacattgcgccaaaaactagtacaattgttacctaagtaaatttaatta

SEQ ID NO: 23103 - DNA, 304 bp, Setaria italica
  Peptide Sequence Number=SeqID_89077
gcggtgcgccatcccgctctccgcggaaaccttgcccccgccgccgccgcgcggggcggcggcctcccactgctcgctgtcctcgacgcgggccccgaaccggccggcgtgcgccgagcccgtggagctgcaccgcgagtagctccgcgtccggcgctccttgatggccctgtagatgaacgggatgagcccctccatcttccggtgactctggcggctatggcttgcacgacgacgcgaacgccaagcgctgctggcggggctttcgctggaggagatcggaatggtggttggctttcggtgg

SEQ ID NO: 23104 - DNA, 274 bp, Setaria italica
  Peptide Sequence Number=SeqID_89078
gcggcgctggggcgcccaccatcacgaacggaacgatcaggatcggagctagctcctaccgccgccggcggactcctcggcgacggcggcgagcctctggaggttgagcctgacgacggtgtcggtgaacatccgggtgtcctcctcggtgttgccctcgggcacgtccacgacgtaggactcgacgacgacgcagtacggcgggccgccggcgggatgctggcgctggaactcggtgacggaggtgacggagcggtagttgcggaggcggtgg

SEQ ID NO: 23105 - DNA, 800 bp, Setaria italica
  Peptide Sequence Number=SeqID_89079
taagaaaagcaatgcgagaagcatcaccatgcaggcatgtgtggtggtgccccatgaggattgaagagaagacatgatgggcgcgatggatcagtgatccgtgccgccgccgccgccgccggagggccgcggcgaggatgaggaggaggtggcgatggcggcgagcttctggaggttgagcttgacgacggtgtcggtgaacatgcgcgtgtcctcctcggtgttcccctcggggacgtcgacgacgtaggactcgacgacgacgcagtagggccccggctggaactcggtgacggaggtgacggagcggtagttgcggaggcggtggtcgccgccgacgacgcggaagctgaggatgtggcggtcgtcgtcgaggatctcgaggcgctcggtgctggtggaggccgggaggccggagacgacggtgacctcgcggacgctgccgacggtggcgccgtcgccggaccggaggtcgcaggacttgatgaagtgcttgtagcgctgcgggctggcgaagccgcgcacgatgggccacacggcggcgagcggcgcgtccacgcgctgcgtcaccagcgacgtgcacgtccccggcgcgcgacccgggaacgtgtggtgcgcgcgcaccacggactcgagctcccgctgctccgcctccgacaggccctgccgcagcgcgccctccatgtgaggctccatgcctttgcctcctgctgctctctgtctctactctctagctacccgtgtccgtgtattatagtgttataaatctgaaatctctctctccctccctccctcccttt

SEQ ID NO: 23106 - DNA, 401 bp, Setaria italica
  Peptide Sequence Number=SeqID_89080
ttagacttttagtagtagaacaagaacgttaacctaataatctctcacacaaaagcaaggtaagcttgcttattgcagcttatatcagtatttccttctcacttcaactgtactaatcagattaataatgtcccatcatatgaaccacactttatgttgttaacctattttccctaatcggtcatgagttacttgccgcagtaagatgctgctactctcttcaatagcattaggttacatatacacaatgaagtaaagtttgttagaatggaaaaacaaaatgattcttctgatcttcctgcaagtggcaagcatttgtattctaagccttttgatttggtttctaatataatttttagttgataagaaatttattggtcccgattgtcataagatcttag

SEQ ID NO: 23107 - DNA, 346 bp, Setaria italica
  Peptide Sequence Number=SeqID_89081
gggaggagagagagagagagagagagatcagtcaaagcagagccatctctgatccgccgtgcccagctccgtcgccgtcgacgccatgggatcccgccgccacttcctcgacgaccccttcttccccttcccaccctcatcctgcccattcctcgactatgacagcccatcccccttctccacttccccattccccgaactcgacctcttcctgccccccgcgccaccactcaaccccttccccgccccgtccccctaccctttcctcctccgagacctcaccgaccgcgtcgccgccctcgagctcgccgtcgccgcgcgccgccccgagcccaccaccagggaa

SEQ ID NO: 23108 - DNA, 371 bp, Setaria italica
  Peptide Sequence Number=SeqID_89082
cgaggggactccataacagaagataccgctggggattggtacgagtattctttggatgatgggtctttcaacagatttgtcgccgaataccaaggaggagcagtaccattggatatgtgtactctgacttgggtccttccgagcatgtgttgatgcactcgtatgactttaggttcatgatcataatggttctctcttttgcgtttcaactagtcactggtggtgtcccagcacagctgtggcggtgacatgttaggagcttcagtccggatgcaagcatgcagtcttgctgtagtgacttcatttggtgttattacaggttcatgatcttaatagtgatcgtctgcatctttgcctttggctacatgctt

SEQ ID NO: 23109 - DNA, 315 bp, Setaria italica
  Peptide Sequence Number=SeqID_89083
cttggttcctcctcgcctccgcggcctccctccttagcctctgctcggttggcttactgctgccagcttgtcggtgagcctgtcctgctcacgcgcccgtttccgttctatcttggcctctatcctcttcatttcagcttcaatttttgctttctggtgattttcccaagcttgaatctttacttcctccctctgaaacctcgcaagatactttgccttctctgcctcctgccaatctgtagctcgagcctccctgtcgatatcaacaaccttatctgtagtggtacttctgaaaatgtgcagaaagctttcttc

SEQ ID NO: 23110 - DNA, 631 bp, Setaria italica
  Peptide Sequence Number=SeqID_89084
aatttattatggtaaggaatttacctaacagtatagcactgtatttccaaatagaagctgcagcgctcagttttgctgcttcttcgttagcgggcttctgaggcataaccaggaatacggccaccacttggccccgtcgtccctgagctcttcagggtacggaattcctttcaaagtgtctgatcccagatcgaacacgaacgcccaatctgacagcttatgttcaggattctgatagtaaatccaacggcgcgccacacagtagatgtggtttctcctgacagcggggaactccttggcagaaagggcaaagctttcgctgagtcccaagaagagcgagtactcgccgaggtccgtcacccgctcgccgatcttcggcgtccccttcggagtccaatccagcttgtagacctcagcaaaggacgagcacgccgacgagacccgcgaaggagaggaaggaggttggcgacccccccgggagccggtcgcaccgcgcagaaccacgagcagcagctcaccgtcgcagctcaccatgagcacctcgcgaacgaggtggaccaagcgctcgcacctgcagagcttgttcaccttgggaccgaatgaactcatcccggcactcgcgggatggcgg

SEQ ID NO: 23111 - DNA, 217 bp, Setaria italica
  Peptide Sequence Number=SeqID_89085
ggggacggggatcgggaagcagaggcgccccggtcttatatagcagcagcaggagcagaggccatggggatgctctgttcacacctctcctctccctcttctctgctctctctctctacgcacacacaacacaagctatcggctttccttttgatctccggctgggcctccccctctctgctttattcctccatctctctccctcccttcctctgcg

SEQ ID NO: 23112 - DNA, 249 bp, Setaria italica
  Peptide Sequence Number=SeqID_89086
acaagcaccgcagataagctattattttatacgatcgcttggaattctttgttttcctgctgtgctggacaagtgtggcaacggacatagctgactcaaaccctgtggcatgatataatcaactagagaaaacaaacagttgccttcaatcacatcctctcctcatgattggtcacaataatggttcactatttctggttttatccatttcactcaagtaacatggctcatgccttctcattactagag

SEQ ID NO: 23113 - DNA, 619 bp, Setaria italica
  Peptide Sequence Number=SeqID_89087
actagtgctgataatccttgtaatgatgatggcaaagatagagaggagttttgtgctaaatcgccacctcgaaatgatgacactaatgacttgaaggatcagtctctagctgacatatattggcctgattcacttggaccactggacttggacataccatcttcgagatatcaagctgatgacttaatcataggggacagtcaaaatagttggaatcggatgatggcaaatagtctggatgcatttcggaacctgtcgttcttctcctccgtggataagaacgactcgattccatcaatcatgtaggagtggaggtgttagggttccatcacaacttgctgcgttggtcaggaaggaaccgccgatgcagcatttcgctgaagagggagctttatattgtccaagtgagctattcggtgctgatccaagtatccaacagatgcggactcgctgcattcgagatggacgcatgttgttgtaagataatataagggatgtgctaacctgtttgccatgtaaattgtggtgttcttgtacaaaaagcacatacaagcgcttggttacagtaataaagcttctccgacagtgtataaaatcaatgtgttacatgaccgcaaaa

SEQ ID NO: 23114 - DNA, 159 bp, Setaria italica
  Peptide Sequence Number=SeqID_89088
cttgatgtgatgtacacctcagtatacacaaacagcaactggttgtgcacacacaaatgcacatagggcgcggagcagctgaagaatcgctttcggaaaacacgacaccgaccagcgcctgatatgatctttcttgccctgcaccctttctgcagtgat

SEQ ID NO: 23115 - DNA, 1234 bp, Setaria italica
  Peptide Sequence Number=SeqID_89089
tttttaaaaagatccttattattttgaatcatttcatacatgaatcaaatgatacgaccaaccaaacacaccctaagaaaacaggcgcacaatctctctaatcagcagtactaatcagtcagcagacgatagacaaatctcaaaaggaacttggacggcaacagctcggctggacaggaacgccaacgagtgccgagcccttcctggtctggccttgcagcaaaacatgcctcaggcgcagtcagccatctaaattcacaactgcatttcgtatcaaaggcacaaaaattcttacagatacttcaactattggttgtttattcagtaacttgaaacaaggcaggtctgccagcatagtcgtcgatcccttgtctgcatcccacttcatggcaggatcctctcatggtcgcagtgcagcaggaccaagtcaagtactatcaagcttccagcttcttcttcgagcggcgctgcagagagaccttccttgacttctgtttcaaggttatacccaccttcttcttcgggggagagtgtctcaccctcctaggtttctcggtagccagctgcattccgctccacgggaatttggacccctcctccccagctccttccttagccttggcgcgtcctctcctcctctggtccagcctccctgggttcccgtacacgaccttgccacacccagctctggagaaaccctccctgtcgtcctccatccagtgcttccccttcccctccctctgcccctccgcctcggcgccctccaccgccttcctcctggcggcggcggcactggccttccgctcccgctccccgaggatgaccccaatggggaagagatcgggggagaccgtgagcggggcccgcagcgtgacgtaggccttcttgtagtcgggcttggcggcgaggtaggggccccggcggagcttcttgccctccatgttgagggtgcggacctcggcgacggagaagccgtacatggactcgaggcagcggcggatgtccaccttggaggcggaggggacggtccgaacggcgaactcctgcacggacgagagcggggccggtggcagcatgagcttgagagggaggttggcgaagtggatcacgcggcggcccagccggctccccatggctgccgagcggcggcgagggttggtcgggtcgtggcggcggagggtttaggcgggcggcggcggatcggtggagtggggggagggaacttcagttggtt

SEQ ID NO: 23116 - DNA, 487 bp, Setaria italica
  Peptide Sequence Number=SeqID_89090
tttttttatacgaaacaaaacaatcacattccatgccaacaatcaacatcaccatcccaaagtacatcaatccaagaaccaagattagccatcacttcaagtacaaaaggcacattggcagtatgagcgtctttggatacatgccccagcatgccagaccaaatattggccgtgcccagctattttggccaatgcttggttcagtgacaaagtttggcatgcaaaaaaactttggccgtgaccttaggatttgagcagccatgctggccgtttcttgggcagccatgttgatttggcataacacaaccgagtttatcagctcctgtcaagcagcaaaactgcaatttggggtcatctcagtgtgcggaaatatatccagaagacgtagtgtatgtatggtagacttgtgctagaagaaaatagttatatccaactaagagctacgttggagacagtgaactaaggacaactatagatgatttactta

SEQ ID NO: 23117 - DNA, 302 bp, Setaria italica
  Peptide Sequence Number=SeqID_89091
ggcgcggcgggcgcgccgctcccggagcccggcgccgcgctgcggtgcccgcgctgcgactccaccaacaccaagttctgctactacaacaactactcgctgtcgcagccgcggcacttctgcaaggcgtgcaagcgctactggacgcgcgggggcacgctccgcaacgtgcccgtcggcggcgggtgccgcaagaacaagcgctccaggagcagcagcggcgcggcgggcgccgccgggaggagcggatcctcggcggccgcggcagccgccgccgccgccacgtcgtcctcggcggcgtc

SEQ ID NO: 23118 - DNA, 1056 bp, Setaria italica
  Peptide Sequence Number=SeqID_89092
aaagaagccaacaaagcagtagcgtagagcagcatccacggagacagaggaggttgggaggaggggcatcccttctctcttgaagccatcttcttcttccagcgatggtgttgctgggcgggaggagcacattgcctccgatgtcacgcagctcataggatggacgccgctgatcgagctgaagcgaatcgccagcaaggatggagtagacgcgcggatcgtcggcaagatggaggcgtaccagccgctctgctccgtcaaggatcgatgcgctttgagaatgatagaagatgcagaggagagaggactgatttcacctggtgtcaccacactaatcgagccaacaagtggtaacatggggttaggattggttctcattgctattcacaaaggttacaggtttatagctgttgtgccagctaaatattcacttgacaagcagatcttgttgagatacatgggtgctgagctgtatttaactgatcccgccctcggctttcaaggcatgtgggacaaggttgaacagctccaaaaagaattgcccaatgtacatgttcttgatcaaactaccaataaagcaaattctgaagcacacttcagattaactggacctgagatttggaaggacacagccggcaaggtggacatttttgtggctgcttcaggctcgggaggtactgtatccggtgtggggaagtatctgaaaatgcaaaacccaggcgtccaaatcgtttgcgttgagcctgtagagagcccagtcatttcaggtggcgcccctggcaagcacaaatccagggaataggaccaggatttctacctgaagtcctggacatgtcggccatcgacgagactgtcacggtgaccactgaggaggcaatgaatgcgttgaaatgtgatgtttttaccttggtaaacagctttgtttagataaagaagatgagttagattctgtggactaattttttcttagagataccatatatgtacttccttgattttgattattgttgctgttgctttaacacaagctgatgacaaaaaaaaaatactgtacca

SEQ ID NO: 23119 - DNA, 312 bp, Setaria italica
  misc_feature (235)..(235): n is a, c, g, or t
  Peptide Sequence Number=SeqID_89093
cgccgttctgcttcgcgccggcgccggaaccggcttccgctccgtggccgggggccgccccggtcccggcgtgcaggaaccggacgctgcgctcgaggtcgccgagctggcgcaggagcgcggacaggctgggcgtgctctccatgctgctggggccgtcgtcggtggtggtgtcggcgtagaacgacgaggacgagaacgaggagggggcctccgcggccggcctgtcccccgntctgctagttctcctcgccttcgctgccaccgtcgtcgtcgtcgcggcggacaccgtggtgaggaggggtggtcgac

SEQ ID NO: 23120 - DNA, 730 bp, Setaria italica
  misc_feature (1)..(68): n is a, c, g, or t
  Peptide Sequence Number=SeqID_89094
nnnnnnnnnnnnnnnnnnnnnnnnnnnnnnnnnnnnnnnnnnnnnnnnnnnnnnnnnnnnnnnnnnnntttttctttcgatcatgatactataatttcattcccattatagcaaaaattacatttaactgagcaaaattacggcctcatcagccccccattcttctctgttcgtcattgcaaaaattatagacaaccccacaaaattacgacttcggtcggggttatcttggagatggttttcagggtcaccaaaccaacacaaaaatgttctgccttttgtttcggcgtctcgctaacgattccaaaccactctggtcaccatctcaccgatcggaaaaccaaaacaaacctaaactgaaatttttcaaaagtggaactcacacctcagggatgtggtgctcctctctttctcgccggctctcactgtgctcaccattctgctcggcgtccttgatgctagccatggcgacttcttgcaccttcttctcggcctcgtcatcgcccttgttgctccgatctccaaaggaggacgccctgctcgacatgggcgtggcgaggtacgtcggcttcacgtccccagccatgatcacaagtatcttcttccttccctatatcggcggcggcaggtccgaggccgccggcttcgcgccgtcggcgccggagccgtcctcgtcgccgcggccggcgccaccctccaggtacccggagagcttccagtaggagcacgc

SEQ ID NO: 23121 - DNA, 254 bp, Setaria italica
  Peptide Sequence Number=SeqID_89095
ggtaacaagagcaagggtagaccatcacatttcttcatgacctgctctgcaggtgcataatcttccaaggaggtttgtttgaagaataactcccttgattgtttgtcgttaagagttctcatgacgtaaacatggccaccatcggcgctgcaggcgtttgcaatggagtgaatagccgtggtcacgatcactctgctgctcacgcccatgtctttggggaaggcgtttttaatggtgttccagtattctgtccg

SEQ ID NO: 23122 - DNA, 618 bp, Setaria italica
  Peptide Sequence Number=SeqID_89096
tgtaacgtaccggggtggcgcctggcagacttggcaccacggcggtcactgcccccggggcacggtggccatccgtcggaccaccgccgaggacatgctgcgcgccaggtccgtggcccgcttcggccgcaagaagaagaagaatagcaagagatccgtggacgccgcccgcgcggccaatgcgccggacgtcgtctccggcaacggccacgagcacgccatcgcgtacacggcgccttcttcgcagcagcagccggtgtacggtgccaaggccaccatcaacgtctgggatccggccatccagagctgggagaggctgaagctctcccagctctggatactctctggctccttcaacggctcagacctcaacagcatcgaggcaggatggcaggtcagccctgagctgtacggggacagcaggcccaggctcttcacctactggacaaagcgacgcttacgaggccactggttgctacaacgctcttgcccgggcttcgtgcagacgagctcccgcatcgccatcggcgcctccatctcgccggtgtcctcgcccggcggcgcgcagtacgacatgacgctgctggtgtggaaggacccaagctcggcaactggtgg

SEQ ID NO: 23123 - DNA, 1046 bp, Setaria italica
  Peptide Sequence Number=SeqID_89097
ggcagggctggctgtggtgtggaccagcaagcagagcagagcagagataacccatgcacccacccagcctctccctccctcttaattccaggagctagcagtcttcttcttccccttggattcagcagccatccagcttcagcttcctcctcctcggatccttcctctgcagatcgagttgctagcctgcttgcgttgtatctcaagttgaagcagctacctcttgcattgcattggtccatccctcccactcccagataatacaatgcagcagcacacggcggacagcagcaggaagaagaagcggaggaggaggaactggctgctgctatcaacgagatctgctgctcaagaagaaggacaaggagaaggtcaatgctgctgctcccagtcccagtcccagtcccagggacacaagctgatgatcatgtccccgctcctggtcctcgcgctcctcatcctcgctgctcctcctctggcgtttgcggcgtcgccccggaggatggcgaggatccagagccatctggacaggatcaacaagcccgccgtgcgctccatacggagcgcggacggcgacaccatcgactgcgtggcggcgcagtcgcagcacggtctggagcatccgctcctcgaggggcacgccatccagacggagccgcccgaggtgccaagaagaggagccttccgattcccagcagcagcagcagcagcagctggtggcggtgcaacaaatctgacgaagacgacgaccaacagcaacaacaacaacgaacgactgggcgcctggcagacttggcaccacggcggtcactgcccccggggcacggtggccatccgtctgaccaccgccgaggacatgctgcgcgccaggtccgtggcccgcttcggccgcaagaagaagaagaatagcaagagatccgtggacgccgcccgcgcggccaatgcgccggacgtcgtctccggcaacggccacgagtcaggtcagccctgagctgttacggggtactagtctaggtccctaggtcttctttcttacctttacttta

SEQ ID NO: 23124 - DNA, 264 bp, Setaria italica
  Peptide Sequence Number=SeqID_89098
gaggcagcgacatgaacctcaagcatatgggggcgtcccccggggacccgatcggggacgacgacgttgacgacgatgagcgggtggccatcgtacatgtcgtcgactcagctctccgggccgagatagcgaaagaacgggcgcgaaattgtttgattctagagttagagtgtacaatccatcacgagtacttatgattttgttccttgatagagaagaacagaggaatttatctgtgtatctacgaggtaccctgccggtcca

SEQ ID NO: 23125 - DNA, 265 bp, Setaria italica
  Peptide Sequence Number=SeqID_89099
agtaaaattttgcagatcacatactacacaaacatatataggtacacaggttaaagataagcaaaagggctactacctggagtgtagaagctcacgtacggtgcgatggtgcagtagatgtaggaccctctctcctcgaccttcttcacctgccctgacttgggcatgactgcgaagacaccaacatctgagctaatgaaaatggtacctttgccctctatgaagccaatcacatcaagtgagaccaacggatcaataacgggga

SEQ ID NO: 23126 - DNA, 648 bp, Setaria italica
  misc_feature (619)..(648): n is a, c, g, or t
  Peptide Sequence Number=SeqID_89100
ttacttgaagatgccctcatggatagagatctggttcatcggcaagactgctagacttactagactagttaaagcaacaatggctctaggcgttgctggcttgggttgtgaggatgctcttgtccatctgcttaactatgtgtggccaaacattttttgagacatctccccatgtcataaatgctgtcatggaggcgattgagggatgagggtcgcactaggtgcagctgtgattttgaattattgcctgcaaggcctcttccttgcagcaaggaaagtgcgtgaagtgtattggaagatctacaactctctatacattggtgcacaggatgcacttgttgctgcatatcctgccctggaggatgatggggataacatctttagccgtccagagctggcaatgtttgtctgattaacgctactttgggttgaagcttctgaagagttgcaacgggtttaggaccagtccccggcacgatgttttatccctgcggcatgttaagcttatacatatgatcctatgttttgaaggagaaatgacaatgctagtatgctgtcgtcttgttatgaatattaaaggattgtgttatataaacttttaaaaaaaacaaaaaaactnnnnnnnnnnnnnnnnnnnnnnnnnnnnnn

SEQ ID NO: 23127 - DNA, 704 bp, Setaria italica
  Peptide Sequence Number=SeqID_89101
aattctggtgattttcttttcttgaacaatcctggggtgatgaaagctgtgatgtgtacttaaaacactgacaccattcttatgacatcttttgttgttctgtcgactgtgaaaggtatctagatacctgatggcagcatatttggcacgatagtcttgtttgcatttgagcagtgcagtagcaatcagtatttggtctgtatcctgttccttttctgcatcttctttttcctgtatgtctttctgcaaaagaaggatctgatatgcaaacacattggcaggctggatgtacatgtccatgtgtcgtcatccatatgcatatgaagcttgaactgtgggtggtatttgagttagagcttgtacttaaattacttggtgttacctcttgtgatgcatgttattgaagttgcatcttttttgtatttgcaggattgttccttctgaagggggttgcaatgtttaggaattatttttcctggttttactgtagtttagtgctaaataattgctgatacaatctgtctactgaccatttgggaattgctttgttttcaggctactttgggttgaagcttctgaagagttgcaacgggtttaagaccagtccccggcacgatgttttatccctgcggcatgttaagcttatacatatgatcctatgtttgaaggagaatgacaatgctagtatgctgtcgtcttgttat

SEQ ID NO: 23128 - DNA, 791 bp, Setaria italica
  misc_feature (743)..(791): n is a, c, g, or t
  Peptide Sequence Number=SeqID_89102
tgaacaatcctggggtgatgaaagctgtgatgtgtacttaaaacactgacaccattcttatgacatcttttgttgttctgtcgactgtgaaaggtatctagatacctgatggcagcatatttggcacgatagtcttgtttgcatttgagcagtgcagtagcaatcagtatttggtctgtatcctgttccttttctgcatcttctttttcctgtatgtctttctgcaaaagaaggatctgatatgcaaacacattggcaggctggatgtacatgtccatgtgtcgtcatccatatgcatatgaagcttgaactgattgttccttctgaaggggttgcaatgtttaggaattatttttcctggttttactgtagtttagtgctaaataaattgctgatacaatctgtctactgaccatttgggaattgctttgtttgtctgattcaggctactttgggttgaagcttctgaagagttgcaacgggtttaggaccagtccccggcacgatgttttatccctgcggcatgttaagcttatacatatgatcctatgttttgaaggagaaatgacaatgctagtatgctgtcgtcttgttatgaatattaaaggattgtgttatatacttagtaatgtgctgtgaaccatgtagaatgcgagctccttcgtgtttttgtttcctcactgtatttttggagaacatgagatgtctggtacatgtctatctattaaaaacaaaaaaaaaannnnnnnnnnnnnnnnnnnnnnnnnnnnnnnnnnnnnnnnnnnnnnnnn

SEQ ID NO: 23129 - DNA, 2638 bp, Setaria italica
  Peptide Sequence Number=SeqID_89103
ggaagaggaggagcagctatcgccagaggagcaaaaggagaggaaaatcatgaaactgttgctcaaagtgaagaatggcacacccccacagcgtaaaacagcacttcggcagctgacagacaaagcccgggaattcggtgctggaccactgttcaacaaaatcctgcccttacttatgcagccaacactggaggaccaggagcgacaccttctggtgaaggtcattgatagggtactgtataagctggatgagctggtccgtccattcgtgcacaagattcttgtggttattgagcccctgcttattgatgaggactactatgctcgtgttgagggccgggagatcatctcaaatcttagcaaagcagctggtcttgccacaatgattgctgccatgcggccggatattgataacattgatgagtatgtcagaaacaccactgctagggcgttcagtgtggtggcttctgctttgggtatccctgcactcctaccgttcttgaaggctgtctgtcagagtaagaagtcctggcaggctcggcacactggtatcaaaatcgttcagcagattgctattctcatgggctgtgctgttctgccacatcttaagtcacttgttgagatcattgaacatggtctgagtgatgagaaccagaaagtgcggaccattactgccctttctcttgctgcactagctgaggctgctgcaccctacggtatagaaagctttgatactgttttgaagcctttgtggaagggtatcagatctcaccgtgggaaggtccttgctgccttcttgaaggccattggtttcatcatccctctgatggacgctctgtatgcgagttactacacaaaggaggtgatgcaggtccttattagggagttccagtcaccagatgaagagatgaagaagattgtcctcaaggttgtgaagcagtgtgtcagtacagagggtgtggaggctgattatatccggaatgacatccttccagatttcttcaagcacttctgggttaggagaatggctctagatcgcaggaactataaacagcttgtggaaactacagtggagatggcgaataaggttggagttgctgatattgttgggagggttgttgaggatctgaaggatgaaagcgagccctacagaaggatggtgatggaaacaattgagaaggtggtggccaacttgggtgcttcagatattgatgctcgcctagaggagctgcttattgatggtattctgtatgcttttcaagagcaaacaagtgatgatgcgaatgttatgcttaatggttttggagctgtggttaatgcacttggacagagagttaagccttaccttcctcagatttgtggtaccatcaagtggcgattgaacaacaagagtgcaaaagttaggcagcaggctgctgatctgatatccaggatagccatcgtcatgaagcagtgccaggaggagcagctcatgggtcatttgggtgttgtgctgtatgagtacttaggagaggagtatcctgaagtgctgggttcgattcttggagctttgaaggctatcgtcaatgtcattggtatgactaaaatgactcctccaatcaaggaccttcttcctcgtctgacccccatcttgaagaacaggcatgagaaggtccaagagaactgcattgatcttgttggtaggattgctgatcgtggagcagaatttgtgccagcaagggaatggatgaggatttgttttgagctgcttgaaatgttgaaggctcacaagaagggtattaggagagccactgtgaacacatttggttatattgctaaggctattgggccgcaggatgtgctggccacccttttgaataacttgaaggtgcaagagcgacaaaaccgtgtttgcacaactgtagcaattgctatagttgctgaaacgtgctcacctttcacagttttgcctgcccttatgaacgagtaccgggttccagagctcaatgtccaaaatggtgtcctgaagtccctctctttcctctttgaatatattggtgagatgggcaaagattacatatatgctgtcactcccttacttgaagatgccctcatggatagagatctggttcatcggcagactgctgcttctgctgttaagcacatggctctaggcgttgctggcttgggttgtgaggatgctcttgtccatctgcttaactatgtgtggccaaacatttttgagacatctccccatgtcataaatgctgtcatggaggcgattgaggggatgagggtcgcactaggtgcagctgtgattttgaattattgcctgcaaggcctcttccatccagcaaggaaagtgcgtgaagtgtattggaagatctacaactctctatacattggtgcacaggatgcacttgttgctgcatatcctgccctggaggatgatggggataacatctttagccgtccagagctggcaatgtttgtctgattaacgctggatgtacatgtccatgtgtcgtcatccatatgcatatgaagcttgaactgattgttccatctgagttagagcttgtacttaaattacttggtgttacctcttgtgatgcatgttattgaagttgctatcttttttgtaattcctaaacattgc

SEQ ID NO: 23130 - DNA, 337 bp, Setaria italica
  Peptide Sequence Number=SeqID_89104
tccccgaggtcctccccgtcctcatcacccgcgcgcccccactgctgttgttcctcacgcaccgcgcggccgctaacaaccgcagcccgccgccgcggagggtctggaacgcgagccctggatacggagaaggtgatggggctccagcggcccggcgaagaggcgatggccaactggcggcaaacggcgggccgcggaggcggtagcggaagctgggggcagcagtggaggaagggaagacaaggggcgggcatgcctggtgggtgctcaccgccggcaaagggcccggcgaagacgtggcggagggcgccgctgctcgcccactcgtcgccggcag

SEQ ID NO: 23131 - DNA, 521 bp, Setaria italica
  Peptide Sequence Number=SeqID_89105
aacagtatcttagattaacattatttccatcatactgggcagtaagaacaccatccaagaaatcagatttcgcaattccatatacggacaacagtttctcctcctcttcatttctcctctcttccactgaaacttgaccaataggaaagtggaatgttgccctcggcagaccaccgtaaggcaccaaagatgacagctcgagtttatacaatgggtcacccaacctagtgatcaccgaaatttcccctttttgcagcttgacatcgtgcgagccacggagccggacggcgccgccggggagcgcggcgtcgccgctgagcagcgcgttgcgttcctcgacgtcgtacagcacggagaagtgcttggtgatgagccccaggaacggcctggcgaagaggtgctgcagcgggtccccttcctcccctcccccttgccactgcccctgcgggtcgctctggaaggagagccgcagcttggcgaggccccccgcgagcaagcacgacaccttgttcgcgaacacg

SEQ ID NO: 23132 - DNA, 355 bp, Setaria italica
  Peptide Sequence Number=SeqID_89106
ttttctacattactaagtacttagatatagtaaatatatgcaggacttgcatggtataataattgcatgtcaaagcagtgatctttaactaattataactattttccaatttctatccacagatattaacgagtgcaagcttggagattttaatgcatgtggcagtggtagcatatgccatgacttggatggtggtttcgagtgcaaatgcaaattctggtacagacgtgatggtaggagtggtacgagctgccagcggatattttctaccactacaatatggacaatcataggtgaccattcatcacctcttacctctagcagcacgtattcttctcaatataatcatcagtat

SEQ ID NO: 23133 - DNA, 1237 bp, Setaria italica
  Peptide Sequence Number=SeqID_89107
aattttcaaccaaaaacggtggtgaaatactgaaggacatgggcattaacattttcacagaatgcgagctgaaaaaggtgacagacggctacaaaaaggtcatcggagaaggcgcatttggcaaggtctacaagggaacaatcaaaggcgcggaacaagtcgccgttaaatgctccttcacgagaagtaaagcgccttgccatgatgaattccggaacgagatcatcttccagtttcgtattaaccacgcgaacgtggtccgcctcattgggtgctgcctggagacggatgtccccaagcttgtcttcgaattcgtccccaatggaagcctctacgagctgcttcatgtcagaagggatcaagggctgtccctgccgacgcgtctgcacatcgccatcggctctgcggaagctctcttttacatgcactcgcagggtggccacaacaaccatgtccacggggacttcaagtctggaaacattctcctcgacaacgacctcacgcccaaggtctccgacttcggatcatccaagctcgtgtccatcgtcagtgggtatgccaagtggtacgtgtcaggggacatgaactacattgatcccacgtacttgaagactggccgtttcacagagaagagcgatgtctacagctttggggtagttctgttggagcttatcacgaggaagacggccaagtacgacgggagcaacagccttaccataaacttcgtcaagtcctgtaaggaggagggccacgggagggagatgtacgacccagagatgctgatgtctgacgatgctaaagatcaccattacatggagtgcctgtacaggatcggcacgcttgcggtgcagtgtctcaaggaagatgtggatgagagaccggccatggcacaagtgctgaagcagcttaagcaagtgcaggaaatagcttgcggaggcttatgctccggggcaagttaatgaaaaaaggcacgtagatgcaacaagtaattggctgagaagtagtcatggtttgaatggaagtgaacgagagtggacatccaacctagtcgatttatttatcaatccagcatatatcatacatgtactagccgtgatgcggttgagctaactgcctaattaaggcctaggctccaggatagtcaggagcaatgccaattcttgtgtcagattgtatcactttatctatcagtgacctgcttgtgaaactatgtgtggcgcccaaaatgttttggatc

SEQ ID NO: 23134 - DNA, 1358 bp, Setaria italica
  Peptide Sequence Number=SeqID_89108
cttccactttcgtgcgaaacaacgctactctgctactccctccattttcgatcgttttaacttttctaggtacacggagacatctctctgacagagacacaaatacagagtgtggcactgtgggtgcgcacacctatatacacacggcatcaattccccggatcgtagtatcagacagagagctaaaagtttgttagctagcagcagcagctcctcgtcctagtagctagcagcagccatgccacaagtgttgtggcttcttctcctcgttctggttgattcccacttggtgccaatgccactgattgccgcggacactgctttgcccggcactagcatgtgcggtcatgtcgagatcccctacccattcggccttagcgaccatgcctccaggcagggcaagttcaacatcacttgcaaccaaagcttcaaccctccgagaccatatttggcccgcaacctggaggtcatcgacatctcgctggagacgggcgagatgcgcgtcttctcccccgtgtcctacacctgccacaacccgtcgtccaacacacgcgggtccttgcagacttggacattccgcctccccaagccgttcctgatctcgacgacgcgcaacgtcttcacggcgattgggtgcagcactcaggcgttgctgcaaggtggggctaactggagctacttcaccggctgcaccaccacctgtacgagcttggattcagcggcacgagacggcgatcggtgcacgggccgcggctgctgccaggctgacatctccgtcaaccttgccaccatgaaggtcggctggaacgaccccaacgatcgcccggacaatcgtgcctggctcttcaacccctgcagctatgctttcgtggccgagaaaggctggtacaatttcagtcggcaagacctcgttgacaaaggaggacaaaacttcagcagccggactggatatagaaccatccctttggtgcttgactgggccatcgtcaacggctcctgcacgtcgtcagatgcaaattacgcttgtttgagcgcccacagcaactgtgccaactccacacatcgggattccggatacctgtgcggatgcagcaagggatatgagggcaatccctatgtcaccggagggtgcaagaatattaacgagtgcaagcttggagattttaatgcatgtggcagtggtagcatatgccatgacttggatggtggtttcgagtgcaaatgcaaattctggtacagacgtgatggtaggagtggtacgagctgccagcggatattttctaccactacaatatggacaatcatagcaatccttgctgtctgtctccttacgtattgggcgattgggggagtggaag

SEQ ID NO: 23135 - DNA, 1823 bp, Setaria italica
  Peptide Sequence Number=SeqID_89109
ccttacctgatcatccaaatatcattgattttgagaagttcagggatgtcaatatgttttcagttggtcagatctgggccctttatgataaccttgatggtatgccaagattctatgctcgaataatgcagcttgatgcttcagacttcaaagtacatttggcttggctggagcatgatccaatgaatgaagaagagaacaaatggaccgacaaagaactacctgttgcttgtggaaaattttgcttaaggaaaacaagagatatatcacaaaacatgtccatgttttctcacattgttccatgtgcggacggtaacaaaagaaattcgtatgtgatacaccctgttaagggtgaggtatgggctctttacaagggatggagcatggaatggagctcagatgcagataaccatagatcctatgagtatgaagttgtggaagtcctgtcagatatatcagctgatggtggtttcactgttaccccactggtcaggattaagggttttgtcagtttatttgcgacagctagggacaaatcctcattcacaataacatcaagtgagctactccagttttctcacaggatccccttttataggacaactggaaatgaaaaagttggcgtcccaggaggatttctggaactggacagtgcatctctccccactgacctggatgcagcatttccttctgttgctctagactcttacaagtctaccaacagtatgtccgttggtttgagaactgatagcatgaatgttggaatggatcctggaactgagcatattgttctagagaaaaatcactgtgaagcacatttgcctatggaaaatcataagtatacctcttttgaacaagatacattctcgcaggaaaatgcccatggtgccaacgattttggtgattcctatcagcagaattgcctttcccccaaaactttcacatatcctgattctgctttccacaattttgaagaactccgctcacatgagaagttcgaatgtgggcaaatatgggccttatacagtgatgttgatgaattccccaagttctatggctgggtaagagaagttgagatggagccgttcaaagtgcatttgacctggcttgaggtttgtcctcaacaggagcaggaggaacagtggttggagcaggggatagctacaagctgtggtacatttcaggttcgagactggaaagccatttatgacacaaatggcgctttctctcatgtcgtacatgcccgaaagactagcaacaagtggcaatttgaaattcatccgcaagtaggtgagatctgggccatctacatgaactggtcgcctgattgggctcctagtggcaaccgtgccgagtatgctataggcaagataaagaggcgcactagatctggcatagtatttgactttttgaccaaagttgatggatatgtcgctgtgttcaagcttgataatcaaaggggggcattaaaggtacgagcgaaggagaacatgagattttctcaccggataccctcgttctgcctgacagaagaaaatggcggtgagctccgtggcttctacgagctagacccagcttctgtccccaacgattttctatagatgaatgatgttcctggaatcattcttgatgcattacttgtctgaaggctgtgtaggcgaatttatctcacattagagttttcttgtgttctgttgaacgtctgaacttgtaagcctgtaaggtgcaaccatgtgtggtttatttatgtgagaaccatgctagcattattctggaattgtactgtatgtcagaaccaggcattattgcagccacttgactaa

SEQ ID NO: 23136 - DNA, 496 bp, Setaria italica
  Peptide Sequence Number=SeqID_89110
tcactctagaaatgaaacagtgagttcttcctatcactctccaaaaagttctcatccatcatactgtttatgatcaaaatcggactatcgcagaaacaggtgtgaagttgccacgacagagccaggcgtcagacattgaacccttcagctctcaggcattgcaggtgggcttcgatgaactttccgcaggcatcctcgccattctgcacgatgcagtcatctctcagcttcttcgtatctgggcaagcgcaacatatcttctttttcggcttcgtctcaggtgcaggagctgtggcaggttgctcctcagttttcacagatgcagtgttccccatatcgagtaggagtccctggagccgacgagcgcgggcgcaaactcgaatccgcggtccggatctgactccagaacgatctctcggagccggagggaggaatcgcgccgccgcacgcggagaccgggggacgagagggttctagaggagacggtgcggcgtgg

SEQ ID NO: 23137 - DNA, 719 bp, Setaria italica
  Peptide Sequence Number=SeqID_89111
aaaatatatctcgccgctgccgcaagccctagccgccgtccgccgccttcctcgtcgccgtcgtctcgagctctcggcccgctgccttcgaggaacgcggagcgccaccgcacaggacacatcccctacccccaggaggttagcatccgacagcaatggcgaagcatcatcctgatctcatcatgtgccggaagcagcccggcattgcgatcggtcgcctctgtgagaaatgcgatggcaagtgtgtcatttgcgactcatacgtgcgtccatgcacgcttgtccgggtgtgcgacgagtgcaactatggctcattccagggaaggtgtgtgatctgtggaggagtcggcatctcagacgcctactactgcaaggagtgtacccagcaggagaaggaccgggatggttgtccgaagattgtcaatcttggaagcgcaaagactgatctcttctatgagcgcaagaagtatggttttaagaagagatgatcgagcagagggagtgctgggttctactggctgcgtgtttgtgttctgtcgcactgatgctgagagtaggttgcctgaggcagcagctttgtatttgtgtttatgatttgatattgatgtgaggatacacccccctgatatgctttgtaataagtagttcaactgtatggtgtaatactctagaagctggattatgcaatttatgtggtacggtgatggccacggttggtc

SEQ ID NO: 23138 - DNA, 2674 bp, Setaria italica
  Peptide Sequence Number=SeqID_89112
tactcaggtaatatatgtcgacccgaccacgggcgccctgcgctacttggggaagcacggggaagatgttttcgattccgaggcggcggcattgaactacatcactgatggatcaaggattttatccaagagcaccacctatgggaaagcagtgctgggctatgcagtgttaggaagctatgctttgcttttggttgcaacgcagctgagtgcaacagttcccaatctgcccggaggtgggtgcatacacacagtggcggagagtcaatggataaagatccagctgcaaaaccctcagccccaggggaatggagagcagaaaaatatccgtgaattggctgatcttgatattgacgggaagtactacttttgtgagacaagggatgttaccaggccatttccaagtcgtatgacagtatgggaaccagatgaggaatttgtttggaatgagtggctgtcaaagccttttaaggacatcggcttgccaggacactgtgtcattcttttacaggggtttgctgagtgtcgaaactttggaggtgctgggcagcaaggtgggttagttgcccttattgcacgtcggagtcggttgcatcctggaacccgctatttggctcgtggactgaatgcatgttcaggcacaggcaatgaggtagagtgtgagcaacttgtttgggttccacaaaagggtggagggcgcatcccttttagctcatatatctggcggcgtggaactataccgatatggtggggtgcagaaataaagaatgctgtgtcagtagaagctgaaatttatgttgctgatgatccttacaacgggagcttacaatactaccaacgactgagtagaagatacggcaataaatcatctgaagagaatgtatctaggcaaaagaaatctggaatggttcccattgtttgtgttaacttactaagatatgctgaaggtaaaactgagtcagttcttgttgattgtttcaaagaatctctacagtacatgaagtctactggaaagcttggaagcacgtggattcagttgataaattatgactggcatgccactgtgaagttaaaaggacagcagcagacagttgagggcctatggagacatcttaaagcacctacaatggccattggcttcagtgaagggaattactatgatgtaagacagcagcttaaggaatgtaaaggatcgattatctgcaatgacgacataaatggcggattttgcatggaatctactcaaaatggggtgatacgtttcaattgtgccgactcccttgatcggaccaatgctgctagttactttggggcacttcaagtttttgttgaacagtgtagtcgattgagtatctcactcgatgtagatgcaatgtttgggttatcaagcagatattctgaatatgacagtcgaaatgctcgttctttgccccctggatgggaggagcgctttgactctgtaacagggaaatcattttatattgatcataatacacgtacgaccacatgggaacatccatgccaggaggctccacagaagccctggaagagatttgatatgacatttgatcagttcaaaggctcaacaatgcttgctccagtgaaccaccttgctgaactttttcttttggctggcgatatccatgctacattgtacactggctcaaaagctatgcacagtgagattctgaacatatttaaggaggaaaccggaaagtttagtaaattttcagctgttcagaatgtgaagattacagtgcaaagaaggttccacaattatgtgaatgatagatcccgccaaaagcagttggagatgttccttggattgaggctatataagcatctcctgtccattcctatattccctctcaaagtgctatcaaggccatctggatgcatgttgaaaccagttcctagtatcaccccagtggctgatggtggttccagtcttctcagcttcaaaaagaaggatcttatttgggtatgtcagcaaggtgcagactacgttgaactttttatataccttggggaaccttgtcaagtctgtcaactgcttcttactgtctcccatggtgctgaagattcttcctatccagcatcagtagatgttagaattggctcaagcatagatgcccttaagctcgtggttgagggtgcttgcattccacagtgctcgaatggcacaaatttattgatacctctcactggaagaattgatccagaggacttagctgttacagggaaaagtgctaggcccaatgttcaagagagcacataccttcctttgttatatgactttgaagagctagaaggagaactaaactttttaaatcgggttgttgcattatcttttcatccatctgccatatcaaggacacccatcactcttggtgagattgaagtacttggaatttctcttccatgggcagacatgttaaacaatagtggacgtgctcctgaatttatggagcttctccataaaaaatcaagcgctcactgtgatataggttcgaagtcttttgcaaattcttctgggcctgtgaatgattctcgtggcagtgaggggtcttatactaaaagttcatcgtcagctcaaccaggtggttcggaaaatttgttggattttcctcacaggtgattttgacatgtcaaagtcacatataactgaaaatat

SEQ ID NO: 23139 - DNA, 433 bp, Setaria italica
  Peptide Sequence Number=SeqID_89113
tagcagtagcaatgtaacataaccgcataatcgaaagctgcattgtacaatggtctgaaacgcacaacagcctgacaaaatgcttgccaacacacaaatgatagtttcagagtcccatggggtgaaataatttagaatccttaccctacacatcatccaactcaaaacacaattctgacaaaatagtaatctctaacacacagcataaaacggtaccagcaaacagtctgacgacttaactgataatgtctgccactgccttaaccaccttgaagggactcacccttgcttttcctccctttcgcggttccactgctcaatcttagccctgcgttcctcgctgttctccctgactgggcttcttgcacgcctgggaggggggctgccaccatgcctgcgcctccctccatcatcgtaccttttctattgtcct

SEQ ID NO: 23140 - DNA, 759 bp, Setaria italica
  Peptide Sequence Number=SeqID_89114
ctgagactttcagtcccattgtgaagcccgccactgtccgcacagtgctctccttggctctcttgcaactggccgattcatcaattggatgtgaaaaatgcttttctttgtgggacgctgttagagacagtatattgtgctcaacctgctggctttgaggatcctgctcgcccttatcatgtgttttggcttaatcgatctctttatggacttaagcaggcacccgcgcttggtacaaccgtttcgccacccacttgttgcagctggttttgtggaggcgaagattgacacttctctgtttgtggatgacatagttctcacggcgtcctggacacctctgctttgcagcactattgatgccttgcatcaggaattctccatgaaggatcttggtgagcttcatcattttctaggtatgcatgtgcagcactctggtgatggtcttctgttgtcccagcgctagtttatgctggagattctggacgtgccggtatgaccgactacaagccttgttccaccccagttgatactaatccaaagttgtctgctgctgaaggtgctcctcttgtcaatggcactgattttcggagtcttgctggtgctttacagtacctcaccttcacacgtccagatattgcctattctgtttagcaggtttgcctccatatgcatgacttgcaagaaccgcatcttgctgctttgaagcgcattcttcgattgctattacttcagtattaggatgtgacagttacatcgtca

SEQ ID NO: 23141 - DNA, 959 bp, Setaria italica
  Peptide Sequence Number=SeqID_89115
cgtgcgacttcttcgggcggatcgtgcgggcgctgcggcggcagggcatgaaggagaagtacgtgagccccgtcgtgctcttctacgcgaacaagtgggtgctctccaagaagacgcacaagttctgggcgagcacggacgacgaggccgtcgacggcgagaccgacgcgaacaggagggccgccgcgatcatggagggcgtgatcgctctgctccctgtcgaggcggccgcggtggccgcgagcggcgccatcccggtggcgttctacttcgctctgttgtcgcggtcgctcgccctggagctgagcgacgaaagccagatgagactgcgagaacaagtggcgtcgaacctgcaattcgcccgcgtggacgacctgccactgccggagcaagaaacgggccggcccatcgccgacagcagggaggtgagggcggtggagagcatcgtgtcgagccatgtctccgcgcaaagaaaaggcgcggaggtcgtcgccgagctgtgggatcggtaccttttgcaaatcgctagtgatccgaagctccggccggagaggctatcggagctcatcggcgtcattccggcaggcgaccggaagaaccacaaccatttgtacgaagcaatcaacacgtatttagtggagcatcggggtttgtccggggaggagaaggcgacgctgtgcgggcacctcgactgccggaagctgtcgcacgatgcgtgcatccaggcggtgcagaacgaccggatgccgctccggctgatcgtgcaggcgctgttcgtgcagcagctgcacacgcaccgcgccttcacggagtgctccgactcgttccggtgcatgcactccggtgagctcgtcccgggcgccggcgcgtacacgcccagccccgggtgccccgccattcccaccagccagagccagccgctcagcagcggcagcccgtacgagagccaccgcgccccg

SEQ ID NO: 23142 - DNA, 285 bp, Setaria italica
  Peptide Sequence Number=SeqID_89116
gtttgccaacgcgacgtacgagaggctgccgttggacgaagaagttgatgaggaagccatggaagctggccggcctggcggtggtggtgtccctccgatgatgggcggcgggctgcccgatccattggcgatgccaatgtacggggccgtgccacccaacctgctcctgcctggaggcggtcagctcggccatggcgccgaggggagtgcatggccgcatgcacgcccgccgtactagaggatctccatatacaatagtgacagtttgcactttgcaagcatgaa

SEQ ID NO: 23143 - DNA, 2121 bp, Setaria italica
  Peptide Sequence Number=SeqID_89117
tttcacccccacctggaggtgcttcgactgcaccaggcattctggatcagcaaaatcttgctcttgttgatgccacacctagggacgcaggtgggctttttgatgattctggcgacccgtatgttggttctgagattactgcagaacctcagcatggacttgacagtcctattgtattttgggatgacattatcaaaggtgttggccaagagtttgataatgtgaaggatttccgtgctcagttgtgtaaatatgccattgggaaaggatttgcatatagattcataaaaaatgaaacaactcgggtcacggtaaaatgtgttgcggagggctgcacgtggcgattgcatgcatctgagtcatctcgtaacaagaaatttgttatcaagaaaatgacagatgagcatacatgtggaggaggtaatggagaaggtcagcgtcgagcgacaaggcagtggctgactaacatcattaaggagaagctgcatgataatccaatgttgaagccgaaagagcttgtcaaagaaatatatgaacaatatggagttacgctaacttattcgcaggtttggcgaggtaaagaagtagcgcagaaggaactgtatcacgctatcagggagacctacagccatttgccctggtattctgatagacttattgagtccaacccaggaagtatagctttgctgtctccaatggtggatacaaaattccgtcgcttttttgttgcattccatgcttctttgcatggctttgcaagtgggtgcaggcccctcttatttctagacaaggttccactgaaagcaacaaatgattacaaattgctggtggcggctgccgttgatgcagatgatggcgtctttccagtggcatttagcgtggttgaaaatgaaaactacgatagctggatttggttcttaatgcagctgaaatatgctctccaaatacacaactacccttgcaaagccatgacattcttgtccagtggacaaaagggtctggatgctgctgtttctcaagcgtttgaagatagccaccatgccttctgtttgcatcatatcatggaggaattcaaaggcgagctgaggaaggggccatggtcacaacaaataagagatggcatgattgaggatttcacccgtgcagctcaagcatgcagcattgaggattttaatgcatccattgagagcataagaaatatatccactgaagctgctgactggatcattgcaagcaagcctgagcattggtcagatgccattttcagaggatgccgatatgatcatttctcctcaaacattgttgatgccttcaataactggataccaaccaagaaggagggttcaatagtgctgatgattgactccttgagaacaaaaattatggagataatagaatcaaggcgtgaagcttgcaaggcgtggtcagggccattgacgccttccatggaatataaagcaaaggaggagatgatgaaggctggtaagatgaccgtgctgtgctcctctgaaaccgtgtttgaagtgcggggcaatgcaatttttgttgtcaatcttgcaaactgggagtgcacatgccggaggtggcaactttctggactcccgtgtgtgcatgctgttgctgtcttcaataggattgggcgatcttactatgactactgctcaaagtttttcagattagaaagctatcatttgacttattcaggaacaatcttcccaatacctgacatggatacagttgattttagtgctggggcaaatttaattccacctcccaagcctcgttcatcagataaaccgagaaggaagcggtttaaccccaacaaggtccctacagttatacgactctgcagcaggtgcaagcaagcaggccacaataaggcaacctgtgaagctattttgtagaccgaagtaactttctgcccctcgagtgtgtatagtagcagtgtcagttttttggcggagcatggccaacgggaagatggtgggtggtttttgcggagctaatgtggtgaagaaattccacacaagctgttgggtgcgctggtggtgcctgccttttgtggttattacttggatctaagggggacatgggatatcaggcatatgattctgtttatgt

SEQ ID NO: 23144 - DNA, 543 bp, Setaria italica
  Peptide Sequence Number=SeqID_89118
tttgtattctactagtcgtttctttcgtccttactagtttctacttattctaacgtaccttttcagcatcaatctgtaaccagaagacctcagcatctggcacgaaattcctcattcaaccactgacacctgtgcctagttcacatgcttcttactctttcttttcttcttttgctgatccccatcggcatgttctttctttggttccgcatcctcagtaggctgtggtctcttctttggaacttcgaactggttggctgggaactgtataccatcttccggacgtagaagttcaccacatctccattgtcacgcttcatcagcacatgcttttgaagtcgcccaccagagtccttagtcatttggccatccagtgcttcaaaagctttctctacctcatctatctcattgaacaaaatacatgtagaataaaattcacctcgaatccttgaaatacaaatctttagtcaatacaaataactagggggttaccccaagaagaaaaaactttagacaacaagttacttagaacaaaggacaaga

SEQ ID NO: 23145 - DNA, 1846 bp, Setaria italica
  Peptide Sequence Number=SeqID_89119
tttaactattgcaacataattcaatcaacgtacttcaagccatccgatttttttaaagattctgaataccagttctgtagcattaccgaacaaaattttctaatgacaaccatatttggcaaaccacatgcccgactgcgtcagtctaatcgaagaatcaaatgccccctctaagcaaccaggcgattagcacacaccgcacgagaacagcaacggatcgtgagatcggagaaacggacactatttcctcgtacatgggtaccagtactacgagtccaccctctccaaaattggtttcgccgagctctgaccaaactgttcctctccaaacagctcatgatcacagcgttcttcgcctacagttcactatcaacgacctttcagcatcaatctgtaaccagaagacctcagcatctggcacgaaattcctcattcaaccactgacacctgtgcctagttcacatgcttcttactctttcttttcttcttttgctgatccccatcggcatgttctttctttggttccgcatcctcagtaggctgtggtctcttctttggaacttcgaactggttgggctgggaactgtataccatcttccggacgtagaagttcaccacatctccattgtcacgcttcatcagcacatgcttttgaagtcgcccaccagagtccttagtcatttggccatccagtgcttcaaaagctttctctacctcatctatctcattgaacaaaatacatgtagaataaaattcacctcgaatccttgaatcaatcttgtcatcaatactggggttcccagagaaaactttgcacagttcttgacaaggcaggtgcaccggtattctatgagcaagcaacttcaacgaatcagactcagttattacaccgcttaccgccacttcaatgggatcattaaatccatgcttaagctttgcgagaactagattcattgcagcttctgcgtcctttaagcaattatgtggttcgccttcttctcgaacagaataccccaaaacagacttgcacagactgtttaaggaagctgatgcagtagtaggtaaattggcatacttaaagatgtaggctgtatcaataacttgagagcaatcaatctttaaggcacataaatctctatataagctgtggccaatcaaaatctttcctttggacaagatcctcttcagcgatttctgaacatcaactaatgatgatgtgactccttctagatccttcttagatacaccggtgatgtgtgttctatagtcagtaatagctttagaaggatttacaagtgtgtccagcttcacctccagattgttgtctacaacacatactcggaccacagcctcagtgccatcatggcaaaggaccatctcacagtcaattgccaacatagcacttgagctcaccaaacttgagacatctcctatccgcaacactttccatccctcttggtatgatgggaagcaataatttttcctgtactctgggtgctctgccgtcagttgaacaagtttctgctcgggagaaacctggtcaggaaaatcgttcatatgctgctgcacatcacttctttccttttgacgcttaaccaatttgccgaagtacttttggaaatccttggagaaggtttgcaggaaggcgagcagcacatccctcgagcgcttcctggggtcgcttactgaagcgccaaacttcctgtcgttccgagccaagaaatccttccacgccccatcggagcctttcaacccgttcttctgagtgaacctcacgacctcaacgagacaacctactttactacggacggacggacgaagaccgacttaggtacctaattacgta

SEQ ID NO: 23146 - DNA, 167 bp, Setaria italica
  Peptide Sequence Number=SeqID_89120
tccaatgctgcaaggaattgatttttgcattggtgaacacaaggttattagccatctatttggtctagtacaaactattgaagatctgatttttttgttatgcgatccataattttctttgatttggatacaaatctcagcaggcgttttgttgtcaccccctttct

SEQ ID NO: 23147 - DNA, 264 bp, Setaria italica
  Peptide Sequence Number=SeqID_89121
ggagacggcagcgcggccggcctctggttcgggcaccctattccggcagctggctggcccagttgcccgctgcgctgccatatccacggcgacgggtgaggctgacccgaaccgattcgatgtgccgcgagcaccgcagctacctagcccgtgtccgcagaccgcaggtggaagatcacgtgcggagcagtgtgctagctgctcgatctgggacaccggacacagccagggtcccaaagatgcatatatataaaaatcagatcg

SEQ ID NO: 23148 - DNA, 1250 bp, Setaria italica
  Peptide Sequence Number=SeqID_89122
gcagaaatttgcctgagataccatcaacaccacacattgagcacttacttcaggaaattcaaagtaagtcagataatcgaattaagaatgacatacaaggcagtaaagaaacggtccatgcacctaatcggcatccggcttcagatcaacttgacgcatcatctgcgaccttcctttttgtttagatgagagcccacagagaggctcctcctttcctccagttgtttagatagcactgctcaagttgatccaagagataactttcttatcgcggaaaatgtagatacattaatgcccgatgccctgttgtcaagagggatgtcttcaggaaagggtatatgcaatctacctactggacaaagggatcatagggatgtggagaacgagctatcctctgctgcattcagctcccagtcatttggtgtgcctgacatgtcttttaagcctggatgttcaagtgatgttgctgttgctgatggtggaatggcaagccaaggtttgtggaatagtcaaacacaacggatgagaactttcactaaggttcaaaagcgtggatctgtggggagatcaatcgatataacacgataccgaggttatgaggatcttcggcatgatctcgcatgcatgtttggtattcaggggcagcttgaagatccctacagaacagattggaagctggtgtatgttgatcatgaaaatgacatcctcctcgttggggatgacccctgggaggagtttgtaagctgtgtgaagagtatcaaaatattatcatctgctgaagtacagcaaatgagcttggatggcgaccttggttgcatccctccacaagggcaagcctgtagcgcttccgatgacgcaaatgcgtggaggggctgacgtaaatactaatgtgcatcttaccattatttagaggatactgagtgagggataaaggattggaatacacgtctaatgttattacgaggtattacttagggccaactcactgacagaactgatggaaatacttctggcagaatttgttcagcaaactgccttattttggcggtcctgacgctttgttccactaaaatccggtaattaccaacataatcagattagtttcttttttttttgggatactaaacttctttgaagttgagaagctacctctgtttattgggacttacattcattgtaatccttcaaattgttcaattgtcacaatgtatatatgtgctgtaaaccctgtaacttctggctttgcaact

SEQ ID NO: 23149 - DNA, 258 bp, Setaria italica
  Peptide Sequence Number=SeqID_89123
gtgctgccaccccctcagaagaattatcactaatagctgccaccatggcatcacaactgcacttgaacctttttctgattatcccgcatcttcctgctcacatttgttatttggagaccattatttctgggttccttcgacaggaatcatcaaggcatattgttctccttactctaaggagtgcagtgttataagtggtttgtacatctagttggaactaacagaccatagaggggccaatacaaaatataggtaaag

SEQ ID NO: 23150 - DNA, 338 bp, Setaria italica
  misc_feature (338)..(338): n is a, c, g, or t
  Peptide Sequence Number=SeqID_89124
cacgccgcagaacccgacaagctccaagaacgagatcgctgcaatggtaaggccgaaccaattagcttcgtgacaatctgagcaatggtgttcagaagattaccgaggaggaagcacgcggcgcgccagccgccgcggccgtcggcgagtctggagctgacggacgggccgggtcggtgtacaagctcgcccgactccatcgcggcacctcggccggaagtgttgccgtcggcggctggctaacgaaaaaatagctccggcggcagctcagctcagtggactcgtgccaaatggcgaggaagcaagtcatagatgtttattaggccgtccccgtcttn

SEQ ID NO: 23151 - DNA, 573 bp, Setaria italica
  Peptide Sequence Number=SeqID_89125
agttatgagtattactactgcaagcaggatatgtttgaaccattcctttgagagtgaaacctatttacaccttagtcttttattggggaaaagattaatctacatagctatgtacaggtgcttttgggcgttttcacttggagttcgtctgttctgtcattttacctgaattggctatccgatgttgatctgatatgtagacacttggctcatatcttggattgcgaatgcttttcacttgaagttcctctgttggcccttttagctgaattgactctttgatctgatatgtgcaatttctgcatcaggcactcaggtcgcatcttggattgcaaatgattgattgtgataattggttgccttttctttagtttaaaattagggtgtcttaacttcaaaaaaaaaatggtgtttgatgcactttggacggtggctaatgcaacggatggccgcaatttttgtttgtccaaatggcagtggcagacagtagcagtcaggtggctaccgtacaaaaacttcgcccacccctctcgccatcaggggcgcccaatctgctgtgcttcctcgtcctcc

SEQ ID NO: 23152 - DNA, 349 bp, Setaria italica
  Peptide Sequence Number=SeqID_89126
gttcatggcgaaggagacggagacgaaggaaatcgtggcgctcaagaagatccgcatggacaacgagcgagagggcttccctatcacggccatccgcgagattaaaatcctcaagaagctgcaccacgacaacgtcatcaatctcaaagagattgtcacctcgccagggccagagagagatgagcaggggaatcaaattgagggcaacatgtacaaggggagcatttacatggtcttcgagtacatggatcatgacttgacagggctatcggacaggcctggaatgcagttcaccataccacagattaagtgctacatgaggcaactcctttttggccttcactactgt

SEQ ID NO: 23153 - DNA, 447 bp, Setaria italica
  Peptide Sequence Number=SeqID_89127
acccgtcgcacgaccgcgcctccaccgccgccgcggacccgcccgaccccgcgcacgtcgcggcgcagacgtcgcggaggcggaagtcgtaggcgcgggtctcgacggcgtcggcgcgcgagaagaggaacgggccgcccgtggcgaggtcgtagcatgggaccagcaccggccgcaccgtgtcgcgcagcgtgaggtccccgaacagcttgcggaacgcggcggcgcccgggcggcggaacagcgcgcgcaggccgcccccgcccccgccaccgtctgaccatccccgtcggaggctccgcagcaggaacgcgagcgcgtcctccgccgagaagagcgggcgcccctcgggcccccgcgcgaccagcatggccgcgagcacgcccccggctccggaccccgccgcgacgtcgaagaagtcggccagcctggcgccgtcgtccccgg

SEQ ID NO: 23154 - DNA, 429 bp, Setaria italica
  misc_feature (380)..(380): n is a, c, g, or t
  Peptide Sequence Number=SeqID_89128
aagtttattgctttcatgtacgtttcttgattaattactaaaagaacttatgatcagcacttcacctaccgcccatcccattctcatccactttgcaactccagctccatgtgctgaacttgttggcaagcaccaaggtagctatgaacaagagctagttggagctgagtttgctctgccgtagcctgcgttcgtcggagagtatcttggcgaagcgtgctagcgcctcttcattcgttccttcaccgttaacaggctcgtacatccccgtgtcgatgttcactcttgacacaggcttcttgagcagctcatggccgatcctgatcagagcctccatgttctccttggttgtgatgtcaactgatgacgtgtcccccgtnaacgagtcatcctggatgcgaaggtagttcttctcacagtgaagggcct

SEQ ID NO: 23155 - DNA, 1404 bp, Setaria italica
  Peptide Sequence Number=SeqID_89129
atcaggccattattaacgtccgaccccccccccccccccaaacaagtggggatctcgaccgactggcccaaagcaaatcatccttgcctaccaagttattgacctattgcacaaattgtgcatccaatcttttccaaactcccacagaagctacttcagagtggaagcactccgatacaatcctgtcattgcgctggtaatcttgtcacctgaatgtctgatctggaaacttccggttctccttggcctgcctggcttgggcaggaagagtgtgttgagcatcttatccagatcttcggcactgtacttaacatacttgctcgcactgatgtcctgctcaacgagcggcccatagttctgcatgaagctccggtaaataggcactatagcctgcaccacaaggtggcatgtcttctgctgcaaatccctatctgatatcacccatgtagactgcttttgaaacatctcatcaaacttagcattgaacgatttgagcctctgcttcactaaatctctagcggtagcctggcccttggagaacatgatcagcccctccctgctcagcaggggcgcaagtgttccccagctctccctcagaaatactgccgagtagtaatccttgtactgctcatgctccctgagccatgcatcgcctaagagctcacccagcttagtacccttcaggtgcttgaagaagtgccagtgtatgttcatcatgaagaggcacgacagcgtcgtatctccataagcctttgaccatgtctcgaagttgatctcaagcgtcttaacgatattaagcaccgcgtctaccagcatcttatcattgaacacctctttgcgccagctgcggtggatggtgaccacctgtgtcagcacagaccgatacggctccccaaggagctggttgcagtacttggcaacaaagctcaccaggcgcggcactccaccatcaactggtggaggcatattgcgctgcagctcaacctgcacgagcaattcctcaaaaatctcaacagcaccatccaccaccatcttgacaagctccctagtccgggtctggatctccgcacaagcctttccaccgaacaaacggttgaagtccagcctcagcttattcagagcatcaaacacgtcaagcaaccgcaacagcttgatggggtctttcctggtatcagccagggcgcggccaaacttgaggaaatcgagaatgccagcacgagccgcgacctcagcaaagcacgacggcatggcctctggccgccgctcaaacaccgccacgcagagcttcctctcagcttccaggaggtggtgcaccgcaaactccagatgccgaccccagcgctcgacgctcgggctgagcacctggacaacctagacgacgtacctaccgaatagtactaccta

SEQ ID NO: 23156 - DNA, 325 bp, Setaria italica
  Peptide Sequence Number=SeqID_89130
ctaacttattcgacaagttcttcaactcttacaatcccgatggggcaagggtagcaagagttttgtgaggttttacatgtaacatgtcatgaattcatcggatgaacatccaaggactaccgaacccacaagcacggaacattcgacgaattcatgacactgttacatgtaaaacctcacaaaactcttgctaacttattcgacaagttcttcaactcttacaatcccgatggggcaagggtagcaaagctaagcagactccgacttggtgtagatcctaacggcaacagccaagcccaggatagccaggggaaccaagaactga

SEQ ID NO: 23157 - DNA, 713 bp, Setaria italica
  Peptide Sequence Number=SeqID_89131
tactaattagttaaaaaacccttactaactaaaaaacttctttgtcttaactttatttcgacaagttcttcaactcttacaatcccgatggggcaagggtagcaaagctaagcagactccgacttggtgtagatcctaacggcaacagccaagcccaggatagccaggggaaccaagaactggaggatcttgataatgaactctggggtcttgtcctggttgtagtgcggttgcttgggggcgacatacttcgtcctagcagggatcgttgacgagtcaatttcacccaacaagtactcatccatcattgcacgggcagtggtactgtgcccaacatcctcaaaatcatcggtcgcatccttggcagttgaggacagcagaacatcatcacctcctgggtggtcttccaaaaacttggtcacatagtacacctattccacagaaaaacagagaactggtgaggttctaatggagaacgataaatttctgattattagtcaaagtagcaacattaatgaaagagctggtgccatgccacaggcaaaagagagagtggccataacacaaaaaaaagtgtgataaaagataatcaacctgatattctcaaatattgttatgcaaatgaaagcattaaggtttttgaaggaaaggtaaaaagtgcagcaggttaagcagacataacacatttcatcgactactcacactgagtcgga

SEQ ID NO: 23158 - DNA, 944 bp, Setaria italica
  misc_feature (31)..(31): n is a, c, g, or t
  Peptide Sequence Number=SeqID_89132
tttggtctagttctctttagttttttttttntttttttttttttttaagtttttttctttttactgtaaactaactcaggttatagattctgtagaagtatgtagcaaaacacatcttgctcagaacaggtaacaacacagaaaacaaaccgcaccgagcaacaataatgtgcatcctaaggaataaggcaaatataactgaatatccatccacttaacttgagtctcactttaccaatagatgttgcacgtaacggtaccatcacagagactgaagtttccaaattcatgacagcccaagctcgctcatacaagacatgcaatcctcactaacttattcagttgtaatctttgaatgactgatgacaatattaggtggattccgacttggtatagatccttacagcaacagccaaacccaatatcgccaaggggaccaaaaactggaggatcttgatgatgaactctggggtcttatcctggttgtagtgtggctgcttcgggggcatgtacttcaccttagtgggtattgtagttgcatcaatttcgccgactaggtactcatccatcatcgcacgagcagtggtgctgtggcccacatcttcaaagtcatcagtagcatccttggcagtggaagacagcagaacatcatcacctccagggtgatcctccaaaaacttggtcacattgtacaccttgccgccgatgatgagccagcagtcgtccttggtgttgtgcttggcgacctcctcgagggtgaagaccttggacgacgacatggtggtgctggtctggaggttggggactctgggccgctcctcctcgtcgtcgggagccgggagcctggagatggtagaggctctgggtggggggctctcgttggggggggctttggatccaacgaggacgagacgggacgaagcgcagcgcagggattgggtgcc

SEQ ID NO: 23159 - DNA, 604 bp, Setaria italica
  Peptide Sequence Number=SeqID_89133
tagccttcgttagcaccggaaggaaggaggactcagcggccgccgccccccgacctccccaatctcgagaggaaggagagaccccgggcttgggctcgtgccgagcggaggaggcgaaggacgatggggaagggcgtcctggaggtgcacctcgtcgacgccaagggcctttacggcaacgatttcttagggaagctggaccccttcgtgatcgtgcagtaccggagccaggagcgcaagagcagcgtcgcccgagaccaggggaggaacccgcgctggaacgaggtgttcaagttccagatcaactcggccgcgtccaacgcgcagcacaagctcatcctccggatcctggaccacgaccatttttccagcgacgactcgctcggggaagcgacgatcgacgtgacgggcatcatcagcctgggcgcggagcgcggcacgtacacccagagcgcggcgaagcacagcgtcgtcctcgccgacaacacgttccacggcgagatcaaggtcggcttcaccttcaccgccacccaggttcaggaagatggagaggaaatcggaggctggaggtacagcagctttaatcagtaggcgtggtgacctc

SEQ ID NO: 23160 - DNA, 675 bp, Setaria italica
  Peptide Sequence Number=SeqID_89134
tttctacctgggattcacgattacctgttacggatcgctagtacgccaccgttgatggcatggactgacgaatgaactgcatgcaactgtattgcagaccaggggaggaatccgcgctggaacgaggtgttcaagttccagatcaactcggccgcgtccaacgcgcagcacaagctcatcctccggatcctggaccacgaccattttccagcgacgactcgctcggggaagcgacgtgagtgcccgcctgcccgtcaaccatgcccaaccgctagtcctaactggtccgccctccggaacagttgaccgcgcaaccgcccgccctaaccgtgggattccccatcaacctccgcaaaatttgcaggatcgacgtgacgggcatcatcagcctgggcgcggagcgcggcacgtacacccagagcgcggcgaagcacagcgtcgtcctcgccgacaacacgttccacggcgagatcaaggtcggcttcaccttcaccgccacccaggtgcggtagagtttcggtcatcatgcgcggccggtgtttgtgcccacatgcattgttgagatttatctgcataccgatgtgtggtttcaggttcaggaagatggagaggaaatcggaggctggaggtacagcagctttaatcagtaggcgtggtgacctctgaagttcttta

SEQ ID NO: 23161 - DNA, 724 bp, Setaria italica
  Peptide Sequence Number=SeqID_89135
tatgcaacatagcaaagttttaatttgttcaggtgaaatctcaggtttccttctgtggtgggagatgctcattttgtctaattgggccgaaatggacaaattcagataagttttgagtctggaagcctatatacagtacaagaactctgcaatggaggggtccgaatctagcaggagttgcaagagagatgtcgaggacagcattgatgccatgggcagttggaaggaagatgagcgagaggatgctgacggcagaaagagccagtcaagcaaggtgagaaagcatggctgtgcagatagagttgaggatccagatgatgctaggcggggatcttctaccaataggtacgagcctagaaggaagtctgtttcaggctcaggacaggcctacagcgacgacgaggaagactacaatgtaagaaaggattcacgggtgtccaaggttccaaggcgaagccctgaagagaaaagtgagatatcatctgatgtctacaaggatagaggtgggacagcagtaggagaagaagagaagatgagaatgattcggactcatcaagaagatctggctccagaacctctggccacgatgtttctcatagtgaaggtggaagcaaggctgagggtccatacaatcatgggagacacgaggagaaggatgtacggcactcagagggaatagatgggagtagggagaagcaatggcaccgagacctagaggagaaac

SEQ ID NO: 23162 - DNA, 247 bp, Setaria italica
  Peptide Sequence Number=SeqID_89136
ttcgggcccgtttatcggggcgtgctgagcggtggcgcggagatcgcagtgaagcggctgtcggcgaggtcccggcagggcgcggcggagttccggaacgaggtggagctgatcgccaagcttcagcaccggaacctggtccggctgctgggctgctgcgtcgagagggaggagaagatgctcatctacgagtacctccccaaccgaagcctcgacgccttcctcttcgataccagaaagagtgggc

SEQ ID NO: 23163 - DNA, 487 bp, Setaria italica
  Peptide Sequence Number=SeqID_89137
tagtctctcaggatctcgcggccggagatggtggcgccggcgccggcggcggcctggttgctggggaacgtgaggcccaggaactcgttcttgtagaacccctggttggcgtacttgtggaaggcgacgtagtacatggggtagcgccagaagggcttgggcaggtcgttggggaggcggaagaagccgccgttgagcatcatgacgccctggatgccggcgccggtgatgatgcccatgaggaagtccgggacggtgctggccacgatcatcatgagcccctccacgaccatcatcgccgcgaagagcaccagggcgaagtaggcgaagtggccgaagctgctctggaggctgaccatgtagtaggccatggcgcccgggacgacggagatgagcgccaggtacggcgccgccgacaccgtgttggcgattgcgaacgaggccacgccgtagtgcccgttcagcctctctacgtccgtaagtatca

SEQ ID NO: 23164 - DNA, 515 bp, Setaria italica
  Peptide Sequence Number=SeqID_89138
tgctacacacacctcaccctgcgcccgcacttgcgactcgttgagcgaaaggaggagaccgtgcgcacggtgccgagagccatggcgaaggcggtcgcggtactggcggcggcgctgctgctggtggcggcgatgggctccggcggggcgtcggcgcaggactgcgactcgtcgaggctggcggactgcgcgcccgcgttcctgtttggggttacgccctcccagtcgtgctgcgacaagctgcgcttggaggagcagaggggttgcctctgcgtgtacgcgcacgatccgcagtacagcggcttcctcaacagcaccaaagcccgcgacgcgctcgcctactgccaggtcgcctacccaagctgctaggcgccgcgcgccgtgcgcgtgcgggctgtgcgatttgcctcgcatctatatacaacaactactactacgtaatatgtatagtagtagttcatcactctgtagtaatcctccatttatctcaagcgcaaatatactataagaccgac

SEQ ID NO: 23165 - DNA, 510 bp, Setaria italica
  Peptide Sequence Number=SeqID_89139
ttggtcggtacgacggacgtccggtcgtccggtcgtccggtcgtctagtctagttgtcgacgcaacgaggctggcggactgcgcgttcgcgttcttgttttgggacgacgcccctaaagtcgtgctgcgacagcctgcgcgaggagcagaaggggtgcctctgcgtgtacgcgcgcgacccgcagtacagcggcttcctcaccaccagcaccaccgtccgcaacgcgctcgcctactgcaaggtcgcctacccaagctgctaggcgcccgcggcgcgccgtgcgcgtgcgggctgtgcgatttgcctcgcatctatataccaacaactactactacgtacttgtgtgatgtgacgaatggatttgaataaatgggggcgaaccaggtgatcccccggggagagcatatactatatatgcatgtcgatcggtcggtcttatagtatatttgcgcttgagataaatggagattactacagagtgatgaactaactaaaaaaaaaaaaaaact

SEQ ID NO: 23166 - DNA, 638 bp, Setaria italica
  misc_feature (555)..(638): n is a, c, g, or t
  Peptide Sequence Number=SeqID_89140
aaaggaaacgaaagctggtggcgtcgatgggcgtggcggacgcggcgccggcgccggcgccggcgcagcagtgcgacgcaacgaggctggcggactgcgcgttcgcgttcttgtttgggacgacgcccctaaagtcgtgctgcgacagcctgcgcgaggagcagaaggggtgcctctgcgtgtacgcgcgcgacccgcagtacagcggcttcctcaccaccagcaccaccgtccgcaacgcgctcgcctactgcaaggtcgcctacccaagctgctaggcgcccgcggcgcgccgtgcgcgtgcgggctgtgcgatttgcctcgcatctatatacaacaactactactacgtacttgtgtgatgtgacgaatggatttgaataaatggggcgaaccaggtgatcccccggggagagcatatactatatatgcatgtcgatcggtcggtcttatagtatatttgcgcttgagataaatggagattactacagagtgatgaactactactatacatattacgttacttacaaaacttaaattaaaaaaaaaaaaaannnnnnnnnnnnnnnnnnnnnnnnnnnnnnnnnnnnnnnnnnnnnnnnnnnnnnnnnnnnnnnnnnnnnnnnnnnnnnnnnnnn

SEQ ID NO: 23167 - DNA, 1747 bp, Setaria italica
  Peptide Sequence Number=SeqID_89141
acaccgtggtcagaagcgggctagtggtgatccatacctgcagcattgtgtggaaactgcagtgcatctagccaaaatcggcgcaaccgcaactgtcgtctctgccggccttctccatgacacaattgatgattcgttagtttccacacaatgctgcaggtatggatcaccactagcccgcttctgaccaaaatcggcgcaaccgcaactgtcgtctctgccggccttctccatgacacaattgatgattcgttcatggactatgatcatatcttccggatgtttggtgctggtgtggccgatctagttgaaggggtttcgaagttaagccatttgagcaaacttgctcgggacaacaatactgcaagtaggacggttgaagcagatcgcctgcacaccatgtttcttgcaatggctgatgcacgagctgttctgataaagctagcagatcgtcttcacaacatgaagacgatagaagctttgcctttggttaaacaacaaaggtttgcaaaagagactatggaaatattcgtgcccttggccaacagattaggaattgctagctggaaagaccagttggaaaatatttgcttcaaacacttgaatccagaggagcacaaggagctttcctctaaacttgtgatgtcttttgatgaagcactccttacgtctactcttgataaactggataaaggtctcagagatgaaggtatttcatatcacaatctttctgggaggcacaagagtctgtacagtatatactccaagatgatcaagaagaacttaacaatggatgatgtccatgacatccatggcctgcggcttgtggttgagacagagcaagattgttatcgagcacttgacatagtccacaaactgtggccccgagtcactggaagatttaaagactatatatcacatccaaagctgaatgggtatcgatcgttgcacactgttatcatgtgcgagggtgtccatccatttgagatccagatccgaacaaaggaaatgcatctccaggcagaatatggatttgccgcacactggagatacaaagaaggtggtttcaggcactcctttgtgctccaaatggtggaatgggcaaggtgggtgctcacttggcaatgcgaggcaatgagcaaagagcgcccctcagctttagccagctctgttgggattaggccaccatgtccttttcccctgcattcagaggattgcccttattcctacagccagcagtgcaaccatgaaggtcccatatttgtgatcatgcttaaacatgataagatgtctgtccaagagctcccgccaaactcgactgtagttgatctaatggagcgagtcggggccagcagtccaagatggagcccttacagcttcccactaaaagaggagctgcgaccgagggttaaccacaagcccataagcgatccaaaccggaagctcagcatgggtgatgtggtggagctgacgcctgcgctcccgcacaagtcgctgactgagtacagggaggagatccagcgtatgtacgagcgtggcgggttcgccctcgccaccaccccgagaagctgacaccctcgtgccccgtaacctgctgttgtacaataccatgtaaatatgaaaactaatttcttgcagcagagaaagcccagatgaacaaaactcccaactgaattagtgttgggggtattgatcccaggacactgctgtgtgtaactctttacaagttgatgaaatattgaaatgt

SEQ ID NO: 23168 - DNA, 242 bp, Setaria italica
  Peptide Sequence Number=SeqID_89142
tcccaaaactgctggccctcttgtgataagtctcccgtgctggagatctcgatctcctcagcgagggtgaagggggcatttttcctggcctcttaagcctctctaagtgctaatatggtatccttcgttttgagacagtagaatgcagtcaaattccatccagatcaaatggaacatgtaccatgaccgcgccacccacccgcattccaccgccgtcgtcactcacccgcgcccccacccta

SEQ ID NO: 23169 - DNA, 516 bp, Setaria italica
  Peptide Sequence Number=SeqID_89143
gtggggccgttcgtccggtcgagcaccggcgaaaaggccgatgagtcggcgttcttggagtggttggatcaccagccgaaggactcggtggtgtacgtctccttcggcactgggggcgcgctgtccgtggagcagacggccgagctcgccgccgggctggaggcgagtggccacagatttctttgggtcgtgcgcatgggttgccgtcgaggcaacccctgcgcgttggggacggtccccggcgacaaggacgacccgctggcgtggctccccgaggggttcttggagaggacgagcggccggggcctcgccgtcgcggcgtgggcgccgcaggtgcgcgtgctctcccacccggcgacggcggcgttcgtgtcgcactgcgggtggaactcgacgctggagagcgtggcggccggcgtgccgatggtcgcgtggccgctgtacgcggagcagaagacgaacgccaccatcctgacggaggtgatcggcgtggcgctgcggccggcggcggcgcgc

SEQ ID NO: 23170 - DNA, 424 bp, Setaria italica
  Peptide Sequence Number=SeqID_89144
ctacccacaaacaacctgagaaagaacagcaccctgctctgtctcacctcattggtttcggaccaagatgacctccatggggttcagctatgcgcagatccacgtgaggcaagagaggtgcaggatgaagagcctgcaggccgaagagaaagagaagaaggccaaggaagccgcaggtggaggagatgatgaagtgggtaacaagagacccacgggtgaagacgacaaggcctccgtcggcggctgcgcatgggcaagcgggaaggtgcacccctgtgccgggacggcggctccaccaccgccaaattaaatggtggcggccggtgaggttgtgcggagggttgggaatggaagtcgagtttagtttgatcttgtgttccttttgttttcgtgtcttagttttttctttgctgtcttgaaaggg

SEQ ID NO: 23171 - DNA, 428 bp, Setaria italica
  Peptide Sequence Number=SeqID_89145
cggcagtgtgtttccttcaccaaagccaaggagtaaaaatactcggaaaaaaaaaggccaaggcgggggataagcggcaagcggcgacatggccgcgccggcgacaccgagggcgtcgctgatcctcccgcgtgcctcctcgcactcccactcccaacccagcgccggcggtctcacctccgaccgcgtcgccgcctcccaccgccggcgcggcgacttcgttttcgtcgtcaacccctccggcgccaatggccgcacgggcaagcagtggaagcagttgctcccgcacctccgcacccgcctcgccgaccagtgcaacatttgcgagtgcatcacttcgggcccgtcccacgccatagatgtcacaagggaggctaataaaggagtggggctgatgcagtgatcgctgttggcggcgatggtacgct

SEQ ID NO: 23172 - DNA, 302 bp, Setaria italica
  misc_feature (249)..(249): n is a, c, g, or t
  Peptide Sequence Number=SeqID_89146
ccgtcccccgtcgtggcttaattattcctgatgacgaccacaggcgagggatgaagtgccgcgcgatgacggcggcggcgagcagcgccggcgtgacggacccgacgacggacgccggcggccaaggaccgacaccgggccacatcgcgtgccagatggtggtggtggttccgatcgtcgatcggcgctgtgggttgctagagggtccgaatgatggtcgttgcgtgtctgtgaccagactagggggtntatatgaagtgttgtaggaacgaggagcgtttttgatatgaattgatgaaagg

SEQ ID NO: 23173 - DNA, 1047 bp, Setaria italica
  misc_feature (1012)..(1047): n is a, c, g, or t
  Peptide Sequence Number=SeqID_89147
acgacacccagtactcggacggcacgggaaacctcgacaccggcgccagcttcgccgccgccccggacatcgaccacctcaacgaccgcgtccagcgcgagctcgccgagtggctgctctggctcaggtcggacctcggcttcgacgcatggcgcctcgacttcgccaaggggtactccgccgaggtcgccagggcgtacatcgacgccacggccccgagcttcgccgtcgccgagatatggagcgacatggcgtacggcggggacggtaagccggagtacgaccaggacccgcaccggcaggcgctggtggactgggtggacaaggtcggcggcgcggcgtcgccggccacggtgttcgacttcaccaccaaggggatcctgaacgccgccgtggagggcgagctgtggcggctcatcgacccgcgggggaaggctcccggcgtgatcgggtggtggccggcgaaggccgtcacgttcgtcgacaatcatgacaccggctccacgcaggccgtgtggccgttcccctctgacaaggtgatgcagggctacgcctacatcctcacgcaccccggcaacccatgcattttctacgaccatttcttcgactggggtttcaaggatgagatcgcggcgctaatggcggtgcggaagcgcaacggcatcacggcaacaagtgagttgacgatcctcgtgtacgacggcgacgcctacgtggcagagatcgacggcaaggtgatcatgaagatcggttctaggtacgatgtcagcgcgttcatccctgccgggtaccaggtcgtcgcgcacggcaacgactacgctgtctgggagaaaggagccaaggaagaagtggctcaagcataacctcgtgtgcttgtaaatatgatttgtgttctctgctacaagcagatacgagtatacacggcttgtaaagttgtaattgatggcaactgtaaattgttaattgtgcacaatacgtgataaaataagtgatttcgcctgttgactaaccnnnnnnnnnnnnnnnnnnnnnnnnnnnnnnnnnnnn

SEQ ID NO: 23174 - DNA, 239 bp, Setaria italica
  Peptide Sequence Number=SeqID_89148
acccggacctgtgcggccgccgccgcctgcagctcgaggtgcagatcctcaaccgggaggtcggcttcctcgagcaagagatacaggggctcgagcggactcagccggtctcgcggtgctgcaaagatgtcaacgagtatgtcagcgcgaaggccgatcccatgataccaagtaaagacaaaaggaaacatggatcttgcagcttctttcgatggatcagatcaaagttgtgcacgtgt

SEQ ID NO: 23175 - DNA, 320 bp, Setaria italica
  misc_feature (294)..(294): n is a, c, g, or t
  Peptide Sequence Number=SeqID_89149
ctcccgggtggcagcagctggtctcgacgggaccgaggcgctcgtcgtgaactgccacatgctgctgcacgccgtccccgacgagacagcggggtcggtgatgagcctggcgcagccggtgtcgctccggaccatgctcctcaagtccctccggaccctggacccaaacctggtggtggtggtggaggaggacgccgacttcacggcggacgacgtggtggggaggctgcgcgcggcgttcaacttcctgtggatcccgtacgacgccgtggacacgttcctgcccaaggggancgagcagcggcggtggtacgaggcgg

SEQ ID NO: 23176 - DNA, 496 bp, Setaria italica
  Peptide Sequence Number=SeqID_89150
tgtcttctacacaatcatataggagaggaaagtgcctccaacactccaggtgagcatcaagtttgctgtcattgttatagcaaaggatgtcagccaggctgccagtgtcgcaatgcttcctcccagactcttgatgctaaccgggaggatctcagacatcatgagccatggaatggcacccataccgaaggagaaggcaatgacgaaagccacaagagcgaccaaggagatcatacttaacaagtagtatgtgtctgaatcatgcgaaacattatccttgagaaaaatacaatagaaacagcaagcaggcatagagtcatgccagaagtagaaataataagaaggatgcgtcgtccagctctgtctaataaccatgttgtaactccagtggcaagaacctggatagctccaagtgaacaggtggccaagtcgctgtttgaacccctgcagctttgaagatgttacttgcataaaaaacagtataccgttgattcca

SEQ ID NO: 23177 - DNA, 237 bp, Setaria italica
  Peptide Sequence Number=SeqID_89151
tagcaacgacaacgcagatccaatctgcagctgcatgaagggtttctctataagatcactcaaggactgggatctgggggacagaagagatgggtgcatgaggaatactccattagactgtgcaagagatggaaacaagacaggtctcacggataagttctaccccatgcgaagtgttagattgccccatgatgcaaacaaagcgcaggctgctacaagtggagatgattgctcgca

SEQ ID NO: 23178 - DNA, 373 bp, Setaria italica
  Peptide Sequence Number=SeqID_89152
ttttttccgaagaattgtgactgagagttccatgtcaatctgcaaaagtagaaagcagacaggcatgccaatctacagttccacactgtaaaggttcctgaatttctgatcaaaaacacaaacacacaaatggaacgcacatgcttccatgccagactagaccaccactacggatgtacacaagtatccagatcagaaggtcatggcgatgcattcctctcttacagcagcaaagaggtcggaggtcgtgtatctctcgccaccgctgggaaacacagtgacaatcatcttgtcttggttctcttctcttgacgccaccttcaagcaggctgccaaatttgctccagatgatatcccaactagcaggccctct

SEQ ID NO: 23179 - DNA, 275 bp, Setaria italica
  Peptide Sequence Number=SeqID_89153
agtgatctctgcataattcttctgatccacagcaagccgttagttgaaagctcctttaaagttcgaaacaggaccataaagacacgatgtgaagcaagaacatcggcagactgcagttgttgtgccaatacagagagaaggtctggccactcttttgggtaatccaagcgagcaatcttggagattagtacagctagctgcagtgcaatctggctattctcctcacggatatttagcaagagatttttccgaagatggtccttctcctcattgct

SEQ ID NO: 23180 - DNA, 883 bp, Setaria italica
  Peptide Sequence Number=SeqID_89154
tacttgatgagctccttgaggcggtccacgatgaagatctcgtcgtcatcatcgacatacccaatgtcgccggtgtgcagccacccctccgcgtcgatggtcttcgccgtggcctccgggttgttcaggtaccctttcattatctgctcgcccctgatgcaaatctccccgggctggttgcggtggagggacaggccggtctccgggtcgatgatcttgagctcggcgttcctcaccaccgtgccgcaggcgccggacttcaccggcgatggctccttggcaaatgccatgcacattgacagcaccggccctgcctctgtcataccataaccctgtccgagcacggcgcgagggagcttagcgcgcaggatgtcctgcagctccttgcccatgggcgcggcgccggagatgaccatgcgcaccgaggagaggttgtggcggtcgatggcgtcggtcttggctatctccacggcgatgggcagcacgagcggcacgatcgtgatgccgtggcgctccacgagctcgaacatccggacggtgtcgaagcgcttcatgatcacgagggccgcgccggcgcgcatcccgcagaggaggatggagtgcagcgcgtacacgtggaacatgggcagcacgcagaggacgacgtcgtcctcccggaggtggaggttggggttgtcgccgtcgacgacctgagccacgctggtcaccagcccgcggtgcgacagcatgacccccttgggcaggcccgtcgtgccggatgagtacggcagcgcgaccacgtcgttcgccacgtcgatggccgcctccggcagcgccgagccgtcggcggcggcgaggtcggagaacgagacgcagccctcggcgcctcgcccgtggcgacgac

SEQ ID NO: 23181 - DNA, 336 bp, Setaria italica
  Peptide Sequence Number=SeqID_89155
aaaagaatacagattgcattagttgactgacactaaacataccttctgcagattcttttatcatcagtacaaagatttggttcagattccgcctcaaccataacagtgtcatcattggaggttgacgattgcctttggcctatgctctgaagtgctagggccagctctgggtccacaccaaattcgaaaccagacactccactggctacagaaccaaaaccactttcattgccttgtgctaatattggtgaactgatgatggcatcagaaagtaaatattctccgggagggacatgaattatatgactattgcctccactactcacttgtctagta

SEQ ID NO: 23182 - DNA, 772 bp, Setaria italica
  Peptide Sequence Number=SeqID_89156
ccgccgcggctctggtcagaaacccggccgccgtcgtgccgcgcttcgagtcggagcaggggaacaagcagtataattccgaccatggcggcatgtccatgtcccagcgcttcttctccaccctcgagcggtgcacgctcgcggcgttgaggagctgcgtcgagtgggagcccgagttcttcccgcaggtggcgccgcgcctccgcaagccggtcgtcccactggggctcctgccaccgtcaccccgagcgaacggcgccgaggacgccgtcaccgtgcgctggctggacgtgcagccgccgagctcggtggtgtacgtcgcgctggggagcgaggcgccgctgcccgtggagcaggtgcacgagctggccctcgggctggagctcgccgggacgcgcttcctctgggctctgaggaagcccagcggcgtccccgacgacggcgacctcctccctcccggtttccaggagcgcacccaggggcaggggctcgtgaccacggggtgggttcctcaggtcaacatactggggcatggcgccgtgggcgccttcttgacgcactgcgggcagagctcgttcgtcgaagggctcctgtttgggcgccctctggtcttgttgcccatcttcggagaccaagggtcgaatgcgcgcctcttggaggggaagaaggtgggattgcaggtggcgagagatgaggacgacggatccttcgaccgccatgccgtcgcgagcgcgtccgtgccgtcatggtggaggaagaaacaaggggtgtc

SEQ ID NO: 23183 - DNA, 843 bp, Setaria italica
  misc_feature (784)..(784): n is a, c, g, or t
  misc_feature (796)..(796): n is a, c, g, or t
  misc_feature (818)..(818): n is a, c, g, or t
  misc_feature (829)..(829): n is a, c, g, or t
  Peptide Sequence Number=SeqID_89157
taaacttacttagtattgttagtcttagtaactagtagtcttgtcttattcctattctaccagcgtcgccgacgaactgcccatgggcatcccaaggcctagtttcaaaagatttccccaccatgctcctctttttgtttaccgtcccatcttcttgtgcatattcggggaaatactccaagaatgactttgttccaagggagtctaccccttcaaacagaaactccctcaccaactccttggcagcacattcaccaatcaacttttttaacagtggataaccaggatccttctcggctctccatgtgagatatttatgctgtgcttctctatttcggtcaattttttctacgctggttccttgaactgcttcatccattaattccagccagaccttgaagtaatccatgaaggcagagtatagaacttggtggttggcctcagttggctcaagtattgtccagataacaataggagagaagaatctcagagactcgcttgtaatcttgccaccccagggcagaagctgcatttcatctcactgtatttgtgtataagaggcatcaaattcctatagtattttcccctgtaatccttgtgctcagtggtgtcatacaaaggattcagatccaagacaacaatactacgcgcaggagatgtaaaagcgttggcacaaaatataggaaggtcgtattcaggttctgagaaggcagcaaagtcaagaacctgaaccgagtttttctgctcaattgtcaggcttcgaagcaatctaatcttgggggcnctgaatgaaagngcattgaaaatgtattatcctnattggttttangaacttgaactttt

SEQ ID NO: 23184 - DNA, 1437 bp, Setaria italica
  Peptide Sequence Number=SeqID_89158
catgcaacttatataactgccatgtgacattgtcttctaacacaataatactgcatccaaagttccaaacagaagtgctttttgaacaccggaaatggaatggattttattccatcagaagaatggaaggcaattgctgttagctttgctctttcgattcttcaacattcaacaatatttacaacactgcacaaggctgtacaatagaacaataggaatgatgtacatttcaagaatagtgatcagacagtcaatctgggtggatcactttggcagaaagggcagccgagaaaaacttgagccgccaccgttctcactgacgatcagatctgatccggtttgcttagtgggcttcgacccacgattgtctttactagaactcttcttggttattttcacgggaaggatctgtaacctcgaattggagtcagttccgaaggtttcagcgagtagctggtagctctctacaagctccagctgccgagcaactatttctgaacatcttgggagtagttcaactggctccccgcctggaattacaatgtactcaattgcaagccgagcctcctccaatgcatcgatttcctccaatgatggcttacgtttcggggcatcatcctcaatctctatctctccctccataaccgtaggttgcttatttgatggtgaattgtcccttccaacaatcattctgacagcctttactatctgggccatcgtattagacttcacgacaaatatgggaagcttgtggtatttggcaacattgtgaatccaaggattctgcttcatttcagaacttgatgcaagaatcacatcagctgctccaatgtcatctgttacatctagttcatcatcaaaacccatcaccgttgctacttgcaatatatcagcttctgaaatctggtatgtgtacacacggacaagagactttccaggtgcagatttcttgccttttgttttccttgtataaacaaaatcatcaccaaagttaccatccgagggcatgctcttgctttttgtttgcctggagggagcaaaatcatctctgatggtgtcttccgatgacattgtcttggcgaccatatgttcctgatataatggcaacggttctatttcatattctctatcaggtatcaacaacggcatttgtggctcagtagacttattatgcattttgcgagcttcaaacttaggaggcttccctgcaagaatagcatccactgtagtttctaacttgtgatgaactcgacattcagtcttcgatattatctcaacagcgcatgaaaatgttgggggcccttttctctcaagaattgttttctggactttcctcttttttgcttcctcatcaccaagagtcacactctcaatcccaccaacgagcatttgcaagcaagggttttttaaaatgctctcaattgtcaccccatgagc

SEQ ID NO: 23185 - DNA, 907 bp, Setaria italica
  Peptide Sequence Number=SeqID_89159
gtagctggaggcgttcctggaggtggtgccggcgaggatgcggagcgggctggcgcagcacccggaggtgcgggagctcgtggaggtcgtcatggacctcggccgacgcccgatcgcgcggttcccggctggagactgggtcatctccgaccagccagtcaccgccgatgacctccgccaggccgtctccaaggtgggcgacttctctgaggacaaccgatctgggatcaaccactcgttgcaccggatcagtgctatccggaaccggaaggcacagataataggcctgacttgccgtgtcggtcgagctatatctggcagtgcagagatgatccgtgatctggtggtgagcggtggttcaatattggtgatcgggcctcctggagttgggaaaactactctgatcagggaaatagctagaattttggcggatgagggtaagaaacgtgtggttattgtggacacatctaacgaaataggaggtgatggggatgtacctcactctggcattggacgtgctaggagaatgcaagttcccaaagttaccatgcagcataacgtaatgattgaagctgttgaaaatcacatgccggaagtaattgttattgatgagatcggtacagaacttgaagcaatggcagctagcaccattgctcagagaggcgttcaattagtcggaactgctcatggggtgacaattgagagcataattaaaaacccttgcttgcaaatgctcgttggtgggattgagagtgtgactcttggtgatgaggaagcaaaaaagaggaaagtccagaaaacaattcttgagagaaaagggcccccaacattttcatgcgctgttgagataatatcgaagactgaatgtcgagttcatcacaagttagaaactacagtggatgctatt

SEQ ID NO: 23186 - DNA, 691 bp, Setaria italica
  Peptide Sequence Number=SeqID_89160
gctggagacttcctcgtcgtcgccggagccggtggcgaggatgatgaacagcagcgccgcgagcgcgaggaccaggccgtcgaggccgaggagcgggcgcgccacggcggtggaggcagaggacgagtgggagaagtcctggacgtagcgtatgtacttgacggcggtgaaggcgaaggagagcccctgtgagagctggatgccgcgcacgacggggagcgggaggaggcggtagaggcaggtcatgaggcccgtagcgccgaggaagagcaggacggcggcgaccgaaagccccgcggacatgatctgcgggatggtgaggtgcgccgaggagagcgcgacagcggcgatggacttcatgggctgcacgggcatcgggatgccgaagagcaggcccgtggagaagttgtagagcgcggtgaagatgagcgtggtgccgaggtcgaggtgcgacgccagcgacagcgcgagcacgatggggatgtaggtgcccaggtcgcccaccgcgccgcccagctcggaccagacggaggtcttgagatggacggaggaggggaggaacccgaggcggcgtccgctgccctcgggggggaggagcgggtcgccggcggcggacgccatgggggtgggcgagcggcaacgactttctctggatgttatctggtggatttgggcttaccttgcacgtttc

SEQ ID NO: 23187 - DNA, 340 bp, Setaria italica
  Peptide Sequence Number=SeqID_89161
agacaagtagttaagttacgaacaatacaatacttacaatagtacaagagtacaatgcctgttctgctggtgcgcagagagggaccacccaccggatgcgtaggcaggcggcatgtgctggtgctggtgctggtgctggtgagggtgctggtgctggccggagtggttgaagggcatggcgctgtggttgatcgggctgccagagtcatcggatgatgcgctggatgtgccctccgatggatgctcctccaccacagatgcctaccttcgtgccacctcctgtggccaccagcccttcctattcggtagggtctactattcctagtagttctattcggta

SEQ ID NO: 23188 - DNA, 1499 bp, Setaria italica
  misc_feature (1)..(54): n is a, c, g, or t
  Peptide Sequence Number=SeqID_89162
nnnnnnnnnnnnnnnnnnnnnnnnnnnnnnnnnnnnnnnnnnnnnnnnnnnnnngtttaagtagaacaaagcaaaacaggatacgatcccaaattaaaccgaagcattcaagtaaattcatgatccataacactagagaatggtattttaactagcctaggaggtgaagatctcatcaggcatccatcacaactggcgttaggggctgacagactttaggacaacgctacagcattacaacggcggctaattcgaattaaattaatcttacttgggggggaaacaacagcaggtgagaccatgaaccctaactctcctagctagcttagctatagcagatacaccgtcactgatcagagcagacgacgcaaaaggatcatccatggcagaagtaccaaccaaccatcagcagcttcctctccagcccaaccaggaaatggggcacttaaggttgagcagtgttagttcgacatcatcttcatgtcagagtcatgcctgttctgctggtgcgcagagagggaccacccaccggatgcgtaggcaggcggcatgtgctggtgctggtgctggtgctggtgagggtgctggtgctggccggagtggttgaagggcatggcgctgtggttgatcgggctgccagagtcatcggatgatgcgctggatgtgccctccgatggagggctggtggccacaggaggtggcacgaaggtaggcatctgtggtggaggagcagacatcggttcgaccttccgtgcctcagctggctttgatttcttgccctctgcgatgaaactggccaccacaacctgaacaggagttgctgccatgagcattccagcaacacatcctccaagaactcgtccatcagatcctgcaagtgcaacacttaaaccaccagtcctgctgcgagtgtcaccatcctccgcaagcaggaaagaaccagatagtgagatgatctcaaaacgcccctcataagtaactaatccaccagatgtagctggctgccgaagagtcacattgctaattgcaccattagcagaaaggatgcagactgtgcgagggccttgctgcgagaacgtcattattttggatgcaacatcctcgccggccttgacggtgaggatgtgaggggtgaaggcgatgccccaagaacccagggcttcgaactgcttcttcttgccggagcctgggggcctgccgcggcgcttggcgttggggtcggacggggggctgctgatggagaacccgccgtgctgctgctggccgggggccgcggcgccgccggcggaggcggaggagatgggagccagcgccagggccatgctgccgtcgggcgcgtacttgcgcggccgcccgcgcttcttgcgcatcagctcgcccatgcccagcacattgccgcccggcgagcctgccgctcccccgccagcgcccgcggtggactgcggcggcggcgcgtacagcatgggcgccgcgtggtggtggtgctccggcttcggcgc

SEQ ID NO: 23189 - DNA, 711 bp, Setaria italica
  Peptide Sequence Number=SeqID_89163
tttgagttctaaacaaggcagagaaaaggatcattgcacttaaagtcagaaccagccttcagacaccaagcgctgcctcctcctacaccaggccgggaaagcaagtaccccgctttgttgctcccgcttgcccatcttgcagtctccagagccttcattttggcggcaagatcttctggcgcagagggcgttcgaagttccatcacaagaaccatgttctccaacacccgggcattttccgcgatgaaaataaggaaggcgaattcattttcctcaccatgaaactcacggaaaactagcctcttgagttgtgactggacacagttgatgggaccggtctcctgccagtacttcaggttccgcttgtcactaggctcacttgtttcttcagactggatgcacagcgtttctacattgggaaagcacctgaggaagcttggaagcattttttacttcattgcaaagtttgaaatgcaggtgcagcgccaacatctgcacacttggaacagtggtctttggactcggcctggttccagactgcaacacacaaaaacaacagatccatgaagcaccatcacgttaaactcctcagtcggccgatatttctaatgcatgcatgccaattatcgacagagagaacgaacgaaaaaggaattgactaattgagacattgatgacggtgttgccaatctccagtgcatgcacaccagg

SEQ ID NO: 23190 - DNA, 1361 bp, Setaria italica
  Peptide Sequence Number=SeqID_89164
cgcggctccggatgcggtggctggcggtgctgtaccggcgcacgctgcggcggctgcgcgcttactacgccacggcgatcaacgacctcctcgagggcgccgcggtcatcagctccatccgcgggccggcgggcgccgactgctccttcggcaccgcgttcgcgccggtggtcaccgtcgggtactgaattctcacggccggctgcatgcggcacgcagagacgtcgagccctgtatggatgctgtgctgaagggctggtgcctggatgtatgcttgtatagacgccaatctctctcgctccagcaatttcttttgctcactttctcttcctccttgatcagttgatctgatgtgttctttgctagcagagtcgtcaattcagcaatcaacatgtgcatgacagttctcctggccttgctacattttttttatgtcaagaaatcagaaaacatagagacaaaactctctgtttcggatttccttgacgacgcaaataatacttttcacgtttctatcgaccatttccccccacaagagttgcttatcgatgcttattgtgcagttcatatacatatagtacgctatgtagtactagaagagcgcgctcttttttcttgttgtccaacagtatgtgcactaattacatgacagatttcaaacacacaaattgaacacaatatagaaccacatacgctctcgtttcttattgtcctacaagatgcacgtgtctggttgattacatgacagattttggattagtagcatagctatagaaatattttcacatcatagtattttgggaaaaaaaaacccccacaaaccacaagaaaggaggataatatgaatgcactattgtagctgtttttctatttgaaagaaagtaggctatccttttttttcaataaataaaagagtgcttttgttcatcacttaggagttaggaacatgattaaaataatttacgattaactctctagttcaacgtggtgcttgtattgtatacgccacacagcacgatgtttaccatacttgtatagtagctaagttcatcagctactcaattgcactctgttctgatctttattgctcatcacatgaggtgaaacaagatgatgcatctgttcgcaacggagtagctgatgaactagcgacaaaccgacagcagagcatttcttgatgggttgccaggttggcatctttcctttcaaagatcctgtggctcatgtgagtgtgacatgtcaccgctactggaagataagggttgcaactactgagaaggctcaatatactatgcatgctatttttttttgcttcgtttaactacatctggccagtataatttgttgatcaaatgccaacg

SEQ ID NO: 23191 - DNA, 257 bp, Setaria italica
  Peptide Sequence Number=SeqID_89165
cttgttgggagaaagatatgaccttcatattgacatcctcaccagcagcaacattaatgatatgaggtgtaaaattcgcaccagaagcacaagctaccaattcaccgagtggcccgaacagtgtctgcggcgccggcgctgacacgaccaccgccgccgtgggcgcggcggccgtcactgccacggatatcggcgtcgcgcggctgacgaaccccaccgggcgccccctgccccgcttcatgacggccccgacggca

SEQ ID NO: 23192 - DNA, 682 bp, Setaria italica
  Peptide Sequence Number=SeqID_89166
ataaaagtggtgaaggaattattatcacaacacatgacaaattggcttattacttaaggttattgacaagtcagcttccaatagagagccagttccttggatctctgaaagataatttaaatgccgaggttgccttgggcactgtaacaaatgtcagggaggcctgtgcctggcttggttatacgtacttatttataaggatgaagactaatcctctggtttatggaataacttgggaagaggttttgggagatccttctatgggtgcaaaacaaagagcattcattattgatgctgcacgtgcactagacaaagctaagatgatgcgctacgatgaaaagagtggcaacttttactgcacagaacttggtcgaattgcaagccacttttaccttcagtactccagtgttgagatttacaatgagatgcttcgacgtcacatgagtgaaagtgaggtgattactatggtggcccattcctctgaatttgaaaatattgtagtcagagaagaagaacaggatgaactagaagcccttgctaggaaagcgtgccccttggaaattaagggtggaccgactgacaaacatgggaaaatttcaattctcatacaggtttatatttcccgtgctccaatcgatagctcctctttgcattctgatgctcaatacatcagtcaagcctt

SEQ ID NO: 23193 - DNA, 2196 bp, Setaria italica
  misc_feature (1)..(87): n is a, c, g, or t
  Peptide Sequence Number=SeqID_89167
nnnnnnnnnnnnnnnnnnnnnnnnnnnnnnnnnnnnnnnnnnnnnnnnnnnnnnnnnnnnnnnnnnnnnnnnnnnnnnnnnnnnnnncccccctttttaccgttttgttccttcctccccgccaagtgtcgggccgcgctcgcctccttctccgtccgcagatgaagtcgcaaggggacctcgacgacgacgagttcttcagccagcccccgagctttccccttgcggctttcccctctggcggtcgtggcgcaggacgtcgtcatgtacctggcggattggagggtctggacctcaactcggaggccatggacttcaatgacaacatgtcgtacttggaccttctacgctcatcgcctgccagattggttggggatggcgacctccttggtggcgctaggcatggcgctggccgtgcccccgggcgtggcgtcggtcgtggacgtgcttctagccgtgccactgggcgtagcggcagctgtggacgtcgtgcagctgaacaggatgtcggcatcccttctcggtcagctggaggtggacgaggacatgctcgtgccacaccgaatcgtcgtcctaccaccactgcatcacgtcaattccttccaccacgtcctgctggaggacaaagcagtggcgcaactcctagtggtgctgatgatgcattcgatgttggtctccagaatcctagcacatctacatggagcctgaacccctccaacgaagaggccgacgatcttcaggacattgatgcatcgatgacctattcctcaagtgatgatgatgatgagtcagcgagtaaatcttcttcaactgatgaagatgaagtaaataggaatgcactgggacaattggagcttgtgcatcaatttggagccgtggcctgcattttcggtatgtactacgaatctgctttcatgaacaaaactaagaaggtgaaaactggtctttctggatatgagtgggtcatgacaacacttagcaatccaacagcttgctacgacatgtttagaatgagtagggaacttttttggcggctgcatgatgtgttggtgtcatcatatggactgaactcatcaaaaaggatgagctccattgagtcattggctatgttcctgtggatcattggagcaccacaatcattgagacaagctgaaaatcgttttgagaggtcgattgagacggttagtaggaaatttgaacaagtcttggatagtgtatttaggctctcagctgatgttataaaacctagagatcctcattttagaacagtccatcctagattgcggaatcctcggttctcacctcactttgacaattgcattggggcaatagacggaacgcacatcccggttgttgttccactcagtcgcactagtcaacatgttggtcgacatggttactcgagtcaaaacgtattggctatttgtgacttcgacatgaggttcacgtttgcggttgcgggatggccagggtctgtacatgacatgagggttttcaacgacgcaataaacaaatatggtgataagttccctcatccgccacaagggaaattttatcttgtggattcggggtaccctaatcgaccgggttatcttgcaccttataagggaacgaagtatcatttgccggaatttcaacaaggtccaagaccaagaggtaaaaaagaggtattcaattatttgcactcatccctgcgcaatgtcattgagcggtcatttggagtattgaagatgaaatggcggatgttgttagacttgccgagttatccattgaataagcaaagcaaaataatccttgcttcgatggctctacataatttcattcgagaaagtaatatgagggatcaagactttgatatgtgtgaccaagatgaggagtacatgccaatgccgacgacagctgcttctcaagcaagtggtgctacgaatcttttaggtgacgaggatatcgacatgaatgcgtttcgagatgctatagcaaatgctttgtttcataatgaagagtaaagctatgtgagagggtgtttgtattgacaaatattgtgtagaacctgtatgccgttgcattcttgcacttaggaatttttgtcttgactgatggcgcatgaaatagaagggcaaaaaagacatgtatgcaacaaacaacaaaaaagttggattttggaatctagaatccaaacaggttcattcagattta

SEQ ID NO: 23194 - DNA, 757 bp, Setaria italica
  misc_feature (739)..(739): n is a, c, g, or t
  Peptide Sequence Number=SeqID_89168
tgcatcggtataactatttccttttacttcacatatttcagtaatttcactagtgaacagaaaaagtagcaacaattaagtttttacaaccactgcatcacgtcaattccttccaccacgtcctgctggaggacaaagcagtggcgcaactcctagtggtgctgatgatgcattcgatgttggtctccagaatcctagcacatctacatggagcctgaacccctccaacgaagaggccgacgatcttcaggacattgatgcatcgggatttcagaaattgaagtgtagccatcagtatggaaggaaacaggattaggcagtattctttcaagggttctccattattttcttgatcctgagaagctcttaactctcaagatattttcccatagtctattaataatttacagggcatattttgcacaaaatatatctggtgtagttaacttacaaagccaaagccttcggatttgtagattggtccaaccattgtgtaacctttgcaatgctttgcaagaaatattttgatgtatggaacttcatgtacgacagcagttataccacccattttgctccctttagagagtgcatcagcaaaatcatctgaagtttcatatgctctgatctttcttctgtcaaagccaagttcttctaacagatctcctacataagaaccgttgtgataccctacatattcaccttttttaatgagttcatgaatatcagtttatgtgggttnaagttgttgcacagtgag

SEQ ID NO: 23195 - DNA, 557 bp, Setaria italica
  Peptide Sequence Number=SeqID_89169
gctcagagaacatagttgttccatgtagaaaaacaaagtctgcaacaggaactcttcatccccaagggccgtttctgcaaaaatggaacaggatatttgtgatatcatgtatacttgcagtttcagtggacccattgttcttgtatatcccaattatcaatgatgaaaaaccttgctggtacttggatagaaagttggaaaaggcagcaagtgtcctgcgttttttcacagatattttctacatactccatatcatatttcagttccgaacaggctttattgcgtcatctcctacgacttttgggcggggtgtcttaatcaaagatagatatgcaataatgaagcgatacatatcaacatacttttttattgatgtcttcgctattctacccatcccgcaggtaattattttggttgtgctacctaaacttccagacgcagaggttatgaaagccaaaaatgtcttgatgattataattatatgccaatatgtgcctcgactaatccgaataagaccgctatatcaacaaatcacaagatctgctggggttattaca

SEQ ID NO: 23196 - DNA, 501 bp, Setaria italica
  Peptide Sequence Number=SeqID_89170
aaatacacatttctagaaacagcttgcacatattgccttgttaaacacttcatgtgagaaagtttcataaaaaactcaaaaatggaaatggcgtaaacacttatcggtcttcctgatattcattcttgatgattagttattaatcttcgtgatatgtcatgaagacaatgtctgaatttgaggcttttgctttgagggctgaagacctgaggtttgtggccacccagttccgaggactccacagcaagcagctccatcacactttcaggttctacttgcagcagtttcatccaagcagccttgcaccgctactgcaggaataagattgaagattaaggagaagaggttgatgtttgtgattgcgaatgacctctctcagcttcatggcagccctgtacgcttcacgtttcgctggaaacaggatacagatcttatctgtcataccccagcccaatatctcttagtagctgaagttgtatgtggcccaattgtggttgtagc

SEQ ID NO: 23197 - DNA, 528 bp, Setaria italica
  Peptide Sequence Number=SeqID_89171
caaattatcaaaatgcttcatgaaccggaaggtgcagcaagcgccaagagaaagagacctgaggtttgtggccacccagttccgaggactccacagcaagcagctccatcacactttcaggttctacttgcagcagtttcatccaagcagccttgcaccgctactgcaggaataagattgaagattaaggagaagagtcagcctctctgagaatagaagaaatgagagtgaaaaggcatgatacagatcagtggatgtcatattgacatcttcctgagaacctcaaggaaagaatacggtgttatgaacaatacagatggcaagaaacaagcggtgttgatgaagagcaactccttgtgaatctccccaaagatcttaggagggatataaaactacatctttgtttatcacttctcatgagggtatgttcttacatggttttgttttcccagagtaacctgctgaccatcacctatcagtaaatcatttatcttgaggctgagccagttttgtaagactccataatct

SEQ ID NO: 23198 - DNA, 1802 bp, Setaria italica
  misc_feature (1795)..(1795): n is a, c, g, or t
  Peptide Sequence Number=SeqID_89172
atatttgtttcttgttgtatagttaagattgtaatcttgatagttttgttaccaggtgattattttggttgtgctacctaaaatattatcttttatttgatgattcttctagcactttaggtttccagatagtgcattaagttaaggcctatccgtatttgtttgttgttctatagttaagattgtaatcatgatagttttgttaccaggtaattattattctacccatcccgcaggtaattattttggttgtgctacctaaacttccagacgcagaggttatgaaagccaaaaatgtcttgatgattataattatatgccaatatgtgcctcgactaatccgaataagaccgctatatcaacaaatcacaagatctgctggggttattacagagacagcacgggctggtgctgctttcaatcttttactttacatgcttgccagtcatgtccttggagcaatttggtacttgctttctattcaacgccaagaatcctgctggagacaggagtgtagaaataatgcaacatgtgatgctaaatatatatactgtggggctgtcaataataatgagaaaaatgcttttttaaagactgtttgctcattaagtccaccaaacagtcttccagatccattcttcgggatttatgcaccagctatagaaaatataacacaatcaagaagtttctttgtaaaattgttcttctgtgtttggtggggcctgcaaaatcttagttctcttggccaaaacctgaaaacaagcacttatgcatgggagaatatatttgctgtttttgtctcaatatcaggtttagttttgtttgcactgcttattggtaatatgcagacctatttgcaatcagcctctctgagaatagaagaaatgagagtgaaaagccgtgacacggatcagtggatgtcatatcgacatcttcctgagaacctcaaggaaagaatacggcgttatgaacagtacagatggcaagaaacaagcggtgttgatgaagagcaactccttgtgaatctccccaaagatcttaggagggatataaaacgacatctttgtttatcacttctcatgagggttccaatgtttgaaaatatggacgatcagctcttggatgccatgtgtgattgcctaaagcccattctatacacagaaggcagctgcatcatttgtgaaggggatccagtaaccgaaatgctcttcatcatgcgaggaaatctaatgagcatgacaacaaatggtggaaggactggcttcttcaactccgacattctgaaaggtggagatttctgcagcgaggagctcctaacatgggctcttgaccccacatcaacatcaagcctccccaactcaacaaggatgatgaagacaatttccaaagtcgaagcttttgctttgagggttgatgatttgaggtttgtggccacccagttccgacgactccacagcaagcagctccagcaccaggagcagtggagaacctgggccgcctgtttcatccaagcagcctggcaccggtactgcaggaagaagactgaatattccttgtacgagaaggaggaggttgtcgttcgcgattgtgattgaaggctccacctctctcagcttcatggcagcactgtatgcttcacgtttcgctagaaacatggtacggatcttgaggagaaaagccacgcgcaaggcccggctgcctgcgagactgctgtggaagcctgcagagaccaacttctctgcggaagagcagtaacgttcgctatccgtactttgcggaacatcattaacccccncttaaag

SEQ ID NO: 23199 - DNA, 1137 bp, Setaria italica
  Peptide Sequence Number=SeqID_89173
tattattatttgtcttgttttttgttcttcaattatcaggttttagttttgtttgcactgcttattggtaatatttaatacaaccaattgcaatgagggttccaatgtttgaaaatatggacgatcagctcttggatgccatgtgtgattgcctaaagcccattctatacacagaaggtagctgcatcattcgtgaaggggatccggttactgaaatgctcttcatcatgcgaggaaatctaatgagcatgacgacaaatggtggaagaactggcttctttaactccgatgttctagaaggtggggatttctgcggtgaggagctcctcacctgggctcttgatcccacatcaacatcaagcctccccagctcaacaaggacagtgaagacaatgtctgaagtcgaagcttttgctttgagggctgaagacttgaggtttgtggccatccaattccgacgactccacagcaagcagctccagcacactttcaggttctactcgcagcagtggagaacctgggctgcctgtttcatccaagcagcctggcaccggtactgcaggaagaagattgaagactctttgcgcgagaaggagaagaggttgaagtttgcgattgcgactgaagggtccacctctctcagcttcatggcagcactgtatgcttcgcgtttcgctggaaatatggtacggatcttgaggaggaacgccacacgcaaggcccggctgcaggaacgagtgcctgcgagaatgctgcagaagccagcagagcccaacttctccgcggaagagcagtagcttcgctcttgtgcctaacctttgccagacatggatgctaagccaaaaaaggaataaaagagagagagagagagagagcaccatgatagcgtgactacttgatgacgtagatggctgcttgtttcagatctttcgagtagcgttgtactcctccgttgttttagcttttctaatacatatttatatttagatgcataataatatatacgagattcggaggagttatacgccttacctcggtcttatgtgcttgtgtaacgtaggtgtgattagcaatgtagtgatgtgcctcaaagtatatatgtatagttggcgatcgtgttttctacaaaaaaaaaaa

SEQ ID NO: 23200 - DNA, 396 bp, Setaria italica
  Peptide Sequence Number=SeqID_89174
acgtaggaattcaaatgattttggaataccatatcctacatacttccaccctgccaaggatgctgatgtcttcctttggcaggatagaatgaggagcttggaacgcccatggctcttctcgtttgcaggcgctccacgtcctggtgatccaatgtccatcaggggacaactcatagatcaatgcaggagctcaagtgtttgtaaattgctggagtgtgaccttggggagagcaagtgccactccccgagcacagtcatgaaaatgtttcagagttctttgttctgcttgcagcctcagggtgactcctacacaagaagatctgcctttgactccatgttggctggctgcatacctgttttcttccatcctggttcagcctacgtccaatatacatg

SEQ ID NO: 23201 - DNA, 1844 bp, Setaria italica
  Peptide Sequence Number=SeqID_89175
cgccgccttctgtcgcgccccccgaggaggaggaggaggaggtgaagccgccgccggagccgccaggaggagccgccgcccaaggtggcgtagtcggggtacgtcgggcgacgctcaagacggcggagaacaagagcgacccgtgcggcggccggtacatctacgtgcacgagctgccgccgcggttcaacgaggacatgctccgggactgcgagaagctcagcgtctggaccaacatgtgcaggttcatgagcaacgatgggcttggcccgccgttgagcgacgaggagggtgtcttctccagcaccgggtggtatggcaccaaccaattttccgtggatgttatcttcggcaacaggatgaagcagtacgagtgcctgaccaaggactcgtccattgccgctgcggtgtttgtgccattctatgctggcttcgatatcgcaagatatctctggggttataatatctcgacgagggacgccgcgtcgcttgatttggtggattggttgatgaagaagcctgagtggaatgtgatgggtgggcgtgaccatttcttggtcgcagggaggatcacttgggatttcagaaggctgacggaggaagagtcggattggggcagcaagctgcttttcttgccggctgcaaagaacatgtcgatgcttgtggtggagtcgagcccgtggaattcaaatgattttggaataccatatcctacatacttccaccctgccaaggatgctgatgtcttcctttggcaggatagaatgaggagcttggaacgcccatggctcttctcgtttgcaggcgctccacgtcctgcattgatctatgagttgtcccctgatggactagatcaatgcaggagctcaagtgtttgtaaattgctggagtgtgaccttggggagagcaagtgccactccccgagcacagtcatgaaaatgtttcagagttctttgttctgcttgcagcctcagggtgactcctacacaagaagatctgcctttgactccatgttggctggctgcatacctgttttcttccatcctggttcagcgtacgtccaatatacatggcatcttccaaagaactatacaaggtactctgtcttcatccctgaagatgacatccgtacgagaaatgccagcattgaggagaggctaaaaagttttcacccagatgtggtcaagaacatgagagaggaggtcatcaatctaataccaagggtgatatatgctgatccaagatcgaaactggaaaccttgaaagatgcatttgatgtttccatagaggcaatcattaacaaagtgacgaagttgagaagagatatcatcgcaggccacgaagataaagattttattgaagagaatagctggaagtatagtctgttagaagatggacagcacacaattggacctcacgaatgggatccattcttctcaaaacccaaagaaaaaggtggagattctagcagttcatctgctgaagctgccaagaattcttggaaaagtgaacaaagaggacagaattaaaccacaagccatatcatcttggagatgtgataaagggggcagagttagctacactctctgatgatgctgtgatgcaaatacattgcacataggtcaagatccagtagttatggtgatcatgagcatcactgatgatctagttcaccctacagttgtacgaagccattccactaaaaatgcttcggggaaatttggcacacaccctttgcttacctttataaataccattttccacactaatttttgtttttgatgtttttgctcaattaatcctttgtaagctcttacaggatttagaggtatatcgattttgtt

SEQ ID NO: 23202 - DNA, 1360 bp, Setaria italica
  Peptide Sequence Number=SeqID_89176
atactagaataataataataataataataataataataataataataataataataataataataataataataaatcatgcatcatcagatgagatgagatcagatgatgagcttgacgagttttcgtagacgaagtctgcgaggatcttgtatgccttctccgtggggtggtagctgtcccagaagaggtagtcgccgacggggtcgcagacggcggaggtgacgcggttgcagagcacggagacctccaggaggccggtgccgcagcagcccttggtggactgcttgaagccgtagctgcgagggtgcatcatcatgtcgtacaggaagccgtagatgtccatgaacaccagcagcgtgccggggtacttggcccggagcgccgccagctccctcaccatgccggcgttgtaggcgacggccacctcgttgtggccctgggagcagccgcgctccaggccgccggacatggtgcgctgcgacggcacgcagccgatgggcgggatgccgatgaaggccacccgccggccgccggcgcggatgaggtcctcgacgaaggaggatgcgtgctgcaccaggaggttcgcgtacgaggcgtggtcgtactcgctgcgcgcgcgcatggtgaagtaggtgttggctatgtcgtcgctgccggcgcagatggcgaagacgccccgggacaggatctcggaggccttgtcgtccccggcggcggcgcgcaccttgcccaggtactcgtggaacatggtcagctggtcgggcagcgagatcacggaggccagcttgggtgtcagcgggtcgaagccggtgccgccggaggcgaagctgacgccggtgatgaggtcgtgcgtgtccagcggctgaggggagaggtagggaggcaggtaatccttgagccccagacgggacgcgatgaagtctgtgggtatccttccgttgcagaacctcccggtgggtcggtggttgaggaagtcgtcgccgtagggcgggaagtctgccttgatgatggtgttgatgccgttgttgttgccggggtccacgatggagtcgccgaagacgatgagggcagccgcctgatgaggcttgtcgtcggcgttgggcctgtgctgctgctgcttggctgatctcgtggcgttggcagctgcagcacaagtgctagcaggggccaacaagatgagcaggagcaacaagagcagctgggagctgcgactgatgatcattttgtacttaattagctactatatattgtagtatatatgtatagtatatatgcacatatgtggaagggaataatgggaagaaaaggaggatgcagcagctatagcagtggactccagattggtggtgatgctgcc

SEQ ID NO: 23203 - DNA, 423 bp, Setaria italica
  Peptide Sequence Number=SeqID_89177
ttggaccagcaggcactccacggatgatctctatgtccttgacctcacaaacgacaagtttaaatggcacagggttgttgttcagggggctgggcctggtcctcgctatggtcattgcatggatttggtagctcagcgttatcttgtcaccgtttcaggaaatgatggaaagcgggtcttatcagatgcttgggctttggatactgcacagaaaccatataggtggcagaaacttagccctgagggcgatagaccttcagcaagaatgtatgctactgccagttcacgttcggatggcatgcttttactttgtggtggaagggatgcttctggaacaccactttctgatgcttatggactactaatgcataccaatggccagtgggagtggactctagctccagggggtatctccatctccaa

SEQ ID NO: 23204 - DNA, 2930 bp, Setaria italica
  misc_feature (2900)..(2900): n is a, c, g, or t
  Peptide Sequence Number=SeqID_89178
atgatctctatgtccttgacctcacaaacgacaagtttaaatggcacagggttgttgttcagggggctgggcctggtcctcgctatggtcattgcatggatttggtagctcagcgttatcttgtcaccgtttcaggaatgatggaagttaatacaagaatagaccttgggctttggatactgcacagaaaccatataggtggcagaaacttagccctgagggcgatagaccttcagcaagaatgtatgctactgccagttcacgttcggatggcatgcttttactttgtggtggaagggatgcttctggaacaccactttctgatgcttatggactactaatgcataccaatggccagtgggagtggactctagctccaggggtatctccatctccaagatatcagcatgcagctgtttttgttggtgctcggttgcatgttactggaggtgtccttagaggaggaagggccatcgaaggagagggcgcaatagcagtcctcgacaccgctgctggagtttggttggatagaaatggcattgtgacctcccgcactttaaaatcatctaatgagcatgatgcttcttcggatctacttcgtcgctgtcgtcatgcagctgcctctgttggttctcagatatacatttatggtggactgaggggagatatcctcctcgatgatttccttgttgctgagaatgcacctttccagtcagaaattacatcatctatgtacggtgctgatagagtcccgaggggggaaactcaaaatagaaatcataattattattcggattcacctgtccagcaatcttcaaataacagcacggacaaaaagtcaattgacatgttgatagaggcctcaactgcggaagctgaagctgtaagcgctgtatggcgagctgctaaggaagcatctgcagcatcttcagaagacagtctttcagagggaatagggtctgagtccccactgagtgagacttctccaatgcctgaagattttgatgatgggggctccctagagccagatgtgaaactgcattctagagcagttgtagttgctaaagaagcagtaggagacttaggatgcttggtcagacagctttcgctcgatcaatttgagaacgaaagcagacgaatgcacccttcaagtaatgatcaatcttatccaggcaggagagcattaaacagacaacgatcgccacaaggtttgcataagaagattatttcgttcttacttaagccaaggaattggagagctcctgctgatagaaccttcttccttgactcttacgaagttggcgagctatgctatgctgctgagcagatttttatgcaagaaccaactgttttacaattaaaagcaccaattaaagtatttggtgatcttcatgggcagtttggagacctaatgcgcctttttgatgaatatggtttcccgtcaactgctggtgacataacgtacattgattatctcttcttgggagactatgttgaccgaggccagcacagcttggaaacaataactttgcttcttgctcttaaaattgagtacccagaaaatgtgcacttgatcaggggaaatcatgaagctgctgacatcaatgctctttttggctttcgccttgaatgcatcgagagaatgggtgaaagtgacgggatttgggcttggacaagattcaatcaactgttcaattacctcccacttgctgccatgatagaaaagaaaataatttgcatgcatggtggcattggaaggtcaataaacaccgtggagcaaattgagaaactcgaaaggcctatcacaatggatgttgggtccattattctcatggacctcctatggtctgatcctacagagaatgatagcgttgagggtttgagaccaaatgcacgaggacctggcttagtgacatttgggcctgatcgagtaacagaattctgtaagagaaacaaattgcaattgatcataagagcccatgagtgtgttatggatgggtttgagcgttttgctcatggtcaattgatcactttgttttcagcaactaattactgtggtactgcgaacaatgctggggccatacttgtggttggcaggggcttagttgttgtaccgaagctaattcatccacttccaccacctgttaattcacctgagtcctcccctgaacgtggggatgccacatggatgcaggaacttaacattcagcggccacctactccaaccagagggcggccacaagctgccggtgacaggaattctcttgcttacatatgatacatgacagagccacctcaagcttctggatctgttgtttgtaatcagaaatttgttggcagtttcaaggtacatatggtataccccagaagaacaatcaaccaacaggacatcatggatacaattgtgaaaagttccctggtgatccatagtgatgcatcggtgttagctgtagttgatgtggtacaatgatttgatctcctcattgggaagctacataataatagttcagatcgctatatgcttcccaacctgattcggcctctctgtagttcattgtttggaggggaagagtgcgacagtgatatgaaggagaataatcaaagtctgatgtagtttgccgtaatagctcacctgtaattgtagtgcacatagctaagaaggcttttttccatgtgtttgtataccatgcctccagtgtggagccgcagtttaaacacaatagctatacaacttatcagattctgagtttagattggccttagatttgaggcttttcatctgctctttgtggagcgtgaatgtttgtaagttaatgattgaatttatgtaggcgtctgtgcaataaactaattaagttatgatcaaaaaaaaaaaaaagtactcacactgagtcgaaaanaaaaaactgagacacgacaacgagggagta

SEQ ID NO: 23205 - DNA, 289 bp, Setaria italica
  misc_feature (271)..(271): n is a, c, g, or t
  Peptide Sequence Number=SeqID_89179
cacagtacgccctcattatacacttgttataccgtcagtgttggctacatggccagtgcagtggtcttctctgccaccatcctcctcttggcagtggccgtagtatttgcctccgtctcctgcgcctcacacccattgacggctgcggaggcaacagaccacgccatcaccaaggagaagagcaacctgctacaggtgcacagtgactatgacaaggagatggaggaagccaaggccaccaggggtcaacgaggcagtgccaccgaaaagntgacgaatttggtatccg

SEQ ID NO: 23206 - DNA, 312 bp, Setaria italica
  Peptide Sequence Number=SeqID_89180
tgcaatatcatgctccaaaggaatagtaaaagaagtcataattgtacctgcatcggcactggatgtatgtgatggtggcagaataactacacaagtgcttacttccatgttccatgtgtctccaaactagtacataattttgggtttcagataatcagacaaatacaggacagcaagaaattggtcaactaaattcttgctcttgtttctacacattcaaaattctgtttgatgcaccatcgctgtgctgtccgcagattgcagtgcagccatgatagagctggaacagcagactggatgattgtctattaa

SEQ ID NO: 23207 - DNA, 265 bp, Setaria italica
  Peptide Sequence Number=SeqID_89181
ctccctcgtccagatacattggcatgcgcagtgcatcaaacgggcttcgctaccattaccgttacaaaacccgattagatttgagcatttgaggaccataagaacttttggccacgaatctatgatcatctatatagtgtgaaaaacaataataagatgcccttaaagctttagaggcagacaggtgggacccatagtccaatgcctagcgaaatggtggaggataccaggaatctccacggccacacgttcggaagataccacg

SEQ ID NO: 23208 - DNA, 258 bp, Setaria italica
  Peptide Sequence Number=SeqID_89182
aatttagcagcctaaggtgatatagagattccagtgtccttggaacatacgtaatttcagtaccaccaaggtccaacaactgcaagtacttgagccccttaaaaagcttatctaagctgcgattgcccaacgggatcttgtaaagaataattgtcttcaagcttgccacagtccccatttcttccacagcagttgttggtgtgttgtttctaatccacacatgtcgcagtgcttcactggaatttccatttatagtag

SEQ ID NO: 23209 - DNA, 452 bp, Setaria italica
  Peptide Sequence Number=SeqID_89183
tcaacaaattccaaattgctgtctacaaattaatcggagcgaaagatgtgggtcctgttaggaaataaccaatcatattttagtacgcacttctttccttgataaactactaaaaattgtaattgccatcctttagtactgttaaaaaacagttagatcgacctaggaagaaataggtggctttattaagaaaaaataagcacccaaattcgtcttggcaaggacttgaacctgggtggtgtgggcatacattcacaccatcatcaaactgatctaggctcagttcctactttagtaccatttcataaatagctagttataaaatgctgtaaaatagcaaatctagttctttttctcttttatgaaagaaagaacaagttgattcagaacaaaagaaagaaaaaaatgtctacaaatctttactaaacaaaccagctaatcgaagagttgga

SEQ ID NO: 23210 - DNA, 885 bp, Setaria italica
  Peptide Sequence Number=SeqID_89184
actgtaccgcggcgtgcggcagcggcactggggcaagtgggtggcggagatccgcctgcccaggaaccggacgcggctgtggctcggcaccttcggctccgccgaggacgccgcgctcgcctacgacaaggcggccttccgcctccgcggcgacgcggcgcgcctcaacttcccgtccctccgccggggcggctcgcacctcgcgggcccgctcgacgcctccgtcgacgccaagctcacagccatctgccagggcctcgccgccgcgcccgattccaaatccgccgccgctgccccggaatcgcccaaggcctcggcgtccacgaccacgacggagggcgacgagtcggtgcactccgccggctcgcctcctcccctaccggcgttccagcagcagcagcagcaggtggcgccggtcccggagatggcgagcctggacttcacggaggcgccgtgggacgagtcagccgccttgcacctgaacaagtacccgtcatgggagatcgactgggactccatcctctcgtgatcaagccaacaagctcaatcacgcgctgtaatttttgtcaatgggtctaatttaattaacccgcagccgccgcggatccgatggaatattagacatcgggccgccgtggctgcgagtagggtttaaggagctcgtcgaacgtagcggtcattaaggagagggtttaagctaagctttaccatttggtcgtcatggagtagtacaagtgttgtattaagattattcattagcgtcatgtatggtaactagtgatctcctggttgcttcgccggttgtttttctctcccggcaaggccagttgagggtgtaagtgtaatgaattgttatgtaactgttggttacttgctgaaaaaaaa

SEQ ID NO: 23211 - DNA, 310 bp, Setaria italica
  Peptide Sequence Number=SeqID_89185
gcatctaaggcaccattgctagttgaaacgtttcactcatcaatcaatggagaatggtgaatcgcctgtagctgacaagtggtcccacccgtcggcgaccaggcgtacaaccgccgcgcagctgggttgctgtcaatgcagcctctgccgcttggcaatgaaccccgtcgagcagttggcggcggccatgggcgtcagcggcagcatgggcatcgccgtcatcggccgcttcatgcaggtgttggagccggcgtagcccagcgtcgcggcggccgccacggcgttggcgccgccagcagccatgggcgac

SEQ ID NO: 23212 - DNA, 642 bp, Setaria italica
  Peptide Sequence Number=SeqID_89186
agtcgtggaacaccacgccgcgcgccaccggccgtctccctctgacattgaacaggatcttggcgaccctggcccggagcagcacgtcgatcccgtcgggcgcgcgtacctcagcaggtccgcggccgtgtgccgccgcccgtcggcgtcgaaaatcgagccgccgaccttggtcccgtcgatgtggtcgaacgtgaagccgttgtccggcgcgatcccggactcgagcagcccgctctgcagcgcggcctgccagggccccagctccggctggaacgccaccacgtcctccacccaccggtacgccgccttggcggcgtccaggtcccacccaacatcccgcacgtagttatcgccggcccgcgtgtagaagccggcgttgatgcagctgccgccgcccagcacccgggggcgcgagttgatgacgccgtcctcggacacgaaccgctgcgcgggggagcccggggaggtatcggacagcgtgtccgcgaagcgggtcatgtccccgatgcgctcgtcgtcgtagggagagccgccgcgctccagcaggagcacgcgggagcgctccgacagcgtggccgccagcgggtaccccgccgtgccgccgctaagacccttagtttaaatttagggtttaagtaa

SEQ ID NO: 23213 - DNA, 483 bp, Setaria italica
  Peptide Sequence Number=SeqID_89187
caccaaccgactgataagcttgtcaaaagaatccagcagggactgaccactgagctgagctctgtacggaccaatgccgactcctgtcggtcgtggcgtcttatcttttcttcggttgcacctaccggagtatatctgcattgctattgctgcatgtttgacacattgacatcacactgtactgaattttttctgatggattcgctcgctgcgaccgtgaattctgacgagattcatctgcccgcctgcacaggtggtgtcgaacgaggcgcgggcgatgcacaacgtggggctggcggggctcacgttctggagccccaacatcaacatcttccgggacccgcggtggggacgcgggcaggagacccccggcgaggacccgctcctcaccagcaagtacgccgtcggctacgtcacgggcctgcaggacgccggctccggcgccggcggtcgtactagtccttctaaggttcgtccgtcgtt

SEQ ID NO: 23214 - DNA, 2760 bp, Setaria italica
  Peptide Sequence Number=SeqID_89188
cgcctgtactacgggaggggtggtggtgaccaggaacctagagagctagctatcatggccgcggcggcgcctccgttctcggctccggcggcggccgcggtggcggcggctctgctgctctgcttcttcagcggctgcaatgcgcagacgccggtgttcgcgtgcgacgcgtcgaacgcgacgctggcggcgtacgggttctgcaaccggtcggcgacgcccgccgcgcgcgccgccgacctggtgtcgcggctgaagctggcggagaaggttgggttcctggtggacaagcaggcggcgctgccccggctgggcatcccggcgtacgagtggtggtccgaggcgctgcacggcgtgtcctacgtggggcccggcacgcggttctcgccgctggtgcccggcgccaccagcttcccgcagcccatcctcacggcggcgtccttcaacgtcacgctcttccgcgccatcggcgaggtggtgtcgaacgaggcgcgggcgatgcacaacgtggggctggcggggctcacgttctggagccccaacatcaacatcttccgggacccgcggtggggacgcgggcaggagacccccggcgaggacccgctcctcaccagcaagtacgccgtcggctacgtcacgggcctgcaggacgccggctccggcgccggcggcgacagcctcaaggtcgccgcgtgctgcaagcactacaccgcctacgacgtcgacaactggaagggcgtcgagcgctacaccttcaacgccgtggtgtcgcagcaggacctggacgacacgttccagcccccgttcaagagctgcgtgatcgatgggaatgtggccagcgtcatgtgctcctacaatcaggtcaatgggatccccacctgcgcagacaaggatctcctgtcaggagtcatcagaggagactggaagctgaatggatatatttcgtcagactgcgactccgttgatgtgttgtacaataaccagcactacaccaaaacacccgaggacgcggccgccatctcgatcaaagcagggctggacctgaactgcggcaacttcctggcgcagcacaccgtggcggccgtgcaggccggcaagctctcggagtccgacgtcgaccgggccatcaccaacaacttcatcacgctcatgcgcctgggcttcttcgacggcgatccgcggaagctcccgttcggcagcctcggccccagcgacgtgtgcacgtcctccaaccaggagctggcccgcgaggccgcgcgccagggcatcgtgctcctcaagaacagtggcgcgctcccgctctccgccaagaacatcaagtccatggccatcattggccccaacgccaatgccagcttcaccatgatcggcaactacgagggcacgccgtgcaagtacacgacgcctctgcagggcctgggcgcgaacgtcgccaccgtgtaccagccgggctgcacaaacgtcgcgtgcagcgggaacagcctccagctcgacgccgccacgaaggccgcggccagcgccgacgtgaccgtgctggtcgtcggcgccgaccagtccatcgagcgcgagagcctcgaccggacgagcttgctcctgccgggccagcagccgcagctcgtgtccgcggtcgccaacgcgtccagcggcccctgcatcctcgtcatcatgtccggtgggccgttcgacatctcgttcgccaagtccagcgacaagatcgccgcgattctttgggtcggctaccccggcgaagccggcggcgccgccatcgccgacgtcctcttcggataccacaacccaagtggaaggttgccggtgacgtggtaccccgagtcgttcaccaagatccccatgaccgacatgcggatgcggccggacaagtcgaccgggtaccccggccggacgtaccggttctacacgggcgacacggtgtacgccttcggggacggcctgagctacaccagcttcgcacaccacctcgtgtcggcgccgacgcacgtggccgtggtgctcgcggagggccacgcgtgcctaaccgagcactgcttgtccgtggaggccgagggcgggcactgcgacaaactggcgttcgacgtgcacctccgggtgcgcaacgccggcgaggtggccggccggcacacggtgttcctgttctcgtcgccgccggcggtgcacaacgcgccggcgaagcacctgctggggttcgagaaggtgtccctggagcccgggcaggccggcgtggtggcgttcaaggtggacgtgtgcagggacctcagcgtcgtcgacgagctcggcaacaggaaggtggcgctgggcagccacacgctgcacgtcggggacctcaagcacacgatcaacttgagggtttaaagcttgagtgggaaacggcaatggggtggcgacctttgaatgatgcagttggaattggggatggaattgtatgggtcagggaaagtgtttgatcagaattggttcaggaggttcatcaataagggcttcccgtcgggaaagaattggatccacgggcagcgtagtctcttgtttggggtattggattcatttggagggtccatttgcaattgtgatctcggagaagtgtaattgactggaagggaggagagttcgttcatttcttcttttataaagtgttcaaattgttcttgtgttatcaaagaatcatacctgatccaagatttaaaaagggatgtagcttgtgggattccacaatctgggattgacggattaagtaaaaaaaaaaaaaaa

SEQ ID NO: 23215 - DNA, 758 bp, Setaria italica
  Peptide Sequence Number=SeqID_89189
gtgctctcagtccgtcgctcagtcgtcgtcgtcggcgacttcacgccggcagcggggctccttccaccgccgccggatcctcacctcggcttcctcctcccccgcgctctctacggctgctggactgaccgagggcggagatccgcccggactcggatcggttccctcgtctgctggcacgggcggcaggacatgcttcgtgttcaccctgtgcttccaaggcaggacctgttgtgattttataaagcagcagctttgtcgtgtgtacactgaatatgtggaccaacattttcaaaatagtggacctccaaacagtttcatggtttcagtttcttcctattgaaccagatgcaagtacaactaaagagagaagttcaaaggctgagcagaaagatgctcttaataacgttgtgctgtcggcatatcttcacttacaaagtgaaggtttcctaagtacctggacaaattcctttgttggtccatgggatccatctcaaggagagcataaccctgatgagaagatcaagctctggttgtttcttcctggccgccactcatcggtatctgaaatggcccaaactgctgtaaacaaattaagagttgcttcaaatggtttatgggtagccccaggcaactcagaagaggtagcagctgcactgtctcaggccttaagaaattctttagaaagatcactaagagggctttcgtatgcaaggtttggtgatgtttttacaaaatacaacccccccacaaaaaat

SEQ ID NO: 23216 - DNA, 807 bp, Setaria italica
  Peptide Sequence Number=SeqID_89190
ttaccttggtactaaatttcctttttgttttgggttccctaattggggtaattccctaattcttctaaggagagcataaccctgatgagaagatcaagctctggttgtttcttcctggccgccactcatcggtatctgaaatggcccaaactgctgtaaacaaattaagagttgcttcaaatggtttatgggtagccccaggcaactcagaagaggtagcagctgcactgtctcaggccttaagaaattctttagaaagatcactaagagggctttcgtatgcaaggtttggtgatgtttttacaaaatacaacccccctacaagaaatcaaaacagctttaggcgagcacagcctacagtggagtttgtctttgctgccaccgaggaagcaatatttgtgcacgttctcatatctgctaggtacatgcggaacctttgtagtgatgacatagagaaagttctcacgcattctcctcgctctgttggtgaaggtcttccagttgttgttgctcctagtggaatgcttggtaggcttgtcggctgttgtccaagtgatcttgtcagacaagtatatccaagcaagtcctcggcacctaatttgccaggttttactcaacctactattcaaatgaaaaaggaaatggattcagtgaaggactctcagctgggtgctgacggacagcgaaaggtagaatcacctgatagccttccagttcttgagaggacatttatttacccacctgaggctgttttggtacctatggtccatcaagcatttgttcgttttctagcaaaagaatgtgttt

SEQ ID NO: 23217 - DNA, 1905 bp, Setaria italica
  misc_feature (1)..(20): n is a, c, g, or t
  Peptide Sequence Number=SeqID_89191
nnnnnnnnnnnnnnnnnnnnaccctttaggaatgtgaacttccttcatatcttgacatgtgggctctgcccagtttacattaaatcatcagctgaatggtcccatgggataaattaggatgacaagacaccatacccttatacattatacaaggcaatacaatggaacaatcaactgcatccactccgactccggtaccaactgcacctctaggctcatcgaccacggactgaaactataactatgggtcggccagcccatcatcctatcgcctctaatcaagttgagagaaagaaaatgctgcctctaatcatcagcaccagtttattaacctatgtactacatggtgcttgctctagaaccttctcgcgcctgccactgaaacagctgctttctgataatagcacaacatccgcaggtgacagtggaagtgaactcaagtaatgtcttggctgacgagaccttctttgtttgttaatgcctttactttcagaaagtcgcagattttccaatcgggcgatttgaccgattgaagacaaataatcaacaaaaacagggcctctcaatgactgagacagctttgaaggaacaacctgagacatggttccaaaaagatgaacctgatgctcccttcttttagaaatacaagtagtcggatttttcatatgagaaacattagcagatccgcaacttttcataagtcctgaactaataatttttccaagagatatggcagctgtactggcaaacaacaactcttgtgacaaggcaactgaaccatcatctatatcttgggactcccttgagaacatgcacagagcatgctgtgcataaacagatcccatctcaacctgattgttgtaccaggaaaagtcatctggctcagcacaaggagttgaagatggatccaacatatccttagtaagagggtagcaacaagaaagcataagatctaattctgatattaaatcagacactccagaagcaagcttcaaagctccagaagctgctctattatgatcagcctcatgggaaagttcaggacagcaacttcgtagcctgttccaagtatcctgtacttgttcaaccttgcaagagtcattagattttttaccagagagcagccagatactttcagcacgactacattcatccatcaattgaaacccagcagttgaacagcttgcttgttcatttctgccaaatgattccacataagcctcacttgtctcaccaactacatcttccacatctttctgtcgttcagccattacattctttgcattatcattgtcttctaatacagttcgaaacatagtgtatgtaccactatcatgaaaggtagacaaatcattggacaccgcccttgacaaaattcatcatcacttattgatgcagatgtgccctccacaatgaaggatgactcaggcacacatgacacgccatggtgaaatatcattacgctcagccgcttggccacgcttcaacttggatttcttagcctttcttgttgtagctgcacttcttcctttgaccgaaggtgctattacttgtaactgcagaccttcaagatatgatgcctccatctgtttcttcttttcttcagccacaaggatagttttgtctacctccatgtatactgtttctgataatttagaagggaactcccatggcagcatttttggtacagtagaatgtactgcatccaaatcaagtgagaaaggaccacacagacattcatttggcctctctgtgaattgctgctttccttggtaccaaaactgcagaagcatcaccgtcctcctaatgtcacctaaacaaatatcaactacatgctttaactcaggaacagtgacatctactccctcagatttacagatcatggcaacatgtgaaaagtaagca

SEQ ID NO: 23218 - DNA, 488 bp, Setaria italica
  Peptide Sequence Number=SeqID_89192
gtggtatggagctgattgcttcaaaagttggcattctgccaaggaaactctccaagaagcatgaccctttctgtgattccctccgaagcatggcgaagcaactgcttgagctgaagtatgatggcactcaagatagtgacttatatgacttcgaagcaaatggcgagggatgcaatgtcaagtacctggaaatgtatgatccgcctgttgaaattaaggagagtgctgttcacaaaattccttcagattcacctcatgatgatgtgggctcaagaaagtgccagcaggaagaattgaaccatgagtcggagcatgatattccaccaactgacagtccacatgattcggtccctgatgatagaaatttatttcaggattccaacattgtcacatcacccagttccccaagaggaagaaggatgtgcaagtactgcacctgatgagcattcatctactggagtgctcaaccatatgttggaacatgatca

SEQ ID NO: 23219 - DNA, 1041 bp, Setaria italica
  misc_feature (947)..(947): n is a, c, g, or t
  Peptide Sequence Number=SeqID_89193
atgagaactggggtgatgtgcatgtgcacttccatcgccagcagtaacttgagaattggagtgataagtgctcccatcaccaatgggaacatgagaattggggtcatgtttgctccaactgccagtggcaacctcagaattcaggcaacgcatgctaccagtgccaacggcgacctgagaactggggtaagaaggtgtgcagccactgccagttgcagcatgagaattggggtaacgcatgaccccgaagccagtgccaacctgagaattggggtaatgtgtgacccaatagccagtggcaaactgagaattggggtaacctgcattgatgccaggtgtcttgtttgcccggaaagcatcattgtaaaagcttccaacaattgcctgtataggtgttgcagccacaagaggcccagctacaacgccaccgaccacagaacaatcagcacaagcaagggtcacagataagcacccaaatccagggctatcagatgtacaaatggatccgaacatgcggatgatttctaaaggacccttatgatttaaaatgacagaagagtgtagtagatttgcttcctgaacgaccccaagcactgagagaacacagacagccttcccgattatttttgaggcccccacaatctttgatatgatatcctctcccacatctattttgagcacgtgcggctggagcccacccaattggccgtgccctgtccacaacgacacaccaaaattcagcaaattactttttttgaaatgaaattcagcaaattactgggcggagaacaaataaaggcagccaagtggaaaagacttttttttggaacataaagtggaaaagacccgtcacaggtagcttcaccgtgcgcagccggagtcggcggcggtgccggagtgaggaggaagccccggcggctggaggaggcggtcgcagttacgcgggngcccccgcgccgtttctccggtattatctgtggcggcggcggaggaggaggaggagggggtaggagcggcggcgagcggtggcggcggcgggtc

SEQ ID NO: 23220 - DNA, 597 bp, Setaria italica
  Peptide Sequence Number=SeqID_89194
gccacggcagcatggaacgcagctccaaccggcagagcctcctcatccatgacgaagtacggggagtgcaccgggcgcaccttctccatggtggtctcgttgccgacgccgatcatgaagaaggcgcccgccgctctctgcgcgtagaacgcaaagtcctcgccgcccatggtctggggacgaatcttgacattggcctccccgagcatgccctcggctacctctttggcatgggcgtacatcagctcgtcgttgacggtggttgggtacggccggagatcctcctctaggaagtcgacggtggcggcgcagcggttcacggtggcttgggcttctatgatctctttgaccctcttcatgagatatgataggccttgatccgtcatgcttctgaaggtgccaccgatcgtcaccgattccgggatgacattgtaagcttcacctcctttcagcaatgtcacagataccacctgaaagcagcttcaagaggatcggtttcccgggagacgagttgctggaggctgaggattgcagaggacgcggcgatcacaggatcaatggtgtcgtgagggccaccggcgtgcccgcctttcccgg

SEQ ID NO: 23221 - DNA, 352 bp, Setaria italica
  Peptide Sequence Number=SeqID_89195
atggcttcgccgccggcgacctggaggcgcgcctgagggaggccgcggaggcggccgcgcgggcggcgcacgcgccgtacagcgagtgcccgtcggggttcgcggtggcggacggcgacggcaggatctacgccgggggctgcctggagtccgcggcctacaacccgacgctgggccccgtccaggcggccatcattgcgatggtggcagccggaggaggccccgccggggatgttgtggcggcggcgctcgtggagaaggagcgggcggcggtggcgcaggaggcgacggccaggatcttcctggacgccgtgtccccaccgccacaagtggtccagacggggctcatcac

SEQ ID NO: 23222 - DNA, 777 bp, Setaria italica
  Peptide Sequence Number=SeqID_89196
taaatacgtctgctaattgacaaaacagtcagcaggagaacctgatgtacagaccaaaatcaaaaccttgacctcaattgcggaggagcacaacatcaaatgggagcctaaagcattcgaggagaaattgcagaagccaaatgaagatcgtctgcatgggtctgcaacatattctggaggaaatatttcaactatggggtcatctacttctagcatgtcaacaccacagcccacatactctggtgttcctgcagcgactgtgtcggccacttctcatgtgccagcgggaccttattcgcctgtagatgtctccgcgaatagaaattctaatgctttctcacaagaaaaccttcggaatggttccagtgcttcagtgccccctagctcccaacatggtgcatctgcttactattcgacacagattcctggttccaacagtatctctcatggaaatactgaagctccaccttacactcaatatggcacagcagtcccagacacagtgtccagaaatgaagagatgaaccaatatagggaaagaaaaccttcggtgagtggtgccaattggaatgtggaattcaaagatgcaacatctgctgcacaggcagcagcagagtctgcagagatggcaagcattgctgctagagctgctgctgaacttgctagtcgtggaaactattctggtgatcaaagcactggagcttatgaggcagctgcgtacagccatgaaaatacaccaaggaagcaaccggctaaacatttagtgaaggacgagaa

SEQ ID NO: 23223 - DNA, 246 bp, Setaria italica
  Peptide Sequence Number=SeqID_89197
gctgatagaagagagccattgatgtgcagagcagggtttggctcatcgcatggacatcagggtgcgcctctggacagacaccttggaaggctgagcggcctttggagtttccttcagtcgttgattcaccatcttttcgatctgctctattgatctggacagtttcttctccattagatcagcatgagctgaatcatttggtttggatggaaccgtctgcaacgagcagtcagatggagaggaaga

SEQ ID NO: 23224 - DNA, 642 bp, Setaria italica
  Peptide Sequence Number=SeqID_89198
tcgacaccaatccaccatcaaagcatcgccattactcatatgctccgatcgaactagacctgaactcacatatatagtagtagtagaagctacggagtaattgattaagctaagaacgcaatgcctagctacttattacttactgccttgatgatcgaccaagatcgatcttaacgtgtccaacgggatgatcgaattaacatgtcgccaccatcgtcgatcagtaggggcactggcctttggcgccgggtgcgtagaagagaacgctggttggggtgtagatgccctgcagccccgccggcgggatggtcctcgtctccctgacgagggagaggccgatccactggttgggagggtagtagggcttgttgcactgcggcgtcggcgacgagaccaggtacatcttgcacgtcctggcgttgaagttctgcatgtcgtagaacatgatgaggaagtagccgttgccgtccgtcaccgtccccgtcgcgttcaccaccttccgcccgtagcacaccatcatcgccgtcgcgcctggcagaggcgacgcgtcgatgccggtgttgtagcccttgcccttgcaggacttgcagtagatgacgccctccacgatgacgaagggcagcggcttcggcggcggcacga

SEQ ID NO: 23225 - DNA, 262 bp, Setaria italica
  Peptide Sequence Number=SeqID_89199
ttgcaaggaccgtcagtgttctgagatccgctcccatagtcaaatgaagacttttcaatattgtgcgtgcaggataatgccaaatggccatgttccttgtacattttttcacaagcttccatcatagcacaagaaatcatcctccaagctgaggagggtgttgttccttcaaatgtaaagtccccaatcttgtcatgcagatttgcatctttagtcggtgcccgactggaagacccagaatgtaacactacagctggcactg

SEQ ID NO: 23226 - DNA, 268 bp, Setaria italica
  misc_feature (218)..(218): n is a, c, g, or t
  Peptide Sequence Number=SeqID_89200
ggcttaatttgttaggatgttgcttttatgttacacgcttcatttactgctctacccaactcgcttacgagttacggcataaaggttttgtgttgctgtaaacacctcgcgctgaaatgatttgcgctctaattttcaccgttagcctctgcagtctgcactctagcaccaaagtcaagaggacccgcccactggacctacacttgcatagtttttcnccgatactaaataatttgtattcagtttgctacataagttctaataattt

SEQ ID NO: 23227 - DNA, 509 bp, Setaria italica
  Peptide Sequence Number=SeqID_89201
ccgatcatatgagtgcgagagatttcagcacaggcgctcgagctataaagagctccagtatatctctgatggtgatagcaatggcgttatctactatgccggaacatcatttgggaaacaccagtggatgaatcctgtattagccaaggtaaaaggggtgtctgaggctgttgagtggagtaactaatgagcctgctggttcattcactcatgagcatctatctattcgtgcaatcagaatatcactgtggtggcaagcagcccaaattcgaggcacacggatccgaaggctttggtttcgaagaattaccaggggacttgctttgctgggccttgtattgaagatggcaagaagatttcttggtggatggtagacatcggacaggaccaccagctgatgtgcaactactacacggtgaggcaggatggctccacaaccttcatgagggatccatggacggtcggaactggacgagcctccgcgtccacgaggaggacgcgaccatttg

SEQ ID NO: 23228 - DNA, 1638 bp, Setaria italica
  Peptide Sequence Number=SeqID_89202
atagtaacaaataggggaacttaaggtggataccaggatattacatcagtgctggtgcagctgcttctattatcagatcagttcgccatcactgttcttcagtttgaatgctgtaaacgaataatggaatgcctttcagaggacacagtatgttcagtcttacaggcagtttcatcaatcccatcttgtaaactgcttgaagaagtatgcaagaggaattttgctacacactttgattattgcacaactgcttgcacggactttgtgttgttagatgaggcaacatttaaggatattcttcaggcaagtgatataactgtgttcggtacatcagcctactgcagtcactaaatacaaataatgtcctttagagcatagactaagatgtctatcaagattcagcatcaacagataatcaagatattagtggtctaatgttaaattgcacgtgtataatatcttaaagctatagtagattgtaaggagctgcttcacataagcttggcagttttatgtggtttatagttgtatctgctgaagcccttcagttttatcagttatgctgttgcattttcctgacaacaaatgtggctttcgtagtttttggagttattttggttctttttattctggttgcaaggctgccagttaattatgcagatatctccttactaataattgcatatgtcttcatgcgtactctgttgatgaacctatacattcattacatgttaggttaggaggaatatgagttttgataggaatggtaaggacttgcttcagtttaagttcgtcagatattgttctcccaggaagtaaaatttgctctccagttcttttggttctgatattgttaagagtttctggtttatatattacgatttcagctattattttacataaacaaaatgaatctgtgtggaagtacagccaaacactgcaaatagtagtgaggcatttcttttggcattggtcatactagtagtaattttgcagcatggcgatatgacggtaacatcggaagagagggttctggatgccatcttaacctggtgtatggggacttgtgaaactttttactggacttcagtagataagctcttgagaacttcaacacctgagcaactctttggagagaggctttccgccatcgatactttactaccgtttgtgaggttccctttgatgcagctgtccatgctaaagaggatggagataagtaatctggcgaaccacatacaagtattcagacagctggttgcagaagcaattgagttctctcatgccggacaatggacaccgacttctatatgtagtgcgagagatttcagcacaggcgctcgagctataaagagctccagtatatctctgatggtgatagcaatggcgttatctactatgccggaacatcatttgggaaacaccagtggatgaatcctgtattagccaagaatatcactgtggtggcaagcagcccaaattcgaggcacacggatccgaaggctttggtttcgaagaattaccaggtatgatgacagcattgggctgataaacagagcacattttttttgtggtggtcaaacaaaatgaagcatgatatataatagcaattagttaggacgaacttacttaagggta

SEQ ID NO: 23229 - DNA, 2861 bp, Setaria italica
  misc_feature (32)..(32): n is a, c, g, or t
  Peptide Sequence Number=SeqID_89203
ttccaagggcgccgctctcccatccggaccancttttcatctcttgcaagcaagcaattcgacgcgccgttagcatcgagattgggagggagggagggagccatggaattcgtcgaggagaccaagaagagatccctgacggtcgcccccttcgagtgcgcctggggcgaggagcttcgcttccgggagcccggccgtggctgcgtctccttcgaggcatccgcccacaacgacgtcaccctggtgttccgccaccaccccgggagccaccactaccactacaagatggacaccagccgccactacactgtcatcctgggtagccacaggaacaagcgcctcaggatccaggtcgatggagccaccgttgctgatgtcgccgcccccggcctgtgctgctccaactccttccaggccttctggatcaccatctgcgacggcctaatcaccatcggccaaggaaggcaccccaacaccaacctcctcttccagtggctcgatcccgatcccaacccagatgttcagtacgtcggcctatccagctgggacaagcacgtaggctataggaacataagcattctcccagcagctccccagtacagcatactttggacccaaaagttgttatgctgtgggaaaccaggcacggcagatgactccgaccagaggctgcttgcagactttctcgagagctgggacttgtctgatgctgtatttgtggttggcaccgaaaggagcttgtccctgcacacagaattgtcctctgtgcttctggagatttcccttttcaaatagcggaccatggagctaccatccaacttccatcagtatcctacccacttctccactcccttcttgagtatatctacacaggttctacacagattgctgaatgtctactaagttccctgctggagttgagctcgcattttaaagtcaaaccattgatcaaatgttgtgaagaaatcatcgactgttcgggagtggataagaaactttcagagtccggcaaaatcttaaaattatcaagtagcggattccagcaagatcataaatttggttccttccctctcaaggacccagtggatgcgcagaaaattggacagttccttgcaaatggcaaacatagtgatataaatatctatgttaatggacacggtcttgttgccaaggctcacaagcttatccttagcctgtggagcgtgccgtttgcaaagatgttcacaaacgggatgaaggaaagtagtgcctccgatgtatttttcaaagatgttcctcctgaagcattctttctcctccttcagtttatgtacaatggggaacttaaggtggatacccaggatattacatcagtgctggtgcagctgcttctattatcagatcagttcgccatcactgttcttcagtttgaatgctgtaaacgaataatggaatgcctttcagagggctcgcgtgtcctactggaagaagctcatccaacaagactagtttctagttttattccaaatttatgggatatggcttctgcaaatttgggtgaacttgttgctggttcagagtaggctgacccctgaaagtttattgcaggacacagtatgttcagtcttacaggcagtttcatcaatcccatcttgtaaactgcttgaagaagtatgcaagaggaattttgctacacactttgattattgcacaactgcttgcacggactttgtgttgttagatgaggcaacatttaaggatattcttcagcatggcgatatgacggtaacatcggaagagagggttctggatgccatcttaacctggtgtatggggacttgtgaaactttttactggacttcagtagataagctcttgagaacttcaacacctgagcaactctttggagagaggctttccgccatcgatactttactaccgtttgtgaggttccctttgatgcagctgtccatgctaaagaggatggagataagtaatctggcgaaccacatacaagtattcagacagctggttgcagaagcaattgagttctctcatgccggacaatggacaccgacatcatatgagtgcgagagatttcagcacaggcgctcgagctataaagagctccagtatatctctgatggtgatagcaatggcgttatctactatgccggaacatcatttgggaaacaccagtggatgaatcctgtattagccaagaatatcactgtggtggcaagcagcccaaattcgaggcacacggatccgaaggctttggtttcgaagaattaccaggggacttgctttgctgggccttgtattgaagatggcaagaagatttcttggtggatggtagacatcggacaggaccaccagctgatgtgcaactactacacggtgaggcaggatggctccacaaccttcatgaggtcctgggttcttcagggatccatggacggtcggaactggacgagcctccgcgtccacgaggaggacgcgaccatttgccatcccgggcagttcgcgtcgtggcccgtcgtgggcccgccggccctgctgcccttccggttcttcagggtggccctgacgggcccggccgcgggcggcagcgtctccaacgcgtggaacctctgcatttgcttcctggagctctacggctacttgcgctaactagattatattactccttttatacaatatacacacacatgtatgctacctttttatttgctcgatctgtactctactcaccgtgtatacgagattatatattgcttgcagcttgcttgaattaaaacatacttaattatttatttgtttcaagataaattatataatacgtacgcatgctgctgacaaaaggaaaaaaaaaaaaaaaa

SEQ ID NO: 23230 - DNA, 787 bp, Setaria italica
  misc_feature (724)..(724): n is a, c, g, or t
  Peptide Sequence Number=SeqID_89204
ctttctcctggcgtttcatttccttctcaacttctttttgcactttttgaatatccttttcattagcaggcaagtttccattctgcggctcagagacactcgcatcatcatgcctgctagcattttggtcatttttctccgtgtcttgcatcaaccccttgactgttgacccagcatctctcacacctctttctgtgttgttcttctgaatcgcccgttccaccattgatctgatcccttccaggttcaatgatttattcaactttaatgatgcttttctgagatcatttacctgggtttcaactcctgggttttccaggactgacaaagttgaatagatggcagtgatcctctcatggattttctttctgacagatctccgtgtactcagaatgctgcgtgctttcacaggcatcagcttcagatctcttatctcccagcaccaaagagctgactccgattcatcttccaacacatcagcatccgggaagaattcccatacatcatcctctgcccaacgagcaagcacagagctacggactgatgccgtcgacacaccatccaatcccttcatcttctcatatatctcgtccaccaacttggtcagcccaagactgctctcctcaagcaagcagccaaccaacgcgttgccagacaggttcccaccatcaaaccgcatcttgcggtcagaaacctccttgtaatactggaagagcccctcganctcctgccggcatccggcaacaagagcgtccttgtccgcggtagcaattgccggaccgctgga

SEQ ID NO: 23231 - DNA, 355 bp, Setaria italica
  Peptide Sequence Number=SeqID_89205
gcgcaggagcgttgggatgtcatcctctcctcgaagttgtgttgctgtcagatttgtatctttagcgaattcaaccaggttttgtcaaagtcagaaagcaccacaagcggggcaactgattggggggtttgctctccgagttgagaaatagattcctacttttcttcctcttatgagctgcctgctttgttatctgcctgtcgtaatcagatagtgaaggtttctcttgatttttcctttgctctgcctccattcttctgatgaaagaccgaagcttacgcttatccagtggtggctccagattctgtttcttcaaccatgcttctttacaagcctgttgccattaaaaaaaaaa

SEQ ID NO: 23232 - DNA, 320 bp, Setaria italica
  Peptide Sequence Number=SeqID_89206
catgccgatgagccggctcttgtcgtgcacagccttgtccctccccgtggccttccagaacccggccatggtggccctattggtccttgtccccgtcgggtacttgcggtccttgtagctgaagaagtaccactcgttctgctcctcgtacccgatcccgcaatgttcttggagatcccagggctcgatgcggtagagatcgatgtcgcgtatgacgtcgaggtcgatcttctgggaggccaccttcttcctgaggtagtagccgacgagctcctcgtcggtggggtggaacctgaagccagggggcacgcatgattcca

SEQ ID NO: 23233 - DNA, 693 bp, Setaria italica
  Peptide Sequence Number=SeqID_89207
acctgaaagacagggaacaattgccatgccccaatatgctgatccatctcctcttgtttggattccttgcataatattagtcagtgttttgccaacttgtgtatgaccagagagacaaaaaaggcttatctttcacggtttgcctatagttcagattgcctctagcttaagtattgttcccaggaaagagccaccaaaagaaggtgaactcgagcaatactaatctgacaaaatgaacactggtaaacaggcatctggtagagcgctgcctgttgcgtaggaagtaccggtgggaaacagggggtcgaggcttgaaggaagggcgacggggaggcgccgtgctgttcgcacggcgtcgagcagggagacgaggaaaacgtgggaagctgggcaacgatatctttctgatatgattgcttgattaatccctagtacaattgggtttatatatcacccctaaaaagagaatcctaactgattactccttggccaagaaaggcctgaaccaactctatctctttcttatcctaatccaactctaactgggctcatccccttcaggcgcctgggcctgctgctgctgcctacgccccctgtaggggatgcccaccataacacatctccgtaatttacagtcctacatacatggtttgagaactataaatcctgaggaagtgatttttacatactgaa

SEQ ID NO: 23234 - DNA, 646 bp, Setaria italica
  Peptide Sequence Number=SeqID_89208
caagatggagtcactgccctctggctgggcgctggtggaagcggcggtgacggcggcagcggcgacagccgaatcaagggactcggcgctcggcatctctaataccagattggtagagcgctccctgttgcgtaggaagtatcgatgggagacagggggtcgaggcttgaaggaggggcgacggggaggcgccgtgctgtacgcacggcgtcgagcagggagacgaggaaaacgtgggaagctgggcaacgataactttctgatataattgcttgactaatccctagtacaattgggtttatatatcacccctaaaaggagaatcctaactgattactccttggccaagaaaggcctgaaccaactcactctatctctttctgatcctaatccaactctaactctatctctatcttatcctaatccccttcaggcacctgggcctactgctgctgcctacgccccctcgtaggggatgcccaccataacacatctccgtaatttacagtcctacatacatggtttgagaactataaaccctgaggaagtgatttttacatactgaactatcttcctcttgtgaaagaaaaaattagtctgtgctatgtagcaaacttcaggcctcatatggagaagactagacccc

SEQ ID NO: 23235 - DNA, 898 bp, Setaria italica
  Peptide Sequence Number=SeqID_89209
agaagtctgtgagcatggtgaccagcgttggagacggaaatagtgggtcgctcgggattcctccgtcctaatggggaatgggtcacatgcttctgttcatgatgttggtacggtagatttgaagtttacttcaggaaagatcgtgcaactgaagaatgtgcagcatgtcccttctatcaggaagaatctagttagtggctcccttttgtgtagggatggttttaaggtagtgcttgagtctaataaaattgtcgtgtctaagagtagacaatttattggtaaaggctatgagtgcggaggcttgttccgcttttccctttcagattattgcaataagtctgtgaactatatttgtgatggtattaatgagagtgatgctagtgtttggcattcacgtttatgtcatttgaattttggttctatgtctcgactttccagcctgtgtttaatttcaaatttttccattgtcaaaggttttaagtgccatagttgtgtgcaatctaagcaacctcgaaaacctcacaaggtggcagaggagagacacttggcaccacttgaactaattcatactgatatatgcgagatgaatggtgtgttgaccaaaggtggaaaaagatatttcatgactctgatagatgatgcatctagatattgctatgtatatttattgaaaatgaaagatgaggctcttaattactttaaaatctataaggctgaagttgagaatcaacttaagaaaaatatcaagagaattaggtctgatcgtggtgacgagtatttctcttatgatttcgacttgttctgcgaagaacatggtattatacatgagaggacgcctccctattcaccccaatcaaacgggttgccgaaagaaagaatcgcaccttgactgacttgg

SEQ ID NO: 23236 - DNA, 317 bp, Setaria italica
  Peptide Sequence Number=SeqID_89210
ccgtgctccatgtagccgccgttcggggaggtcgacaggttgctctggctcttgagctccctcttgaggtctcgcatcagaagcttctgaatcctgtataggcgatggagctcgtgaacttgctgtctgaaagtctcttcatgcttcagcatggccaatttcagcgtgtctttgtcgcagtgcctgaatacttgctccatgggcattgtggaattttgttcttctctctctctctctcttccaacctagtgtaactgcttgatgtcagagaagtgactcacgaactgtatcctacttagctctaactactccttggc

SEQ ID NO: 23237 - DNA, 1013 bp, Setaria italica
  Peptide Sequence Number=SeqID_89211
ccgtcccggtggttggccgccgcccgcggcgccggctccctcgatctcttctcgctgcagcgccggcggagggcacggggctcgggatggcaattcgcgtcgtcctcctttctccacagcgcgccctgggcgtactggatgaacacccccgacgggatggtgtggacgctcatcggcgtgaatgtggccgtcttcatgctctggcgtgtggctgatccggggttcatgaggaggcatttcatgatttcactggacaatttcaagagcggacggttgcacaccttgctcacgaatgctttcagccacgcagattctaatcacctattttccaatatgattggcttctacttctttgggacaagtattgcgagcacatttgggcctgcatttctgttgaagttgtacgtagctggagcacttggtggatcggcattattcttgctagagaaggctttactagctccacgcaaacaggcttatgctggatgggatacttcaagagcccctgcacttggtgcaagtgctgcagttaatgcaactatcctccttcagattttcctgaatcccaagggactagtctatttttacttcgtaattcctattccagctgcacttatgggggctgctttgattggtgctgatttatatagggtcaagaaggggcagggcgatgtatcaggttcagctcatttaggtggtgccctagttgctgctcttgtgtgggctcgaattgcgaaaggctggatctgatcttctagcttttatataaatggaccaaaagtgcaaaggcaaccatctgcgcccaccttgtggccccttttgggttgaaatttgcatttgttgttatctgacgactcactgataattgagggatggctgaacatgctacttgctgccccggatgatgtcgtagcggataattggatatttgtcaatgctggctgaatatttttataattttattccggcaatggccgtccttaagcgaaaggacccgatctcagttggcacga

SEQ ID NO: 23238 - DNA, 393 bp, Setaria italica
  Peptide Sequence Number=SeqID_89212
gaacatgactgtacacacagatcttctacagagctgttcatctcgcggagccaaaccaacatgcctcctcccttccaagaacttgcaagcgcatgctatgttcttgtccaaaacatcaggttcagttaatttggtaccagttcaattgtcacttgtcagtcgtcatcgcatggaaggagtgttggtatttggccgttgtccacaaaatcaactttgtttagccttacactgcacaatacatgttcaggaagctcttcctgcttctgggcctgtatggttagaccgagatcaattactccatgtttcaatcgttctcggaacgcttcaagccctttccttgagatgaagctaaaccggtgtacatcaaggtcgatctccaagtaatttgatccc

SEQ ID NO: 23239 - DNA, 269 bp, Setaria italica
  Peptide Sequence Number=SeqID_89213
aggggcttcttcggggcgagcaacatcgagaaccatgccgccgctctccatcacgggagggggagggtttggatcttgatgctgctactccaggaacaaacagcgcattactctatccgatatttgttctggtctactccacctgcagatccgcggagtccaggcgctggaggagggcgcgaatcgtggtgccggagaaaggcgggggcggcggccgccgcgttggcctcgggcggtgggcggcgccggcggtggatctggattgggga

SEQ ID NO: 23240 - DNA, 358 bp, Setaria italica
  Peptide Sequence Number=SeqID_89214
accttggcgaaggtgccctgcccgatggtgcgccccacctcgtacctccccacccgcttcttccgcgccgccgcgctcgccattcctcgggcctctcctggcgtctccccacgcgcccgtcaggtgtccgggggctcgggttcttgctgccgtgcgtctgcgcgccagcgcgggcgatgcggtgcgatgtgacggctcgaggtgggactggaaggtgaggccggggacggggacggggacggggacggggacgggggttcgcgtcgcgtgcggtgagaactggtcggcggggtggtcgctggctggctggctcgacgctgtatatagaaacgacgagcggcgccgtcgcgcccgtcag

SEQ ID NO: 23241 - DNA, 280 bp, Setaria italica
  Peptide Sequence Number=SeqID_89215
agaagcaccaatttatgtgaatgctaagcaatatgaaggcatcattcgtcgacgccgtgcccgtgccaaagcagagagggaaaataggctggtgaaagccagaaagccatatctccacgagtcacgccatctgcatgcactgcgtcgtgcaaggggctctggtggacgtttcctgaacacaaagaaagagtccaatgggaaggatgctggtggcgacggcaaggcaatgatcagcaagccgcttatgcgccaggtggcatctccaagttcagagatccag

SEQ ID NO: 23242 - DNA, 375 bp, Setaria italica
  Peptide Sequence Number=SeqID_89216
attcggtttcaggtaaaggggagaaaggtgcagagtactctgccactgttgctttgccatcaccgttcgcaatctacaatggtcgttttgagctgggccttggtcaatcaatggtttctgctaataatccttatgctgaccaacactatggcctgctttctccttatccagtgggagcaacgaatggaggatgcacgcgtataccactgaatatgccaacagaagcaccaatttatgtgaatgctaagcaatatgaaggcatcattcgtcgacgccgtgcccgtgccaaagcagagagggaaaataggctggtgaaagccagaaaggtatctcgcacatctcaaattattaattgaactccttaattgttacctt

SEQ ID NO: 23243 - DNA, 327 bp, Setaria italica
  Peptide Sequence Number=SeqID_89217
tcctcgggggccgtcccgtcgcagaagcacgtgctccaccgcgccctgggcctcctcgcctccgtctccgcttccggccttctccagcgcgggccagcgctgctgtggaactgcaatttccaggcgcagctcgcgtccgctctcacagtcgacggggaccccacgtcggcgctctccgccctgtccacgggggcagccgccgccgccgagctcgggaatccgcagctcgagctcttcttcgccgcttcctcgatccacgtccacctcctctgctgggaggcagcgccgcggttgagaactccgtcaatcgcgccacgcagctatggg

SEQ ID NO: 23244 - DNA, 670 bp, Setaria italica
  Peptide Sequence Number=SeqID_89218
tcgagttctctcactgcgcccagcccgcgtcccactccactccactctccaccacgccacaagccacacacccagacactccggacagaggggcagcagcacagccgcacaggcacgagaaacagctcacagtcgcggcgagctcccgggtctccagcgagagagcaggagggagggggtggccgccggcgtggactcccgcccggggctctccgcggcgcctcggcgcaatgctggccttctccgggggcagatcgggctgagccgcggccgcggctctcgaatcgccgccgccctcgcgtggttccggccggaggacggatcttgcggcggaggacgcgagaagggggagtgggaggcggccgtttcttgatttttctgctagccgaagaggattgaagttctgatgggaaagcttgtacagtagtactgaatccaattcttttccagcaagtctcaaccatgcaacatcttacagtgatagccttttgtggctgcttctcttctctttgcaagcattcctcatgccaaaagtgctgatctcaactctgataagcaggctcttcttgcatttgctgcatcactgccccatggcaagaagctcaactggagctccacaactacctgttcttgttacctaccttgggttgggggtttgtacttatttgtt

SEQ ID NO: 23245 - DNA, 968 bp, Setaria italica
  Peptide Sequence Number=SeqID_89219
ggtagctccagttgccaaagtgaattattctgggttatgcaagtactagcataggtaggtacagtttgggtagctctcaatgctgccccacagttctgtttaggccgtaagtgttgtacaaggtacactctgttgtttagtgttctaatgcagtaactttttgtacttttagtgtgtcacagttctgtttaggccgtaagtgttgtgttttgtgatggaatacctaacatttatttactgaatcggggagtctgtttatgaaatgagctaaaatggggccttgatttggaactaaggagagatgctactgacaggctgttagtacaagaaaatgtctacttcctgcctatctatttgaagatctcttttgtattttgggggttaaaatatctgatgtattattttctacaacatttcccagatgcccatcttttcaaaattctcagattcttttgatcgtctttatttttctcattaggaagctagcgatgaaagtgtgtcagaggtcaaaagtttgtgcatcatgcatcatatactgaattctttcttttatatgaaatatgaatatgaaaggctatgttgttgtatatgaaatatgaatatatgatcttgatgttatgcgctgtttcactaacttctatttcttttcttgtgctgctagaggattgaagttctgatgggaaagcttgtacagtagtactgaatccaattcttttccagcaagtctcaaccatgcaacatcttacagtgatagcctttgtggctgcttctcttctctttgcaagcattcctcatgccaaaaagtgctgatctcaactctgataagcaggctcttcttgcatttgctgcatcactgccccatggcaagaagctcaactggagctccacaacacctgtctgtaccacctgggtgggggtgacatgcacaccagataagagccgtgtacatacactacgtctacctgctg

SEQ ID NO: 23246 - DNA, 1110 bp, Setaria italica
  misc_feature (1105)..(1110): n is a, c, g, or t
  Peptide Sequence Number=SeqID_89220
tcaagagactgaaggaagtggtggtgagcaagaaggactttgaacagcagatggagataattggcagggttggccaacaccaaaatgtcgttccattgcgtgcttactattactccaaggatgagaagctattggtgtttgactatgtcccgtctggtagcctcgctgctgttttgcatggtaacaaatctgctggaagagctccattggactgggagacaagagtcaagatatcgcttgatgtagcccgtggtattgctcatcttcatgctgagggaggtggcaagttcatccatggcaacatcaaagcatcgaacgtccttctatcacagaaccaggacggttgtgtatctgagtttggcttggcacagctcatgaccactccacaggctgccccacgtcttgttggataccgggcaccggaagtccttgagaccaagaaatcaactcagaagtccgacgtctacagcttcggtgtcttgctccttgaaatgctaactggaaaagcccctctcagatctcccggccgtgaggattccatcgagcaccttccaagatgggtgcagtctgtggttcgtgaggaatggaccgctgaggtcttcgatgtggacttgttaaggcatcccaacgttgaggacgagatggttcagatgcttcagatcgcaatggcgtgcgtggccgctgtccccgaccagcggcccaagatggaggaggtgataaggaggatcacggagatccggaactcctactcttcggggacaaggacgcccttggaggacaagccggagactgcccaagcaccatgaggggtacagcatagtttagccagagacggtaactaggttgcatagtgagttgcttatagagcttcagcaaagttgatagcgtcctgcgtagcgcagtttctgttcgatccccggttgtttccagtaaatctgttgtgcatttttttccttattctgattgataatccgtgccattgtatcgttcagttaaatcagtagctcttctgattttcataggataatgttgctctgtaatttgacataatatctgcagcgtgattaatgaattgaatttcccttcttaaaaaaaaaaaaaaaannnnnn

SEQ ID NO: 23247 - DNA, 593 bp, Setaria italica
  Peptide Sequence Number=SeqID_89221
ccttcttggggaatgcttttctgtgtggatttcctttggatccatgtccaggaacggcaccttctccttctccagtatcacccctagcacccagtaagaccaagaagagcttatggaaaagatcaaaactattgtgataattgtaattgctgctgttggaggagtattgttgcttattttgattctcatgctcttgatatgtattttcaagagaaagaagcacactgaacctaccacagcttcatccaaaggaaaggctgttgcaggtggcagggcagaaaatcctaaggaagactacagcagtggtgttcaggaagcagagaggaataagttggttttcttcgagggcagttcatataattttgacttggaagatttactgagagcttctgctgaagttcttgggaaaggaagttatggaaccacctacaaagctgttcttgaggatggcaccacagttgtggtcaagagactgaaggaagtggtggtgagcaagaaggagtacttacttagttcttagttttggtttttgttttttctttttaggtttttaagtttttctttttagttttttagttttttaggttttttaa

SEQ ID NO: 23248 - DNA, 2337 bp, Setaria italica
  Peptide Sequence Number=SeqID_89222
atgatctgtaactaaccaaacaagcagctacagatcatgacaaataccctataagaaaaaggcatataaacgcccattggaaaatgcaatgtattatgttttctatacaaattcccttgcctttgtacctgtttttccacttgtaaactgaacttttatactgttctcttgactctaaaaatacaaaccatgtattcacttatcgttgactcttgtcacccggcaatgtgggaggagtgatgcactgatggagactcttggattataactgcattttccccttattcctcctgctgttcctaacaatgtggcatctgaggcttatagctattttttctgctgcgcttttctttacgcatcttccatgtgctaaaggtgctgacctgaactctgataagcaggcccttcttgcatttgctgcatcactgcctcatggcagaaagctcaactggacctccacaacacaagtatgcacatcgtgggtcgggattacttgcacgcccaatgggaagcgtgtacgtgaagtgcggctacctgcaatagggctctttggtccaataccatcggacacacttggcaatcttgatgcactagaggtgttgagccttaggtcaaatcgccttactgttaatcttcctcctgacgtagcatctattcctgctctccattccctctatcttcagcataataacctgtctggaatcataccaacttccctctcttccagtttaacattcttagacctgtcgtacaacactttcaatggagaaattccgttgaaagtgcaagatatcactgaactgactgcattgcttctccagaataactcactttcgggacccattcctgacctccaactccccaaattgagacatttgaatttgagcaacaataacctcagcgggccaataccaccttccttgcagaagttcccagctagttctttcttgggaaatacctttctatgtggatttccattggaaccatgtccaggaacggcaccctctccaatatcaccatcaccccaaaatggcagaagaagcatatggaaaaagcttagccgtggtgtcattattgcaatagctgctggagtaggggccatagtattgcttttgattatcattctcttggtatgcattttcaaaagaaagaaagacgcagagcctggcgcggcatcatcttcatccaaaggaaaggctattgctggtggaagggcagaaaaatccaaggcagaatacagcagcggtattcaagaagcagagaggaataaattgtttttcttcgagggatgttcatataatttcgacttggaggatttgttgagggcttcggctgaagtccttggaaaaggaagttatgggactacctacaaagctgttcttgaggatggcacaacagttgtggtcaagagactgaaggaagtggtggcaagcaagagggaattcgaacagcagatggagctaattggcaaggtttgccagcatcagaacacagtcccattgcgtgcttactattactctaaggatgagaagctcttggtgtatgactatgtcccattgggtagcctttctgctgctttgcatggaaataaagctgttggaagaaatccattggactgggaaacaagagtgaaaatagctctgggcactgcacgtgggatggcttatcttcatggcgaggtcggcgggaagttcatccacgggaacatcaagtcaagcaacatcctcatttcccaggaactcagcgcctgcgtcaccgagttcggccttgcccagctcatggccccgccccacgtccacccacgtctcatcggataccgctcgcctgaggtcctcgagaccaagaaaccgacgcagaaatccgacgtctacagcttcggcgtcctgctcctcgagatgctcacaggtaaagcccctctgagatcccccggccgcgaggactccatagagcacctcccccggtgggtgcagtccgtggtgcgagaagagtggacgtcagaggtcttcgacgtcgacttgttgaggcatccgaacgtcgaggacgagatggttcagatgcttcagatcgcaatggcatgcgttgctgttgtccctgacgagcggcctcggatggaggaggtggtcaggaggatcgaggagatccggaactcctactcggagacgaagacctccccggaggacaaaccaagggagggatccttctgatcattcatcagtagcacagcaataacatggcatcttagagaaagaaataggtttgacagctctgcattgtgtgtgtgtgtgtgtgtgtgtgtgtgtgaacctttgcagttgattcctgatcattctttggtaa

SEQ ID NO: 23249 - DNA, 552 bp, Setaria italica
  Peptide Sequence Number=SeqID_89223
ttgctctcaaacaacataagaaacattccacagcagagttatccgctggagagagacaagtacagtcctaactgtggtcatgtagtagaagtacaatcaaaggtgaagaggataatacaactgtgaaacaattcaaaatgttcagggcattcgccatcatcatcgggaaaatttcaaatggaaacagaaacaacatcatagtgttcagcccgtgttccatccacaccagaagttcgggaccacacatcgcaaccatcttattggaagcaaatcagaggcagcctagggttcggggtgacctgagacgcgcggatcactcggcgtgggcctcggcggcggcgagctcctgctgctggaggcgctcgagcgccttctggtgcgcccaggtctcgatggtgaggtcgggcttggcgttgagcccgacgccgaggatgacgacggtgaggaaggaggtgacgtagcagggaagctcccagtcctcccacatgcgcgactcccctggcggcggcggcggccggttgaagaggtaccccttgggctgctcctcgtcgg

SEQ ID NO: 23250 - DNA, 475 bp, Setaria italica
  Peptide Sequence Number=SeqID_89224
tgcagagattggactgaatagagcacaatgtcatcatccagtcctctaagaaatgtgtcctcgcagctcctaacctgaatacttcttaggggatgtagcttttgaaggtcagtaaatgagatgagtgatgcatcccaattcgtcaaaccttctacttcaccaagattgtggaaggccaattcaccgggcatcttataaatggacaaatgtctcttttcatagcgcaagctgtccgttcggaaagaagatagcatgcgagtgtgaggaaggggaggcaaggacaacttcgggcattctttagtggaaagataacatagattagggaaccatatggtgttgtcctgtgtagaagaactagagcaccttgagaacggtagggcagtgagctttggacaattagagcactcgattctttcaagccttgagaacaaatgtgtgttacctcccccaatccactccacaagttctggcatat

SEQ ID NO: 23251 - DNA, 398 bp, Setaria italica
  Peptide Sequence Number=SeqID_89225
ctggacctgtcccatcacttctccttgatcagatccgcacgatgagcttcaccttcactttcctcttccatcccaaccttgtccctcactttcgccttcactcccctccattctctgcctcaccatccacttcttcggagtggtacccgccggagcgggcgtgggcgtggctgcgggcgtcgtcctcctcgtcgtcgtcgacgtcgtcgtccagctcctggtgccgctgctgcggcggcggctgctgacggtggtcgtcgtcgacgacctcgacgacgtcgtcgtcgtcgtcgtcgtccgcgtcctcctcatcctccgactggtccccgaagaggttctgcatcatctgattccgcgtctcctcctcgacgtcccgctcccggttcgccgcccgacca

SEQ ID NO: 23252 - DNA, 255 bp, Setaria italica
  Peptide Sequence Number=SeqID_89226
ctccgggatcgtgccggagagcgcgttgcgggagatgttgacgatgctcatcgccggggagtcgcagacgttgtccggcaagctgccgttgagcccgttcagggaggcggagaaccggtacagggtgcggaccaggccaatgctcccaggtatcacgccggagaagctgttgttgtcgagctggacctgctcgagccgagactggccgccggagaactccggcaaccggccggtgaaccggttgttctgggcccg

SEQ ID NO: 23253 - DNA, 353 bp, Setaria italica
  Peptide Sequence Number=SeqID_89227
ctgaactgggaaataaactatcatacaaatgcatgtagcagttagattggcagtttctatattcttaatatgtatggactggatgagcaacccaataagcatgttcatcaactcaataagcaagcttttactgatattaagtctgaaaatgagctccgcggtttctgtgaacttaatggcccaaataattagctgaggttgttgcagtatttaatctgataaccaaaagatgagaaatttttatccttggaagctgtgagctggttgatttagatcttctatttgatgttggttattgatatcacaataatagaagatctaaatcaaccagctcacagcttccaaggataaaa

SEQ ID NO: 23254 - DNA, 413 bp, Setaria italica
  Peptide Sequence Number=SeqID_89228
gggggagtccatggtcagcagcggctcgtcggcggcgtccgccaccaggaccgccgccgcgcctgccagctgcgcgttccatgtcttgagcgcgaagtagcagccgccgcggtccacgaggaggaccacggggcggcccgacggggaccggaacttcttgtcgccgaacgggccgcagcccgtggcgagcttcgggtcctccgggtacatcaccacgccggtcagcgtgccgccgtactccgggacgccgtagttggcgatcgcggcctcgtggtgcccgcgcagcgagcgaggggacagcaccgtgacgctgttcttctcgacgatgaaccgcgccgacgccaggctcgccatggacactgccagccatgcccacgccgcggcggcgagcctcgtcctctcgtggccgtgga

SEQ ID NO: 23255 - DNA, 445 bp, Setaria italica
  Peptide Sequence Number=SeqID_89229
aggacaaggacaaggacagggggcagcaggaccactacggcatctttgccatccaggacgccattgtcagggacattggcccttacaagaatctcgtcaggttcacctccagctcctccttggacttcagaggattctccagctcccccctgctcaccaagctcagggggatgctagaggcgctgcagcaggtggatctacggttcctcaaccaccagcagaagctggcattctggctcaacgcctacaacacctgcatcatgcacggcatcctgcagcatggcttgccctcaaactcggaaaagttgcttgcactcaagaacaaggccacgatcaacgtgtcaggccagaagttcaacgccctggtgatcgagaattcatcttgaggcagccgtcaagtgtagaaagaagaattctggaaatgcgatgtggacgtggaagagca

SEQ ID NO: 23256 - DNA, 252 bp, Setaria italica
  Peptide Sequence Number=SeqID_89230
ggcagcggggaaacgcggtggtgaacgacgtgccggcggcgcaccccaccaccggggacaacgtgctctccaccgccaccatcgatttcagcgactgatgttaagacacacgcacacacacacactctctctctctctggcgtgtatacgtataggcctggctgtatgtctgtgcatgtacactcactttttatcgcggttgtcactttcacctatataagtatcccagtaaataattgttcccatgtgtcg

SEQ ID NO: 23257 - DNA, 397 bp, Setaria italica
  Peptide Sequence Number=SeqID_89231
tggaacatgggcacggtccacaggtacgtgggcatggcggtgatgtcgtacgcgagcaccgtggcgatggtgttgaggtacgcgccgcggtggttgtagaccacgcctttgggccgcgacgtcgtgccggaggtgtagttgagcgagatcgggtccagctcgttagccggccaccggatgtcgaaccgcgcgggggcgttcgtgacgaggtcctcgtagtcgtcagactcggcgtcgtctgagatggtcaggagaaccgggagggcggcgctggactcggcgtcggcaaggcgcttcagcgcggctctcccgacgtcgaggaggtttgactcgacgaggaacaccttggcgccggagtgcttgagcaggacggacaccatggccgcgtcgtgccgcg

SEQ ID NO: 23258 - DNA, 472 bp, Setaria italica
  Peptide Sequence Number=SeqID_89232
caattaaactgagccaggagcaaccttgtccaagcacctcaaggagaacccatccatttctaaggtcttcaaacacgttgttgatgtaagtggaaattccaaggctattaatccacagccggaatgacctttcttccctggaaacttgagcatcatcagagagtccatccacaaaagaaacttgtttcatttgtttggacaacccatttcttttctgaaaaatatgagctacaaaggcaagatttagatttggtaagccatcaactatgtcttttggagtcaggtatcttttgcagcccatcctatctgcatgctcaaggactaatcttgctctatgaagcaagtcttttactgacattgccgatggttttgcactgcattcaggtgccaggacattcaatagacaagcatacgcttcactgtcttttatatctgatgaaaagtttgttactgttctctggaaacctccttt

SEQ ID NO: 23259 - DNA, 251 bp, Setaria italica
  Peptide Sequence Number=SeqID_89233
agtagtagttttctgggcggcgccctcttcccatcaaacaaacaggcggcaggcgatcccccgcccccgccggcattcccacgacaacacgccgcgcggcacagctcaggctcagctcggccccccatttgttctcgcccgccgactgccgtgccgccgcccgcttccggccgcccccgcctcaatccgtccgcccccgccgtcaattactcaattactccaccaccaccagcaattcctttcgcttcacc

SEQ ID NO: 23260 - DNA, 661 bp, Setaria italica
  Peptide Sequence Number=SeqID_89234
ctctatgaatttattcccagaaaaacatcataagttcttctgtaaaccactggagaggcccaggaatgaagctctaccagagcctagcagacgccatcttgttaggaaggttatcagggaatgctggagtaaatgtggttgtaacatgcaatgcggtaaccgtgtggttcaacgtggtatagcttgcaacctgcaggtgttttcacacaagaagggaaggttggggcctacgcacacttgatgaacttccaaaaggagcttttgtctgtgaatatgttggcgagttgctaacaaatacggagctccgtgaaaagacatctcaaaaagcgtgcaaggctgggtatacgtacccggtggacttggatgctgattgtgattcagagggggtgttgaaggacaaagaggctttatgcctggatgcaacattttatgggaatgttgggagattcatcaaccacagatgctacgatgcaaatttagttgagatccctgttgaagtggagacccctcatcatcactattaccatcttgcacttttcacaaacaagaaggtggaggcatttgaggagctcacatgggattatggcatcgattttgatggtgataagcatcgtggcggaacatttcaatgcctgtgcggaagcagatactgccgcggcag

SEQ ID NO: 23261 - DNA, 493 bp, Setaria italica
  Peptide Sequence Number=SeqID_89235
acccaataccgataaataacgacatcccttagccttctttagcaaaattgcagatgattctgaagacactgtgtgctttcttggcattgatcttggagctttttggagcctatggagatggtgaatttaagtggaactatggatatccttacattgctgttgtcataaatttcagccagacatgggcgttgtactgtcttgtcaaattttacaatgcaacgcatgaaaagttacaggcaataaggccactagctaagttcataagctttaaggccattgtatttgccacttggtggcaaggattcggcattgcaatcctatgccaaactgggctccttcccaaagagggcaaagtgcagaatgcaatacaggacttcctcatttgcattgagatggctatcgcagctatagcgcatgcctatgtcttcaccgtggagccgtaccagcacatccctgtacttgatcatgggaaagtcgcatgtgaggaaagtaa

SEQ ID NO: 23262 - DNA, 497 bp, Setaria italica
  Peptide Sequence Number=SeqID_89236
gctctccattctaaaaaaaggtagctcccttgctctgcatccaagagaagcgtttgttgcagaggctgctggatgtggaatgaagcgatggcacctgatggaggatcctctaccttccgggggttgtacggcaacatccacaccccggcagtggtcactggcgccgcgtttgcggttgtcgctctcctcatctcgctctggctcatcctgcagcacctcagatcgtacaacaatccagccgagcagaagtggatcatagctgtgctgtttatggtgcctgtatatgcctctgaatctgtaagtgcaagctccacttgttcatatgcctatttcaggcagagaaatgctactagtagtactaggtttgcatgcaactgcaaactattttgacaaaatgttaagtgtacttcactgcttctcgaacaaaatgttatggactttttttgctgtcttgcttctgttggttgacgtatatcccattcatcaagattagtcat

SEQ ID NO: 23263 - DNA, 3808 bp, Setaria italica
  Peptide Sequence Number=SeqID_89237
cccattcatcaagattagtcattccacatttatcaggatgctttcattttggatatcctcttttcccttatacttcaaggtactgacactgtgacacgaattggtatcccattccagttttcgattcttttcagataatttcactgtggaattcgaagttctctctggcttgtgatatattgcggaattgttacgaagcctttgctctgtatgcctttggacgatacttggtcgcttgccttggtggggaacggcaagtgttccggttacttgagaacagaaaaagggaagagctaagtgaacggttgctcgagagtcaagacaagacacaagctcataaccaaagtagagtgtggaatttctttcgtgaccctaatgctatgggagaaagcttgtacacaattattaaattcggtcttgtgcaatatatgattctgaagacactgtgtgctttcttggcattgatcttggagctttttggagcctatggagatggtgaatttaagtggaactatggatatccttacattgctgttgtcataaatttcagccagacatgggcgttgtactgtcttgtcaaattttacaatgcaacgcatgaaaagttacaggcaataaggccactagctaagttcataagctttaaggccattgtatttgccacttggtggcaaggattcggcattgcaatcctatgccaaactgggcttcttcccaaagagggcaaagtgcagaatgcaatacaggacttcctcatttgcattgaggtaatcttgtcacctctttgtgaactaccttctcctctgctacttcggtgaaactctattgttattctcctagatggctatcgcagctatagcgcatgcctatgtcttcaccgtggagccgtaccagcacatccctgtacttgatcatgggaaagtcgcatgtgaggaaagtaaaatggaggtgaaggtagatgtcaacgatggcaggagcagtacaccaactatcattaaacaggaggatacccatgtcgaagctccgggtacaagcatcaaagagagcatgcaggatgtcgttcttgttggtggccaccatgttgtcaaggatgttgcccttaccatctcccaggcaattggacctgtggagaaaggtgtcgagaaaggtgttgggaagatccaggagaagttccaccacatctccctgaagccagggggacaaaaaaggacctgaagttgatgttgaggagcacgtcactgagaacgtagtggacggcaaacctgtcagggttgacgcagaggttgaagtcgaacaaaaggtgcaagatgacagtgaggatggcaaaactgctgtgattgaaaccgagatggaaatccaaagaacgggaaggataatgaagtgtagccatccttgttatgtacggattactgctcactcgaaaacatcagaagtatagcataaagcttggtaggaactggaaagaacatgtactcttccccatctgttctgggatttattcgtcgggtgtcttttaatacagtgattagagttacatccaacttgtgggttcattgctgaaagatgtacatacggataacaaaagcctttcttgatcaagcattcaagttagataaacacatgatgcccatcctatacagcaataatactttttacattaacatacaacacgatcacagagccttgcagctgtgccctcagtttgccccaccgcagcacagctccgagcagcactcgaagcatccaaggcacgcgatggcagcacaggcctgcgccatgacaatggcgcactgatcgttcatcttgctgcacgccttgatgaagcacatgcagcagaagcagtcggccatgcggctgcagcagccgacggccttatcgaatatctcaaacctctcgtgtacttcgatgtctccgaatcctgccgtcaggttctcccttgttgccacaacatcaccgaatccgagtgtcaggccacgaagcggcatcgctgaccgctcatctgggctgctttgttttgttggtttgttcttggcctgttgtgctggatctattttgtccaagttggtttgaagtaggaccattcgtgtgtactcagaaggaagactattttgtatgcttaatttcacaacctttctctcgagctccttgttctccaaaagccatgcttttgctgtgagtagatccatctgttgttttgccaacactttgtcaagaggtatatcctttacatgttggactttcaattcaattgatatttcactcatatcagccaagtgacccttggcgataagggtctccggaagcttgccatgataccttccagaaacacacagtggatattttgcagaaatgtctggaatatattcagaatccacctcaaaatcttgaatatgctttatggcatcaatggaaatatttgatactactgtgcttgaggctttctggaaccattgaaccattcgaccctcaattgatcctgtatcaaatgcagcggcatagtgacccttaccgattgatgccaacatcctcaagaaatagtggttgcaatatgaacctagtccaaaagtagaaatgcgaggagacttagatcctctattcatgagctgagttttcacagtatggcagatattccgttcatcatcgactgacccatcagtaacaagatatatttgtggaagagcatcatgagaattcgacagcaaggtcattgcctcactcaaaggatgcatgatgtcagtgccaccctgagcaacaaagtttaagttcatccattctatagcactttctattgttttatcatttacttgctccaaacatgatgagaatgagtgaagctcatcattaaatgctattatgttgaaaaagtctccttgaataagatcagagagagcagtggacatggcattcttgacactctcaagtggctttccttgcatgcttccacttgtatcaacgagataaacaacagcctttctgaagacctttctgttctcattgtttccaggtaaaaggaaaaggcagaacatgtctctgtcatcatagtcacgcaatgttgagggctgcacaagaactccaccagacaaatcaccagagtaaacagtatatgtgaaggtaaaatctttggttgaccaattctcaacagcagcttcatgcaggaaagacaatttgtcaccgtgccggcctttttccttcaaggggtggcttgtcccctgcaatataacctctttactcacaccacaattaatagtcagctgtattttctcctttttcatgaaaacctttggcaaaggattcacaaactgcggaaaacaaaaaggaacttcaacagaaaactgcccattgctatatagcaacttctgtgaccacctgattgtggcaaaaatatcttctccacccccaacctctggtattgtcaaggaaaaccattcctgtttcaaaagacccccattctcgggcaaggaaatcttcacagcactgttatcctccgtatcaatgacatgagtattgtacgatcttttcccaacagtaacctcagcgcctagaattgaaccctggtgtcccatgggcacgacgatgcggcagtggcacgcccggctccgcgtgacgcagtgcacccaccaccgcgcgcggagggcgacctcggcggtggcgcaccccgcggcggcgcagtcgacgcggagttcgacctcccgcatctgcagcgggatgagcgcgggcgggtcgaggcggccgtagacgtggggctggtagctgggcacgtcggggctgtcgacggcgcccgggtcgacgacgacggcgtaagccatgg

SEQ ID NO: 23264 - DNA, 273 bp, Setaria italica
  Peptide Sequence Number=SeqID_89238
ggcggggaggcgaaggtcacgccggaggtgggtccggcggcccaggaggaggaggaggtcgacgaggagcggtggtcgcgcctcctgccggagctgctcacggagatcgtgcggcgcgtcgacgccggtgccgagcggtggccgctgcggcgggacgtcgtggtctgcgcctgcgtgtgccggcggtggagggacgccgcgttctcggtcgtgcggccgccgctcgagggcgggaggatcaccttcccgtcgtcgctcaagcagcctggacca

SEQ ID NO: 23265 - DNA, 326 bp, Setaria italica
  Peptide Sequence Number=SeqID_89239
tcccggtagacctgtcacggcgtactgcctcttcatgtcgcaggtggcaggcacggtggaggacgtgaagctcttggttcactcagggatcgtggaacacttcctcgccagcgacgagcaggtcgctcaagacttcgccgacctctgcaagggagtggtcatggacgtcgacaacatcgacaggaactacctcatgcccatgtggcacgagatgcaggagcgctgcgagaaccgcgtgcacaggttcatgggatggttctgccagtttaagaacttagtgatcatcatcgtactactagtggctctcatcatcatcgcatgtcaag

SEQ ID NO: 23266 - DNA, 252 bp, Setaria italica
  Peptide Sequence Number=SeqID_89240
ccacgagcggcgcgacggcagcggcgccacctagccggctcatgctcagcaccttgacttggagctgcaggaacttgacgtagtcgatgatctcgtccagcatcgacgccttgtccgtcttgttggcgttgggcaccagctcctgcagggccttcatcctctccgcgatcctctccctccggagccgctccgcgatgctgtgggggtcggtggcctggccgcgccgcgcccgcacgcgctgcctgggtggcg

SEQ ID NO: 23267 - DNA, 672 bp, Setaria italica
  Peptide Sequence Number=SeqID_89241
tcccggagacattaccaccgattgcatacacgctgccgccggtgcgaggcaagatctacagcttgactaagtccgggcacattctcgggttggacatgacagctgcgaagagttcacttatccagcgcccagacaaagtaaggactgacaacttcatgctgtcatttggagaggagggttctaagctaatcctcatccacgctgaagggtatctgctcagcatctggcagcttgcgacgaccaggagcgactcaaatgactgggtgctggtgtatgacaaaattcgtgtgcatgaggcgtggaatcgtcttgaggatgttatggtgatggcagctgatgacaatctcgagtttgtgttcctgtggctgagatcaagtgcggttctcatgcatatgcacctgaagagcaggagtgagaaagtatatgacgaattcaaggtacgtgatgggcgcttcttagatatcaatccctttatgatggtctggcctccagtcttcccagcattgagggaagaagacaatgtggagggatgatttgccttggtatgaccactccttgtatgtatttccttcactgcctatgacatgaaaagatttgagtgggcgatagtcatgtcttctctgctggttgtaaaatgcttgtgatagtatctgctgattcagaatacattaa

SEQ ID NO: 23268 - DNA, 1121 bp, Setaria italica
  Peptide Sequence Number=SeqID_89242
gggtcagaatttatgagtcaaagtattatatctccacatatgagaaagaggctacagtacatgaatcagtactgcaacttgcaaagctaaactctaatattatgcaattgcatcatcaacaagaattggaactcattacaagatggtggaaggatctagagattgaatcaaagcttccatttgcccgagatagagttgttgagtgctatttttggatattaggagtatatttcgaaccatgctactcacgaggccggataatattgacaatggtgatttctattgccaccatatttgatgatatgtttgattcctacggaactgtagaagagtgcgagttactcaccaactgcatagaaagatgggatagaaaattggctgacgatctcccagagtgcatgaagcatgcgcttgggaaaattttggatagctatgaaaccatggacaatgagctggcgcaggaggagaaatatcgcatgccctatctgaaaaacttcacaatagatctggtcagaggctacaatgccgaggtaaaaatgcgtgaagaaggatacatcccgagaactgtaaatgagcacctacaagtttcgttaaggactggtgcatgtcacctgttggcatgcgcttccttcgttggaatggacgagatagcaacaaaggactcttttgattgggtctctaccatgcctaaaatcgtaaaagcactttgcataattttgagactattggacgatctacagacatatgagcgagagcaattgcaccctcatgttgcttcaaccatcaaaagctacatgaaagagcacaacgtctcaattgaaattgcacgcaagaagatagaggaactgaaagaggagacgtggaaatattttaacggcgagtggctgaatcctgataatgcagtgcctagttcgctattggagaggatattcaatttgaccaggacgatggagttcatctacaacctggatgataatttcacgaactgtcagaacctcagagataccatccacttgttgtttgtggagccctttcctatctcctagtgcaaataattccaacaaataaacagtgtgtcgcccagtgccagatgcccatgtccacttgtacaaagaatatgg

SEQ ID NO: 23269 - DNA, 389 bp, Setaria italica
  Peptide Sequence Number=SeqID_89243
acaaagtacaatcaaagaaggccatggcaagagacccttaaagtttgcgacgtgctttggtgagcaatggcataaatggtccgttccagtgcttgggatgttagtttctactttctagataagactaatatgctgcgtgagccatatattctattctattatattcatatcccgtttgtgtttgtttgcactgtttccccctcacaacaatttggggcaacatatataactttacatgttcatcaacttcgttctctttcgcatgattatgatcatgagatgctaatggccttgcttgctttcaatgcgaataacattttacttctgaatgggaatatgtaaacaagttctccatgtataggctgctctacaaacaaaaacagactaga

SEQ ID NO: 23270 - DNA, 722 bp, Setaria italica
  misc_feature (695)..(722): n is a, c, g, or t
  Peptide Sequence Number=SeqID_89244
taaggcgaaggacagaggatgacatcaagctggccaacagtgtcgatgttgcgtcccttcgccacccacagcaggatgcggagcgtgtcaagaaccccgagtggctggttgtcatcggtgtctgcacccacctgggttgcatcccactccccaatgcaggagactttggtggctggttctgcccatgccatggctcgcactatgacatctctggtaggatccgcaagggcccagcacccttcaacctggaggtgccgacgtacagcttcttggaagagaacaagctcctcatcggctgagactactgggctgtagtgttggccctatggcgctgtcattttgtgtttgatcgacaattaccttttttgttgcctggggtatacctttggtggactgttgtctatcggagtgcagtgttgttgctagcacctgacagtaatgaataacctgctgctacttaaaggatgctgttaattgttaagtttttgggtgctgtttcctgatctcaagaggaagggtcttgatcatgtaatacctttagctgttgtagtctattttattgggtttcgcctatgttagtaactcttgcggtattacttggggtccaaaaggaacgtcttgtagctatcatggtttctggaattatgatgaataatcatgtgaatgtttgttagaatggccattggctagtaaannnnnnnnnnnnnnnnnnnnnnnnnnnn

SEQ ID NO: 23271 - DNA, 685 bp, Setaria italica
  Peptide Sequence Number=SeqID_89245
cgattggcgaacgtgcgccgcgtagatttcggctagagactactccgcccgatcaggaggatcaggtgcagcccttggcgccgaacccgatcttctggttggccacgtcgtagaccacggcgaacgtcttctgctgcgtgttcccgaggatgccgatgctggtgtcgtcgccgttggacgcgaacgccaggcacgcctgcgacaccttggacacgtacagcaccccgctgaagtcgaggctcacggtgacgccgccggagaacaccagcgccaccgatgggatctgcaccgtcctgtgcccggtgaagtcgtagcacgtgtccaggagggacagcgcgggcgcccgcttgtacctgcgcatgaaccccgcgaacgacgaccggagcgccctgtacgcggtgtccgggaggcgggtgatcacggttcccgagtcgatcaccgtgccaggcgccttgagcacggccgcggggatgctgaccgtccggccggccaccttgatggcgacgaggtcgaggtagtagaacgatggcgtgtcgctgcgcgccaccatcgccgtgaactgcgcgttggacggcgcggcgccgccgagggacaggtaccccgcggagctcgacgacgagggcaggcagtatgagaaccccgcgccgtactttgccgccgcctgcgaggtcagcgagaccttcgg

SEQ ID NO: 23272 - DNA, 150 bp, Setaria italica
  Peptide Sequence Number=SeqID_89246
tcaaaaaacaaaaaggagtgggcacagcgatcggtcgaactgccaacctgaagctcacactctctggtgagtctccctcagagctagcttacgtccatcccatggatttccggcaattgctcggggccgtcaccttgatatccaccttct

SEQ ID NO: 23273 - DNA, 253 bp, Setaria italica
  Peptide Sequence Number=SeqID_89247
gagccagctaattgatggaatattagccttgaaatgttcaaccatttttctaaaccacttctcctaagttcttctgacagagagatctgatttgcaatagtggtatccagtctgtctgaatcagtagctgtgacatctacatcatcttgatgctctctgtctgcatccaagctgcttctctgtagcaaagctaatatccgtggatccataactttgtctttcagcatgtaggaaaaatttggatccagccctt

SEQ ID NO: 23274 - DNA, 412 bp, Setaria italica
  Peptide Sequence Number=SeqID_89248
ttgtggctagaactagaagtccttaattggaggctgcgacggggtcgaacggggtggcgcagagcatcagcggcgagcggcggcgcacgccgagtcctggcgcctcccccatgtcgacctcctcgacgccctccggcagcgaccagtcaaaatggtggagcaggccggcgagcccgagctccatgcttgccaacccgtagttgaagcccgggcacatcctgcgccccgagccgaacggcacgaactcgtagctgccgccggtgaagtcgacggagccgtcctcgaatcgctccggcttgaactcctcggcgtcgttccagtacctcgggtcgcggccgatggcccacgcgttgatgagcacgcgcgacctcgccgggatcgtgtagccctcgagctcgcactcgtcgatgct

SEQ ID NO: 23275 - DNA, 346 bp, Setaria italica
  Peptide Sequence Number=SeqID_89249
tactaattaattttacctaattactaagttaacctaattaactaattcccttctacttgtagttcttgacacaagctcatcaactgcagcattgactgcgcacaaattaaagcccttcctttggcaaaccgctctgtcgttccgggacattctgtctgagaatccttttccaattgtttagcaagggctgcatcctgccaagctctagttacagcagcagattcactaatctttgctcttggcttggtagaatcagtactattcacagattcatttcttgataacttgtaagagttatctgcatgtacagatagcagagcacttacaattgctacgattgtccttg

SEQ ID NO: 23276 - DNA, 1333 bp, Setaria italica
  Peptide Sequence Number=SeqID_89250
tttttttttttttttaccttaactaagtaagtttgtctattttcttcatgttggattttatgtacaacaatgtttcaatagagttcggatgcatctacagagtacatttcattccatggcaactggcctggtcacaatggtttccacgaggccaggcagagacgcagagtccattcattggatgaatctgaaactgaagaacacctggattacatcatctagggaaacgttgcaaagccttaaatttggatgcctagcgcttgcccacctgccttttgcctgctactctcctctggatattagcctctgatttaaggaactgacagaggattcttcgtcttcccttgtacgaactgcactgggctcactgtcactggcttcttcaccgagctggtcatctgatgccatcagaagctccttccgagcacgctccctgtctcgcgggtaggtgcagtagaggaaggtgtaggtcaggcagcagatggccatgggcaccgcgatctccgtgtaaaccgccttcgccagtgctgcagcattctccctgtccgtgtccacgcttgtgtcggaagagaccggcttgtatccaaacacccgctctgccagaacaccaacaatgggaggtgcgaacgacgcgaacacggcttcgaaggacttgtccagtgcgtagactgtcgtcctcgccttctccggcacaatctccgcaaaaatggggttgttggtggacgaggcgttccaggagatggcgaaccccatgatgaagaacacgacggcgtgcacgacgccagtagacgggtcgttgggcagcgcgagcagcaggatggcgccgagcgggagcgccgacgcggagctgatctgcgccagcgcgatcctaccagcgttggggaacctcctggcgacgaggtccccaacgacgccgccgaagagcgcgccgagcgccgtggcgaagaggtagagccccgtgattacgctggtctcccagtgcgtgaagcccacgagctccagccacatggcggagaagttgagcgcggaccagggaatggagcccgcgatcccctgcgcgacgatgatctggaacgtgggcacgccgaggacgcgcctggcttcccggagcagctccttggcttcgtctgtggccgaggtggcggcggccttggacgacttgccgcgcgggtcggcggcgaagagccacatgagcgcgcccaccgcgacgctgacggccgccacggcgtggaaggcgagccgccacccggggacgccgaggaaggcgacgggcgcgagcagcacgccgaaggagcccccaggatggagcccaggttgcaggtcatctggagcc

SEQ ID NO: 23277 - DNA, 362 bp, Setaria italica
  Peptide Sequence Number=SeqID_89251
gcacgcttcccatctcctgaagattccaaacctctttctttggatcctgatgagcgtcttgccggcgcggtccatgaagaagacctcgcggccgccccggcagccgtagttgtcgacgcggaaggcgacgccgccgtcggctccgtacaccgtgcaaccgttgccgctgaacaccagcgacttcatccacaccgtgtacgctgcctgcttctgcaggcttcgagactcatccccggtgggtgagcaggagggagacgatgaggctgcaggtaagggctggatcttggccattgaaggaggtcaagacgctaattgctctctgctgttcttgttcttggtggcaaatcaaggctgcagatgag

SEQ ID NO: 23278 - DNA, 1090 bp, Setaria italica
  Peptide Sequence Number=SeqID_89252
aattacctgcgaattatccgaagagctcgcggaaatggcgacggtgctgccgctcgccgtgctcgccgccgcctcggcccctgccgcgccgaggacttgcatctccgtcgccccagtccccccgcccttactcggaactcgcgtgggtctcctcctccgcagcccaccgcggggcgtcgcctgcgccctccgccggaggccctcaaagtacaaaactaaaatccagagtgaggaggaggtggtggcaacggaagatgccatggacaatgatgacgaggatggtgcgctggaagcacttttcaagcagctggaagaagatcttgcgaatgatgatttatctgtcgatgacgatgatgatgagatatcagaagaagatatggccagatttgaaaaggaattggcagaagcaattgaagatgtcggcggtgttgatgaatcagcaggggattcattgctgagctctggagactatggtaatgatgagcaaatagacagaagcgaaggaccagagctgaaaacctggcaactccggagattggctcgtgcactgaaaataggtcggcgtaaaactagtataaagaatcttgcaggggagctaggcttagatagggctttggtcattgaacttctccgcaatccacctccaaaacttatactcatgtctgattctttgcctgatgaagccccttctaaacctgaagtgaaggaactagaactccctggttcaaccactattgatgttgatgaggttagtaccactgaaatcgagccacagatggagcttccagttcatgtcatgagcgcagaatggtctgcacggagaagactaaaaaaggtgcaacttgagaccttagaaagagtctacttgcggagcaaacgccccacgaatacaatgatcagcagcatagttcaagtgacaaaccttccacgaaagaccattgttaagtggtttgaggatagaagggaacaagatggagtccctgaccatcgtgttgcattcaagagatctctatctgagactgtagctagttcgtaacttcttcagataagcctttatctagtgttcacatggaaacccttacgagcctgt

SEQ ID NO: 23279 - DNA, 1266 bp, Setaria italica
  misc_feature (1)..(46): n is a, c, g, or t
  Peptide Sequence Number=SeqID_89253
nnnnnnnnnnnnnnnnnnnnnnnnnnnnnnnnnnnnnnnnnnnnnntttttttgttggtaaacatcacaggagatgcactaaaaacgttttccacagtaacccaatccggcatatacagatcgacaggcccgaaacggacagttcagctgttcagcacgacaaatgaatttacaaaatttattcagcttcgcagtggaaagtctagcggtgctttattcttattcctcggagcaaacagagtgcaaacagtcggtgctcggcgataataatgaacaaataggtagtttatacataggggatgaatactttaaacaatcaatttggcaaaaacaggcggagttccttacggctgcaggggcggaaccagcagccattacatagaagcagctgtaccatcggcggatcagtcgattaggctgcgttctggccaaaaagaagcttccggatctctggcaatttcttgcggaaaacaacttcaagtcttgcatcaagagtactctcgtacacaatctttccatctcgagaagccaggacaacacctccatagcaaaattgtccatgagcgtcatgatggcttggggcaggtggcaggtacacatcatggtcaacatgtatctctggctgatggacatctgcttttgatgcatactcatgctttgccgaatgcagtactgattccacgtgatggtggtcttctttacggcaacggagtaatacagctggctctttcaaccggagcaagccctgaacaattagatctttcaaaaggttcttgtattcatggtggttgtcgctgacgcgaaggagttccttcatggcatcctctttcattttgttaactagatcatcctgagcttgaagaactttgatgcgagacgcattcaactgcatagagtactcaattttcttccgtacttcaacctgcttctcttttcgttcatactcttgcctgatcttcttcttctcagcttcaacaagctgcaacttctcgatgttgaattcctcctcggcggagacggagatctcgctggccttctcctcagcctcctggcggatgaaccgcaccatctgctggatctgcttggagacatcggcgtcgttcatcttggcggcggcggatccgacggagccctccggctgctctgctcgctccggcgacggtggggtgtgggaacgctggagcggggcagggaggggagggcaatcgggagtccaccgggaaggtcacggatcttacggagccctccggctgctctgctcgctcc

SEQ ID NO: 23280 - DNA, 413 bp, Setaria italica
  Peptide Sequence Number=SeqID_89254
tggcaatgtttgtggcgaatgcaagcacctcctcagtgatcccaatcacatcccagtcctcctccacttcttcctcctcatgccctagcccatggccctccaattcaccaccctcctcatgccttactctctgctccccgaattgaccaccctcctcgtgccttactctctgcagctccaattcgccatcctcttcgtgctttcctctctccatctccaactcatggccatctaccaactcatgccctacccggtcatcttccacctcaagtcttaccctctcctcccactgatgccactcctcgtcgccggaggccatcttagagaacccagtcacggccttgtgacttgagatccgggagatcccgctcctgaacctcccgccaatatccgcgaagtcgttccggatcccg

SEQ ID NO: 23281 - DNA, 414 bp, Setaria italica
  Peptide Sequence Number=SeqID_89255
ttttttttttttttacagaataacaataaaggatgtgttatgacaactcgtacaaaaaatgtcacaggacagatgtaccaaacacaggttacagcagtccacctgtgtttggtacaaacccttcaggaaaagaacaccacatccctcaaccctcagtactcagactcgacataagctctatactccaacaatggtgccaccgccaacacccaccatgcaacagcaacaatgttgttttttgctccttagagcagattttccctttgctctttacattttcagccgaatgttgttctttgccgtgtcgacaaaggttcataagcatgatcacattcccacgccaggaatgggttttggcggtagttctggtggtggtggtggtggtggtggtgatatttgtatggagaagctgcg

SEQ ID NO: 23282 - DNA, 443 bp, Setaria italica
  Peptide Sequence Number=SeqID_89256
atatatgcatctcattgatctcaatgcacacaacgacagaaagtatcaagacttctccaagtcgcaaagtacgactaacaattttgaaacctcgcaaaaagactgtaataacaaacaaaagctatttccaatttgcaatcataagatagcgataacaacttaatacgaaccggaccgagatgattatatgagcgatcatccattgccagcgagcgttcagcggaactgggcgatggtgcggtagtcggcgttgcccctccagttgagcgggatgacgttgttggccaccagaatcttgccggagtcgctgcgcacgcgcagcgagaggggcgccttcagcgggtggccgggttcgatcctccaaacggcgccccacgactcgtagagcggcctccacgtgttggagttggcctccttgaggtccacctgcaccacggcgccgt

SEQ ID NO: 23283 - DNA, 1441 bp, Setaria italica
  Peptide Sequence Number=SeqID_89257
tggagaaagaaattgcgcccattatggcagtgtactgggagaaggcagagtttccatttaatgccattcctaaacttgcaagccttggtgttgctggaggtacaataaagggttatgggtgcccaggactttcaattacagctagtgctgttactatggcagaaatcgcacgggtagatgcaagctgttccacatttatactggtgcactcctctcttgcgatggtgacaatagctctttgtggatctgaggctcagaagcataagtacttgccatcccttgctcaacttactactgttggctgttgggcattgacagaaccaaactacggaagtgatgcaagctccttgaaaactacagcgaccaaggtacctggtggatggcacgtagatggtcaaaagcgctggataggcaacagtacctttgcagatgtgctcgtggtattagctaggaatgcagatacaaaacaattaaatgggtttattgtgaggaaaggagctcctggtttgaaagctacaaagattgagaacaaaattggtcttaggatggttcagaacggtgatatagtttttaataaagtgttcgtccctgaggaggaccgattgccaggtgtcaattcatttcaggatataagcaaggtcctcgctatttcgcgtatcatggtggcatggcaaccaatcggcatatcaatgggggtcttcgatatgtgccatcgatacctgaaagaaaggaagcagtttggagttcccctgacagcttttcagctgaaccaagagaaacttgtccggatgctcggtaacatccaatccatgcttcttgttggctggcgcctatgcaagctttacgagtcggggaaaatgacgccaggccacgctagcctaggaaaggcttggaactccagaacggcccgcgaggtggtttccctcggccgagagctgctaggtggaaacgggattttggctgatttccttgtggccaaggcgttctgcgacctggagcccatttactcgtacgaaggcacgtacgacatcaacagcctggtgaccggcagggagatcaccggggtcgcgagcttcaagccggccgcattagcgaaagcccggttgtaaaatttgtacacagctcggaaaagaaaaaggttctacacggctgtgacgacggttcttctcgtgtcagcaacggtgtggaagcgaataaaatcaggtctcctcctcgtatactgaggtggttggcacaggattaaacggcagcgtaacctgacgcggacgaaaagatgttcctcgcaagtgcccggaaaccgacggtcaatgttggctggctgctcatgatgtgagtgaggacttgtagcgaactcccttgtgaatttgtactgtatggtggaggaaccaaaaacgtagaaaggtatttgttcagcctggttttttaagaaaaaaaaaaaaaa

SEQ ID NO: 23284 - DNA, 139 bp, Setaria italica
  Peptide Sequence Number=SeqID_89258
ctctaccatctgaaacacaggagtataatatgccatctagaaaatgctcctactgcataaacaagctaaggcctaccataaaaatcataactctctttagtcaccctagtttcaaactaagttattcagaaaaaaaaag

SEQ ID NO: 23285 - DNA, 472 bp, Setaria italica
  Peptide Sequence Number=SeqID_89259
ttagaattagtttgatgtctgcagttggcatcctactggatggcaattcctcagagcacgacaatccaagtttaagtagggcaatcaggcaatcagtctttctattttgcgatgaatcaccctcacccacaccctgaaattcattctcgaggctcaacgacagacgcgtgtcaatgacgtccatcattccattatgcagggccagctcaacatattcacggaggcttaatccctctctgaaggtgctatctgtgggcctcctaccagttaccatttctaacacaagaattccataactgtagatgtctccatttgttgacaccacgttcccagcaccatactctggggcagcgtaaccgattgtccctctaactcccactgagctcgctgactgttggacaattaagcttccatcaaacaaataaatacttaggacaaagtaccaaaagtactaccaaacaatagggacaaa

SEQ ID NO: 23286 - DNA, 873 bp, Setaria italica
  Peptide Sequence Number=SeqID_89260
caaaccaaacacaaaactaggcaatgacgcaatattcttgcttattgtgcacagttctaaatggtccgcttaccggtttccatgctacatggcacatgagaacatacacaagaacatctagagattcataggacaaatggtaaagtcacaggacatcactagagtcagttggcgtagagaaccggttatatgaacaactcctaaagtttcgatgtttctcagtcgattgcaataatcagaggactagtttggcaaggtttctgcaagcttcccaaattatgcaccgccacattatttctacagacccaacacgcctgcctccctctctgctgaagcaacagatccagatggtgttggtgatttcatggacagcggcgctactatctgcgcgggggctattgcagcttgcgccgtcactgttacacccttagttagcatgtcatggttgggaactggggtagctaagagaagaacacccatctgttgtgtgctgctaccagcaatagctgctgtggtgacattctcctgggaaagttcagaaggcttgactgcctttttgggtttcttggcccggcgtcgcttttccgaagaggccggcaaagcttcagggatagcattgtcaccactcaatagactcttcctgtgaacagaacagaaatctgttccccatttcgcactcgtaccacatccttggaacttgcatcggctgcccccaccatgcttaatacagaaatctgtccgcccttgtgcactctttgtacatccttcgaatttgcaacgccttcccccaccatgcctgatgcagtaatctgtgttcccttgtgcgccctttgcaccacccttcaaatttgcatctcttcgcccacccaccat

SEQ ID NO: 23287 - DNA, 1721 bp, Setaria italica
  misc_feature (1720)..(1721): n is a, c, g, or t
  Peptide Sequence Number=SeqID_89261
ctggcatcgatcatcctcttgatcttccttctcgttcctctgatcgatatatccttctcggccgagctagcccgtaccgggccgccaggcaagagatcagagggcaaacagagctagtaacaatggcggatgcgggggaagggcggcgggtttgcggcatgccggagaaggctcagctccacgtggcgatgctggcgctgcagttcgggtacgcggggttccacgtggtgtcgcggctggcgctgaacatgggcatcagcaagctcgtcttccccgtgtaccgcaacatcatcgcgctctgcctcctcgtgcccttcgcctacttcctcgagaagaaggacaggccgcagctgacgctcaacttcgtcgtccagttcttcctcctcgcgctctgcggcatcaccgcgaaccaggggttctacctgctcggcctcgacaacacgtcccccacgttcgcctccgccatccagaactccgtcccggccatcaccttcgccatggccgcggcgctccggatcgagaaggtccgcctcgaccgccgcgacggcgtggccaaggtggtgggcacgctggcttgcgtcgcgggggcctccgtcatcacgctctacaagggccccacgatcttcggcccgtcgtccggcggtgacaagcagctgatcatgcagcagctcgtcgccggcccggagctcgccatggggctgagcaaggccgtggagggggagatgaagaactggacgctgggttgcgtgtacctgatcggtcactgcctgtcgtggtcggggtggctggtgctgcaggcccccgtgctgaagaagtacccggcgaggctgtccgtgacctcctacacctgcttcttcggcgtcatccagttcctcatcatcgccgccttcatggagagggacgccgacgcatggaagttccactccggatccgagctcttcacgatcctatacgccgggttcatcgcgtctggggtggcgttcgcggtccagatctggtgcatcgaccgtgggggcccggtgttcgtggcggtgtaccagcccgtgcagacgctggtggtggcaatcatggcgtccctcaccctcggcgagaagttctacctcggaggcatcatcggcgccgccctcatcatcgtcgggctctacctcgtgctctggggaaagagcgaggagagggcgcgcctcgccagggacgccgccgccgccgtcgtcatcatgccgccgtcgtccgacgccggtgccaccgcccggagcgccaacaagctcacgcagccgctcctgctgccgccctccaccgagaacaacgtctgatccatccagccggccggccatcgtctcgatcgatcactgcacggcggcgcatggaggatcatccatccatcgatcgatccagcaagcagatcagcagtgttgttaatcaattattagtgctttaaatttttctctttgttgctttcacgatacgacgcatgcatgtatgcattattgttaatggtgtggtgagcgatgatgatgagcagacgacgactgcatacacagcaggttgcatgttgcgacgactttgcctgctgcttcgtgcgtactacttagtaggattgtttgcggcattgtgcatgtatttgcatggtcgatcggaaattagtgtgtgtacgatcaatattaattaattggtgtgttcatggagcctttgctgccttgacaaaaaaaaactaaagtgacgnn

SEQ ID NO: 23288 - DNA, 425 bp, Setaria italica
  Peptide Sequence Number=SeqID_89262
gaggccatgcgcggctggacggcgcgcgcgatgctccgcagcgagctgggccggttcacggcctcgatgacgcaggcgcggagcctggcgtggcgagcgccgtcggcgttgaggatggaggaggcgccgacgaggtccggcgcgggccagcacacgccgaagctgtcgggggactgcagcacgagcttgttggccgcgggcgagcaggcgagcaccgcgggggagccgaataggtgcgtccggtacagcccccccgtggcgtcgccgtacctgcgcttcttgtcgtggacgaagccatcggggcggcgcgcgcgtcggaagtagcgcttgagggcggggttctcgccgacgaagggcaggcccatgtggcccggcgggagcttcgcgcggggcggccgtggcgccagcgcctaaacgcgaacgcg

SEQ ID NO: 23289 - DNA, 356 bp, Setaria italica
  Peptide Sequence Number=SeqID_89263
gccgccccaccgtcgcccgggccagcgtgttggtcgcgcacacgttggccgcctgccccagcgccaccgccggtcctcgctgccgcgcgagctccctgaccatgagcgcgacctcgccctccctgacggcgcggaggtcgtcgagcgctctggcggagaagaggtggagcgcgcagagcttccgcagcgcgcgccaccgggcgccgtagggcgcgaagacgaggtcctggtagttgtacgcgacgtgctcggcgccggagttgggcggccggttgctgaagttggcgtcgtgggcgcggaggaactgcgccgccaccgccgccgacgccgccaccaccaccttcggcgtcttgtct

SEQ ID NO: 23290 - DNA, 377 bp, Setaria italica
  Peptide Sequence Number=SeqID_89264
gtccgcagcgcagcagaaggtgcccgcgcccactccttttccccccaccatccccccggtgcaccggcctcacgccccgcacggcgaaggccgccgccgcgcaggactccgaggccgacggccgcgcgagctgcaggtggagcagggagccgtgcggctcgcactcgtccgtgaggtccgcgcggacgcaggccacctcgtcgagcggcggcttctgcagctccgtcgtgacgaggcacccgagcgccttgtacccctccggcggcacggggacccagaagtaggcgtcgcggaggccgtagcagttgccggcattgccacggctgccgttggcgacgccgccggcgcggaactcccagacgagcgaatagtcccgc

SEQ ID NO: 23291 - DNA, 555 bp, Setaria italica
  Peptide Sequence Number=SeqID_89265
aagtaacaaaacgtaagtaacgtaaccaaagacgtagacaacggactggttacgcaaggcgactgggcagaataccttcccttgtgtgctgctacatgcagaccctacgacgcgacgcaggcgtacgcggtgtccaagctcgccaacgtgctgcacacccgagagctcgccgcgcgcctgcaggaggcgggcgccaacgtgacggtgaactgcgtccacccgggcatcgtcaggacccgcctaaaccgcgaccgcgaaggcgtcctcacagatctggtgttcttgctgctgtccaagctgctgaaaacgatccctcaggctgcggcgaccacgtgctacgtggcggcccacccgaggatggccggcgtgtccggccgctacttcgccgactgcaacgaggcgctgccgtcgccggccgccaccaaccgccaagaggccgcgcgcctctggcaaatctccgaggccatcatcgacgcccaccaccacgaccgaagcgccgcgctgctgttgctccctgtcccggcgcacacaggtacagcagcatcgccgccgccc

SEQ ID NO: 23292 - DNA, 474 bp, Setaria italica
  Peptide Sequence Number=SeqID_89266
gtcattgacattgtcctcctgcagcgtgacaataccaaaaccaccagtgctggggccggcaggatcattgagaggtgggtaataaagtatgaaacttgctctggcagtggtagtggtaatggtagcaagaacagtggaaagaaatctaggagcagctctgctcaggatcatagcttgtacaggagggcgtacaatggctcgacagtgctgttccgttcactatatctggttgtcaggctcttgccagcataccatctcttccaggagctcaattcatctggaagaatccgccctctcagcctctcacacaagatttcatcatttgttgagccattcacccgtgcagaggatgcagagatgaaacactatgcatttgctcctattgaaactctgtctggtcgcttgagcttgtcagtgtcatatgtgccagtgctggaggtggcagcagcaccagagcacatacgtcactgagtc

SEQ ID NO: 23293 - DNA, 330 bp, Setaria italica
  Peptide Sequence Number=SeqID_89267
tatgtatatgcaggctcaagtctttaactagttttctgtttcctcatcagtagcgcagaattgagtctgccaacgatctcctctgcagttacggtgaacccctcctccacctttgctgtgatggttatgatcagcgtgcccgccgggaatggcatgacattggcgtggatgatactgaggcggagctcctcgacctcggtgagcaccttcacggccacccccttgccgttctcgcaggtgatcctcaccatcacgctcttctccgagaaccgggcctcgatctccggcagctgtttcctctccgccggcgtgcctgatgacgctgacagc

SEQ ID NO: 23294 - DNA, 1386 bp, Setaria italica
  misc_feature (1275)..(1386): n is a, c, g, or t
  Peptide Sequence Number=SeqID_89268
ggcccaactcggcttcgtgttcttccccaacccaccactagggagcgccgtcctcgcctccggctctccgcctctcccctcgcatactctcctcctcgcagcgccacccgcgaaaccctagccccgtctccacccagagggagggagagtgagagagaggccttcttcgtcgtctgctgcggagccaggatgtcgtcggcgttcgggtaccagaagggcggcgacctcgaggcggggacctcgggcgccccggggccgcgggcgctgtacccgggcatgcaggagagccccgagatgcgctgggcgctcatccgcaagatctacgtcatcctctcgctccagctgctcctcaccgccgccgtcgccgcggtcgtcgtcaaggtccgcgccataccgcacttcttcaccaccacgcacgccgggctcggtctctacatcttccttatcatcctccccttcatcgtgctgtgcccgctttactactaccacgagaggcacccggtcaacctgattctgcttggcctcttcaccctcgccatcagcttcgctgtgggcatgacatgcgccttcaccagtggcaaggtcattctggagtctgcaattctgacaacagtggttgtccttagcctaactgcttacactttctgggctgtgaggaggggcaaagacttcagcttcctgggtcctttcctgttcgcctccctcatagtgctgcttgtgttcgcattcatccagatcctgttcccactgggcaagctctctcagatgatctacggcgggctggcctcactcatcttcagcgggtacatcgtctacgacacggacaacatcatcaagcgcttcacgtacgaccagtacgtctgggccgccgtctccctctacctggacgtcatcaacctcttcctgtccctgatgaccctcttcagggcagccgactaggcgcgccgctctcttgtcctacctcgtacctacgcttcgggtctgtcccgtgtgaataccgtacgttggtacctgaatgctcaccggttaacctcctttgcccagaattccggtccctagaattgtatagctgcgttgccggactactagtatggtcgtgttcgtcgttgctgagttgtgtcggtatcatgctatcatctgcgtagagatcacagatacattgtaatggtcgaatctgtgcgtggagacgtggtgatggatttgggttgcttatgacatggtggttggtttaaaattggaggagtttggatggatgtacaaaaaaaaaaaaaaaannnnnnnnnnnnnnnnnnnnnnnnnnnnnnnnnnnnnnnnnnnnnnnnnnnnnnnnnnnnnnnnnnnnnnnnnnnnnnnnnnnnnnnnnnnnnnnnnnnnnnnnnnnnnnnn

SEQ ID NO: 23295 - DNA, 395 bp, Setaria italica
  Peptide Sequence Number=SeqID_89269
acacctagtatgactttctgaatttgaagctatgagggagcactcactagtattggaatatctagactctacagccaccagtctcaagccatagaatcctctatttctgggaggcacattgttgttgcaacttcgacatcaagtggaaagtctctgtgttacaatattcctgttcttcaatctctctctcaagacttgatggcttgtgctctgtatatatttccaacaaaggctttagctcaagatcagttaagaactttattagagatgaagaatgcatttcatactgatattgatgttaaaatatatgatggtgatactcctagagaagatcgtttgtggatcagggataatgcccgattgttaattaccaacccagatatgttgcacgtgtc

SEQ ID NO: 23296 - DNA, 321 bp, Setaria italica
  misc_feature (283)..(283): n is a, c, g, or t
  Peptide Sequence Number=SeqID_89270
tgcggagtacctttcgttctcacagtaccatcgttaagttgttgtagatattcggcagcttgaggccatctttgggtactactatcccgcagacgtaggtgcgggtgagaagtgatggccatggctttgagaagggcaatatcagcatatagtgttcttattttgtgttgtatcgtacgatgagtgcgatgatagaactgaccaattgcaaaatgttatgaacttgaacctattttatgtaatgtgatggactacgtacagatatgttacaatgatgttgacntgttgtgcttgtgaggtgtagttatcctgaatgatttt

SEQ ID NO: 23297 - DNA, 218 bp, Setaria italica
  Peptide Sequence Number=SeqID_89271
aagcctcttggaagggccttgattattgccttggttgctccactatttgcattgtttgtctgtgttgttgaacaccttctgcactgtgttgttcagcgccatgttgatgaagtggatgatggttgtctcctggttgaggcccttgtcccaaccagagaacaagggctcggtggtgacattcatcaggatgagagcaccatcgctgtaatctgctgaag

SEQ ID NO: 23298 - DNA, 472 bp, Setaria italica
  Peptide Sequence Number=SeqID_89272
cggagatgaagtgtccttcactcgattcataacgaatctacgtcactttgtcgccgaacacccagaccaagaggatatcttggaccacgcagtgctcgccaagcagcgtgctgaacaaccggcgagatggcttcacatcaagctagaagtggtggagaacaagaaaacattgtcgacaaccctactcatacgggatgacgacctgtacgtccatggcttcatgaaccaggaaggcgtttgctacgagcttctcgaaaccaaggacagtgtcaatatgatcccagaagatgaatacaatccccaacccctatactggggcctcacatacaacaccgtactgaacgtccaatatggcagtgaagccacggctaaactggtaactgagcggctaggcatgtccttcgcgattgaagctgtgcgaaggctgtcgagctccacccacccagatgttgaggtggatggtgagaagagt

SEQ ID NO: 23299 - DNA, 854 bp, Setaria italica
  Peptide Sequence Number=SeqID_89273
gttgcaacgtgttggcatactatggtggccacaattgttggagatgttaaaagcaaactgggtgctttatcggatggacttggtaaatggggagttgacacgtttggcaatgtcaagaaggtggcgtttgggaactgggaaatgagaatgggatagggaaataagggaagaaggataacatatcccttgttcggatttatggaatgggaaaagaatgggtatgtgatagggataaaatgagattatttcccaccgctacatacccagcaggaggggtgggttttggctgggaaacaaggaggggtgaatctgacttattatttatcttctcggagcagaccgtcgggcacggatcaccttcctgccgatctccatcgacggctactactgcccgccatgtcctcatcgtgttgccgtggcctcttgggaatggtggcatctatagtgcggacgggtgaaacgttgccggcatcggccctagtgggagcaagaggagcatcttgtgactccccgtaagttcctaactcgcctagttgcacaagtcatcggagccgccacacgaatcgcaagccgttgccacgcaaaggcccggagctgccacttgaatcgcaaaccgccatgcccacgtgtgtggggttcagagctgccgcttgccacgcataatctggccacttgaggggatccgaacccgattggatgggacaaccatttttttcatttcatcagagattttgacttagcaagcaatcgataggcggatggagttgggtgccaggagctgggagggcatggaagacattctttgtttttatttgcttgctcaaaccaaaagaaaaaacaaaggaaagggggcc

SEQ ID NO: 23300 - DNA, 537 bp, Setaria italica
  Peptide Sequence Number=SeqID_89274
aatcgcaggcctgctccgcggtgttggaagccaggaagacatccagctccgtcttcagctggatgattgagctcttcttcacggtgaagagcaggtcgcttgccttcgcgctatcccctctgaacacgtcccatcttttgtgcatgctgaataccttctgctgcatggagaggatgggctggccggcggcgtcgaggagcacgcggcggcggtggacgctgaagagggcgcccttgaccagcagcacgacggtgccgttggcatcggtgacggtgaagtcgccgtcggagaggctgatggccttctgcgtcaccgtcaggggcaccacgtacggcgcgcagaactgcggggacacaaccgccaccagggccgccggcgccgccgccgccgccatgggattgagatcgccgcctccgcacctctcctgcaacggcggctttgctcggtggattcgatcggcggtgagcggcgagcttccacgtgccgtcgtgctctagttgtcttgttggagtccgggcgtggttagttccgggttcg

SEQ ID NO: 23301 - DNA, 259 bp, Setaria italica
  Peptide Sequence Number=SeqID_89275
tggaaaatgcaaaagctatgggttggatttttaaagttggtatcccagactcagccacattccttcgatgtcttactacagctacctccaccacagtttgaacatgtgttgaataagtatcccaatcttcgaggacctctttcttcctttgttaatcagcggaacatgcataacaccttgcccaggtacctctacaatattacattagtgttatataagctactcaatttcataccctcttttgatggcttgagcagca

SEQ ID NO: 23302 - DNA, 1508 bp, Setaria italica
  Peptide Sequence Number=SeqID_89276
ctgagcggccgcgtcggccccctgctcctcccgccgcctccgggagaccgcggggaggttgcctcgccccgcttcgattcgtctcgtgccttcagattgctgagagagcttggcacaaatgtaacagaagatttggttgtgctgatgccaaatttgctgtcatttttgaagcatgatgatcctgcggttgttaagcaatctatagctagtgggacaaatttatttgctgctgtattggaagagatggcacttcagattaacaagtgcggaaaacttgaagcttggctcgaagacatgtgggcatggatgaagcagttcaaagatgcagtccgtggtgtgatgcatgagcctggacctattgcaactaaactacttgctgtaaagttcattgaaacatggattttatgttgcacatctcaagccatcagcgaccaaatacagtcaattgaaggaaaaacaggagatttgatgtttcacgattctctcaatttcatccttgccttgatcctgttgttctggaagctgatgcacacagagccctcctccttctcctggatattctgcaatcagcttatgctcatcgagggtccttcctagttggcaccattaattctcttgcagcggttgtaaagaatcggccaatttactatgaccgtgtgctgccggtgttacttgattttgaccctagcttggagactgcgaagggtgcacattcagcaagcctgcggtatgccctaagagcagcttttttggggtttctaaggagttctcaccaggcaatgattgagtccaaagacatattggtaaggcggcttcgtgctctcagccctggcgaggcaatggaacaaaatattaggcaggcagagaagatgtctagaaatatagagcgtgcttctcgcactaccaaggatgagtctccagcatgggagatgccgtatggagataatcggaagaaatctgctgctagatcaagtgatgttcttgctatgtctgatggcatagctaagagagcaagatttgatacatctgctacttcaaatctgccagttatgggatcttctgattattctgatatgcaggctgacaatgatgccaatgggggtcattcatctgatccagccattttgaatagtgatgtgtctcctgttgagaagatgattgaaatgattggtgcgttactcgctgaaggagaaagaggagctgaatccctgggtattcttgtgtcaacagtagaggcagatgtcatggctgacattgtgatagaaacaatgaaacatctaccgggagcctcatttcctttagcaacaaataacaatctccagaaaccgaattttaaatattcctctggtctcctaacagagaacctgccagtcaattcagactcgtcactgtttgctgcacaatcaacacccacagctgatggtgtcagcatctcaacatctgatccctttgttatgcctggtgttcatgatgctaagcgtgatccaagaagggaccctcgtcgcctc

SEQ ID NO: 23303 - DNA, 943 bp, Setaria italica
  Peptide Sequence Number=SeqID_89277
tttttgttttaatttgttcctttggtttgttttcttattgttattgttcttaagtcgttgtattcctaagtaagggtacccttcgttcgtccttcgtattcctacggtcggtactagttttctaccttgtcttgtcttgttaaatttcggcgaaaccgaattttaaatattcctctggtctcctaacagagaacctgccagtcaattcagactcgtcactgtttgctgcacaatcaacacccacagctgatggtgtcagcatctcaacatctgatccctttgttatgcctggtgttcatgatgctaagcgtgatccaagaagggaccctcgtcgcctcgatccacggcggacagtttcacctgctgctgtaaattcggtacaggtgaaggtggaaaccaatattgtgcctcaaacagataatttgccaagtacactttgctccaattcttctaaggctgaaaactattcagattattcaagagatttacaaaaaaatgaagatgaacatcactcggcttctcaacccaatcaaacaattgccaaagacaagttggagcttttggatgttgccactgagccagagccaacctttgaagctgaggcacctgtggatgtcggggttcattcttctattgttgatgaagagatgccaaatcccatttcttcagaaattacttcaatcgatgaatctgatagtttggattcagaggttgaccccttcttaccagttcccgaggcatcaacaccagaggataccaatcagaacttaccagttattacgtctcatttggaactaagcgacaaagagaaatcattattgaacaaactagccattgggcggataattgatgattacaagaaaaatagtctcaatgccagattttctttgcttgctcatttgattgcccagagtgctgatgatgataatattatggatttgat

SEQ ID NO: 23304 - DNA, 2568 bp, Setaria italica
  Peptide Sequence Number=SeqID_89278
cgtaataactggtaagttctgattggtatcctctggtgttgatgcctggaactaagcgacaaagagaaatcattattgaacaaactagccattgggcggataattgatgattacaagaaaatagtctcaatgccagattttctttgcttgctcatttgattgcccagagtgctgatgatgataatattatggatttgattcagagacacattatctttcattatcatgatcagaaggggcatgaactggcaatgcatgtgttgtatctgctgcagactatgaatgttgctaattcgccagaaagctctacctccacttctaaacattatgagaagttctttatatcacttgcgaggtccttgattgactcaatgcctgcctcagacaagtcttttagcaaacttttatgtgatgcaccatatctgcctgagtcctcgtttagattacttgagggtctttgcatgtcagaagacaacagccaacaagtaaaggatggggatggtgaccgtgtcacccaaggcctggggactgtatggaaccttatcttgggtcggcctcctcttcgcgatctttgcttggatattgttttgaagtgtgcagtccactctcaggatgaaatcaggggaaaggcagttagattggttgcaaaaaggctctatgatctgacatacgcaacagaaaaaattgagcagttcgccacagagagtcttgtgggagttgcgaatgagcattatgtggacacagaaattaacttgaaatcctcaaaagaatctacagctgagtctgaggtaagcagccaggaaacttcagttagcggtcagattccagatgctgggtgttctgaaagtgggtcattcaagacatcattggtttcgcggaagcagtcggcaatatctttatctgaggcaaaacgccatatttctttgttctttgcactttgcacaaagaggcctagtcttcttcaacatctgttcaatgtttatggaaggtctccaaaagttgtcaagcagtgtatccattggcatatgcccagccttgtaagtaatctggggtcctcatgtcctgagatgctgaacataattcataatccacctgaaggcagtgtacatcttattaccttgatactgcaaacattgactgacgagtcaactccttcagctgagctagttggtgctgttaaacaattatataataccctgaaggatgcatccattctcattcccttgctgccttcatttccaaaggaagaggtattgcccatatttccgaggctggttgatcttccgctggaaaagttccaagatgcgcttgctcggatcttgcagggaactgctcatactggtccggcattgactcctgctgaagttctgattgcaattcatgatattaatccggagaaagataaagttgccttaaaaaagatcacagatgcttgcaaagcatgctttgagcagcgtacggtatttactcaacaagtcttggagaaggcactgaatcaaatggttgacaggataccaattcctttactttttatgagaacagttattcaagcgcttgatgctttcccagctttggttgattttgtcatgggattactctccaggctcatcaataaacagatatggaaaatgcaaaagctatgggttggatttttaaagttggtatcccagactcagccacattccttcgatgtcttactacagctacctccaccacagtttgaacatgtgttgaataagtatcccaatcttcgaggacctctttcttcctttgttaatcagcggaacatgcataacaccttgcccagacagatgttgataagtctgggcttcattagcgaaccacagcaggcaccaatgtcgtttgtgcctgctacattacagacagcggatgcaacctcctctcttcctggtgcgaccctgatgtgaatatgatgttgtagtaccaaacagatgcacatacagatctttgcggacggtagtggtatggtcatggaatggagcaaggagaaagattggtgccgctcagacacgactgctattttgtgtcaagtgactatacgtgactctgcaaggagatgtcaacgacaaagagctgttgactggaacaaccaagatggttgtttgcagtgaggtccagtgtttgtgctggagggcttgattcgatggatggaagtgaatccgagttgtatagtagctgtactattatggcaaaatgtagtagtccaatagccgtggtttgggagcccctcgattgctgggcgaggcaaagcaaaaggacagagcttaggctgtttacaggaaagtaatccatattagctgatctccatcattgttttccatgaaacacaaggaagtcgggtcgcagcagctgcacctttcatagggagccggcatttgactaatttactctaaccattgctgtaacagtttgtctgtgtacattagttgattgagtttgctgctagtgttaaaaaacacacccgcttcgatttgtttcgttgtggtctctggccaacaataatctaccgtcatcagaatccccttaattctaagtaaaaaaaaaaaa

SEQ ID NO: 23305 - DNA, 314 bp, Setaria italica
  Peptide Sequence Number=SeqID_89279
gacgtaacagctccgagctgaactgtgacgagagattcgcgacgacctcccaaatggggaaaccccgagctaatccaaacccccgccgatctgaattccccaaatcccgcaaccggagccctaatcccttccaaatcccatctccgatccaatgcctcccaccggcgacgacccgtcggccgccgccggcatctccttccccgacgcggacggcggcggcggcggcgattctgaagacggcgacttcgccgacgctcacctcctcgaccctaccgatccgagcctccacaaccccaccacctcctccgccaccg

SEQ ID NO: 23306 - DNA, 464 bp, Setaria italica
  Peptide Sequence Number=SeqID_89280
atgcactgcagcacttgctcaggggagaggccgtcgagcacaccttctggaagtccctgaaccatgccttaatcaagctggccaagcagtgaacctcaatgtcctctggtacaactcctttgtttagctggtccctcacttgctcctcttggtcattctctggattaatgcgaaatatcccctcagccttgaggcccccctgggcatacagcctctcctgcatgagcagcaatatggtggggaccgaattgcccttgccatcataggtgcattgcattgattcagccgagacaccgaaaacactggcgctggcgctgggcacgcggcacggcatctcgtcctcgaactcgacggggaggccgaggaacccgtggaatctgtcgaaggtgacgtgggcgacgtggcggacgtccgtgggccacccgatctccatctcccccagctccgccgccgccgcgtcctcc

SEQ ID NO: 23307 - DNA, 407 bp, Setaria italica
  Peptide Sequence Number=SeqID_89281
ggggtcttgtgtggttgctgcggcgcatgcttgttgccgccgccgccagcggcgtggtggtgcgggttcttgaggctcttgtgcagcgccgccggggacgggcagcaccagaagccctccggcgtgacggcgatcggcacggtgcggaccctcgcctgcgccgacggtgagcccctcctcggcctcgatccctccatccttaccctcctcgctcgcggccggcttcacccccacatccgattcctcggaacaacctgctcaggcgaaggaaggagtggcttgcaaaaatcagaacaagaaatccgcgcaagatcacgggttgcacaaacgcagcgcagccgctcgaccaaattcgcccagagaaaaaaaagatttcccacttttcccttgtctattcttattgtatt

SEQ ID NO: 23308 - DNA, 267 bp, Setaria italica
  Peptide Sequence Number=SeqID_89282
aaccccgctttggtccccttatgctattgagctgagaaaagtttgtagttgcattacttgtctgtagtttctacatatagaaccgaagcttgaaatatacacgcctacagttcgcctcccgatgaataagaccagacacgcagaacccatggccgtcgacgcttgtcgcctgcttgccgttttgattttaggtggttatatgtgtggtaatcgctacaggtgtgaggctgatggcattgctgtcataagtcatattatacaaaaaaa

SEQ ID NO: 23309 - DNA, 413 bp, Setaria italica
  Peptide Sequence Number=SeqID_89283
acgtcaccgggcaggagggcacgctgtggtggcacgcccactcttccatgctccgggccaccatctacggggcgctcatcatcaagcccagaggcggctacccgttcccggcgccgtacgccgagatccccatcctgctaggcgagtggtggaacaggaacgtggacgacgtggagaccgacgggctcctcaccggcctcggcccggcgatgtccgacgccttcaccatcaacggctcgccgggcgaccagaccccctgcggaggcgctggcatattccaagtggaggtggagcccggcaagacgtacctcctccgcatcatcaacgccgccgtcaacgccgagctcttcttccgggtggccggccacaccttcaccgtggtggccgtcgacgccagctacacgaacccgcac

SEQ ID NO: 23310 - DNA, 456 bp, Setaria italica
  Peptide Sequence Number=SeqID_89284
attcgtttatagggttccttgcagcttatatgtgttcaaaaccatgggtagggttgagagtgggaaaatcgagaggaaaaatgacagcataaaatgagttaaacatatgctgcaaattcaaaattcataaaacactaggcaaggctaacttcaacatattttcaaacacctataattaaaaaaccatgcagatatgtgcgcatactcaagcttcacaaaactattggcaacatcacatcaagctgtcagcttgtaaaatactgtcgacgatgataaatgatgaaatgcactaagattgatacctatcttttctcaataactatcttttccgaaaccactacaggaaatatctataactgtgatcaaatatcacaataattcgtaagataagacattcttacttggttgaaggaactcatcatgccacgtgttgagtgtatcgaatgacctgttaga

SEQ ID NO: 23311 - DNA, 314 bp, Setaria italica
  Peptide Sequence Number=SeqID_89285
ccaaagtaattcctgtacatgcttttcatgtgggccagcagtgaacaagagtagaccccaggtagcaacaaccaaaagaaacacaactttcaaccgagaacctttcttcagaacagatgaacatgttcttcccaaactctgagcaatggctaacacaaaaaatgccgatgtcttaaatggttgcgacgtcattgttagtctctcgaggtccacacgatgtttttctcggagctcggacacgcccttgtcctcgccggcgacgacggcgggccccatccctcggttccggggttcctctatctccctctcccacg

SEQ ID NO: 23312 - DNA, 506 bp, Setaria italica
  Peptide Sequence Number=SeqID_89286
ccgggaaggggaaattgatgggctaggatttggggagccgatgggatgggagcaggtcgttggtgggctgccggttaaacgggccgtgctcgggccgacatgatgtgctagacttgccgccaacaagcacgacaaaccatacaggccgtgccgacctggaccggtccgtgccaaaatgggttgtgcaccgtgccgagagccctcttgatcatcgagtccttagagcccgacttgggtctacatagcctggagaaatatctcttgcacaagaatattgcatattggttatgcttattgattaaggcaaggaaggtagggaatgcaatcatgcaacttactagctcaaaccattcaaaagctttgataatagggtcaaagggtaagtgatattggagaaagtagattatgtggcagcatgccaatttgatgaatttcgaagtggtgatcacaagtttaggaagctagatagaaggatgcagctacagaacaaggatgggaacacggaa

SEQ ID NO: 23313 - DNA, 239 bp, Setaria italica
  Peptide Sequence Number=SeqID_89287
ccaccaactactcgccccgcccgcctccgccgcctcgctccatcacgccatcgccttcccctcctcctctccaccgctcgctttctccaaccggttgcagcaaatctttttccgcggaggccgtcgcctcgccgcttcccgtctcgttccggctcggagttgtgtgtgactccactgaactgccaaatgttcataaaggaggaggtcgagaagccaataggaagcttgatcaagaacca

SEQ ID NO: 23314 - DNA, 273 bp, Setaria italica
  Peptide Sequence Number=SeqID_89288
taataaatgtctccacataaacaaaacgtagtacctgtaaatgtacataatcaagatggttattgtttaatcacagttatgcagttgattgcttatatgccaagcatagtcattattgaatgttaggggccaattatcagccctgcccattaccttcccacagttacaagagagaaaatacagacaacgggtagatttacttcttgttctagacaatatggttctccattagatgatttatgaatccaactaaaaatctagtccatttaagtg

SEQ ID NO: 23315 - DNA, 546 bp, Setaria italica
  Peptide Sequence Number=SeqID_89289
ccatcaaagggaatagagaactgttggatgttctgccaagcaaaagggaaaacaatgaggatgacagtgattcatctgacgagtcctcagaggatgaccaagatgaactagacttaccaactcacaagaggcgcaagaagatggagaagcaagcatacaatgagtggaagtcgtcagttctttcctccaacaagcaaacaaaaccagaccctgccaagcccaggaggcaagctcagcttaacttcaagaagcctgcagacatcaccttagaagtaccttcagcagccaactagacgaatctgaactctccttacaagaatggaattgagaaggagaagtttcttcttaatgcaaaaagggacatctttgttttcatgtcatctttgttgcataacttatccatggaaaattttaccgggaaacatcctggtgtaaatggacatgttcaattgttcatatagtacagtacatgagaagtgtctttggttcctgattaccccttgcttagttgcttggtcctctagctgccgtcagcccaattggcgc

SEQ ID NO: 23316 - DNA, 588 bp, Setaria italica
  Peptide Sequence Number=SeqID_89290
actttacgttacaagaaagggaattaatacaactttaacaaggagcgcttccttgctgctttgccaccttctcggcgggcaagcactgactttggtcggccggtatttactgcagcagcattctatctatgtgcgaagaggcagtagctcaaagttgacaaactaaagctgatagatctttgtggtacatccagcaccgagtttacaacggtttcaacatcaatggcagacctgtgctttgatgtttttgggatagccaaggagaagaaggatccgaagtccatcaaagggaatagagaactgttggatgttctgccaagcaaaaggaaacatgaggatgacagtgattcatctgacgagtcctcagaggatgaccaagatgaactagacttaccaactcacaagaggcgcaagaagatgggtacctgattactgctgattgcatgtgaattctcgatcgctacttttttttttctactgaaatgcttcatgaagctattactgaggagtaatgaacaaatgactgccgaagtttagcctatctatcttttgaattgtatgccatgggcacaacatgatacattgaga

SEQ ID NO: 23317 - DNA, 360 bp, Setaria italica
  Peptide Sequence Number=SeqID_89291
agctagtgagactgatcaagcagatggtggctatgatgtaattttgaatttctgatgtcccctatgctgtgaactccctgaagaagctctatgcccttatttcaaagtgccttcgtcccccatatggagtcttgtatgtggcttcaaagaagaacttggtcagttccaatggcggtgcaaggcagcttcgagctctgatggaagaggaaggtgtccttggtggccacttcttaactgagttgtctgacagggagatatggaagttctttttcaagtgagcatatccagaaagtgggaagaggaggaaatgaatcctgacctttaagacacaattttttatttctatccgcagtaatgtac

SEQ ID NO: 23318 - DNA, 243 bp, Setaria italica
  Peptide Sequence Number=SeqID_89292
gtccgggcacatctgccgccgccgcgatccggggggaggggccaggccagattcgtacaagttttcctcctattaaaggaagcaatccattatgaaagactggtcaattttctccaagcttgataataatggaggctacctccacaagttcccagtaggctctccaatatctcatgatattgggttaggattgatatcacaagttggaaatttagttgagtgttccttccaacatccaaggca

SEQ ID NO: 23319 - DNA, 454 bp, Setaria italica
  Peptide Sequence Number=SeqID_89293
cttgccctcctcaaagttcagaccaagctgctgctcttctcctcctccttgatctctccaggccaagctctctctttctctgaacccataccaaacttccacttcacacaaccagacctagctactagctagctagacagagcagagagagagagactcatatgttgtgagctatgcgtatgcttctctcctagctccacacaaattactcgattggcagaagttttctcctcatccaattcaaagttcaattaattcaccaaattaagagctatggcgaaccggtggtggaccggccccttgaacctgccggagcagccgtccggctcgtcggcccccaagaccgagcccccggccgtcaaagacccggagctcagccctgcaggaggcgcgccggcggccgaccacgctgacgagaccaacgagtccggcggcggggagccgcgcgagggcg

SEQ ID NO: 23320 - DNA, 420 bp, Setaria italica
  Peptide Sequence Number=SeqID_89294
ccatggattaatcatctgaagacaacatatgaaaccaatagcgcaaccgtcatgatcaaacaagtaatctacaggagtgtagtcacaatagagctgtcaaactgaagtcagtacacaatacgacagcagctttgtaccatctaaatgcatgagccaattgtacaagcacaatatgagcgtgagcattttcccaccagaaaagtctgtagcacccttgacatagatctttctcgatgagtcatgctcaagcagcatggtgaaaccgccaaaataaaggatatagaatgtgaccctttttagctaataccccaccatccaagtctcactgattcaaattaaggttctcacatattgatcaagatgtttattgaaaagttcacacttgatttgtatgcccctgccacaccaatcaagtgtgaa

SEQ ID NO: 23321 - DNA, 459 bp, Setaria italica
  Peptide Sequence Number=SeqID_89295
acaaaacaagtaatctacaggagtgtagtcacaatagagctgtcaaactgaagtcagtacacaatacgacagcagctttgtaccatctaaatgcatgagccaattgtacaagcacaatatgagcgtgagcattttcccaccagaaaagtctgtagcacccttgacatagatctttctcgatgagtcatgctcaagcagcatggtgaaaccgccaaaataaaggatatagaatgtgaccctttttagctaataccccaccatccaagtctcactgattcaaattaaggttctcacatattgatcaagatgtttattgaaaagttcacacctgcaaataagagatgttcaggaaactagagaacttagataaataagagacgtagccactaaacgtgaaattggttatgtacgggtaccatctcacaactgaagataattcaaatttaatgtacagtacaa

SEQ ID NO: 23322 - DNA, 1303 bp, Setaria italica
  Peptide Sequence Number=SeqID_89296
agtatccactctagttcgattcattccatctgacaaggtgatcaatagatagggaaaacctgaacgatgaccagataacccatggattaatcatctgaagacaacatatgaaaccaatagcgcaaccgtcatgatcaaacaagtaatctacaggagtgtagtcacaatagagctgtcaaactgaagtcagtacacaatacgacagcagctttgtaccatctaaatgcatgagccaattgtacaagcacaatatgagcgtgagcattttcccaccagaaaagtctgtagcacccttgacatagatctttctcgatgagtcatgctcaagcagcatggtgaaaccgccaaaataaaggatatagaatgtgaccctttttagctaataccccaccatccaagtctcactgattcaaattaaggttctcacatattgatcaagatgtttattgaaaagttcacacttgattggtgtggcaggggcatacaaaggattttttacaacatactccacatataggttgtagatatgcttcaacgaatctcgttgatcaccagtccttggatgtgtgattagaataagctttataccagaagggctctccatgaagttcaatttgtatgtgtttgtcttgaagctataaaatgaacagccttgtcctggcagtagtggcaccccaagattacccttttcagccgtggtcgggtcgatcttggcggtgaaggatcggagggagaagaggagcccgaacatgagcttgtggtcctgggtggggtcgagggtgcggagcgggcggtgccactcgcggtagagcaggcagacgccgttgcggttgaagacgtagagcacctgcgcgttggcgccggtgcccgtgccggggggcggccgccggggccgggctcgcatccggcgcgaccgacgtcagcgaggagccgccgaagaactgcatcgccggtggactggatctgccgcggagggtgcggggcggatctccggccggaacgggagggagtagacgagaaagaaagagatcggaggcggggaagctcaccgccaccgacgggctttggagcagggggcgggggacgcggcgtcctcgaccggagcaggcggggagaccgggtcacggacgcgcggaccgcggcggcctagacgcctagtgccctgagccggcggcgcgacgcctgcgtgagggcgggggcgcgcggtggcctgagccctgagcgtctggcccgtggcgacggctggaggagaaggagacccggcgggcgctgggcggaggcggagttggggacgacggcgcgg

SEQ ID NO: 23323 - DNA, 243 bp, Setaria italica
  Peptide Sequence Number=SeqID_89297
tggcttggtgcttccaggcccgtgacaaggttctccggagagcaagtgaccatggtccagctgcaaggatccacagagtcttggtcccagttcttcagcacgccatgaggatccttgaggtagttcttgatcatcatgagagcttgaacttcatagtttacgcccttgggggagaggaggccacttgccggcccgcaagcggagacgaacaagagcagcaccagggaggaagcaacaagaacc

SEQ ID NO: 23324 - DNA, 411 bp, Setaria italica
  Peptide Sequence Number=SeqID_89298
cctatcccctgtgtgccttgcctatccccgttgcgtgtctcagcttggcaatgggcggcccgcaagcggagacgaacaagagcagcaccagggaggaagcaacaagaaccatccccattgccaaggcagcgcaagcccagggcctcctcggcaacaggttcaggagcttcttccgtgttcaaacatgtaagcgagcaagggtgaggccaaggcgaggaagaagcatgaggcagcctggcttcccacagaaccaaattgccagtggcagtggaagggatgccggatgcctctgctctgagcctctgaggacctgccacctgagcctgcttgggatagaaaattgcagcaaaggaggcaagaaaattcctcctcctcaccctcccctttgtgttcttggggcctgtgaagaat

SEQ ID NO: 23325 - DNA, 283 bp, Setaria italica
  Peptide Sequence Number=SeqID_89299
ggctggcctcgcccaccaccggctcgatcgcgctccgaccgctcaggatctccagcagcaccacgccgtagctgtacacgtcgctcttctcggtgatgttgctcgtgtacgcatactctggagcaatgtagccgtaggaacctgcaatgcgtgacatggcatgatgataattgggggagttcatcagcttggccagtccaaaatcagccaagtaggcctcatactttgaatcgagcagtatgttgttgcacttgacgtcccggtggagaatggccgggacgca

SEQ ID NO: 23326 - DNA, 158 bp, Setaria italica
  Peptide Sequence Number=SeqID_89300
gatcaagcgggtgcagaaaatcaagtttatccaggatcggtgtaaggggcatgagagattgacctgggtcataatatggatgcgatcgttcttcaaacagttctacggatcagtgtccaacgatgactatgtcacaatgaggcttggtttcgtcatgg

SEQ ID NO: 23327 - DNA, 170 bp, Setaria italica
  Peptide Sequence Number=SeqID_89301
cggcgggcgggagccagcaggtggtgatgcggtggcggtacggggacgtgggcgacagcaacttcgcggtgcacggccgcgccgtgccgctgctcgtgggcctgctctgcgcggtcgtcttcttcgtcgcgctctgcctctacctccgctggcggtgccaccggtacacg

SEQ ID NO: 23328 - DNA, 1011 bp, Setaria italica
  Peptide Sequence Number=SeqID_89302
ctacaacggcgacagcttcctcgcctccgacggcgtgctcagcctcgggtacagcaacttctccttcgcgtcccgcgccgccgaccgcttcggcggccgcttctcctactgcctcgtcgaccacctcgccccgcggaacgccaccagctacctcaccttcgggcccaacccggccctgtcgtcgccggcccccaaggccaggaccgcctgcgcgggctcgcctccggcggcgcccggccccaggcagacgccgctccttctcgaccaccggatgcgccccttctacgccgtcaccgtcaacggcatctccgtcgacggggagctcctcaaaatcccgcgccgcgtctgggacatcgagaagggcggcggcgccatcctcgactccggcacgagcctgacggtgctggtccgcccggcgtaccgcgccgtcgtggcggcgctgagcaagaagctcgcggggctgcccagggtgaccatggacccgttcgactactgctacaactggacgtcgccgtcgacgggcgaggacctgaccgtatccgtgccggagctgttcgtgcacttcgcggggtcggcgcggctgcagccgccggcgaagagctacgtgatcgacgcggcgcccggcgtgaagtgcatcggcttgcaggaaggggagtggcccggggtgtccgtcatcggcaacatcctgcagcaggagcacctgtgggagttcgatataaaaaaccaacggctcagattccagaggtcgcggtgcacgtaatgattgggccgcggtgatccatcgttctcccctccacttcattttttacccctttgtggtggtgatcttgctgattctttttttcttttttttcttttcacccttgttcagatactaatgcaatgagaaatgtaccttattgcaatgcaaaagtgataagctgtaatcagttttgcattgcaataaggtacatttcacccttgttcagatactaatgcaatgagaaatgtaccttatcacttttgcattgc

SEQ ID NO: 23329 - DNA, 540 bp, Setaria italica
  Peptide Sequence Number=SeqID_89303
ctcaactcctacaaggtggagcacaacacactagctccatagtgtgctctagcttgtaaggccacccaacaaggtctggtgaccatatagacttgtagtatcaacaagagcagagtagggagacagagagaggagacactggaagccagcagggaccagagagcactgtaggagggagtagtgtgcactagtgcaagctgcaaactcgggtacaagaagtgaacgatggatattgagtccaggcaaggttccaaaggggactccatggctgcatcggaggtctctgttgactggagaggcaggccctgcgaccaccgcaagcatggcggcatgaaagccgccgtcttcgtcctagggatccaggcgttcgagatgatggcgattgcggcggtggggaacaacctgatcacgtacgtgttcggggagatgcactacccgctgtcgcaggcggccaacatcgtcaccaacttcatcggcaccgtcttcctcctctccctcctcggcgggttcctctccgactcctacctcggcagcttctgg

SEQ ID NO: 23330 - DNA, 709 bp, Setaria italica
  Peptide Sequence Number=SeqID_89304
tttctagaaaccgatcatggcgcagcagaaactcccattcatgcatgaaacgttagaagacataagccaagcactggtaattgttgcaattcagtttatcactcggctgcccatcgctgatctagactaccattcacaatccaagcatctcaagttaccagtttacatacacctagtacacaattctatggacataccaagtactactatatgttatgcaggaacatactgtacaagcacaagtgagcaccaatacgggctctgcatggccaatagattagccatggagaatatcaggcgaagctagactgctacaacgaccatggggacattacacagacgggcacattctatttagtcttaccgcgggaacggggaaccaaggtttcctttcatctcctgggccggacggctccgatcgatgtcgtcctcgatgatacggaagatgaacgggctgacctgtcattctcctccttgtcctcgctgaatgccttctggagcacgtcttgcaggtcatggaacctcctcttcttctctgtggatgtggatgtgtctctcccaagggaagccagctcgttttcatcgtccatgaactggtccagcacttttgaacaccgtgggaagaagcgcttcccaagttcctacttgtttttggtagtagggtcgtcttcttatttccgttagtttcttaagttttgtttttcttttt

SEQ ID NO: 23331 - DNA, 1499 bp, Setaria italica
  Peptide Sequence Number=SeqID_89305
tactaattactaatttaagtcttaaccaaaaatggcgggaacggggaaccaaggtttcctttcatctcctgggccggacggctccgatcgatgtcgtcctcgatgatacggaagatgaacgggctgacctgtcattctcctccttgtcctcgctgaatgccttctggagcacgtcttgcaggtcatggaacctcctcttcttctctgtggatgtggatgtgtctctcccaagggaagccagctcgttttcatcgtccatgaactggtccagcacttttgaacaccgtgggaagaagcgcttcccaagttccactgttttggagagggcgctcatccgagtcaagtgttcttccttcattttgaaaggagtgtcatttagatcaacagtaagggcaaattccaaggttccatccacttgagcaatgtccattgctacccttgcctccatggggaacaatatcctcgctaaagcaactcgattttcaaggtagagcaaccttccacgcagacagtctcctgccatcgcaagagaaactgatgcttctccaagttgcggatcccttctttcagcttgctctagtatctcaatacataatttatctttcggagaaggttttccatcctcagtaggcccaaagtaatccccatgcttggtaagtcgcttagatatctgtactgcttttctatgatcaaatgtgagatctgacggccgagctcccttggtcaaaagggagacaataattttaggctccattctcatagcagcaatatgaagaactgtataacctcttgggttcctatgattaacatctgcaagtgcgagatccagaagctctgttgtgatctttgagtcacaatgttctacagcatagtgcaatgcatatgcgtcatcaagattagttttcccttccttgagtagcattctgactagctccacatcatcagaatccagcgctctgtgtactcttcgtacatgtatgttagggaagcccttgtcttcaggcgaaactaattcaagacttagccttgcatcaacaatttgtttgacaacatctggaggcaaagccttctcaagagtaatcatatcaagatttgaccgaactactatctcaaggcatctctcgagaagtttcacacaagatttgctgcataagtttgcaacagataggatcaatgggaggttgtctacttcaaccttatcaaggacatcaaggagctgccgctggaagaggctggtgagctcggcgacctcgaaggtggaggcggcgaagaggacctgcgccatgaaggcgacggcggggcggcagccgagatgcgcgcaaccgccctcgtcgacgcagagacacgccgccttgggcagggcgccgacgcggccgctgtagaggtactcgatcaccagccgcagcgcctcgtagccgacctccaactcctcgccgagaagctctcggagctcgaccttgtcctttgttcctttgtccttgtccttgtccttgtctttg

SEQ ID NO: 23332 - DNA, 267 bp, Setaria italica
  Peptide Sequence Number=SeqID_89306
ctctgtcgccggaggagacgcgccgggaaggccagttccaggttgtgccgggggctcagggcacgccggatccggcaccgccggcggccgccaagagagggagccctgaggtcctgaaattctctgtgttccaagggaattcggagtcagatggtaaaggagagaaagtcccggagcactctaccactgtctcactgcagtcaccattcccagaatacaatggccgtttcgagatcggtcttggtcaatccatggccccttcaatta

SEQ ID NO: 23333 - DNA, 270 bp, Setaria italica
  Peptide Sequence Number=SeqID_89307
acgcgccccctccgtgagcagccgcaggttgcgcacgtagcggcccaggacccccagcagcgccgacagcctggcacgcagccggcgcgtcgggctcagccggaaccccctcgccggccgcggccaccgccgcaggcccagcctcgtgtaggacgaactcttggtctgctgatcacccatgattagctagcttccttctcttctggattaccctggcaagtagctaacgacacacctgtcacaatctaatcctgctatgattagcgcaca

SEQ ID NO: 23334 - DNA, 251 bp, Setaria italica
  Peptide Sequence Number=SeqID_89308
cggcagcggcgacggcgaggccggcgggacgttgctgcccttaatgaactcgaggcactcggcgacggcgcgcgcgtagaacgagttggaacgcatgcacggcggccgccgcgccgccttgctgccgttgtcattgccgttcccggtggcctgatgagctcccttctcttctggattaccctggcaagtagctaacgacacacctgtcacaatctaatcctgctatgattagcgcgacacctctatctgtg

SEQ ID NO: 23335 - DNA, 416 bp, Setaria italica
  Peptide Sequence Number=SeqID_89309
ttcttgaggcggccgaggctcgtcggcagcggcccggtgatgctggtctcggcgaggccgatcatggtgagccgggagcagttgccgatctccgtggggagcgcgccctggaggttcttgttgccgccgccgcggagcacctcgaggctggccatccgcccgatggccgccggtatcctgccggcgagctggttgtcgtagatgatgagctcacggagagccgtgaggttgccgatggcgtccgggagggcgccctccaggcggttggagttgaggtacagcgtctcgagcttgctcccctgccggcacagccccgccggtatcggccccgtcagcgcattgttgctgaggtcgaggtgcgctagcgccggcagctctccgagcgccggcgggataggccccgtcaggttcgcgcc

SEQ ID NO: 23336 - DNA, 431 bp, Setaria italica
  Peptide Sequence Number=SeqID_89310
ccgggccgctgccggcgagcctcggccgcctcaagaacctcaccacgctggccatctacacggcgctgctctctgggccgataccgccggagctcggccagtgcacaagcctcgagaacatctacctctacgagaacgcgctgtccgggtccatcccggcacagctcggcgggctcaggaagctcaccaacctgctactgtggcagaaccagctcgtcggtatcatcccgccggagctcgggtcgtgtcccgggctcaccgtggtggacctgtcgctcaacgggctcaccggccacatcccggcgtcgttcggtaacctgtcgtcgctgcagcagctgcagctcagcgtgaacaagatctccggcacggtgccgccggagctcgcccggtgcaccaacctcaccgacctcgagctcgacaacaaccagctc

SEQ ID NO: 23337 - DNA, 539 bp, Setaria italica
  Peptide Sequence Number=SeqID_89311
agaccgaaggaccaagcgaggtggccagcgagaagggcaccgcgaaccacaccagcccgcccagcaggtatcccttgtgcgtcgacgatggccgggccgcgattgcgctcatccagtaaccattgtcgacgaagaccgtgccgaaattaccaacgatgttgatgatgccgaagacgagacccccggagctgagcatggtgaggtaggatcctttgaagtttccatggacagggccgcatgcctggtcagagtgcgagagcggtgcggagcagtcccgcgccgcgctggccacggccgtgaggtgatcgtgcaccaccttcgggctgccaaggctgttgctggaggtgtacacgaggaagacgaagatgacgaggacgacgtggacgacgacggagtggatgtagctggcgaggaaggtagccttgagcccgcccgcgagcgtgtacacgacgacgccgagcgggatgaggaagctggcggcgtagacgttgatgcccgtgagcgcgttggccactgcagagccgcactagtgcgactga

SEQ ID NO: 23338 - DNA, 704 bp, Setaria italica
  Peptide Sequence Number=SeqID_89312
ggccacggggctatggtgtccgcatactgcaatagctggcctcctaattctccacggcgccatagccccgtggtcgaggcagtcaggtgactgcgctgaccacaaacacttcttgcatgttgtgttctatttttgactgagaaactactgatgatgctgatgcacacttcgtatttgagttaatggccctgctggttggattaaaaacctatgagttcttttcgacagtggcagattgattctaatgttaaaaacctatgagttcctttgttgattactagttcaacgattaggatttttttgttggtttggcagatagattgcctttcacatgtatttcaattacatggttttctgagtgaactacaatttttttcttgaaatcctgtaagtagatcctcttaaattgcacaattaaactttgggcctaatttgcggtatcaatacatccatctttatctacatgtatgtaggtgctgatatttcagattttaggtttcttattaatacattttatggctctcttagtacaagtgattgtgttgcaaattggtggttatatgcttatatatcccagatatgatgaacattgctgtccatatgcatgattatgtattgtgaatttcactatctgattatgcatgccccttgcttgctgcaagaccattgatatattgattatgtattctgaactttcaatatct

SEQ ID NO: 23339 - DNA, 375 bp, Setaria italica
  Peptide Sequence Number=SeqID_89313
taaagaagaaagaacaaaagaaagaaaataaaagaaccaactactaggggacccgaacaacccagctggcccacatgtcctccaccccatgcatagagagctccaccttcagttacagcacaagagtgaacgcctccacaagacacgtctctaattattattctatcaagggcaacaattcgcctagggatcagctccttgtctccagactggagggagcaatggccaagctgccccatgcttcccagtccccaagtataccccatgcttgcagcaaaccatcctcagatagagccacaacatgaacagctccacaagaaacctgcttaatcactgtgtctggtgtgaaagctccccaaaaaaggcgaggataat

SEQ ID NO: 23340 - DNA, 483 bp, Setaria italica
  Peptide Sequence Number=SeqID_89314
taagacaacgtttctttgtcaacattggggaactcaagaggataagatttggacctttgcgttcaaatatcgtaaatagcagcaaaaatgcatggcgcaacacagatgctacattgagactaatgatctacatgagatctagatgaaataaaactggcttgttctcttgcagttagccctacagttagttgtggttagtcttcaatactccaaaacgcttctatgttgtcacgtgataaaccacacaacagtcactgacagcagagaacagctcccttgagatgacttacacctccccattttctgatatagccgctgtatggtactcgccacatgacaccctaacaatcttcacttgctcaggggcgtcatcaaggaatcttgcataagcagttaatacacgagctccctgaagtccttgagaagtacagcctctgccaagctgaccatactcattgtagcctggttagtaagaaaatagca

SEQ ID NO: 23341 - DNA, 1792 bp, Setaria italica
  misc_feature (1745)..(1745): n is a, c, g, or t
  Peptide Sequence Number=SeqID_89315
gactcagtgtgagtagtgatgcaacatcttctattagctcagcattagaaaggtttacagtctctgctagcttgaactcacacagctcttttaacgaacatgcatcagtcagaacagctgaatgtccacctccagcagcaagtctcctcacctcaccaacacaccaatcaactggagaggggaaccaagcataagtagattttgcatttgccgcctgaccatagctattatagccccacccatatatacggccatctttcatagatacaagtgtgtgagagtgcccacaggtagcaagacgaacacctgatggtatgaccaggactgggatattgcgaagtagcatgtcagatccattaagagagcaagagaataagccactctggggcccgacacccagctggcccacatgtcctccaccccatgcatagagagctccaccttcagttacagcacaagagtgaacgcctccacaagacacgtctctaattattattctatcaagggcaacaattcgcctagggatcagctccttgtctccagactggagggagcaatggccaagctgccccatgcttcccagtccccaagtatacacctccccattttctgatatagccgctgtatggtactcgccacatgacaccctaacaatcttcacttgctcaggggcgtcatcaaggaatcttgcataagcagttaatacacgagctccctgaagtccttgagaagtacagcctctgccaagctgaccatactcattgtagccccatgcttgcagcaaaccatcctcagatagagccacaacatgaacagctccacaagaaacctgcttaatcactgtgtctggtgtgaaagctccccaaaaaaggcgaggataatctgaaccctgattttgtccccaaacccaaagtctgcttttggacaccgtgccatcgttttctcgaggctcagcaacagcagctgtacaatgtgcaccacaagataccgattttacaagctctgtctccagtgacttgactttcttgggttcctttgcactctcctcggtcccatctcccaactggccaaagtcattagcaccccaggtgaagagtgatccgtcagaagcaactgcagcagtgtgctcacgaccacatgcaatatcggtccaccttaggctctccccattccccaatttgaatagtttaggagggaggctcttggggatcctcaagtggcactccttgccctttcgcgcagtctggccactgtggttataaccccatatgtaaattgcgctttttgttggaacaccaacaacacgcaggttgctgagcacatcatctacatccatggcccctggatggatggaacgaggaggaggaagaacgatgcagtctttcgggcggattcggcgaaaggtggggagcttggcttgcttcccttcgtttgacccgcggcggaatggcctcgcttccttgttcctcctcggggcacacacacttgtctatgggcaccgaccaccggatttttctggaattctggattcccgaggtcctgggaaaggatagacaggaacggcggagagcggaggtcacgtgcccaacgtgagcccggtccaggggaggttggtaatggtaggtcgccgggtgcacaggagcgtgccgcgtatatagccgtagaccgagctcaccaaactcctcctcctgagtcctgacgtcagctacctgcctctgcttcttcctccttccgcaaactcaagngggggaactggatcaaatccctagcaacaaagggtggaaacgagaaa

SEQ ID NO: 23342 - DNA, 551 bp, Setaria italica
  Peptide Sequence Number=SeqID_89316
tataacgccaatctttcatagatacaaaaaaaaagtaaaaaagtaaaaacaagtgtgtgaggttgcccacaggtagcaagacgaacacctgatggtatgaccaggactgggatattgcgaagtagcatgtcagatccattaagagagcaagagaataagccactctggggcccgacacccagctggcccacatgtcctccaccccatgcatagagagctccaccttcagttacagcacaagagtgaacgcctccacaagacacgtctctaattattattctatcaagggcaacaattcgcctagggatcagctccttgtctccagactggagggagcaatggccaagctgccccatgcttcccagtccccaagtatacacctccccactacaaaacccgaagatcttataagtagaaacaatcaagttcatgcttggtaggcgtgtaatgataagagttaagatgtgaaatggttaaggttttgacttgccgtgaacaatttgaaaaatgaaagctaacaatctcagcaatatctaggctagtaaatcgac

SEQ ID NO: 23343 - DNA, 876 bp, Setaria italica
  misc_feature (1)..(31): n is a, c, g, or t
  Peptide Sequence Number=SeqID_89317
nnnnnnnnnnnnnnnnnnnnnnnnnnnnnnntgtttttttggttcaataaagtcagcatcgatccttctttatagactatcagtaccagcaatactgaccaacaatgtgcacaagcattggtgcaaatttcagtttatcacacttacagttgcacccacaggtttccattaggttgtacaacaacctgactgtcggaccaagtccatgatacatacggagcctctctggccctccgatacacttgagaggcacataaatggaagtttacagaccaatcagaataaaattgatggagtccacacaccatcgcatagaccacaacaattaatgtctgaatcgataacattactgggagatcaaagatattaaggtttagatgaattgctatcggtttaatcggcttcagccttgatcgcttcaactattcatcagtgtctaaccggccttagctttgacttctccaggaacttgcttttccaggagctcacattctacttgatcatgcacatgttcccttagtttctcacacaagcgtgccaaggcatcagcaccagtccgtgatgcaacatcttctattagctcagcattagaaaggtttacagtctctgctagcttgaactcacacagctcttttaacgaacatgcatcagtcagaacagctgaatgtccacctccagcagcaagtctcctcacctcaccaacacaccaatcaactggagaggggaaccaagcataagtagattttgcatttgccgcctgaccatagctattatagccccacccatatctattacggtaaaccaattaagtaattaacaaagtactacctacaacctacaaccaaacaacaaccaaatacaaactaggaagaagga

SEQ ID NO: 23344 - DNA, 354 bp, Setaria italica
  Peptide Sequence Number=SeqID_89318
tttaccttaggtactaacgtaagttaacgtcgtattttcgctggtgctaatcctattatactcgtcataacaaaggttgatctacttcctagagacactgacttgaactgcgtaggcgactgggttgttgagtcagttgtcaagaagaagcttaagtaggaatcttctccttgctgttcctccttccacagtactttcatcaaatgcttttacccatttgaagttgtatttgttattacttgctattttgtagcgtccttagtgtccatttgacaagctcaaagtcattggttggcatcacaggggttatagcagagattcagcaggaaaagaaggtcagcatgtccttttttt

SEQ ID NO: 23345 - DNA, 562 bp, Setaria italica
  Peptide Sequence Number=SeqID_89319
atgagtgcaagtgctgttgggagatttgtgcactgcattatatgcaatttctgcaatttatagaaacttaacttcattaattcaggcaatagaactttgaagaatacaaatgatatttagtatttctgttgttagccaccttagttatacttgaccaatattatactctactacagggttccgcgaatgttgggaaatctgcatttatcagtgctttgctaagaacaatggcatataaggatccggtggcagctgcagctcaaaaatacaaaccaatacagtctgctgttcctggaacaaccctcggccctattcaaatcgaagcattcttaggaggagggaaattatatgatacaccgggtgtccatcttcaccataggcaagcagcagttatacatgctgatgatctgccttccctcgcaccacaaagtcgtctaaaggggcgatgttttcccgtatgtatatttcattctctggaacacaggttccttcctcaaaacttccacactaatctttttcttcagaacatgatgttatgttcaggctaatgatacagtatgtt

SEQ ID NO: 23346 - DNA, 660 bp, Setaria italica
  Peptide Sequence Number=SeqID_89320
atatgctccagttgccagttcgattcaaaataccaattgagtatacttgtacacgtggtcacactcttgatgtgtttttattccttaactgtttgcttctgcagacatatttcgcccatttgaggttttcgtgaagtgcgacttgtcaacaaagagtccagacatcctggtggagacccacatgtgttgtgttttgttgattttgacaaccctgctcaagctacaattgctcttgaagcgttgcaaggtgatgatacttataattatggatatggagtatgtagcggtgttgattacttgactaacttttgtgagatgcaatttcccatgtgtattcttgttaaattctgttatacttctctgcatttgcttctagtttgttgtgaagcttgttttcaaattggtaattatacctgtccattcaatctaactttgtgcaagtcctgtaacatagtttttaagttcatacgctagttatagaagcctgctgacagttaggtgggtatacagcggtaaacccaacacttcactgcattccagacaacactcagcatttccagagtaccaagccatagcattgctcgacagctagctttgttgtgctattcctacccatctaacactagttataaaattaccaagttttctataggatctaac

SEQ ID NO: 23347 - DNA, 1217 bp, Setaria italica
  Peptide Sequence Number=SeqID_89321
gcggcgggcatgaacccgcaggccgccgccgccatggcgcagcaggccgccgcgccgccgctcaagcgcgcgctactatagttctgagatgtgtctggaggacaagacatgacaggatattatccacgtgaaactgacagggcaggttaccattcacttagagagaatgaagcaatcggagcatcttatgatcgttacctgcgcaatgggatgccctccgtcggtgccaatgacactagtagggctgctggaatggctgctgggatggctgcggggatgggtgctgggatggctgcggggatgggtgctgggatggctggctatggtgttgatgaacggcgtatgatgggtgttgttggtatggacagcagagggatgggctacggtggcagacctgagcctcctcttcctccggatgcatcaaacactttgtatattgagggattacctgcaaactgcacacgccgggaggtttcacacatatttcgcccatttgtaggttttcgtgaagtgcgacttgtcaacaaagagtccagacatcctggtggagacccacatgtgttgtgttttgttgattttgacaaccctgctcaagctacaattgctcttgaagcgttgcaaggttataagtttgacgaacacgatcgcgactcagcccatttgcggctgcaattctcacgctttcctggtccgaggtcagctggcgggcctcgcggtaggcgttaagacgtgtggacctcgcggttgccgaacctatcgtttatacgaacgatcaatctgccgtggcgtaacgcttcgagccttcgatatgcgctgaaatcctcggtggcttttatgtagggttcgtcagctcattccgtgaacgcgtgaaagggactatgcaataagtgttattcggcctcttgtcattagactgccgtagcatgtgttagggatggagttttaagttatttgacatactgtatctgctgccttagttgttattatctactgtaacttcgttaccttgctatcggagacaagagtttgttatacagtgaattgttatatgttcttagaaaaaaaaagggagataacgaattgcaacgacccaacaaggacatgacatctaacgtatttgaccatcagttctacgcaaaaaaaaagagtacttatctaggaagtgatcttgaggttttgcaaccacctggttgaggctttctcaataggcagatggt

SEQ ID NO: 23348 - DNA, 464 bp, Setaria italica
  Peptide Sequence Number=SeqID_89322
cgggcggaggaggcggcgatggcgacccacggggtgcggaagagggcggcacggcgggcgaaggcggacgggaggaggccaaggtccgccatgcccagcagctggtacgcgccgctgctcagctgggcctcgaacatgccgatcgacgacagcaccgcgccggcctcgatccagtacttgagccacgagcctccgatgatgcctgcagcatcggccaggtagccgttcgcccaggcctccggcggcgcgtccgtggcaccggtcgccgccatgagcggcagcaggtagcttgcggcgatcagcaccacggccacggccagcgcccgcggcaacgtccgctccggccgctccacctcgccggccatcgtgctcgcgctgtcccagtagttgaggttccagaacagcgtgttgaagaagagcctccagtccttcctccctttcaccgacgccgcccaccgccgcgg

SEQ ID NO: 23349 - DNA, 261 bp, Setaria italica
  Peptide Sequence Number=SeqID_89323
gcacatccaatccaagtcatcagccagctcttctcagttctcacaagtcacaagcaacagctctgttggaactccaagccgctctcgattcccaggaggaaccgaagatctgctggtggttgcctgcagcaggacacggatgggtaaccttgtctcgcagtgcgtcgtcgcgagcggcgccggcgcgcggcccgtggtcgtggcgccggacggcagccggacaagggtggaggagcacacaggggtcgccgagctgatgat

SEQ ID NO: 23350 - DNA, 379 bp, Setaria italica
  Peptide Sequence Number=SeqID_89324
ggcgcacccgggcaggatcggatgctcgcaagggttcaccgcgctgtacgccggcggggccaacccgaacgtgctcgtcggcgccgtcgtggggggacccgacctccaggacaagttccccgaccagcgcaacgaccacgagcactcggagccggccacctacatcaacgcgccgctcgtcggcgcactcgcctacctcgcgcactcctacggccagctctagctaagctacctgccgttgagttctagctacctgcctgagttccgcatcattcttctttggtcgataaggttgtcggagtattgttagtgttctggtcgtcgtgattgattagtcgtttcgatggttgattaggaggggagttgttaatcgtggttt

SEQ ID NO: 23351 - DNA, 1379 bp, Setaria italica
  misc_feature (1)..(48): n is a, c, g, or t
  Peptide Sequence Number=SeqID_89325
nnnnnnnnnnnnnnnnnnnnnnnnnnnnnnnnnnnnnnnnnnnnnnnnggttggacaacgtagcagcgccgacttaatgaatgaatataatgatgcatcgtcgattgattaacaacactgtagtctgtgttttgacataggcaagctagaggcctgatgaattaatacagttcaatatgtatatataggaataataggaatagtaattctcagcagcagattcgatcatcaagtgaggacttggatgtagttgtcgaagatgtcgttgacgatgatcctgtaggctcgctcggtggggtggtagctgtcgaagaagacgtggttggagacgtcgtcgcagacggagacgaagcgggagtcgcagaggccggtgacctcgatggtgccggtgccgcagcaaccccgggtggtctccgtgaagccgtacttctcgccgcgctccatgagatcgtccaggatgcggtagatgtccaggtagacgaccagcgtcgggaagcccggctcggcgttgaggccggcgatcatctcctggatcctggcgttgtagagctgcgccgcctcgttgcgccggggctcgcactcccgccgcagcccgccgccgagggtcctctgcgacggcacgcaacccaccggcggcatccccacgaagccgatcttggcggcgcccctggcgctgacgttccggaggaaggactccgcgccggcgaccagcagctccacgtagctggggatgtcgtactccacgctccggaacggcgtcgtgaagtaggtgttggccacgtcgtcggtgcccgcgcacacgacgaacagcgcgccgccgatgatcttctccgtctcctcctcgccggcgatcgccaccagcttctcacggtactcgtcgaagtaggcaagttgctgctccagcgagatcacgctcacgacgacgggcgtgagcgggtcgaatcccgtggctcccgacgcgaagctgacgccggtgaggagatcctccgggctcagatccacgcccaggtagcccggcagcagctgcttcactccaagcccctgcgcgatgaggtctgtgggtatgaggccgttggagtagcgtccggtggcctcgtggttgaagaagtccttgccgtagggcggatggttggccttgatgagcgtgagcaggccgttgttgttgccggggtcgacgatggagtcgccgaacacgatcaccgccgtcaccagcgggccacgagaagggtcgtactggtacccatggcacgccgacgagctcgccgcaactgcaagcagcagcagcaggagcggcggcggcggcgccatggccggccggctgtcgtcggcagctcgatcgatctctgttactagctgcttgctctccgcttgcacttgac

SEQ ID NO: 23352 - DNA, 331 bp, Setaria italica
  Peptide Sequence Number=SeqID_89326
tgctagagtagttggacatcagtagtaaccagatacgagtactgccggactcatttgggaacctctcaaatctacgcgtatttcatgctgatgaaactccactggaagtaccacctaaagaagttgtaaaattaggagctcaggtatccatcgcattatcgcagtgctgttatcccatatttactaacttttgtctttcactggctgaatgatgtttcttctacatgtcaggaggtggttaattatatgaagaatatggttgctgcaaggggagcaagccagaaggaaacagataagaggagcttctgggcctggcttcactcgctgttcg

SEQ ID NO: 23353 - DNA, 1215 bp, Setaria italica
  Peptide Sequence Number=SeqID_89327
ccgccagataatgagataaacttatcaagtaacaacacaggtgccagtacttgttgaaaaacagaacagacataacagtgccaaggatacattaagcatcttccagaactcagtacgcattcagctatgaaaaactgctaacattactgcaacatgaaaagcttgagtctacagacagttcatcagtagcgatcatcaaaacgtcctcctcccctgctggggcgatcatacggcccaggcctctccctgtaacttcctccatcatagcgtgcaggtcctccaccgccatagcgatcagtgacaccaccacgtggaccatccctgtcatagccaccaccccttgggccatccctgtcatagcttccaccaccccttgggccactcctatcatagccgccgccgccgccaccaccacgaactccatctctctcgtagcttctttctcgctccctaccataaccacttggcgcataacgatctggaccacctccgtacctgtccgcaccaaagtgatcgccaccagaggggtagcgatcattggcataacgatcacggcccccagcatacctgtctcttgtgtcaacttggtcacgatacccataacgaccaccatcataacgatcatccatgtaacgatcaccaaacctatctgatccagagaaacggtctcccctgccgccaccgctgccaccactaaacttggatgagaatctgcccgaacgaccaccagcagcattagggcagtcacgaacccaatgtccaggacgaccacattcgaagcaattgccggggggtggaccatcacttctaccaccacgatactctgctcgtccaccaccactgtcataccttgtgtcatctgtgttcatcttaggctcagccttgttcactgaaatggtccgaccatccaactcttggccatgcatttccttgatagcgctgtcaactgcccgccgatcttcgaatgtcacaaagccaaagcccctgtggcggttagtgtgcctctccagcatgatctgcgcgtcgacgaccttgccgaagcggccgaaagcgtcctcaagcttgcgctcgtccgtctgccacgacaggccgcccacgaagatccggccctcctccttcccttccatcgccgccgctctcgatcaatggattcgatgtgcgggggtggggagggaagattagggtttgggaaggagaatacgaacgaaggaaaga

SEQ ID NO: 23354 - DNA, 458 bp, Setaria italica
  Peptide Sequence Number=SeqID_89328
gaagggaaaactgtgctttgtgcatcaccaaaattcaccaatgggagatggcccgcttttggtattcccacaagcgttgcgaaacgtccggaatggaggggggctccggtcttatcttcgttcagtataccaccgatggtctcacagcatgtgaaggcattacgtgcgttattgtggacattgactatggtaaaaagatcaaagaatacatcaacaccaccagctctccaatcgcaaggattgaaccggcccgaagcattacaggtaaagagatcctagcaccaaaagtggcagcattctcctctagaggtccatcacccgactatgctgatatcattaagcctgacatagctgcacctggagccaacatcttagcagcacaggggaattcctacgcaattaagtcagggacatcaatggctacccctcatgtaactggcatcatcgcactgctaaaa

SEQ ID NO: 23355 - DNA, 1363 bp, Setaria italica
  misc_feature (1318)..(1363): n is a, c, g, or t
  Peptide Sequence Number=SeqID_89329
gcagcaggtgcttagggcataggtctcgattcgatccatcgcgcctgaatcgaatagattcggatcgagtcccgccgccggcgaggggctcggcgctcggcgcaggatggcgagcggcagcagcaacggggagccgagcacggcgccgcagccgaatcggtggtatgacctccgtttgggttcctcctgtcgcgacccttcgcccaccaccaagttctgcaccctccgctatgaatttaagccagcatcaattgacaagactcaagctgggtctctgcagagtaccaaagataaccgggttactgtggaattccacaataatcagcctggcaagccaaaggtgacatttgagggaagccaagaagagtacaaggataatgatggtgtctgttttttgatggtgagaccttccgcctggagaggttacatcgggctgtcaagagattaaggcatgtacgagttccgggagagtctgcagctgctaatttggcaactacaattactggaatgggtgcagaatcacattctcctccattagctaaagtcggcaagtcacagtcaataagtaaaccaacagttcactctgtcccagttgaggttgagcgtattgacatcggggaacctgaaaattcaggcccaaggtacaataacaagagcaccacatatcagcctgttaccacagacccatttgccctttcaccatatccaaatgacgaagatgataatctcgatatacttggtgatgatgatgataatgtctcaccaaataacataacctcaggacaagggacatctgtttgtggttttgacatcaacctaccgaatcagggcaatatggatgatgaaattgctgatgtagatgtaaacgatgaggctgatgaggggctcaatgcagctgaggcgctgcgtgctcaagtgaacgcagagcaggacagctctagctctagcgggagcagcagcagtagcagcagcgggagtggtagcgggagtgggagtgggagcagcagcagtgatagcgatggaagtgatggtgtttcggcgagctcaggagctgatgttgatatatgagcttgatatgcaaagttatctttcgacatatgtcttggttcacggtttttcatttttagcaaaagaggtgtaaggtctgtatatgttggctaatattgcacaggtacattaattaccatcatggcgaacttggttggttggtttcactagacctggtctagaagcacagaatctgtaagcagatatgtacaactatgtccttatgcaacattgttgtcaacttgaatgatatttgttctgttgagatagnnnnnnnnnnnnnnnnnnnnnnnnnnnnnnnnnnnnnnnnnnnnnn

SEQ ID NO: 23356 - DNA, 356 bp, Setaria italica
  misc_feature (322)..(322): n is a, c, g, or t
  Peptide Sequence Number=SeqID_89330
cggcggccgcatgcatggaggacgacgacgaggaggacggcggctggtggtggtggtggccgtggtggctcatcatcccgaaggagatgttcatctcctgctgctgctccctcatgctgccgccgccgctcgccatggatgatatggatcggaggacggagaccggtcgaccgatcgatcactgcaagcaaggctgctgctgcggccgcaggcgcacgccgacacggcctgggcgcaggcggcgtacgtgcgtatatatccccgggccggccgcagagagacctaggaatacggtttgactctaggggccgggccggggganaagggctagcggccaaggcaacacctctatccct

SEQ ID NO: 23357 - DNA, 327 bp, Setaria italica
  Peptide Sequence Number=SeqID_89331
aaatgatgcaagtgtgggcctttggcctcagtggcactggcaacttgtggctctaaagaattcgtgcaactccacgtagcagccaaagaaaaaagaagaagaatggaaaagaaaagttcttggaccctgctgatgtgtgtgcagacgcagatcggaggccccttgcggccttgccaatcaggccatcgcagatgctctctctgtcggtctgccctgtccatgtgtggggaaagatacgattcccttccctgcattccaggatgcaccacaacacgttaaggatacttatattcaattccttatgatctcatcacttcatcagaaacg

SEQ ID NO: 23358 - DNA, 219 bp, Setaria italica
  Peptide Sequence Number=SeqID_89332
atcgcgctcgagacgctcaggaagctcaacatcaccgtcgtcagcaacggcacgtccagctagcgatcgagcggatgggtcatggacgacgacgagcgaatgggcatatgcgtttctgtgtgttttatctgtataaataagttgaagagagtaaattcattgcaaggagcagattacacacatgtgtatggatgtaagcatagaaacaaattttgtaca

SEQ ID NO: 23359 - DNA, 463 bp, Setaria italica
  Peptide Sequence Number=SeqID_89333
ccttgtcattgaaggtctcgtcaacaagtgatctggcaagacatctaacagttgtagaggtttcttcagactgtctctcatttgattggttcgaagtggagaccatcctcctcaccatttccatcagttccgtgtgttccatttttccctttgcctgcccctttgccgagcaagtattcagcaagcggactctaagtccatttctccagttttcctcatcactaagcgccacaattgccttctcagcatcctcaggtgtctcgtactccacaaaagcatgcaactgccaacagctgaaaatatcttcttaagattctggtatgaaggatcaccgggaagattttctgcaacaacaattcgggacttaagctcctgcaaatcagattcagtaaatggctcttgacgtttgaccctttttccatcatcacttacaacaagttttgatgaggttcggagagcttct

SEQ ID NO: 23360 - DNA, 176 bp, Setaria italica
  Peptide Sequence Number=SeqID_89334
ccggtgatccttcataccagaatcttaagaagatattttcagctgttggcagtgtgatttcaatccgtacttgctatcctcagactccaaatggctgaaaatatcttcttaagattctggtatgaaggatcaccgggaagattttctgcaacaacaattcgggacttaagctcctg

SEQ ID NO: 23361 - DNA, 497 bp, Setaria italica
  Peptide Sequence Number=SeqID_89335
tacctacctaactacttaagcctcgccaaccgcgcacagacctggtagcacagcttgaggcttccctctgcccatggtgaaaccccgggtaccatcaggcatgcggggacccggaggaagcttgctggccccaatcggcagctgctggtgctgctcgggcttgctcattaggttgtgcggcggagttccagccgggtgggctccgccgcggttgccacctttggtggttgttgccgtggtgattgtagtgtggctggtggttctggtggtgctggttgttgctgtggtggtaattgttgtactggttgttgccacgcccgcgccctctgccaccgcgacctcgccctttgccgcgtttcggaacttccttgtcattgaaggtctcgtcaaacaagtgatctggcaagacatctaacagttgagaggtttcttcagactgtctctcatttgattggttcgaagtggagacatcctcctcgccctttgccgcgtttcgg

SEQ ID NO: 23362 - DNA, 435 bp, Setaria italica
  Peptide Sequence Number=SeqID_89336
ctcagcatcctcaggtgtctcgtactccacaaagcatgcaacttgttactaaaaagacatatctagcttggcagatctattagttgcaggaccagagccatttggagtctgaggatagcaagtacggattgaaatcacactgccaacagctgaaaatatcttcttaagattctggtatgaaggatcaccgggaagattttctgcaacaacaattcgggacttaagctcctgcaaatcagattcagtaaatggctcttgacgtttgaccctttttccatcaaaacttgttgtaagtgatgatggaaaaagggtcaaacgtcaagagccatttaccatcatcacttacaacaagttttgatgaggttcggagagcttctgcaaaacttgttgtaagtgatgatggaaaaagggtcaaacgtcaagagccattttact

SEQ ID NO: 23363 - DNA, 645 bp, Setaria italica
  Peptide Sequence Number=SeqID_89337
cgggcgtggcaacaaccagtacaacaattaccacccaccgcgacctcgccctttgccgcgtttcggaacttccttgtcattgaaggtctcgtcaaacaagtgatctggcaagacatctaacagttgagaggtttcttcagactgtctctcatttgattggttcgaagtggagacatcctcctcaccatttccatcagttccgtgtgttccatttttccctttgcctgcccctttgccgagcaagtattcagcaagcggactctaagtccatttctccagttttcctcatcactaagcgccacaattgccttctcagcatcctcaggtgtctcgtactccacaaaagcatgcaacttgttactaaaaagcatatctagcttggcagatctattagttgcaggaccagagccatttggagtctgccaacagctgaaaatatcttcttaagattctggtatgaaggatcaccgggaagattttctgcaacaacaattcgggacttaagctcctgcaaatcagattcagtaaatggctcttgacgtttgaccctttttccatcatcacttacaacgaagttttgatgaggttcggagagcttctgcaagcatgaagttgttacgcacagaagcttttactttcttgaag

SEQ ID NO: 23364 - DNA, 423 bp, Setaria italica
  Peptide Sequence Number=SeqID_89338
gtgccaatatcagttattgctggcttcaagaaagtaaaagcttctgtgcgtaacaactgatattggcacgtatccctcgggatctttggtgatgaatctcatcaaatgttctgtggtagccaagtttatatcactaaaatagtactccacctgcttggtgatcttgtgcaccacctcgtcctcgagcccgtccaccgcctgttccgccttcgccgcgggagggagcagctccgcatccggctctggctccggcacctgctgctccttggtggtaaatccgccgcgtccccccaccggcgcgtagtactcgaacggccggggcgggggcggcgcgaagaaggccgcgcgcggcggcggtggaggcgcggcgaacactcggatcacctggggcggtggcggcaccacaaccgcgggcggcgccgg

SEQ ID NO: 23365 - DNA, 1316 bp, Setaria italica
  Peptide Sequence Number=SeqID_89339
tcccactcaccaccaacactaagcctcgccaaccgcgcacagacctggtagcacagcttgaggcttccctctgcccatggtgaaaccccgggtaccatcaggcatgcggggacccggaggaagcttgctggccccaatcggcagctgctggtgctgctcgggcttgctcattaggttgtgcggcggagttccagccgggtgggctccgccgcggttgccaccttggtggttgttgccgtggtgattgtagtgtggctggtggttctggtggtgctggttgttgctgtggtggtaattgttgtactggttgttgccacgcccgcgccctctgccaccgcgacctcgccctttgccgcgtttcggaacttccttgtcattgaaggtctcgtcaaacaagtgatctggcaagacatctaacagttgagaggtttcttcagactgtctctcatttgattggttcgaagtggagacatcctcctcaccatttccatcagttccgtgtgttccatttttccctttgcctgccccctttgccgagcaagtattcagcaagcggactctaagtccatttctccagttttcctcatcactaagcgccacaattgccttctcagcatcctcaggtgtctcgtactccacaaaagcatgcaacttgttactaaaaagcatatctagcttggcagatctattagttgcaggaccagagccatttggagtctgaggatagcaagtacggattgaaatcacactgccaacagctgaaaatatcttcttaagattctggtatgaaggatcaccgggaagattttctgcaacaacaattcgggacttaagctcctgcaaatcagattcagtaaatggctcttgacgtttgaccctttttccatcatcacttacaacaagttttgatgaggttcggagagcttctgcaagcatgaagttgttacgcacagaagcttttactttcttgaagccagcaataactgatattggcacgtatccctcgggatctttggtgatgaatctcatcaaatgttctgtggtagccaagtttatatcactaaaatagtactccacctgcttggtgatcttgtgcaccacctcgtcctcgagcccgtccaccgcctgttccgccttcgccgcgggagggagcagcttccgtctattccggctctggctccggcacctgctgctccttggtggtaaatccgccgcgtccccccaccggcgcgtagtactcgaacggccggggcgggggcggcgcgaagaaaggaccgacgacgacggacggacggtaggaaggacgacggacgaaa

SEQ ID NO: 23366 - DNA, 327 bp, Setaria italica
  misc_feature (37)..(37): n is a, c, g, or t
  Peptide Sequence Number=SeqID_89340
tgcaaatgcggctatgatatttgcgtctggtgctggnaccacatcatagacatggctgagaaagaggagactgagggccgctgccctgcatgccgcactccttacgacaaggacaggatagtcaagatggctgccaattgtgagaggaccgtaacagagaaaaatgcagagaagaagcacaagacccagaaggttaagccaaaggccgtggcagcagcagcagcagcagcagcaacatcatctaccgtagaggctaagaagcatctggctagtgtcagggttatccagagaaatctggtgtacataattgggctacctgcacattta

SEQ ID NO: 23367 - DNA, 576 bp, Setaria italica
  Peptide Sequence Number=SeqID_89341
ctagagcagcatcaacacaggcacagcgtccacgacgagatggtcgccggcgaggacgggtgcgcggacggcttctccaagtacgaggcgctggcgtcgtccctcccgacctccaggcagggcctcgggagcttaccgtaccggaagcacgacggcttctggtacccggagcacctgatggcgccggcgctggccatgcgggacgcgttcgccgcccgtccgactgacgtcatcctcgccaccatgcccaagtccggcacgacgtggctcaaggcgctcgtctacagcgtcgtgcaccgcggccgccacgcgccggccgacgagcgccacccgctgctcgcctccagcccgcacgagctggtcccgttcctgcactccctctacgagagccgatcgccctcagcaccgcccggtcagctcctggaagagatgccttccccgcgcgtcctggccgtgcactcgccgttcacggccctgccggcgtcggtgcgggagtccgggtgccgcgtcgtctacctctgccgggaccccaaggacgcgttcgtctcgctccgccactacctcgacgagatcaag

SEQ ID NO: 23368 - DNA, 1057 bp, Setaria italica
  misc_feature (1)..(27): n is a, c, g, or t
  Peptide Sequence Number=SeqID_89342
nnnnnnnnnnnnnnnnnnnnnnnnnnngttttattcagtaacatcaagttgcatccttttgaactggatcaccagtagtacaaataaactaattacagtgaccgattgaagcacttcgccattacatcgatgattagtaagctaatggtaatattttattcgggcatcgacggcatgaagtgctagcaatttccgaagatgtttcatggcctgaagaaagccgggtgtgggcggccggcgccctggtaggaggtgttcttgaggtggtcgggggcttcctcgaatgagtgccttctcgccagcgacagaatcttcttgtcggcggcgatgaagtaggccatcccagcaactgtggagatgatgagtgcctggccggtggggttgatgttggccttcgcccatggcagcatcctcacgctcgccagggttggaatcgcagaggctatggtcgccacagctgccgccttggttcctgcaagggttgcctctcgcgagcagcgcttggccatggcaagcttctggtccagggaggcacggctaacagtcgacatcttcgaattcgatcttgtagcagcgaagaatataatggaactgaaaggagcgatattcttgtagtgttggtagctgatgggtgggactgaaaggagtggagggtgatggatggattttgacagtgtggttcggtattcactccaggataatgaccgaccttcccgacccttatcactcagggtcgggcgaggcggtgaatatcccgaccccaacactcggggtcgggcgaggcggagcgttccccgaccccctggactttggggtcgggcgagtcgggcgagtcggagatcgaccctcaaggggtcaggcgcatccgaccccaggcttgaggtcgggcgaggcggagtcccaggcgcatccgactccaggacgaaggactcaaggtcggacgaggaggagttccatccttgtacgggaccaagagtccgtacagctcaataacccctgtctagggttttcggtactatatatacatacacccttgctagggtttcgagagacagcg

SEQ ID NO: 23369 - DNA, 751 bp, Setaria italica
  misc_feature (24)..(24): n is a, c, g, or t
  Peptide Sequence Number=SeqID_89343
cctgcttattgttgcatccaaacntacacggcagcacaagtcttggttgtgacttgtgagcccatcaaggcctgaagaaagccgggtggggacggccggcgccctggtaggaggtgttcttgaggtgctccggggcgttctcgaacgagtgccgcctcgccaacgacaggatcttcttgtcggcggcgatgaagtatgccatcccagcaactgtggagatgatgagggcctggccggtgggattgatgttggcctttgcccatggcagcatccgcacgctcgccatctgtgttggagttgttccaaattcactccaggataaaggctgaccttcccgaccctttacacttagggtcgggcgaggcggagaatctcccgaccccggggactcggggccgggcgaggcggagcgtctcccgacccctggattttgggtcgggcgagtcggagcatctcccgaccccaggactcggggtcgggcgaatcggagatcgaccctctaggggtcaagcgcatccgaccccaggcttgaggtcggacgaggcggagtcccaggcgcacccgactccaggacgaagaggactcaaggtcggacgaagaggagttccatcctatcacgggaccgagagtccgtaccgctcaataccccctgtctggggtgtcggtactatataaatactagcacccttgctagggttttgtaccgagagtcagacagaagagatagaagagagagagatcttcagattct

SEQ ID NO: 23370 - DNA, 804 bp, Setaria italica
  misc_feature (1)..(60): n is a, c, g, or t
  Peptide Sequence Number=SeqID_89344
nnnnnnnnnnnnnnnnnnnnnnnnnnnnnnnnnnnnnnnnnnnnnnnnnnnnnnnnnnnnaatttgggaaggagcatctatatactcagatgctgatcaggaacagcaaaaagttgcattccttttgaattggatcggagcaccgatgctacaaactaattacagtggccactattacatcgaggattagggggctaatagctgagcgaaactggtagtttattcggacatctatcgacggcatatggtagctagctagtagtgacgaatagatggagaggtagctcgacaaatgtcttgtacacttatggcctgaagaaagctgggtgagggcggccggctccttggaaggaggtgttcttgaggtgctcgggcgcttcctcgtacgaatgccgcctcgccagagagaggatcttcttgtcggcagcgatgaagtaggccatgccagcaactgtggagatgatgagtgcctggcccgtggggttgatgttggccttcgcccatggcagcatccgcacgctcgccagggttggaattgcagagacgatggttgccacagctgctgccttagttcctgcaagggttgcctctcgcgagcagcgcttggccatggcaagcttctggtccagggaggcacggctcacagtcgacatcttgcaatgatcttgctcgatcttgtgcttgcaaactaatctgagagaataactctgaaagatagtctgcttaaagcgctaggaaatgaagcagatcgatcgcctggtagtgagtagtgaccttagttaagttggtctagttgggtaaagt

SEQ ID NO: 23371 - DNA, 262 bp, Setaria italica
  Peptide Sequence Number=SeqID_89345
ttggacaagcagccacagcctccggtggcgacatcgtggcagcaagatgtcagctctaaaaccatgccagtctcgggtgaaatgattcacgcgccggtggctcatggcagcgagtggggtccggccgacgaggcttggttcaacgcgtgggggccaggaagttccttctgggactacgacatggacagcaacccaggcctctttctccatggtcgcttcgccggcgatgaggccaccatggagcactccaccgcacaagaaa

SEQ ID NO: 23372 - DNA, 662 bp, Setaria italica
  Peptide Sequence Number=SeqID_89346
tgcagtcttcagccggtgggatcatggttgccaagagcaagcgacagctcgccaagctcgcgctgcttctactcgccctgctcctcctcctcgccgccgccatcctgctgtgcgtcttcttgatcccgcgccaccaccggaagccgctgccgccggtctccccgccggggaacgcctccaaccccgacgacagcgtcgtggcgttcgacttctccccgtacctcatcatgtacaagagcggccgcgtgcaccggctggacggcacggcgcggtgctcggccggcgtcgacgaggacacgggggtcacctccaaggacgtcgtgatcgacggcgccaccggcctcgcggcgcggatgtacctgcccccggcgcccgccggcggggcgaaagggaacaagaaggaccccggcaggctccccgtgctcgtgttctaccacggcggcgcgttcgtcatcgagtccgcgttcacgccgctgtaccacgcgtacctgaacgcggtggcggcgaaggcgcgcgtcgtggcggtgtccgtggagtaccgcctcgcgccggagcaccggctgccggcggcctacgacgactcgtggcgggcgctcaactgggtcgcccggaacgccgcgtccgggccggagccgtggctgcgggaccgggcaacctctccc

SEQ ID NO: 23373 - DNA, 440 bp, Setaria italica
  Peptide Sequence Number=SeqID_89347
caggcagagtggatgaagcttatgagtttgtggaggggttgggagaggagggcaacttcatctccatttgggatcactgcttgcatcctgcaaagcgcagggcaagcaggagctggcaaatttggtgacagagagactgctccgtgttgagaagaagtatggtcatgctggctacaaagttctgttgtcacacattttttgctgctgagagtaactggagtagtgctgatagcctgaggaaggagatgagattgagagggttgaggaagatggcaggttctagttggattaaagtggaagacgcagccttacaaaactaccccaaaaatgaccatgtatactccatgctgcatggtgttgattacggcagggacaaaatcatctaaaagtttcagtcctgtggcagtggaaagcttgctgatctggtgtttggacattta

SEQ ID NO: 23374 - DNA, 250 bp, Setaria italica
  Peptide Sequence Number=SeqID_89348
gaggtcgtctgccaagaaaccttgggcctttctgtcattcctctcttggaagcagcaagtgacacagaagcagaagcaacgaacacagagagggagagaggtcaacctcgaagttgcatatatacactgcagcagtgcagggtcgcaccacatcctgtcgtcgtcgctgcgctctcgcacgcttacaatagggacccaacgggtcttggcagcctcgctcgtctaccgctcggcatggaagccgccgcga

SEQ ID NO: 23375 - DNA, 333 bp, Setaria italica
  Peptide Sequence Number=SeqID_89349
tccgattcctccgctccatgcgatgacatccatttgctgctgtgctgtctggttgttgatgtagatgaagaatgacctctgattgatcttagttattggatactggatctcgcagaagtggaaccttagcaggtaacagaatcccgcatcaactggtaaaatccatgtaaggttggagttcaggttgacctgtgcatttggccccattgaccgtgcagattcatagacaccaacaggtgcggtgtaatttggtacactgggtgtatatgtgatggaaaggtttttgtctttcccaaaggacacccccaaaaaccagaaccatatatgtaagga

SEQ ID NO: 23376 - DNA, 231 bp, Setaria italica
  Peptide Sequence Number=SeqID_89350
gcggggagaaaacggcgttggtggcgggggcgggggcggcggccgcggaggggaggagagcgcggcggcgaggcggagcgcgaagcgggtctggtgcgcgatggagaggcggatgtcagcggtggccatggtcggtcgttgggtctacttggtttgagtctcgccggagaggaaagtggagggactgctgatcggggtggtgtgatttctaagtcttgctgtttatgcgga

SEQ ID NO: 23377 - DNA, 2596 bp, Setaria italica
  Peptide Sequence Number=SeqID_89351
tttttttttgacataagcatgcactattgaacttacttttaatgactcgtataagatctcatccctgttgcatatacagagccaaacggccagcggtgtacaaacaccaaaagcaggaattcggacctagggctaggagttaacacgaaagaataaatacacaagcacaaagaacaattacgacatcctatgtcttatgtggatagctgcttcgcaaacagtgcacctttatgtaacctccatgcacatcacagacctatgaaatcctctgcccacaataatctcctgttatggatttgataattttgtgcgggcggggccagtcctggaatgtctcggatgtttttgttgtttggatggacaatcttaacaacaatgatagcaatcacacctaaaacaatcagaaagaggaatgccataatacatttgtcagttgcaacctggcgaccaatctctttcactaattggctagctttcttcagagaaaagtggaccgaatcaagctcattgccaattctcttcatttgctccgtttgctgtgttaatgttgcagcagtttgagctccagtctcaacagtttgtgccacaaccatttttgaacgttcaatagcttgatctgtttgatccatttgattccttccagcatcaatgagttgttgatttgtcatggctgatgccatttgaatattgtcctcagcagcaggctcgctactcccagcacccatatcgaagagctcaaccctcttattggtgttaccaaggctactttgatatgttttcctcaaggtgacgtaggaattcaactctttgatcatgaactgttttctgtcatttagctgcttgttgatctcaggtggattattcgactcctcatctttgagaacgcgatcaaactctttgatcaagcgcttgcactccttcattttccctgtaagatcttccaattgcttagcttgcctatttgaatctttaatcttatccatcttttggaatccattttgtagcacgcggaagatgtcgtggatctcgccgtcgatctgctcgagctccgggctcatgggcaagtcggtcgccatggcgggcggcccccgactccgcccgctgtccccgccgttccgctcacggatcgaagaaccctagcacgccggcctcctcaggccgccattcccggtggggtccgagcggaggcggaggcggggccgcggccgcggggatgcagatagggagggcccacggacgtgcgccacgtctcgcacgtcaccttcgaccgcttcgtcggcttcctcggcctccccgccgacctcgagcccgacgtgccccgccccgtgccgagcgccagtgtaagcgtatttggagtttcgccaacttccatgcaatgctcttatgatagaagaggaaacagtgtgccaacaatactcttgactatgcaaaggaagttatattcacttgggggtcttcaggctgaagggatattcaggataaatgcagataatacccaggaactatatgtgagggatcaactaaacaggggagttgtccctgatggtgttgacttgcactgcctcgccggtctgataaaggcatggtttcgggaacttccaaatggagtattggactcgttgactccagaacaagtgatgcactgcaacactgaagaagagtgtggacaccttgcaagtacgctacctcctgtagaagcagcattacttgaatgggctatcaatctgatggcagatgttgtcgaaaatgagagctacaacaagatgaatgctcgcaacattgctatggtttttgcaccaaatatgaccaagatggcggaccccttgactgctttgatacatgcagttcaagtgatgaatttcctaaagacattgatcttgaagactgtaaatgaaagggacgaggcagtcacagtggcgagggcattccagtccaactccggttccccaagtgacaaagatgaacctcaaactttagagcatttggacatgccctccgtctgttcaagccagcgtaatgttgattcccctacaattgatggggctaagcttgatcagtttctttttagagtggaagaagctcttcatcataagactcatggtggcacaggtggacccaagaatcatgacagtagtgggggcaacgagaaaatcaatggtgaaatttctcccttggacactgatttgagcagccaaaacgagttcaataacaacaacgaggaaggtctctttgacaaatttaaatttaggaaaggagtagggaggctctgcagacaccctgtatttcagttcagtaggtccatgaagaaggctgatgaagcagagcaagcttgtgtatgatatgtagggttgtgcctgtgtagttgataacgccgctatttccgcagcttatttactgtgtagatcatcagctattctcctagatcgtgtgcctagaagctattagcccatttattagtactgatgtggagctctttgggtgtatatgtcagcagttcactcctcacgtcctaattgtattaagccatcgtgtcctgtggttctactctaaatctagtgattattgatttgccggatgcaatctcttgtaaaaaaaa

SEQ ID NO: 23378 - DNA, 1342 bp, Setaria italica
  Peptide Sequence Number=SeqID_89352
ttttttacgagtagcaaacttgaccttcaaacaagctcacaagccaaaagaaacatgaaaaatcagaaaattcacaatctcacatcactaccgcgtatgcacagacaaccagaaagccggggggtgatcacgagtaatacacacaacacgactgccgctaggaacacaaagctactactcaccaatggggaaagaatggatcgatgcaaacaccgacaacgagacaatatacaagcgaggaaagaatcgtgacatcgtgttatgtggctcacaagagccattcgcaatgctcagagtcctccgaaagggtcgatggagagcagcttcctgttcatagcaggaggcgccaggcccgggatgtccctgaggctcttgttgtgcgggttgacaatcttgacaacaattattgcaataacaccgcatacaatcagaaacaggaacgccataatgcatttgtcagttgcaacctggcgaccaatctctttcaccatttgactagccttcttcagggagaaatgaacagagtcaagctcattgccaattctcttcatttgttctgtttgctgtgtcagagttgcagcagtctgagctccaacttcaacagtttgtgctacaaccatttttgaacgctcaatagcttggtcagtttgatccatttgtttccttccagcgctaatgagttcttgatttgacatttctgatgccatttgaactggtgtgtcctcagccacttgatcgttaccagtgtcgaataattcgatcctcttattaccaaggctactttggtacgttttcctcaaggtgacataggaattcaactctttgatcatgaactgcttcttatcatttagctgtttgttgacatcaggagtgttctttttctcctcatctttgagaatgcgatcaaattctttgatcaatcgcttgcactccctcatcttgccggtgagatcctccagctgcttggactgcctgttggagtccttgatcttgtccatcttctggaaccccttttggaggtcgcggaagatgtcccggatctcgccgtccacctgctcgagctcggggctcatgggcacgtcgctcgccatggctccgcgctccgcctcgcaggatccacccaccacccagagcagcggcggcggcgcctcctccggaaatcgtgtcggggtgtcgtcagccgtcagtcagcccggcattccggtggggagggcggcggttggcggcgggaggtgggaggagtccaggtccagccaggaggggggtggggttggtgcgagccgttgggtgtgttgggcccgggccgagctgcgatcccacgcgcatgagctgtggcgaactg

SEQ ID NO: 23379 - DNA, 871 bp, Setaria italica
  Peptide Sequence Number=SeqID_89353
tcctgagaaattagggcacttaaattggcttgatttcacatggcaacctatcgatgaaatttactcgtactttggaacgaagattgcaacatactttgcattcctaggaatgtatacacgatggcttttcttcccagctgtttttggactggcaactcaacttatagattttgggtcattgcagtggttggttcttcctgctttctttatctttgttatttcttgggccgtctttttcttgcaattttggaaacggaagaattcagcacttcttgcaagatggggtattaattgttccttatctgaatacaaaaatcttgacaatgaacttggttccttgggcgattctcttactattgaggaaaagaaatttgatgatgtatctgctgagaaaagaaagttgcaaaggaatgaatggtttggtgtcctccttagaataagaaacaatgctatcattgtgttggctatcatttgtctttcagttgccatttgagttggcatatgctcatctatatgagattacagaaactgaggtgatgaggtatttgttgactgcagtatatcttgttgcaattcagtattacaccagaattggtggcaaggtatctgtcaatttgataaagtatgaaacaaccaaggagaagaatctagttctgctagcttagtttattaaggtctttggcctttactttatgcagtcatatattgggttattttaccatgcttctttgttattcgcgatatactggccctccggcaagttctcatccagcgtctcattgtgtcccagcaagaaaaagcatgagaaagaatcaccatcaggaaagtcagtccggttatcaacaagagtggagaaagaatatttaaaacc

SEQ ID NO: 23380 - DNA, 1485 bp, Setaria italica
  Peptide Sequence Number=SeqID_89354
tttagggttaagtaaaagtactaaaattacgtaagttagtacgtaattaattagttaagtacttatgtaaagtttgcaaaggaatgaatggtttggtgtcctccttagaataagaaacaatgctatcattgtgttggctatcatttgtcttcagttgccatttgagttggcatatgctcatctatatgagattacagaaactgaggtgatgaggtatttgttgactgcagtatatcttgttgcaattcagtattacaccagaattggtggcaaggtatctgtcaatttgataaagtatgaaaacaaccaaggagaagaatctagttctgctagcttagtttataaggtctttggcctttactttatgcagtcatatattgggttattttaccatgcttctttgtatcgcgatatactggccctccggcaagttctcatccagcgtctcattgtgtcccaggtattagaaaatctgattgagaattccattccttacctcaagtacagctataaaaagtacattgctgttcacaagaaaaagcatgagaaagaatcaccatcaggaaagtcagtccggttatcaacaagagtggagaaagaatatttaaaaccctcttatactgcaagcattggagcagaacttgaagatggtttatttgatgactttctggagctaactctacagtttggaatgatcatgatgtttgcatgtgcatttccgttgattttctgctttgctgctctgaacaatgttactgaaatcagagcagatgcattgaagttattagtcatgttgaaaagacctgtcccccgagctgcagctacaattggagcatggttgaatatattccagttcttggtggtaatggccatatgcaccaactgcttgcttcttgtttgtctctacgatgaggagggaaactggaggatggagccaggacttgcagcaatcctcataatggagcatgttctcctcttaatcaagtttggtttctcacacttcgtgcctgaggagcctgcttgggtgaaagcaaatcgagtgcgatatgtagctcaggcacaaaacgtctgctccaaacaacttttgaggagtatttcaaaatttgatgcaaaactggattgagaaacatcatgtgcagtttagaaggcaacgctagttttgtagcttaggtagagcgggatttgtatagtacaaagctgtacaaactgtagggatggaacatcttgtttctgctaagtgtagatatcggcttatcgccaccttacttactggtaaatgtgtagagcagaatgagtttcaatgtaagaatgcgactttattttttggtttctttcgattttactgctctgttgagttgaactgaaacttggacaagtttctgaccatgaaatgtgtgtgggtgatagcgttgtagttgacaaagtaagcacaattaactgaaggtgtagtaaaggaaaaaaaaaaaaaaaaaaaaaactaagaga

SEQ ID NO: 23381 - DNA, 1062 bp, Setaria italica
  Peptide Sequence Number=SeqID_89355
ccgggcgaggaggggcctgttcgacgtgaccgacgacgagatggtgcgacggatggcgatcgaggggcccgagaggacggtggcggtgaacaacgtggtgacggtggaccagagcggcgccgggaacttcaccacggtcggtgacgccgtggcggccgcgccgaggaacctcgacggcagcggcgggtactacctgatctacgtgctcgccggcgtctacgaggagaacgtgcaggtgcccaagcacagcaagtacgtcatgatgatcggcgacggcatcgggcagtcggtgatcaccggcaaccggagcgtcgtcgacggctggacgacattcaactccgcaacgttcgctgttctcgggacaggtttcgtggcggtgaacatgacgttccggaacacggccggccctgcgaagcaccaggcggtggcgctgcgctccggcgcggacctgtcgacgttctaccggtgcagcttcgaggcgtaccaggacacgctgtacacgcactccctccggcagttctaccgcgcctgcgacatctacggcaccgtcgactacgtgttcggcaacgccgccgtcgtgttccagggctgcaacctctactcccgcctgcccatgcaggggcagagcaacaccgtcacggcgcagggccgcacggacccgaaccagaacacgggcaccaccctccagggctgcagcctcgcggcggcgcccgacctcgccgccaacacggcgttcgccgtggccacctacctcggccggccgtggaagccctactcccgcacggtgatcatgcagtcggaggtggacgcgctggtggaccccgccgggtggatgccgtgggatggcgactttgcgctggccacgctgttctacgccgagtacaacaactccgggccaggggcggacacgagcaggcgggtggcgtggccggggttccacgtgctcagcagcgccgccgacgccggcaacttcaccgtcgggaacatggtgctcggggacttctggctgccccagaccggggtgcctttcacgagcgggctgaactgaagagatatggttgg

SEQ ID NO: 23382 - DNA, 467 bp, Setaria italica
  Peptide Sequence Number=SeqID_89356
gttccagaccctcgtcgaccgcaccggcggcggcggcgccgctgaggcgggctgcaccgtcgtcggctgcgaggtcgtgctcttcgagcacatgctctggatgctggagaacgccgacccgccgccggagtccctcgacgagctcgtcgagtactacgcgtgctgagacagagcatccaccgcgcccggccccggccgccggagctggaagcttgtcgaatctcgatgccgcggcggtaaatcgctctgcaattcctgtgtcttgagtaggattagagtaggagaaaccattgttaatcgccgccgcgtcggtaaatctttcggctccgttgattgaattcgattgcctctagttgctacaatttttaatgctatcctcctaataagacctcttggagtctggacaaatgcgtccatgtacattgcaatgctgaaaagagaaaaaaaacatctcccatttcaactct

SEQ ID NO: 23383 - DNA, 397 bp, Setaria italica
  Peptide Sequence Number=SeqID_89357
cctatcccctgtgtgccttgcctatctcctgttgcgtgtctcagccagcagctcacacacacgcgccgcggccgctccgggaggtccccacgcacccgcgcggagtgagagagccgcacgccggacatgcagcgcctcgcctcctcccggaggctcctccgggccgcgctcgcccccgccgcccgggccaactccagcctctccgcggccgccgtcgccgctcccgcgccggagaatggcgccgccttgccgaggatgccggccttcgactacacaccgccgccctacgacgggccgcgggccgaggagatcttccggaagcgggcccagttcctcagcccgtccctcttccacttctacgaccgccctttgaacatagttgatggaaagatgcagt

SEQ ID NO: 23384 - DNA, 424 bp, Setaria italica
  misc_feature (1)..(1): n is a, c, g, or t
  misc_feature (417)..(417): n is a, c, g, or t
  Peptide Sequence Number=SeqID_89358
nacttgtagggtgaaactatgcaggtgcgtgtacatcccgatgatattgatcagtttgaagatcagctagttgaagggaatgtctatgccttgtcaaattttacagttgaaaatacgagggaaagctgcatgatctgtagcaatgagttgactatgtactttggagggcagacggttgtcaatgagatagaagatactgatttgatacccctccacagctttgagttcattaattttaaggatctccgttctaggtgtgacgacactagcttattggcagatgttttgggccacatagtatatgttggggagctagaggaggtctggaaaaaatcccgtcgtatagaaatttgcaatgcaagaattcggaatttgagaggaagagaattgagtatcacattgtatgggggggggggnggggggg

SEQ ID NO: 23385 - DNA, 184 bp, Setaria italica
  Peptide Sequence Number=SeqID_89359
cctttctaggtaaggataagataatgacattagccatttagtttattctgtagtctcttctcctttgaaggtgcacttgccttctctctacagatttttttttggtactggatattggaatttagattcatcataccatggtgacaacttgataaggattgattggtcaccagtgatttccgca

SEQ ID NO: 23386 - DNA, 895 bp, Setaria italica
  Peptide Sequence Number=SeqID_89360
aagtttattagccttgataccagtaaatttagctctgaacttattaaagatgaagttgtaagcttgacatctgtctttgtaggagaaaatggtaggatgacccaaatgagtgatctaagaggtcatcataggaacagaaaaagattccggatctcctgcttagtgcagacatcaacgtttttactgaaaagaattgaggatttggcccaattaggagtctgaccagaggcttggcagaaactataaagaataagcctgatttgggaagcctcaacactagtggctttgccacaggtaagcaggtcatcagcaaacaacaaagagtgaatgggaggataattttggccaagggaaatcccaaagagatggttgttttgtaaggccatttgaagtgggagagagagctcattgatggccaatgcaaaagatatggagataaggggcagccttgtctaatccctctctgggaaagaaaagaagaggaaggttgaccattgacaagaacagagaaatcaagagtagatatacaagttctggttagatttacaatctgcaaaggcaaaccaattctaagcatggcactagtaataaagttcctatcaattctatcaaaagccttagctaaatcaatcttaagaaggaagcctttatgattccaagaagtgagaccaaaagagtgagtaatttcctgggcaataataatattagaagaaatatgtctaccaggaatgaaagctgactgagataaatgcactttgttaggaagaaaaggcttaattctatcagctaagcttttagcaatgatcttgtaaataacattgcaaagactaataggtctgaaatcttgaggaagctcagtagtattttttgtgggaataagaacaataaaagtttg

SEQ ID NO: 23387 - DNA, 797 bp, Setaria italica
  misc_feature (270)..(270): n is a, c, g, or t
  Peptide Sequence Number=SeqID_89361
tccaaaactgaatgacctctgtatgtagccagagactggtcatctggatgcttaaaatgatgggcttctgatgggaatggcatccacctatagtcccagtccaccattttgactgggcgcgctctcacagcagaagacattttcctgatgtcccaaagtttgattctctgatccttgcaattggagatgaaataacgccatcaccacggctatcgataaatgtaactccatctaaatgacctgtcaaaagacctgctgattttccccaanaaggcaacgcctgtcccacaccttacaaagagtatcatcacttccagagtacaatatattgccactttcatcagcaaaggtcacagcattgacatcatccgtatgagcacggatgcggactgacactttatttgctgcaagatcataaacatatattgatctttcattattcccaataacaacttctttaccatcttttgagaatttaacagaaaatattccgaagtcctcatcatgctcattaccagtgaaatccaatccctcatgaatttcattaacattagcatgagattcctttccagaactctgcacattcacaatgtgaacaataggcgacaaacttgcataggcaaggaattgctgatcaggtgagagagcaatatctgaaactgtccactgcagactcctgcagcttatatccttatgaatcttccaccctctctcgacatcgtaaactctgatgcggcttccccttaaacccagcgtacgagtctagtcgtaccctattctagttcttagttagttaa

SEQ ID NO: 23388 - DNA, 851 bp, Setaria italica
  Peptide Sequence Number=SeqID_89362
tgttgaaatagaagttgtgcagcatgcagactgccagccacctgcaccccaccggtagcattgctggggagttccagtgcatgagcacaccggtgttggtatatttgaaaggtccaactcaataccattgatcaccatccccacagtcttcctaggtccccttcctcggggcgcatgaccattgacagccccatcctcccgtggaacagcaggcttcttaggctttttaggcttcggtgacttaggctgccggccctgctgcctcttcttcacaggtggctcagtcctaaccacagaatggtcctcaaccggtggagtgggcacgtgttcctccttacatggaggaggctcctgcggctgcgacggaagctgtggttgcatcatctggagagtgtgtggtgcatccggcatcatcccgtagccagtagggtggtgatgtactgcatgtccaccgtgtccaggatggccaccatgaccaggatgcccaacatgtccagctggcccgacagggcgagcatgaaggaccttctgctcgcgtggatgttggtggtgcgagggtgcaaccaagcttcattgcgcgagaagtccatgtgaatagaatgcggctcggtgggcatgccgccagaggctccacctccgccaccggagtcgcgggaatggtgcgagtggagctggtgcggggcattgtggtgcccatggtgctgcaagaaggcaccggtgggagcagcgactttgtgtcacggtcagccggcacagacgacatgagctgcaggccaaggttgcctttcatcgtgtcgtagaagccccagttccgaatgctgaggttgccgtcgtcgtccatctccgaatgc

SEQ ID NO: 23389 - DNA, 845 bp, Setaria italica
  Peptide Sequence Number=SeqID_89363
ttttttaacttacggggacaatttagaacatcgcccaaagatatgccagcattaataagttaaaaacagagctggcacatgctcgtaggcaccaaagcattatttgagtaacctttccagtccaactacttgcaacaacactctagtcatcattcaccactgaaaccagttcagtacaccattcactgtaaacacaaaatggttggacaagaaacagggcggtctgtattctcagagcaagatttctgggcccttcagtcgctcatttgctagctccttgagcctctcagtcaccttctcagcagcatgtacgtatgcctgcgctgaagctgagtttggtgaagatatgacaatagggttgccttcatctgaacctgttctgatgctaatttcaagaggtatctcaccaagcaatttcatatccatttcctctgcagttctcttggctccaccttccccaaaaatgtacgatttctcaccacatttggggcacttaaaacaactcatattctctactaatcccaaaataggaacttggactttccgaaacatattggctcctcttctagcatcgattaaagcaatatcttgaggagttgaaacaattaaagcaccagataattgaagcctttgtgaaattgatagttgagcatcaccagtgcctggaggcatatcaacaacaagaatatcaagatttccccaagctactccccttgtcatcttctcgagagcactcattaccataggacctctccaaacaattggtgcatctttgtcaaccagaaaaccaatagacatgcatcgcactccatggttgtcaattggaatcatcttcatgtcttcac

SEQ ID NO: 23390 - DNA, 342 bp, Setaria italica
  Peptide Sequence Number=SeqID_89364
tccacaaaatgatagcagatttgaatacaaatatgagctgctgaacactgcctaggattagggttatttgcaggaaaagggaaaatacatgaggatttggtgcagtatctgttaagtgggactcttttcttttttgctaacaaaacacatttcagaggttttggcgagctatctaatacaagatataaacatagactatcagctggtagttacatcacattgcagtcagtaaatttctgaaaaatcagtcatgctaaccatgctgttttagaacacgagagatatgttcaggatccggcaagaagcaactgatttgagaaaggcatcgaactactcaacaca

SEQ ID NO: 23391 - DNA, 478 bp, Setaria italica
  Peptide Sequence Number=SeqID_89365
ctcgcagctgcgccgcccgccctccacctccttctcaccgcaggccgcgacacccatccgcatccgcctcccctgcggccgcgcacccctctccgatgttgcgggcgaggccccctccgcccgcgcaggccccccacacccgccccacggcagacggcgcgcccgttcgcctccgccctccgccgtggagctcgcatagaagaagggaggcgcgggtcgtggcgctgacggcagcgaagaagaacgggaagcgtggctccctccgccgccgctccgttcgccaccctccgccgacctccgtgcgagccgccgctccctccgccacccacgggatcgaagcgcctccacgcctccagacgcgctggccgcgggatgggcatggccccgcccgaatcgaggcgcagccgcaccagttcgccacgccaagaacagccgcaccggcgccggggaagaggcccgaaaggagcaggcggtgcca

SEQ ID NO: 23392 - DNA, 275 bp, Setaria italica
  Peptide Sequence Number=SeqID_89366
ggcgtggagttcgacacctactggaacagggtttgggacccccaggacatcgccggccacgaccacgtcggcatcgacgtcaacagcatccgctccaccagctacacgaggggcctggcgaaaggggacctctccggcaccatgtcggcgaacatcacgtacgacggaggctccaagctgatggtggttaccctacggctggccaacgggagtacttcgcagatacaggcgctggtcgacttcagggacgccggagtaccacaagacgcggccat

SEQ ID NO: 23393 - DNA, 276 bp, Setaria italica
  Peptide Sequence Number=SeqID_89367
cgactcctttcttcaccggaggaggaagcaggccgcgcggttgccgacttcgtcctgttcaggagcgggatcggggaggtcgggaggaggtccggaacgaaaccgacgacgaaggcaaggcagtgagagagacggcgtggcgttgggggtgttggcctgttggggtggcagggggagggggaggagttggcgtcagagagcggttgaggattaggttggtggcctctgccttctctgctgtgtcgtgtacactctctagtctctacactggccaag

SEQ ID NO: 23394 - DNA, 1778 bp, Setaria italica
  Peptide Sequence Number=SeqID_89368
tgatgcatcccaaaagcttaaggttccatctagatgtccagttatgtaaaggttgcgggtcttatgaatgttggtaaaacttgttaaagtttggcctttatccttcattgagaacagccatggaaatttggaggctaatgaaaaataatcctcatcaaaagaagctgaggatgcatggttacttgtatagaactttgcaacactgatgcctgaatcaccataaggaagcttcacagatgaatggtttggaagtgttggtggtgatctagactgagagtgaagaagatagcgctcaatttctgaatcatcatataaacacatctgaccagatttcaacaagagaacaagagcactttgtctgtgcttatttgggtcactaagccctgtaataagttccattccttggcaagattcagtgagaggcaacaccatctttacaattcgcgattcactctcttcattcagaatcagaacctgaaataggtgcccatgatcattgaacccattgatatacaaacgaccagcctttccatcgctagagatccatttcaaagagactattggcaacttgtctagcttgtatcctaggttaagcctctgaataggtagattctggttgcccatagatgacaaattttgtgcatttataatagcctcaggaatgccccaaatgtataaatcaccattgtcatatccaatagcaattttgcttcccttggcacaaacccagcacgcagatgctacagttttagcctcctggtgtgattgttgctgcatggttttaccagatacggatactgccttgcttgctttaatatcccacaaactcataaccccatctctgaagataataagcaccctgttggattccgccataggctgtggtgatacaaatattacttcgacatcattaccaacactgggaccggaaccataagattcagcaaaaggaatccagtacggcatgtcagctaagcatctctgagccagatcaagtttcaacagagacacatttccagaactatctcctacatatatgtagaagctcttctgtagcacagaaaaggcagtgattcccttttcaaacgggtgcacatagcacagttttttcgcgtcaatgtcccaaacctcgatctggttctgggtgttgacattgagcagaaccccttggccctcggcaaactgcaagaacctggaagggagtggggagggggactggagcagagcctgcgtgttgtcgcgaccgaacagcttgatctgcccattcctggtggcgacggcgaggacgtggaggacggggtcgtaggcgaggagggaggcgtcggcggggacgccgtagtggaaggccagccgcgggctcacgtcctcggcgcgcagactgctgatgcttccgatattttgcttcttggaggccttctcgacgagcttcttgacgaacatggctggccgatccgcggcgcagacgagggacgatgtccagacgcagcagggggccacccaaggacggatcaaaactggccaagatcagcgactcctttcttcaccggaggaggaagcaggccgcgcggttgccgacttcgtcctgttcaggagcgggatcggggaggtcgggaggaggtccggaacgaaaccgacgacgaaggcaaggcagtgagagagacggcgtggcgttgggggtgttggcctgttggggtggcgagggggagggggaagggaggttggccggtcgaggaggagggtttggatggtttccgtttgccttctctgctgtgtcgtgt

SEQ ID NO: 23395 - DNA, 508 bp, Setaria italica
  misc_feature (468)..(468): n is a, c, g, or t
  misc_feature (483)..(483): n is a, c, g, or t
  Peptide Sequence Number=SeqID_89369
ggcggcggtcctcctccctgctctgcctcgtcttccggtgcggcggcgagccggcgggcctgaacggcgcgttggtggcccggggcagctccgaggagccgcaggtgctggacgatgggacctggcgggcggtggaggggaaggcggaggcggaggacgaggacgagcggccgtacgagacggactgggactctgactgcgactccgacgacgagggcgaagaagacggcgtcttggggtggctctggaggctggctgatcgcttctggtttctcatcgatcccagccagccatgagccatggccgccgatagacgtgctccggcagcttgatccttgtctggcgcgtgtactgtataacctattacgagcagatcatagcagcaaacaccactctttgtacaaaaggttatattgatggaataaatactacacctgtgtttttgtaagaaaaaaaaaaaaaaaaaanaaaaaaaaaaaaaanaaaaaaaaaaactaagagaacacga

SEQ ID NO: 23396 - DNA, 671 bp, Setaria italica
  Peptide Sequence Number=SeqID_89370
acgtgtttattgcctacgacatttccgcatcagttcaacaacaaagcactctctcggatcagatcccctcttccccttcctgtcggagcaaggccaggtcgtccggatctctccatcagtcaccatggaggatgaggaacttgttgatcagaagaagtatcttgaggaacgatgcaagccacagtgtgtaaaatctctttatgagtatgagaaatgtgtcaagagagttgagaatgatgatactggacacaaacactgcactgggcaatattttgattactgggcatgcattgacaaatgtgtggcaccaaagctccttaagaagctcaaatgatgtatgtgatgctactttcgacgagtgccccaaatgatgacatgatgctacttggacaagtggcattatccatttgcattaaccttgcccgctctggaaactagctgggctcgtaaactgttgcgtctgtgcctcaattccgtgacttattgtgaaacaactaatttttccttgcaagcgtgtttgctgcgttggactgcgcatcgataatttggtgcgtggtgaatctggtgtcattcttgctccatgtgtttttttgcgaggaaaataatattatgagttaggacttttaatagacgaaaaaaaaaaaaaaaactaaaaagagaactagccaagg

SEQ ID NO: 23397 - DNA, 246 bp, Setaria italica
  Peptide Sequence Number=SeqID_89371
cgcaacgccgtgttgaattggcggcggcgggaggaagaggaaggcggggagatggcgcagccgagcaaggagccgtgcaagaaggaggcgtgcgacatccaggcctgcctctccaagaacatgttcgactccaggaagtgtgtgagagttattcagttacttcagtcatgctgtgagcagtgcgagtacaaatcaacacactgtggttccttgtccggattacttaagaacatttcaaagtgatag

SEQ ID NO: 23398 - DNA, 318 bp, Setaria italica
  Peptide Sequence Number=SeqID_89372
atgacgcgtcgccgccgccgcccctgccgctctccatgtcgctactgggcgcggcgggtgcgccgcggctgggaccggcactgttggcgatcagctgttggatgtcctcttggggctcattcctcgagctcaagaacatgaggatcggagccgaacgagcgctcggttcagtcgatgattaccttggcctttgcgtgcgccttcttgttgaagtcgaaggcacgcatgcagtgcagcgttagtcgctagttatagagtcgtggagctgaagctctcaatctcgtatactctgactgcccgatcgccgaatcaggccag

SEQ ID NO: 23399 - DNA, 273 bp, Setaria italica
  Peptide Sequence Number=SeqID_89373
aagaatgaagattctacacattgcaacaaatttcttatcacaaaacatcattgtaatgcaaaagattaatatattcatgtgcatcttccttaattctgaagtgtgaagtgctaattatgtgctagttcatttcttcacccagggtgcgctatggggtacaggaactctaagcccagatgccgctctgttcaacctggagtacgagcggtggctgggggaccacagcaaggtggttgcccggctccgcgccgccgcggaggagccacccgggcc

SEQ ID NO: 23400 - DNA, 654 bp, Setaria italica
  Peptide Sequence Number=SeqID_89374
ctcccgactcccaagtccaaaactccaacgcgagagaagaagagaaaggagatggtggggccgcagtacgaccaggtcgggaacccactgggcgcggtgcgcgccaccttcgagcggacggcggccgccgccgccgcggagtccggaggaagcgatccagtggcggcgttccgggggaaggactggggtgcctgcgacctcttccgctcctttctgctcgaggaagacgggctcgacaaggttccggtgttgaatgcttcaaatcttggattgatcaaaccaaacaccctcgtccggtacaggggaatggttcaggacatgcttgggaatgagtactacattggtgcattcaaggatgggtcgacttggaggacaaacaagttcactgatttctcaccgttctcaatgccacatccttgtgattctcacctttgggagcgtcatctctttcactgtgtgcctgcgcctggacaaaattcttggacaatggagtcttcaccaggacctgatctgcgcaggatgtcaagctgcttggcaactgaattaagagagaaaggaaaagagatggagataaagatgatatggatgtttcagaaaatggacatgaagagtcttctgcgctctgcaagaagccgaaggaagatgatgttcatt

SEQ ID NO: 23401 - DNA, 1587 bp, Setaria italica
  Peptide Sequence Number=SeqID_89375
ttttttttttttaacaatagaacaaatttaagcattcaggtcacgataattctaaagttgaaattacagatctggcaccggcagtgacatcccagaagtaaacttcaaatttgtgcaggagaatatgcgtggcataaacttgagaacaagtgatcaaatagctcgcataggatgacagctgttacagaagtcccaccatggcaccatccaaactatccaagtcttgattcacacaacctagtactatacacatcacagcataccaccacagcaagtggtgtaaaaacacatgcaaatgcggcttcaatctcattgcagcctctgctttctaagcctctcaagctccttcaccatctgccagtgctccaaagaaagactcttctcgccgaagcttgaggccattatttgtgccattgttagccatctgctaagttcagaacaacccaagctcctatcatcgcgcatggcactgaccatttcatcttgaatcatctggtaagtctcaggttcagtggactgaggaagagacctaactgtggccaaataccatctccaattctcaagttcctcagaacctgcatcaatcgtgggaacggaggatggacgaaaaggcaccaccaagtctgaaggaagaatgtttgattttccctcagagagagtaagtagctgcacatcagttgccatatccagcttgtagtactcaaaatcatagtcgaccttctgtgactccattaaattcttgagcagcatggtattttccacacctttagacgtcaatgatcctgtctgtaaaagggtctcatcaaaggtcagatgggagccttgaggtagctgcagaactcctgtgaccaaccttcctgatttgttgtcctttctaggttgaagcgtggctgtgttcagatactctattgacatagggatggcttgtgaatatggcaccaatttctggatcaaagaatacagttgattcccaaatatggaagcactttccctgttaaagccagtgaaattcaaggagagtctaccaacagtaaccacatccaccctattgcgaagtctggatagaagatgcaacagcaagcactgggctgcaagttcatcgtttcctaacaccagagtgaggtgtgagagcaaagactgtcggatgccttttaatatgctaggtgaaggctcaacaacaggaggccttgaaataaagtcatgaggtgataattttctccataccaaacaatgaagtcggggcaccttgctcggaggcaattgaactattacatcttctatgaggtctaacattatatcgtctgggttatcactaggagcagcaagttctgggtcaaatgtatatacaccaatgaactcaataacatcatttagcttcacctggctatcaggcatgtcatagaccttcactagacatgaaaaggagcttccaggtatatgatcacccctattcatctctggcacaccttctgccacttcatttgaactggatgagacatgaacatcatcttccttcggcttcttgcagagcgcagaagactcttcatgtccattttctgaaacatccatatcatctttatctccatc

SEQ ID NO: 23402 - DNA, 266 bp, Setaria italica
  Peptide Sequence Number=SeqID_89376
tccttgtccaatatgattgctgcctggctgaaacccggagccccagcacaattagcagcagcgttagcaacacacaaataatgcagagtatactatactatatgtaggcaggcaatacgttgggcacagcatgtgaagggacgaccgggcccagctgacgacatcacacgaaaccaagcacgaaaaccgccggcctaatgatcgagcgatcgagctgcagcagtagcagttcgttctaaagtttctaacagacaaagacatgccag

SEQ ID NO: 23403 - DNA, 404 bp, Setaria italica
  Peptide Sequence Number=SeqID_89377
tggggaaagaggatgtacagctgcacaccgcaaaatctatgtacaccaacagctgcagttaggagatgtccagaccatcagattactgccacatacaacacatgtatatgcaaagtcagttttgcataacttaacttgaagaaatagctgcgcaactgaactaatctgacaggatctcctctagctcaggatcctcttgcctgatcacagagtcatcgtcaggttcagtgtcaaccatctctcccctcgcggtggtatcctggtcatcttctgtatcagatccatctgcctcttcgtcagtataaacaggatatggtggtctaccaacggctttctttattccagcgtcatttacaggttcctggttacttctagaaattggctcgacgtacgcgtccgtctta

SEQ ID NO: 23404 - DNA, 379 bp, Setaria italica
  Peptide Sequence Number=SeqID_89378
cgggacgatgaggtcgctcatggcgtggaagaagtttttgccgcagccgccggtggagaagatcactgccggcacatcgtgccttactgtgcacttgggtgggatgacgaagctgtgtggcggtggcgccgaggatcttatctcgacctcccgaatcctcgacatggtctctggctcccactttcgcgtgtatggccggactgttatagttgagttctctgggcggaaggtggaagaggagacgacgtagactctgccggatctgccgtggatgcgcaggtctccttccattctgcagtagtccgagtgacgatggctgaagttgcaggttagcttgctgattcttggtgctcctacatctgaatttatcaaagaacca

SEQ ID NO: 23405 - DNA, 447 bp, Setaria italica
  Peptide Sequence Number=SeqID_89379
gccacagcatctagcacaggactccattttgttgtggtagacagcatgaggggtgctaacaagacgcttaggatgaggccttgtaaaaagctgatgtcgcccgattgatttaggtctagatggatcactaggaggcaacattacatttttggcttcaacagatgcttctccagaaagtttatagccaaaggttatgtcgatccagtgatgcagttgttgtgatactctgtcactctctaatgcatccctgtgcagacaaatgaaatcctctgcggatgttgcccaggaaggcaaagccaaatcactcatttcagaatgaagtgaggtgaaaatccgaggatcactataaaattctggaatgcattcatcaggcgtccactggtaaagccttgcattactagaagggtattcattgggctcgtagacggaacgcacagcagacctcaa

SEQ ID NO: 23406 - DNA, 216 bp, Setaria italica
  Peptide Sequence Number=SeqID_89380
ctcttttgttaggtcgccttttggttctctacaatggttcaggtgacatggcagcaggtttttcctcaagctcctcgagtgggacgcgcacgccactgccgaaggttgcgcccttctggggctcctctccgaggggcttaggctcgggtcgacgaggctggaggcggcttcctgcctcgagggtagggtcatggtctgccactactacttggtgtg

SEQ ID NO: 23407 - DNA, 529 bp, Setaria italica
  Peptide Sequence Number=SeqID_89381
cggagatggagttgatggagaggtcgagggagacgagcgaggtgaggttgccgaaggagtccgggatggggcccgtcagcgcgttctgccagaggaggagcttctggagctgtggcagggcgccgagcgatggcggcagcgggccggagagggagttttcgtagaggtagatgttggtgaggttggagcagttgccgagctccggcgggatggcgccggagagctccgtcgtgtagatggacagcgtctcgaggctctggagctggccgagggacgccgggagcgggccggagatcttggtgtcggcgaggccgagcacggcgaggttggagagcttggagaaggagtccggtatcgggcccgccaggtcgcggttgccgccggcgcgcagtgactctagcagccgcagctcgccgagcgacggcgggagctcgccggagaggcggttgtcgaacaggaggaggttcttgagcgatggcgcgaggccggcgagctcgggagggatgggccctgacagctggttggagtt

SEQ ID NO: 23408 - DNA, 294 bp, Setaria italica
  Peptide Sequence Number=SeqID_89382
agcgtgccgttcggcttgccgtcggggcgctcacctggtagctgacgtgccgcagcgccgcgccgtcgccggctcctcctcctcctcccgccgccaggtcgaccaccggcacgcttgccgtgccgacgagcttgtggccgaggagcggcacctgcgccttgacctcgaactccaccagctgctgctgctggcctccgccatcgccgtcgaggtcgaacgcgaacgccgcgtcgtcccagtccgggttctcgccgccgtcggcgtcgggcggcgtcttctcgcggcggcctccgg

SEQ ID NO: 23409 - DNA, 615 bp, Setaria italica
  Peptide Sequence Number=SeqID_89383
taggaaggacaatacaaagtgatgaggagcataagatttgtgttgctactcgtggcgactgccacgttgatcaagccatctggaggagtagaggcagaggaggagggactgggagcgtttcttgctgcagtggaggcagcatacttctcttccattgccgcttctgaatggggatctggttgacaaaatatggtcaatttgcataagggacatggttggtgcagaggaaatattgggcaatgtactgtcatttgcttcagatgaactgttgagtcattcatcagagaatgttttgaagactgtgttgtttctggagcttctagctcttctttcccatgaaaagttatctactacctgtgattgtatccgtgcaaactgcttcggcttgggaattccacaagaactcagcattgcattgggcacctatcttgagagccacaagccattccttgattcaaacttctattcgagacggcatttggctgataaatcaattggagatgctccttccatggctccagcttttgtgccatccatgtcctccggtgatgaagttcagtttccccaatctgttacagaaacaccatctacgccttctaactctctcaacattcg

SEQ ID NO: 23410 - DNA, 462 bp, Setaria italica
  misc_feature (1)..(46): n is a, c, g, or t
  Peptide Sequence Number=SeqID_89384
nnnnnnnnnnnnnnnnnnnnnnnnnnnnnnnnnnnnnnnnnnnnnngttatctcaacagggcagtgctatttgcagataaaaatcacatatctccaatagtcacagtggcggtacactcaattcttacttgaggatgctcaaaattttaggaatatgaaagcctatacagttggacacattctaatttactgatttcaccaaaacagacactctgaagctggtactcaagctcaacccactcaaacccgtcacgaattacagcaaaacgtgcactgaatttgaatcctgtcctgcaatcgaattcgagttcatgaccaacttagtaagctagcaaacacccatctcagagtccaccaacactacgcccgcccactcaacccgcccgaaccacgaaagctaagagagccggcggcggaggggagggtatgggaggggcgaggggtattacgatctcgtcgggg

SEQ ID NO: 23411 - DNA, 577 bp, Setaria italica
  Peptide Sequence Number=SeqID_89385
cttgtgagggcactagggcgaggagataagaaattcctcgagccccggctatagtccataaacgcagctcctctctgatcacatcacagactccattcaagtcaggtggaactccatcgaacacaacgattgcgatggttccaaactgaccatgcacccagaatgatgatagaatttagccctttcctgacctgtcctgatgctctctcactcaccttttcccaccaatcatcaaaggaagtttcatcaggttgtggggctagaatctgcaagcccacactttgaagcagtctgaaccaaacttgccgggtgaagacgcaagaaacgagcaagtgatcaattgtttcatccatttggtcacaaagaggacagcgttcaggatgtgggagaccccttctggtaaggtggtcgacagtccgacacctgttgtgtgcaaccaaccacatgaagaatttgcacttgcccggggcccaacttttccatatcctctcacaaggcctaaagcgaatggaacccaaataaaacaataagtactacaataaaagaacaaagaaatttttaagaactaagaaagtaa

SEQ ID NO: 23412 - DNA, 395 bp, Setaria italica
  Peptide Sequence Number=SeqID_89386
agagtctggagcctgtagtacagcagtagcacagtttggtggtgacactcgagctcagctactcactactactctccactgtatctctactatcctcaaactcaaccagctagccactgtgtgagctcatctctagacaccagagtgtgtgctcttgtgagagtgtgcgtgtggaagtccgtgtgtgactctctgtgcatcgcctcgtccgaggcgcggtacgtcctcgtcacacctttctcggatctgaagctcatcagaacgaagaaggcttctctcatcaggttacaaggtgattaagttcaccaagaggtaagaactgaagatctagacagcagcagctgctagcaccatcacttcactagcacaataacccaaggtctccgagggccaag

SEQ ID NO: 23413 - DNA, 992 bp, Setaria italica
  Peptide Sequence Number=SeqID_89387
aaactataacccccgtcccatcctcccgccacaaaactaagaacttaaatgactacgtccactaacgagcaattaggcttcaggcaaatccttcttggcatcaccataatgcaattaccttggctgtgggcgcgctgggaatgattttgcatgcctcatctgtggagtttgtcgaggggttgacgagcggctcattgtttgtgagcgcagcagcatgtccaccatagatgaagtctgataggcctggattaggctctcactgtctgtggagtcaccacgtgcggttgccctctgccatgagtgggaactcaagcctgagaggacatacgcccgaccagatgcctcatacctttggcgattggccatcctatcttgcatctccttcagctcagcatccaatgcttggcacaaacgatcaccggactgtcctgatgctgatcccatgatcattctcctgcagtcttctagtaacgagacagcatttgtcaggtcaccacgctctgcagaaaaccttgcttcggccatgacctcagctgcatgaagacggttcttctggcggtccacctcgatagacacgctttgtactgagacgaatgctggcctggagatcttcacttgcacatcagccatattcacagtctccttcatcagtggatctttgtagacacagccaaccttgagaagtgctgtttccccatagcctgggggaacgtttacagacacgagaaaatccctttcctcttcagcatacaggtctccaacatctatggagccattcctcttatcgtctgaaactctgctagaatagctgcctgatctgatggagccaaagtgcacgtcaggatggaggctctccacctttacatgcagaccttgtgcaaactacactcagaagcccaccaatgcactgagcaaatgcatcttgtatagcagcctctgtctcaatgaatgaaaaggtcccaccagaagtttgtgaaatggagtgcagcgag

SEQ ID NO: 23414 - DNA, 1556 bp, Setaria italica
  Peptide Sequence Number=SeqID_89388
cacagctctcccttccaccagcgtagattcaacccaatcaatccatttccgatggggctcgacgtcttggagatcgggatgggctccgatttgagcctggatctgaggtacttcgcctccaaggccgtcaggcaggccagggacgcgccggcgtccgacgtggacgcctgcatccgccgcctcgaggaggagcggggcaagatcgagatgttccggcgcgagctcccgctctgcgcgcgcctcctcgccgaagtgattgatgtcatgaaggcggaggcggggaagaaggcgaggagcgatcgcaaggcggcggcggaggaggacggcgccgccggggacaagagcaagtggatgagcacggcgcagctctggaccggcgattccggccgggaggatgattcggaatcagagaagcaagacaaggggaggagctcgccggaggccaagtctggcggcggcggcgctttcgtgccgttcaaggccgtgggctccggcgcgccggcgttcgcgccgctgtgcctgagagtggacgacaaggccgcggacgctgggatgccggatctgtccctgctgtcgccgccggcgatcaagagcgctccggctcccgccggcgccgccgaggagagccgccgccaggtcgtggggttcgcgcaggcagcggggagggccgtcgccatggcgccgtctgcgccttctctgaccctccagcctcaaccgcagcagacagctcagcagcagcagcagcaagcgaggaaggccaggcgcacatggtcgccggaccttcaccgccagttcgtggcagccttgaaccaactcggtgggccccaagttgccactccgaagcaaatcagggagctgatgaaggtggatggtctgacaaacgatgaggtgaaaagccatcttcagaaataccggctgcacaaccgaagggcgcctggatccgccgttgtaagccagccaattgtgcttgtgggagggctgtggatcccccaggagcaaagcagctcacagtctggatctccccagggtcctctccacttctcaacctcaggcctcgccgtctcatcagcggccaccgtcagctgcgaggaggaagatggccggtccgagagctacggctggaaatgatgaataggcagttgcatcatcagtgttcagagatagacggttcgcaaaggaagtgttcagagatagactctggcggatggcgatgccgccaattgcagcttcaggagggagccatggggagactgtagtgtagtttatctgtatacaacaaatacaggggagatcgtcgggccttgagcgcccgagatgaaactgatgatggtgcgtcgggtcgggtttgtacatcggcaaagagatgatactagttacagttttgcggcttgttaatccatgttccgggcagagctacaattttcgccccgagaagagttttacctacctatagaatccgtttgtcgattataccatcttcccatctttctgttgaataaaatgtttttgctgttgttcatggaatgaacgaacagttgttaaagatagaaaaaaaa

SEQ ID NO: 23415 - DNA, 259 bp, Setaria italica
  Peptide Sequence Number=SeqID_89389
aggaagcgtcgcgaaacgcgaccggcctcgtccttaccaccggtcgatagggatctcggcctcgtgccccaccaccgccctgcccatcaccggatcagcccccgccccaccgcagcgcagcgccgcgcgcgcatcacgggcacgagctcacgagccctcgcttccgcttcctgcgctcgcggcgctccgatcggcaccccgcgcagaggagagcaggggcctccggggccctcccccgcggcgacctcgtggcgctcct

SEQ ID NO: 23416 - DNA, 847 bp, Setaria italica
  Peptide Sequence Number=SeqID_89390
acaagatccaagaacataccagtgccaatcctgcaacaatggaacaaactaaagtagactctgtgcgcagtggcaatcatggagagcatcctaaagagatatacccaacaaaagaagctgttaacatagcttcccagaatttctcatgcagtgctctatccggtgaagatccaacacaagtgctaccagatcctatgaacagtaaagatgctcctatagcggactttggtaaagctcaagtatcaagggagagtaatgacaatgagcagtcgattggttcacaatccagggacactaacattattaatctcaatgtctcaagaagaccggtgggtcaatttgattcccggaatgaggttgtggaggaaagtgtgtctcttaatgaaggaagtcaaggtaaccaaagttttagtgatgttcctaagaagtttttaaagaagacatcatgtgggacaacgaatactgaggaagggacttcagggcataagagtctctcttcttcgacgcggaggggaaccagaaatgttgaacctgcactggcaaatgagagaggaagcttttctcttttatacaagtctgagaatatgaaagtaagcagggtcgaactaacttcagaaacagccttaaatcaattatctggtgcaagtaaagtgataaaaaagatgactacgcatcctacagatttgaaaagggaacacaagcaagctaatgcaggacctgacaaatctaaaactgcattctcaaaaacatacagcaagcttcctctctcatttgccagtgcaggttcaacatttctggttcccctccgcgtcgaagaagagagactcttatgccctcgaagtccctt

SEQ ID NO: 23417 - DNA, 1272 bp, Setaria italica
  Peptide Sequence Number=SeqID_89391
gtatatgagctacacaaaacaagatggtgcttcttcctccaagaagaattatattgcactcaaggcaactaaagaaaagaaaatcatatcaagaaggaagcaagtgatgatgaagatgatagtgatgatgaagaagttgatattgctcttcttgtgagaagaagttccaagatgctcaaaaagcttgacaagaaaggagtcaactttgactacaagaagaagaagttctttacaagtgacaacaagaaatccatcaagaatatgccatgcttcaattgtagtgaacttgatcacttggctcatcaatgtcctcttcccgacaagagaaaatacaagaacaagaacaaacccaaggatgatgatgagaagaagcacaagaagaagcctcacaagaacaagaaacatgacaagaagaggaagccacaaaagaaggagaagaagaaggaaggcaaggcttatcttggagaatgggtcatcgatgatgacacatctgaagatacttcttcctcaagtgatagtgacaatgaaggtgttgcagggttggctatcaaggaatatctacctccaccaccttcgctcttctctacttcaagcgagacatatgccttatggcaaagggcgatagcaaggtgagcaaatccaaggatgatattagtgatagtgataatgggtacactcctccatcatatgaagaacttgctagcttggtcaaagagtacactaagatcattatcaagttaaatgaaaagattgacaagctcaagctagataagaagaatctggttaccaaatgcaatgagcatgaagctaagtgcctagagcttgaaaagaagaatgttgagttaaagggtattcatgatgatcttgataaagattacaccaagttgaagaagaaattccaataactcacaactagctacaagaatcttgagcttacctttgatgctatgacaaatgacaaattcaatgaaccaaaggttgtgaaggttgattgctccacctcttgtgatgacttgattgagaaggttgattcctctacccattgcaacttggttaatcccccaatgaaaccatcaagttgtgaagcatgcaagggcaagagtgttgaagtgaaatcttgtgacttgaagacatctaatgtgaatgatgagcttatgaaagaaaatgaacttgctatgagggagataaaggatctcaagcaacaagtgattgatcttaagtccgggtacataactctcaccaatagctgtcgcttgtatgataagatgatgg

SEQ ID NO: 23418 - DNA, 227 bp, Setaria italica
  Peptide Sequence Number=SeqID_89392
gatggaccagaggttttgacggatggattaacttgcttgagcattactacctctgcttcagtgttctagtgtagctcttgtggatgtaaactttcttcttcctttttttgtttggtctatggtcttgtgatcatgccaaattggattattggatgtatataacatcaaagtgatgaggaattgatctgagcttatcaatactactcacactgagtctttcttgttct

SEQ ID NO: 23419 - DNA, 395 bp, Setaria italica
  Peptide Sequence Number=SeqID_89393
gcaggtatgatgttgctgcgtttctgtctcataggttgtttgaatcaggggaaccggtaaggatgtcagtattttattacatatcattgaagttgctaaatggcaaagagtcaaagacatttccagctatattttttgaaagcagaattctaatactgaagctatatgtgattccgttgttttctctttgtctacaaaggtgatgcagtaaattattttgtgataggaattaggatgctatatcatctctactgtcttgcattccaaacattctataatattgatgtatcctggattgcacaagtgaattctagaatatattaggtaagtcgggaattagtataggagtctgtaggataattaggaggaaggcaacctgaggcaatctaacagtt

SEQ ID NO: 23420 - DNA, 1433 bp, Setaria italica
  Peptide Sequence Number=SeqID_89394
cccatcgccaccgccgccctcctcgttgtcgcagagagaagcggcggcggcgatgggtcgcccgccgagcaccggcgccccggcgttccgcttcctcccgtccgaggtggcggagatggaggcgcgcctgcagcagctcaacaacgccatccccacccgcgccgtgctgcagacgctcgccgacaagttctccgcctcgcccgagcgcgccggcagggtcaccatccagcccaagcaggtgtggaactggttccagaacaggcgctactcgcaccgggccaagaccaccagggccgcgccgccgccggcggctaagatgacgccctcgggggccgaccacctccagcacgccgccaactcctccgccttcagggccggtcagccctccgctgtcgccgcgcaccacggctcctccccctccgcagggaagaacccctgtggagggtgtccaggtcgagttcgaagccaagtcagctcgagatggcgcatggtatgatgttgctgcgtttctgtctcataggttgtttgaatcaggggaaccggaagtacgggttcgtttttctggatttggagcagaggaagatgaatggatcaatgttcgcaaatgtgtgcgacagcgttctcttccatgtgaggccactgaatgtgttgcagtgcttccaggggacctaattctttgctttcaggaaggtaaagaacaggctctctattttgatgctcgtgtccttgatgcccaaaggagaaggcatgatgtaagaggatgcagatgtagatttcttgttcgctatgatcatgattcttctgaggaaattgttccattgaggaaggtgtgccgccgaccagaaactgactacaggcttcagatactgcatgcagctagagcggcagccaccatggatgttcacaccccacccaaagaggttaaactagagctgacatccaacgagaagagcccagcagagcagaaagccccgaagcagcacaagatgatggatgtgaacaccgatgaggtgaccatggtttccggcgtggaacaagaagtgacaccagccaaggctggagctggagcctcattaccgtcagcaaccccagaaacccgcaattcgagttcagatatgatgagggatggggagtctgcctcggtggttgaagatgatgatgaagtacaagtggtggagaagatgaaagagggggattagtttgtttgttttttccgtgcattgtgctgggttaacttgatgttgtcgtacaaatttgtctaatttagtagcatatctatttagctcagagcctattgtatttaccatctagcgtcttggtgggcttggaagattgctcttaacagcttaagtgaaagttgactgtttcgaaggcaagtttttagcccaactaagtattgatacataagaattagatcagaagcaaaaaaaaaa

SEQ ID NO: 23421 - DNA, 717 bp, Setaria italica
  misc_feature (648)..(717): n is a, c, g, or t
  Peptide Sequence Number=SeqID_89395
ggttctttatcttcaagcaatgctggatttgctggtgctgcaggcaggttgggggcttttcggcacctgctgcttctgcaggtggcgtttttgctgctgctgctactggtggaggttttgctgctcttgcctccaaaagtggcggtttcgctgctgcagcttcatctggtggcggtttcgctgctgcagttccatctggtggtggttttgctgctgcagcttcatctggtggtggctttggaggtgccacgcagggcggtggctttggcagtggtggtggattcgggtcctttggtggtaatcaaggggctgggttctcggcgtttggagcaagtggacctggaagaccgccagctgatcttttgacacagatgagaaagtaggctccaaggtgaccccgaaattcgtcgtcttcaaggagaaggttcaaaagatttgtgtccattgtgtacattaaatccttttttggtggtcgcatggtgtatgattagtttatgcattagctacggctagatgcaataggcctcggagataacttgtactgtgatatccgaaaggtacttgcattgtttgttccgtgcttaacctgtatagactttttattagctaatatattccgtcaggcctgccagaaaatgtaaaaaaaannnnnnnnnnnnnnnnnnnnnnnnnnnnnnnnnnnnnnnnnnnnnnnnnnnnnnnnnnnnnnnnnnnnnn

SEQ ID NO: 23422 - DNA, 653 bp, Setaria italica
  Peptide Sequence Number=SeqID_89396
gaaacagctttcatcatgcagaatgcttcttcaaagagcttgatgttgtggatgagcttgaagggcaacatcttccgctgatgggttggcaattgcatggagctgctgcgaacaccttctttctgtcaaagcatacactgttttgccacacacatggagagcttgtcagaacttgcaacgatgtatccaaatgtgaatatcctccatttcgaagtcgacttgagaaatgatcgcttggatttcaagttccgcctgaaggatggcgtcagagaggtaccacactatgggcttctgctggccagggtggccggtctccctgcttcagtgattgacaccgcgacgagcatcacttcacagatcacagagcaggaaatgacaaggatggatgccaactgcgaggagttccagtctcttcagatggcgtaccaggtcgcgcagcggcttgtatgcctgaagtactcgaaccaaggcgatgactacatccgtgaagcgctgcgaaatctcaaggagggctatactgcaggccggctaacatgagaaagaggatgttctctgcaagaattggactggtctgcctatgcgcagtgactgaagtgatatcaactccgtgatattgcatgataaatccccaccgccgccacttcccacaatcc

SEQ ID NO: 23423 - DNA, 1518 bp, Setaria italica
  Peptide Sequence Number=SeqID_89397
cccatcacttcctgaggaaagtccatggtcccctctcgctgcccccatcctccaggtgctagctatggtcctcaggctcatgtagatcgtcaatgcgatccatataccgatgaatccgttatgcgcagaaaggtacaccaggcacggtatggacacagaagcaacggcaaccatggagtaggcagagtatgtgtagtctgatgctccaaagttgatgccatcgaacacgaatgccagggaattgatcgtctgcgtgccggcgacaaacgggatgcctttgtgaatgacttcaatcacgggcaggtcctttgtgaaaatgccagctccaaacttcatggcaagtcccagcacaacagtgagacacatgcccagaacgatgctcagctgcagcacacgagatgtcgccgcgaccaccttcttgttatcatttttggcaaacgcacttgccagcacagcctgtcctgccacggccaatccatcggcaagaagagacgtggcgagccagagctggcagcagatttggaagccggccatgatggttggtccttggcgggcagccagcgacgccgccagggtgacgcagaacgtcactgccacaacccttgcgagcaataggaatccacatccaagaaatcgcccaaacttcagagatttaatgctaggcgggataacatcaacttgctggacgagccggcacagcagtatcaatgttatcaggtactgagaagcaacatgagcaacagctgcgccggtgacacccatatggcaaacaaacatcaaaatcgggtctagtatgatgttcgtcgcatcaccaaccacagtagcgtacaacggtgtctttgtgtccttgaaaccccggaaaaccccttgcatggccagggacagtagcacagcaggtgcaccaagtgatcttattgttagatagcgaactgcgggtccttgcattggcgaaccagactttacacccatgatacttagtacaaatttcgctgagaaaaccaggaatatggcctgaagcagcccaagaattgaaccaactatcagtgctgacgtgactgaaggaatgtacttcttcttgctcccatggttggagagctctgtacactctgtggggatacatgtgttgacacattctgcaatatcaggaccagatacaggcgaattgttggtttctgaatccacatgggaagctttctccaggtcatggctgctgttttcttcgacagctttactaatgatagcatcttcctccgcgacaaatgatgttgttacgctaacaagagggtagatgcagacttttgacacttggttaaatatggcaattgagacgccaacagcagcaatctccaccgaacctaaacggccgatgaacgccgtgtcgatcagggaggcgagcggatcggccgccagagcaagcgacgcgggcaccgcaatgcggagcacctccgatccgagctcgtcgagcttgaagacgctccggatgttcatgatgaacagatggagccccgtcttcctggg

SEQ ID NO: 23424 - DNA, 300 bp, Setaria italica
  Peptide Sequence Number=SeqID_89398
cacacgcttgctgttagagtgttgaccaatccctccggcaccgccgacgccgctcccaccaaggcaccagcgtcccggtccgtccgatcccggggctcccgaagccatggagggggaggagggccccggcgcggacatggaggcgctcgtccgccgcctgaggctccaccgcgcggccccctccccgtacgaaccctccgacgcggtggcccccgctccaggcgccggcgagctgttccggccgcggagggccgccgtgctcgtctgcctcttccggggcgccgccggcgagctccgcgt

SEQ ID NO: 23425 - DNA, 260 bp, Setaria italica
  Peptide Sequence Number=SeqID_89399
ccttgttccatcgcatcaatttctcaagctctctcgagatccaggaaaccaactctctgctgtgaagcagcgaaggacctccgtgcgtgcgtgatgggtgacgacggcgcgacgaaggcggcgacgggcatgaagcagatcgcgcggctgcgggagctgctgcacaagtggcagaccatggcgctgggggccaacaagcagcagcgggaggatgaggtgccggatgtggatgaggagatggtggcgtcggcgatcccgcc

SEQ ID NO: 23426 - DNA, 344 bp, Setaria italica
  misc_feature (17)..(17): n is a, c, g, or t
  Peptide Sequence Number=SeqID_89400
cttgtttctgagatganatttgaatgactgcagtacgtaatgaacatgtccaggtgcttagcagttgtcttggcgcgtttgtaacggagattgtatggacaggctggtgggggagagcacaaagaagtggatgacgatgccagtgtgggcaccgttgcgaaggacaagagtgcacttgaagtaggctcgctgtagaggactctggtggtgacgctagggccgttgtcagattaatgcttcatgggggctacaaatgtatctcagtataagtaaaatgcaaagtaacagactgatctaattagtgcaaaacagaccggtcactgaatgcaaactaagtgcaaaag

SEQ ID NO: 23427 - DNA, 266 bp, Setaria italica
  Peptide Sequence Number=SeqID_89401
agtaacaactttaaggtgttgagccgttgcggctaccatcgttgtaacctgatgtagcaccaccgctgttccccgatccgccaccggaaccgctgccaaacccaccatcatgaccacctccgcttccgcttccggagccaccgctattcgcgtagctcgagccataggctccatagttatcgccttcaccttcgccgactcccctgcccccaccagatccgctgccattcccgtagcttccgccggagccgcctgctccgccacct

SEQ ID NO: 23428 - DNA, 636 bp, Setaria italica
  Peptide Sequence Number=SeqID_89402
ttcagtcttcgctgactgccaaccagaggatctccttcccccgttgtgagaggccaagaaacacgagagtgaagcagcgtccatggcgggagaggaggctgggaggagaggtgttccctccctgctgaacccgtcttcgtcttccagcgaagggcagcaagaacacatcgcctctgatgtcacacagctcatcggatggacgcctctgatcgagctaaagcgaatcgccagcaaggatggggttgacgcccggatcgtcggcaaggtcgaggcatatcagcccctctgctccgtcaaggatcgaagcgctttgaggatgatagaagatgcagaggagaggggattgatttcacctggtgtcacaacactcgtcgagccgacaagcggcaacttggggttaggaattgtcctcattgctcttcgcaaaggctacaggtttgtcgcagttatgccgggtcaatattcacttgataagcagatcctgttgagatacatgggtgcagagttgtacttgactgatccagcccttgggtttccaggcataaccaagaaggttgaagagctcaaagaagaattgcccaatgtacatgttcttgatcaattctcgaacaaagcaaatcctgaagcacatattag

SEQ ID NO: 23429 - DNA, 238 bp, Setaria italica
  Peptide Sequence Number=SeqID_89403
ccctccaccgacttcatcgtctcagcgaccaccggtacccaaccggacaaccggtcccccccctactccggcggccaccgccttcttcacgccacggcggcgatggactcgccgccggccctgcccccgctgaattctctgccgccagtgaattgggacgcgctggatgccctcgtcctcgacttcgccagatccgaccgcctcgtcgtccctcctcccgctgcccccgccgacgccg

SEQ ID NO: 23430 - DNA, 1865 bp, Setaria italica
  Peptide Sequence Number=SeqID_89404
cactggaatttattgaatcgtccatttgtaactcagttcactttgatggagaagatgctgttctggttcaagcaatcttgtcaatcaaagcaatagtgaaaatggatccagtatcccacgaaaaggtaattgtccgcttggtgcgcggtatggacaaaattaaggagcctgcagcacgatccttgattatttggatgtttggagagtataacttcatgggagatctcattcccaagatagttcctgctgttctcaagtatcttgcatggtccttcactgttgacgtggtcgaaactaagcttcaaatcctaaatgcttctgccaaggttgtaatgcattgtccggaagaacatgcggaagaattcaaaaggatagttgcatatgtcattgagttggctacatatgacttgaattatgatgtccgtgatcgtgctcgtttactttcaagacttttgccgtgctccacgactcacctagaaccctcataccaacctcagaatggcgatatttgtaaagagcttgcagatcatatatttgatcgaaagttgcagtcaacatctccttcagcaagaaactatcgcatttatcttccaggttccctttcacaggttgttcttcatgcagctcctggttacgcgccacttccaaagcctcaaagtatggaattaagccataataagatcattgaatcaaccagaggcatagccaaaccttctggaagtaataactctgatgctgaatctggatcttcaacatatgagagcagctctgtttatgattcggagagtgaagatgatggcttatcggatggggatactgatgaatcccttcatcatcaagataaccaggatgctccagtggtacacatatatgatgctagtgtacagcaaggccagacgcgtgaaactgctgatgaaaatttggcagatctgatctccactgatttaactgagttgatgtctaagtcagccttggaatcttggcttgatgaagctcctgctgagccacttgttcagaattcgtcgcaggcatcatctgccagagttgcttttaccaatcgcagctttgagcgaaaacctaaattgcatacactgttggactcatctgacagtaatggcttaagtgttttatatgccttctcatctgaggtttcgcccagatcacgcttgctagtatgtgtagacttatatttggagaatgttactacacaacacttgacagatataaccattaaatctgaggaggcttctagcagcgtggattctacaggccaaacattggaaggatctgtgagtgcccccctattgttcctgtggaagagatacattcattggctccacaacaaacggccaagatggttcttgaagtccatttccatcaccatctcttgcctctaaagctgtatgtgctttgcaatgggaaaacacatccagcaaaacttcatccagatattgcttattttgttcggccactacctatggacctaaatgctttcctatgcaaggaaaaccagttaaggggaatgttcgagtatgctaggaggtgcacattcaaagatcatcttgagaagctagagcacagtgataagaaccttcaagtagcccagagtgttgcatcaaaaatactgagcaacgccaacgtgcaccttgtttcaatggatatgccagttaccttcaatgttgacgacacatctggcttatgctggagattcagcagtgaaatcccgagcactttgaaaccttgcctaattacgatccttgcggaagggcatgcctcggggccactggaacttactgctaaggtgaattctgaagatacggtgtttgccctgaacctcctgaacagaattggttggtccatttagg

SEQ ID NO: 23431 - DNA, 245 bp, Setaria italica
  Peptide Sequence Number=SeqID_89405
cgcccgtctggcgtctgcctgtttctacacctgtttcccggaaacaggagagccgcagagcaaaacagggaggcagagccgccgccgttgatccctgtcctttccgatccagaacccaagcctccccgtctaccggagctctcccagatggcggtgagctcgcgggtgccctcccaacccgcggcgcggggcctcctgcgccgcaccccgccgcgcatcctccccgtcgagcgcgcgccgcgccg

SEQ ID NO: 23432 - DNA, 394 bp, Setaria italica
  Peptide Sequence Number=SeqID_89406
ttctagccagataagcaccagcacagcatgtcgtcgccatccgcgtcgcaccggttgcagccatggcgcacctcggtggtgcagcttttggccaggtcacggtgggtgcttcaaaccagctggcgagccatgtccgtgcaggtaacctgtatgatgaaatgctactgaagagtgcaaatgcagcagctctgtggagagcacagagcactagagcagacagtgtatgtccagtgtcctaaaaaaatttcgatctcaaatcagtcagtgtgatttttccaatctcagctcccaatctctaattctttgctcccgatgtctgcttgttgtgatccaaagcttcaatgcagtgctgctgtacagggtatggttttcgcttgttgcagtgctgcggctg

SEQ ID NO: 23433 - DNA, 383 bp, Setaria italica
  misc_feature (377)..(377): n is a, c, g, or t
  Peptide Sequence Number=SeqID_89407
aaacaaaataaagtaaacgtaaacgaaaccaaataaccgaacgtacgacaaccggttagacaagccaatggcgcacctcggtggtgcagcttttggccaggtcacggtgggtgcttcaaaccagctggcgagccatgtccgtgcaggtaacctgtatgatgaaatgctactgaagagtgcaaatgcagcagctctgtggagagcacagagcactagagcagacagtcttcaatgcagtgctgctgtacagggtatggttttcgcttgttgcagtgctgcggctggagttccttcagccttcatcgtcgacctcatcgtgattttttccattcagattgatccactctagaaaattgacaagattctatattccaaanaatatg

SEQ ID NO: 23434 - DNA, 269 bp, Setaria italica
  Peptide Sequence Number=SeqID_89408
caacatccccaacacgcccatagaatcccacaatgctgtgattgttcggggccgctacacggaaaggagtattgcccgcagcttgtttcccgtatggtccgtaggtgttaacattggttacaattgtaagagatgtcacaacagtgtggactccgtcgtagttattaccagttgtcccatagatctccttcacggtctctgaaggaccaaactgtatgggcggttgcttggactttccagcatcaccaccccatggaccaactgcccgc

SEQ ID NO: 23435 - DNA, 231 bp, Setaria italica
  Peptide Sequence Number=SeqID_89409
ctcatcatcaatcttgtgcccgcagcagagttcttgatctgactcgctttgtaacttcttcgtgcgctatcattgtctccggatgaagatcaccgtgcagtcctcgagggccgtcaggcctgactacggcagcgacggcgcggctgcgggcagcgccgccggcgacgtcgtgacgctgtcggtgttcgacaaggtgaacttcgacacgtacgtgtccgtcatctacgtgtt

SEQ ID NO: 23436 - DNA, 360 bp, Setaria italica
  Peptide Sequence Number=SeqID_89410
ggaccaaagtacatggcgagaagagtgtatcaactgagccctccagaggatctgaccctggcaattgccatggtgaggccgtcacgacggttccttaatgacgagacgatgacggggaacgtcctgactgcagagaggtatggcgcagtgaggcgtgtgtatgtcgtggctgaagacgacgagtggaaaccggcggagatgcagcggcttatggcctcatggaaccccggcaccgaagtgatggggttgcagggagctgatcatatgcccatgttctcaaagccgagggagctctcagaattactcatggaaattgccaacaagtagagttgatgatttcagaaacatcctccgcttata

SEQ ID NO: 23437 - DNA, 315 bp, Setaria italica
  Peptide Sequence Number=SeqID_89411
acggagcagcctgcagtacgcgggccggcctccctcgtctggggctgggtcgtcgtctccttcttcacctggttcgtcggcgtcgccatggccgagatctgctcctccttcccgaccactggctctctgtatttttgggctgctcatttggctggtccagtctggggtcctttggcgtcttggtgctgcgcttggctggaggccatcggcctcattgcaggaattggcacacaggcatatgcaggatcccaagtgttgcagagcatcattctactctgcactggcaccaacaaccggcggttggtcttattttgt

SEQ ID NO: 23438 - DNA, 353 bp, Setaria italica
  Peptide Sequence Number=SeqID_89412
ataattccagtcttgcattccaccatatattggataccagaaggctccatttgttatccctccttcaaattctttgctcaaggacatgttgtagtgggactgactatacactgatgccatgtgccggaatgtcttatcatcaggacatccgtaataatgtttgcctgtatctctagttccatcccatggataattggcaacaagagcaccctaaaaaaattcaaataagatgataatatagaacctcatttcaacaagataagtaatagcagataactgtgggtaggagagaatagttaccccatgcaaactagcagaagctgtgaagtgttcttgctttacccagttcataa

SEQ ID NO: 23439 - DNA, 653 bp, Setaria italica
  misc_feature (641)..(641): n is a, c, g, or t
  Peptide Sequence Number=SeqID_89413
ttttccggtttacgattcatttgtagccggcgaccagttcagcaaaacctccgtgttcatggcgaggtcgccgttcgttccgatggaggcgagggagcaagcgggcaccggagggggagcagaggcgggcaagggccaggcgccccaccaggcccgggaggaggagcaggaggcggcggtgctgctggtgcacagccaggtgcggcggatcaagcgggaggacgaggagatcagggagcgcctcctcaagctgcggctgctggagaccaggcccgccggcggcttcgtctgcgaccccgtggcgtggcgggcctcccgctcgctctcgccgctccgccgcgccgggaacggcatccccgtgggcgactgatcgagcgtagcaggagtagctcgagtttcctgagaagctgcagttaccagcagctagcagcctgttgtagatagatacctagccacctagtcatcgtgcctgtccatgttctcgtgtacgttcatgggatcggagcttaagtagatggcggtaagggtgatggcagcgtcaccatgtttggtactccgtagcagtagcatgctctgttctgtctcctcttgttctttgtatatatgagaagagtagtttttaaccaaaaaaaaaaaaaaanaaaactgacgac

SEQ ID NO: 23440 - DNA, 275 bp, Setaria italica
  Peptide Sequence Number=SeqID_89414
cgggagctgaacctgcgaggcaaccgtctcactggtagcctcccggacgacattggggactgcccattgctgaggtcagtggatcttgggtccaactcgctgtctggcaatttaccagagtccctgcgtcggctctccacctgcacataccttgacctgagctcaaatgagttcactggtagtgttccaacatggtttggagaaatggcaagcctggaggtgctggatttgtcggggaataagttatccggcgagattccgggatctattggtgg

SEQ ID NO: 23441 - DNA, 291 bp, Setaria italica
  Peptide Sequence Number=SeqID_89415
gcgcccgcgcgctcccgctcccctttgccgctctccgctttggagggatcatttccatttggtttcgtttcgtttcacccgagggcgaagcgcgagtgcgaggccgccgcgcgtgggagcgggctggatttgcgcgtcctgtaccgcgcgccccatgtgacgggtcgctcgcttgcccccgcccccccgccgctctcccctctcccaagtccctcccatcccgcaaagcaacagcaacgcgccgagcgccgagctgccagccccggggtcccggccagccaaacccacccc

SEQ ID NO: 23442 - DNA, 1564 bp, Setaria italica
  misc_feature (1543)..(1564): n is a, c, g, or t
  Peptide Sequence Number=SeqID_89416
ctgatagctaatgtaacatatggctacacagctgctggcttcagtggtcggatgccttgtgcagagcttgcagacagcattgttcaatgtggtcgtagaacgcttgaaacagcaatatcatttgtcaaccagcatcctatgtggaaagctagggttgtgtatggtgatactgacagtatgtttgttcttctaaaagggcgttctagggaagaagcattcagaataggaaaggagatcgcttcatctataactgcgatgaatcctgatccagtcacattgaagttcgagaaagtctatcagccatgctttcttcttacaaagaagagatatgttggctatagctacgagagtcctgaacagaatgagccaatctttgatgcaaaggggatagaaacagttaggagagatacttgcccagcagttgcaaagattttggaacggtctatcagaataatttttgaggaacaggacttaaccaaagtcaggtcatatttggagcgtcagtggacacgactattatcggggaaagtttctatccgagacttcatttttgcgaaggaggtccgtttaggtacctacagtgcaagggcatccactctgccacctgcagcaattgttgcaacaaaagctatgttgtctgatccaagggcggagcctcggtatgcagagagagtgccatatgttgtaatccatggggaaccaggggctcgtctcgccgacatggttattgatccttatggtctcctagaagttggatctccttatagattaaatgaactatattacataaccaagcagattatcccagcactacaacgtgtttttggactccttggtgccgacctgaataattggtttagtgaaatgcctcgccccatacgaccaactcttgccaaacggcagtctgcttctggtcatggtttattttctcgtggtggcagattcatctggttaggattgaataataaagcctccagcaagggaggcagaatagatacatactacatgtcaagccactgttcaatttgtggtgatctaattcaaggatcagagaccttctgcgaaaattgcttgaaaaatgaagctgttgttgccacagtagttgctggtcgaacttcaaagttggagcgagaaatccaacatcttgctgctatatgtgggcactgtggcggcgcagactggattgttgaaagtggggtcaagtgcatttcccttgcatgcccagtcttatatgaacggaggaaaattcagagggagctgagagttgtctcagaatcagcgggagaagctgggtattatcctttttgctgtgctgaacttttttgaccaagaacatttttggggttgcgtcgtcttctatgttcataccgtgcaaattgtgaaatttgtagcttgtacgttacacttgtgtatagttgctgctgctgttcttcttcttgttgttgtaacaatgtacatgtattgaggaaatagatacaaaggatatgtaatgaacgagctctacttaaaggggcacgtgtaccacatagattgctagaaaacnnnnnnnnnnnnnnnnnnnnnn

SEQ ID NO: 23443 - DNA, 401 bp, Setaria italica
  Peptide Sequence Number=SeqID_89417
ccggagcgcccccagaagccgacgatgcaggcgccgtccgccgccggcacagagaaagtcgtcgtcgtcttgttgccgtacggcccatacgtcctgccggtgctggtgcggaacgtcagcgaggtgatgacggcatcggggacgctcccgaaatggccgatcgtgcccgccaccgcagtgacatgctcaccggcagacagctcgatcactgcaggaactcctttggagccgaaggagtgcgggagcccccactgagcagcagcagcagcagctggggagtagtagtcgcaagccatgaagtggatcgcgctggaatggtacaaggtgatgctgcggaggcgaggagggctggacgcacgcatgtagaatggcttcccgcggatccaccccacgtcccgacg

SEQ ID NO: 23444 - DNA, 1149 bp, Setaria italica
  Peptide Sequence Number=SeqID_89418
cttacttccttttgctccatctcggtgggcgggcgcacggcgtatggctgatggctgtagttgtagccggccgggtttgaggaggagcatgatggcttgattgttagtacccctaatggcatcgagaagccagccggagcgcccccagaagccgacgatgcaggcgccgtccgccgccggcacagagaaagtcgtcgtcgtcttgttgccgtacggcccatacgtcctgccggtgctggtgcggaacgtcagcgaggtgatgacggcatcggggacgctcccgaaatggccgatcgtgcccgccaccgcagtgacatgctcaccggcagacagctcgatctgcagcaaatcgatcagggctgctagcttcgattgattcactcctagcaactactgctttcattaattcatagaagaagaatgaagaagaaggttcagctaatttagttaccactgcaggaactcctttggagccgaaggagtgcgggagcccccactgagcagcagcagcagcagctggggagtagtagtcgcaagccatgaagtggatcgcgctggaatggtacaaggtgatgctgcggaggcgaggagggctggacgcacgcatgtagaatggcttcccgccggatccaccccacgtcccgacgctgatcacgccccgaggcgaagtatgattatttgtgcgatatctctgctgggccttgggagtagcactgctattatcttggccttcgacgcatggcgatgggatccaatcacgaacaaggctcaccgaaacgggttgccacacctgcgctagtctttcacccctgcctcgctgccgtcccaatcccaaaacattgttggcatcccagagctcctttgcgaggtaggcgagggcccctctgatgctgaagctgacgctggcgctgtcggggctcctctcgagcgcccgcccgagctggatgccgatgaggagagcaccggcgtacacgaaaaggggcaccacgatgatgagcagcacggcaggcccggagagcttgagcttgttcgccatttctattcttcttcgatctgttgttggatcctgtcctgccgaccgatcgatctccagctccactgcagcaataataaccaattgagagatcgagagttgctggacggcagcta

SEQ ID NO: 23445 - DNA, 294 bp, Setaria italica
  Peptide Sequence Number=SeqID_89419
cacagataggtgtaccgatctgagcatgagggccgtcctcaattttcctcctctggtacgaaatcctgcggatattgttctgtggtattgtgtcctgcctctcttcctgtactggctgaatcatgcttctattcatgagttcgatgaagtacctctctccacgctcgaataacccaattccatgttcttcgggcacaaaaccttcagctacccacttccatatcaagtaatctttgttaatggtgtaacctgctggatacacacttatgtacagtaagcaagtcctcagataaa

SEQ ID NO: 23446 - DNA, 477 bp, Setaria italica
  Peptide Sequence Number=SeqID_89420
ccttcaccaagaacaagtccgactacgtccggcgtgccatcgccaaggacgattggaacaagatcttcccctggttcgccatggacggcgccgggatgatcatcctcgagccacacggggggttcatcgacaccatcccggcgtcggcgacgccgtacccgcaccggagcggggtgctgtacaacatccagtacatcaccttctggccttggggcaacgacggctcggcggcgacgagctggatcaacaacttctacgacttcatggggcagtacgtgtgcaagaacccgagggtggcgtacgtgaactaccgggacctggacatcggcgtgaacacggtggtcaacgacgtcaccacgttcgacggcggcaaggtgtggggcgagaagtacttcgccggcaacttccgaaggctcgccgcggtgaaggcggcggtggatccaaccgacttcttcaggagcgaacagagcatccccg

SEQ ID NO: 23447 - DNA, 149 bp, Setaria italica
  Peptide Sequence Number=SeqID_89421
gacccgccggtgcagatcggagggtggattctcttttggatggtttcgaaacatcgatggagacgatgaagaactagcattcgttgtagctgaggttcagtggtatacatgcagattgcaggtagaaccgtagaagaagtggagaggag

SEQ ID NO: 23448 - DNA, 1155 bp, Setaria italica
  Peptide Sequence Number=SeqID_89422
aagtagtatatctatattcatcaactcctaaactcaagcagagatgattacaagaacacacgtatgatgttcttacaaattatttactctaccaaacctaatacatatgattcactctactgaacctactaccacatggacactgacttggaacatcctccaggcattaacaccgtattattccacacggacagattaacacgccatgacgcaggcgagacaaaccaactctctcgtctctcccccgaacctgcatgcagaaacattacagctccagctcaggacctgtcgcgagtcgcttagtccacctcctcaatctttggcccggcgccgcttccaccgccggtgccggcgccgttgggcacgtcctcgtccatgcccgcggcgccgccctcgccctggtacatcttggagatgatggggttgcagatcccctccagctccttcatcttgtcctcgaactcctcggcctcggcgagctggttgccgtcgagccacttgatggcgtcctcgatcgtgtcctcgatcttcttcctgtcctccgcgggcagcttcgacgcgatcttgtcgtcccgcaccgtgttgcgcatgttgtacgcgtagttctccagcgcgttgcgggcctccaccttgcgcttcacctcctcgtcctcggccttgtacttctcggcctcctgcaccatccgctcgatctcctccttgctcaaccggcccttgtcgttggtgattgtgatcttgttcttctggccggtggtcttgtcctctgccgacacgttcaggatgccgttggcgtccatgtcgaagcacacggtgatctggggaacgcccctgggcgccggagggatgccggagagctcgaacttgccgagcaggttgttgtccttggtccgggccctctcaccctcgtacacctggatgagcacgccgggctggttgtcggagtaggtggagaagacctgctccttcttggtcgggatggtggtgttcctcgggatgagcacggtcatgacgcccccggccgtctccaggccgagcgagagcggcgagacgtcgagcaggagcaggtcctgcaccttctcgttgccctcgccggtgaggatggcggcctggacggcggcgccgtacgcgaccgcctcgtgaaccacttcgtgcagg

SEQ ID NO: 23449 - DNA, 793 bp, Setaria italica
  misc_feature (763)..(793): n is a, c, g, or t
  Peptide Sequence Number=SeqID_89423
cgccaccagcagcgccgtcacggacggcggcggcgcggcgcagcgccagcaccagcagcagcagaggaaggcccggaggtgctggtcgccggagctccaccgccggttcgtcgcggccctccagcggctcggcggcgcgcaagtggccacgccgaagcagatcagggagctgatgaaggtggacgggctcacgaacgacgaggtgaagagccacctgcagaagtaccggctgcacacgcggcgtgcgtcgtcgtcggacggcgtcggcggcgaccaccacgcggcggcggcgggcctgtggtcgtccgccgcgccggagcagcagtacacgacgtcgcagcacagcacgtcgcagtcggggtcgccgcaggggcccctgcagctgacggtgtcgagccgggccatgtcggcaaccgccggggacagctgcgacggcgacgaggcggagggcggcaggtccgagagctacagcttcgggatgcagcagcagcacgggaccaaggcggcctcgtcttgaaaatctttgatttgatccatggaacagcagcagtatagaagaagaagatgatccagcatatgcgtatgatgcatcagatggcaaccaacaccgcagatgatgaggaattttgtgtacagtcgttgagaggattcttttttttcttttgcagatgaactgatgtgagagtgattgttcagagtgttgtttgtaggatcgcgtgagatatgagatgtcgttaaattacaaaaaaaaaaaaaaaaaaannnnnnnnnnnnnnnnnnnnnnnnnnnnnnn

SEQ ID NO: 23450 - DNA, 428 bp, Setaria italica
  Peptide Sequence Number=SeqID_89424
tcagatcctggtaagagcacttcagtttcttgctgggatcctaattttgcccattttccttcacatgcagatgtccctgaaggttgtgtgatcatcagagaacacatccccatcacgaacctcttcacatgcctatggttcaatgaagttgaccgcttcacctccagggatcagataagtttcagcactgtccgggacaaaatcagggccagagttggctggatgcctgaaatgttcctggactgtgaaaggcgcaacttcgtcgttcaggcgtaccacagggagctactggagcaaatgattgcgtccggtaggacggcccccctcaacgaccgacgcaccaccgtctcgaaaacttcggccaggcagcaggaaagctcccccgtcgaagaagccctccgtgaagcggaaaaaggagaagaaatcga

SEQ ID NO: 23451 - DNA, 392 bp, Setaria italica
  Peptide Sequence Number=SeqID_89425
gggaaaggagtttatttgtcatttgcatcggcatggatacctccttatctatgcagtgttttgatcatgttgaatggacaatacttatttgtgcagattccgaaacttctgctccataggctttttcccaaatgtgagattttcagtttggatagatgcaaaacttgagcttgttgccgatccatatctcctgcttgagaggttcctgtggcggaagaaagcaacttttgcaatatctcggcattacaaacgctttgatgtgtttgaagaagcagaagctaataaagctgcgggaaagtatgacaacgcgtcagttgattaccaaatagagttttacagaaacgagggcctatcacattattctcctgcaaaggttttcccatcgttacgta

SEQ ID NO: 23452 - DNA, 462 bp, Setaria italica
  Peptide Sequence Number=SeqID_89426
tagggtcctagtagtttggtcttggtattgtccttgtaaattgtttcctggtacttgttgaaaggcgcaacttcgtcgttcaggcgtaccacagggagctactggagcaaatgattgcgtccggtaggaggcccccctcaacgaccgacgcaccaccgtctcgaaaacttcggccaggcagcaggaaagctcccccgtcgaagaagccctccgtgaagcggaaaaaggagaagaaatcgagctcgcggaggcgtgttcccaagcccccggtcgccggggggatgggtgctatgtgactcaagttttttggcggagcctggactcccacacttatacaagcgtataacggaacacaagctgattcggttaggggctggggcttgtaatcgtgccccggcgaaagttgtccatagttattcttcattgttgttgtacataacagcgcaaatcaatattcaattc

SEQ ID NO: 23453 - DNA, 1668 bp, Setaria italica
  Peptide Sequence Number=SeqID_89427
gaaggagcggctgcaactgctgcaccgcgcgctgcggctggtcggccgccgcagggccggcgtgctgctgctgctcgccgtcgcgtccgccgccgtgttctgctccctcttcgccgtcgtcaaagatgacagtagttcaattagcattgtgaataattatgaagtcccaaatgccatacagaagtcagtgtatcccagcacaacccgacctctaaagatgtccggagaccaatactcaagtgttgtcaacaaaatcgagcttccaaatcgacttcatctttcatatgcaaatttcacacatccttgtgaaggtttctcagttcctcctcccctggttgataagaaacgcactggaccccgaccatgccctgtttgctatgtctctgtagatcaggcatttgcactgatgcctctacaggcttcaccatcacctgtcctaaagaacctaaactatatatctgaagatggcatcgttgcaaatttatcaagtcagggctctgaatttggaggacatccatccctggagcagagaaataaatctttcgacattagtgaatcaatgactgtccactgcggctttgtcagaggaaagaagcctggccaaaggtactggattcgacatcaaggatgatgacctggtagagatggagcaatgccgtgaactagttgtagcttctgctattttcggaaattatgacatgattcaacatccgaggaacatcagtgaattttcaaaggcaaatgcatgcttttacatgtttgtagatgaagaaacagaagcttatgtgaagaattctagttctttgtacaataataataaagttggactttggaggttagtggttgtccgaaacctcccttatgaagacccaaggcgtacgggaaagattccgaaacttctgctccataggctttttccaaatgtgagattttcagtttggatagatgcaaaacttgagcttgttgccgatccatatctcctgcttgagaggttcctgtggcggaagaaagcaacttttgcaatatctcggcattacaaacgctttgatgtgtttgaagaagcagaagctaataaagctgcgggaaagtatgacaacgcgtcagttgattaccaaatagagttttacagaaacgagggcctatcacattattctcctgcaaagtttcccatcacgagtgatgtccctgaaggttgtgtgatcatcagagaacacatccccatcacgaacctcttcacatgcctatggttcaatgaagttgaccgcttcacctccagggatcagataagtttcagcactgtccgggacaaaatcagggccagagttggctggatgcctgaaatgttcctggactgtgaaaggcgcaacttcgtcgttcaggtaatgcacctgatccacaatccattatggtcttcggtcctcccgcactttcttgttgcacaactgcctgacagttagtgcacaactaaactaataagtggcctttatttttgggtgtactcctaccggacgcacatgttaaactcacaagttacttttggtttgtcttgtttttcttattaattgcaataactatcaattctcctgatatgtgcttcttcacattttttaggaagcaacaaaaaaatggtagattccatcattttcagaaatgaatacaaacctcata

SEQ ID NO: 23454 - DNA, 717 bp, Setaria italica
  Peptide Sequence Number=SeqID_89428
cgggcggccgcgcaggttggatagctgccgctcgaggcggccggagaaggtcttgaacgagtcgaaccgcttgtcgcgggtgctgtcgcaccgccgcgcgccctcgtcggcgttcttggacgggtgcatgttcaggatgggctgcgagtggaaccgcgtctgcttcagcagcctcggggagtgcaggtgcgcctccgccggctgttcctccaccgggtgcacgacgagcccgtcgggcatggcggccggcgccacgcgcgcctccacgcggttggccgacgccgccctgaactgcgacaggtggaacccccgacggggacgccggcatgctgagcgagatggagtacgggacgtgcgcgtcgtcgtacgacctcgctgcagcgctcaccgccgtcgccggcgccgcggggatgctgatgacaatgtccttgtgggcccccgtgtcctgcagctcctccaccttgtcgtccagctcatgcagggagacggtggcgtcctcggcgacgcagtcgaagccggcgatgctctgcgcgggcacctggatcaggagcgccgggagcgcgtcctccctcgatgccagctcggcgttcaccccggccatctgcacgtccttgctgccgaactccatcgtgcctgccgacgatacccaacaacacacctggtcagcagcagcctagatgcggtagtagcgcaacaccaacgtgcccagccacgacg

SEQ ID NO: 23455 - DNA, 313 bp, Setaria italica
  Peptide Sequence Number=SeqID_89429
gggaccactcggggaaaggagctcggggcggttccgtaaaggaggacgaagcggcggccgcggacgaggtacagagggtgcgtagcggggagcgtgaggagagcaggagcaggcggcgtgaggccacgcacggcggggtgaggaagagcgcggcggcggcggtcgcgggccgcaggcggagcggggaggaggtgaggaggagggacgagaggagcttggaggcgccgcccatggcgccggagcgggagagggagagggagggttttgcacctccgctcccggcttcggtatggggcgcagcgggcggtccggg

SEQ ID NO: 23456 - DNA, 297 bp, Setaria italica
  Peptide Sequence Number=SeqID_89430
gtcgtcagccgacgctttttccttctcctcttcctggcggcttcttcttcctcctcgttgcagctcccgctgagccctcctcggcgccgttgacgaaacgcctcttctccctcctcctcgtctcggacggcggccgtcgcgtcaaggattcaagggtggggagctgagctgggaggaggactgccgcagccatgaaggcgctcattctcgtcggaggcttcggcacccgcctgcggccgctgacgctcagcgtgccgaagccgctcgtcgatttcggcaacaagcccatgatcccgc

SEQ ID NO: 23457 - DNA, 297 bp, Setaria italica
  Peptide Sequence Number=SeqID_89431
cacccccgatcagccgatctgctccagcctccagctgcatttgcctcttcctcgtcacgtcacctacccgataaagccatccgtcagaacgtcacagggtggggagctgagctgggaggaggactgccgcagccatgaaggcgctcattctcgtcggaggcttcggcacccgcctgcggccgctgacgctcagcgtgccgaagccgctcgtcgatttcggcaacaagcccatgatcctgcaccagatcgaagctctgaaggaagttggagttacagaggtcgtcctggccatcaatt

SEQ ID NO: 23458 - DNA, 1649 bp, Setaria italica
  Peptide Sequence Number=SeqID_89432
cgcgtgccttcgaatcagaggcaaccgcgtggtttctatatatacaccaaccacgcctgcagcttccgcgggttccatggcactgccacctgggtgggctctgtgccggggcacatcacacatggcgtccgcgtaggcagggggcagggggggagagaagagggggttgtcttggtactccagttgctatccgcgaacaggtggggagctgagctgggaggaggactgccgcagccatgaaggcgctcattctcgtcggaggcttcggcacccgcctgcggccgctgacgctcagcgtgccgaagccgctcgtcgatttcggcaacaagcccatgatcctgcaccagatcgaagctctgaaggaagttggagttacagaggtcgtcctggccatcaattaccagcctgaggtgatgctcaactttctcaaggacttcgagagcaagcttggcatcaagatcacctgctctcaggagacggaacccctgggggaccgccggcccgctggccctggcccgcgacaagctcgtcgacggctccggcgaccctttcttcgtgctcaacagcgacgtgatcagcgagtacccgttcgcggagctcatccagctccacaaggcccacggcggcgaggccacgattatggtgaccaaggtggacgagccgtccaagtacggcgtggtggtcatggaggagggcaccggcaaggtggagcgcttcgtggagaagcccaaggtgttcgtgggcaacaagatcaacgccggcatctaccttctcaacccctccgtcctcgaccgcatcgagctgaagccgacgtccatcgagaaggaggtgttcccgcgcatcgcggcggacgccgggctcttcgccatggtgctcccggggttctggatggacatcgggcagccgcgcgactacatcacgggcctgcgcctgtacctggactccctgcggaagaaggcgccggcgaggctggcgtcgggcgcgcacgtcctgggcaacgtgctggtgcacgagacggcggtcatcggggagggttgcctgatcgggcctgacgtggccgtcggccccgggtgcgtggtggaggccggggtgcggctgtcccggtgcacggtgatgcgcggcgcccgggtgaagcagcacgcctgcgtctcgagcagcatcatcggctggcactccaccgtcggcaagtgggcgcgcgtggagaacatgaccatcctcggcgaggacgtgcacgtctgcgacgagatctacagcaacggcggcgtcgtgctcccgcacaaggagatcaagtccagcatcctcaagcccgagatcgtcatgtgaccgcggtgtcacgcgtcattgtcacggtgcgaagcgcgccagagttacaagtgcgtccgatgtgcttcatgtgtctgcattgttgtttgatttgttgctcggttgtctgcaagtgtaacaagttttcccgactcccgatcagtgtttgtcggtcgagctatatatctgtatggttagctgagtctaattttttctctccgtgcttgtagataggtatcagattaatggaaagaataaaagttttcttcgcgtcattagctgagcatctcatccttctgttgtacacccctctttgcagacatcattcagtttctcagcttttagtt

SEQ ID NO: 23459 - DNA, 522 bp, Setaria italica
  Peptide Sequence Number=SeqID_89433
aagggcatatatcagagtgagggagtatgatgctagatcacgaagcagaagccgtagccgctcgtactcgagaagccccagttacagcaggagcaggacgcatcatcaagtttcctggtcaccatcacctgtggatgaaagatcgctatctagatcccgatcccctgtctcttctccttctcgtggaagatctgcaagcagaagccccaggagcagaagcgcatcccgttcccgttctcctgtgagatctgattcaactagggaacccttgaagcggtgagcaattattaccagagaaaggaaaggaagttgagaacatgcactaccatcacaatgatctgaatgattctgttgttgccactgctccccctcatttgggaggtttgctcttatttagtatttaataattacattattatattgctaaagagtaaagagagtcttactaggcatagcgtactggtgtaaactgaacttctatgtcctggccttggcactcaggactgaacttctatgtcctgg

SEQ ID NO: 23460 - DNA, 1388 bp, Setaria italica
  misc_feature (1)..(1): n is a, c, g, or t
  Peptide Sequence Number=SeqID_89434
ntccgtctgcttccgttccaccacgcggcgtcgcctcccggagtcccgaaccttctcgagcttttattttctaaataggaagaaaacaatgagcagacgtaacagccggaccatctatgtaggcaacctccctggggacatccgtgagagggaggttgaggatctcttctacaagtatggtcagattttggatattgacctgaagatacctccaagacctcctggatacgctttcgttgagtttgaggatccacgtgatgctgatgatgcaatttatgggcgtgatgggtataactttgacggctacaggctgcgggttgaattagctcatggtggaagaggtcagtcttactcttatgatcgttcaagcagctatagcagcgcacgccgtggaggtgtttctaggcgttctgattaccgtgttatggttactggtttaccttcatcggcgtcgtggcaagatctgaaggaccacatgcgacgtgctggtgatgtttgtttctctgatgtataccgtgaagccggagaaactattggaattgtggattatacaaactatgatgacatgaaatatgcgattaggaagcttgatgactccctgttcaggaatgcattttcaagggcatatatcagagtgagggagtatgatgctagatcacgaagcagaagccgtagccgctcgtactcgagaagccccagttacagcaggagcaggagtccaaaatctgtttcctggtcaccatcacctgtggatgaaagatctggccatgcccgcaatctgaggactgcattggtagaatattggatgtattgagaatcggagtggatggtttgggactttggatagtagagctggattgtgatgcatgtatgacaagtgggctacaaccagtcttaggagcaagataggactgacaatcgctatctagatcccgatcccctgtctcttctccttctcgtggaagatctgcaagcagaagccccaggagcagaagcgcatcccgttcccgttctcctgtgagatctgattcaactagggaacccttgaagcggtgagcaattattaccagagaaaggaaaggaagttgagaacatgcactaccatcacaatgatctgaatgattctgttgttgccactgctccccctcatttgggaggtttgctcttatttagtatttaataattacattattatattgctaaagagtaaagagagtcttactaggcatagcgtactggtgtaaactgaacttctatgtcctgggcccttggcactcaggactgaacttctatgtcctgggcccttggcactcaggtttcatcatcagttcaattggtcacttgcaaacacagttgtgcggtcgatgtactcagttatttggtttaaa

SEQ ID NO: 23461 - DNA, 1144 bp, Setaria italica
  Peptide Sequence Number=SeqID_89435
cagtgctctcctattttttgacttcatacatccctaaccctgagttctttgccgtatttaacaaataaatgtactacatatatggactcaaattatgtttcctacttcatattttaaagtaaaaacaaggactctatatatgaaattcacctatgttcaccatagattttaatcatagcctgctgcaaaagaaattcattctttttttttactaaagccggaaggaaaaaacaaggctaggtgcctgaattttgattgatatactttggaatgcttcgtggtttataacactcatgatatgtttttgtgatgtaccaatttctctttaaactagcatgacttgaatttactctggttcagtgattactgattaaacataccgagcttgctggctaacctgcactgctcaaggtttgcttttgtttttcctagatctggccatgcccgcaatctgaggactgcattggtagaatattggatgtattgagaatcggagtggatggtttgggactttggatagtagagctggattgtgatgcatgtatgacaagtgggctacaaccagtcttaggagcaagataggactgacagtaaggatatttaaaatggatcttgtggtgttactgaaacaactgttgactatatgcgcttgaatttcaatggcactaaatggaccttaagtcacaagttttttgttgaattgatattaccatcctggtaaaattttcatattagtgcttcttgcacactaaaaaattatgtttttttaagtcattttattgtaaatgtgcattctgagcttgctcttatctcaaataagttgacactaataataatatttaagatgcactttgcttagtttgcttatttgcagttccagttacgacctgaatacctgataggcttaaaaacaatattattttattggaagtataaagcataaacaccaaaatgtgtactaagcattgtagctccccttatgaaccaatccatttacatgctgtgaaatattatctttttatgagtatctcaaatggtatgttagttatgatacaattttatatcggttctattaacgcatcatcaagtaacaaattttgtttctggaaccttctgcagatcgctatctagatcccgatcccct

SEQ ID NO: 23462 - DNA, 500 bp, Setaria italica
  Peptide Sequence Number=SeqID_89436
cgcggcgaggtggagcggcgtggcgccgtccgtgggcgacgcgcgcgccgcctccgccggcgcggcggacagcacgtacgcaagcacccccgtgctcccgtagagcgcggcgaccatggccggcgtgcgcacctcgaggcgcagccgggcacccgacgcggcggatggcccgtaccactggcacgaggcgtccaaggccgagactttgtcgtcctccacggcgcgcctgaacgccacgaggtcgtccgccgccgccagctccaggagcagcgccgccatcaccgccgattccttggccgtcgccgccggcagcggcggggtcgacggcttgcgaggtccggagcacatactgaagtagttatcacaacaagacgcgttcttggcgagcgttctcggtcagaggtaagggaggatcaacgaccccagcgcttgattgcttgcttggtgcttcctggttcggttagcggacggaccacgcggtggtgaggggtggagggagg

SEQ ID NO: 23463 - DNA, 1223 bp, Setaria italica
  Peptide Sequence Number=SeqID_89437
caccagccgtgaaccgattcaatgattcatcggtaccaccgtaccagcagttacactgtaacagcttcaggccttcagtaatcagcagtctgcacaaccgtggagccatccacctgtgcatgccactcttctactggtacagcttccagtgtatgatatccaatggttcctttagaaccaggcaaccaacatgcgctaatgccgctccagatgctgcagtacagacgcgaccacatgcagggagccggtaacgcagacgaggccaggagatgcgccgccgcctctgctctcgaggatgatctgggaggcggccctgatcaggttgcaggagaatggcaccgcggcgtcctggcacccaatcatcaccgtgggttttccggctaagctcgatggcgatgcggccaggtttgcaatgtgttctggagccttagcaccgctgatggtgccgatgtccacacaattgatgcccaggtcgcgtgccgcagccatccatatttctttcagcgacggtgcgggcattgcacgggaggcccctccagcgatgctcgcctctgtcagcaacaccacgttgggccttgaacctgctagaagctgttcagcaaatgcaagatgctccttgtcattagccattccgacaacaagagccagaggcccttccggtctgacagtctctatcacgtttgacaaggcctttgctgatgcctcggtatgggctccgtcgataagtatggtggatggtccatcaagcccaagcaccaaggcttcctctcgtgtaagaaactggcttctcccaggaagttgcgtctcctctaagccagattggatcgaagcgtcggaaatatcccatcctaggttacggagacagagagctgtgcaagaagctgtaacagcattctggcgctgatgatctcccagcagctgaaggtttacatcatgcaattcaatggagaatagtgtatcatttgaaatcttgatgctgatgtcacagcgttgatacggctttccgttatcccaatatatgcatttagaaatgctcttaatgccaggatcacaagcagatatgacaggggattgcgtcaagaatgctctgtcacgaataatttgctcaatatccgtcgaaaatggtccaccaatcacaacatactggtcgtccttgatgatcccggactttgctattgctatgttttgcagggagccacccatgcagcaagatgctccctccc

SEQ ID NO: 23464 - DNA, 248 bp, Setaria italica
  misc_feature (14)..(14): n is a, c, g, or t
  Peptide Sequence Number=SeqID_89438
ccgaggacatcgtnagggagcggtggcgcagctctaccacaagcacggcaacacggcggtgtcgtggctgcgcgccctgttccacgactgcatggtggggtcctgcgacgcctccctcctgctggacacgagccccgccgccggcgtctcggagaagtccgcgccgcggagcttcggcatgaggaacttcaagtacatcgacgtcatcaaggccgcgctggagcgggagtgcccgggaccgtctcctg

SEQ ID NO: 23465 - DNA, 228 bp, Setaria italica
  Peptide Sequence Number=SeqID_89439
cccaaatctggcgaggcgatgctggccggccgcggcgacggcggcggccgccggcctcgcgccgtcttcatggccttcggcacccaaggcgatgtcttccccatcgcggcgcttgctgcagcttttgcgcgtgaccaagaggactatgcagtggtgttcatcactcattcagcacaccggagtttgcaggacatctagcggccagcaacgttacatacatgcctgtgt

SEQ ID NO: 23466 - DNA, 700 bp, Setaria italica
  Peptide Sequence Number=SeqID_89440
tcttttgtaagtcctacttatttaagtccttgtattgtaaggtattacttatgtgggttggtaaatttgtttttaccttccaagttcctccagcttatcctcatgaacctcctaaagtcaagtgcaagactaaggtttaccatcccaatattgacttggagggaaatgtctgcctgaacattctgcgtgaagattggaagcctgtcttgaacatcaacaccattgtctatggctttaatcttcttttcacgcaacctaatgatgaggatcccctgaaccatgacgcagctgctgttcttcgtgacgacccgaagaagtttgagaataatgtccggagggcgatggctggaggttatattggtgaaacccacttccctaggtgtatgtaagcgtgaaaatggtgacccgttgtctgacaatatgcaactgcagctgatcatagcatgcccgagctatgtgaatgccggagcggtcatgtaatataagttggtgtgacagtcgctgaacacatgaacaatcaggaaaatgtgcgatgaacaaatgctaccttctgtccatttgcagggttcattaggattcattatgattgatgtggtgcttttgtgtctgctctggacaaattctgaatatggtgcatggtttgcaccaactacatgttagtagtagcaagcttgtcagtatcactgattattatgtgttt

SEQ ID NO: 23467 - DNA, 1022 bp, Setaria italica
  misc_feature (991)..(1022): n is a, c, g, or t
  Peptide Sequence Number=SeqID_89441
cagccttttccttctgctaatcccctccgcacggtctcgccgccgccgagcacgcgcgcgccgcctcctcccgccgcagaagcagggctcgctgcccgcctgcctcgagggggttccgtctcgctcccctcggcggagacccgtccgggcgtcgatcgatctcgagggaaaatgataaatctttttaagattaagggccagaagaaggatgatgcagcgactgcaaatggaaagcctgctgtcaagaagcaaagtcctggggagttgcgtctccataaagatattgctgaactcaaccttcccaagaccaccaagatctcttttccgaatggcaaggatgatctgatgaactttgaagccactattaagcctgatgaaggatactatgtgggtggtaaatttgtttttaccttccaagttcctccagcttatcctcatgaacctcctaaagtcaagtgcaagactaaggtttaccatcccaatattgacttggagggaaatgtctgcctgaacattctgcgtgaagattggaagcctgtcttgaacatcaacaccattgtctatggcttgaatcttcttttcacgcaacctaatgatgaggatcccctgaaccatgacgcagctgctgttcttcgtgacgacccgaagaagtttgagaataatgtccggagggcgatggctggaggttatattggtgaaacccacttccctaggtgtatgtaagcgtgaaaatggtgacccgttgtctgacaatatgcaactgcagctgatcatagcatgcccgagctatgtgaatgccggagcggtcatgtaatataagttggtgtgacagtcgctgaacacatgaacaatcaggaaaatgtgcgatgaacaaatgctaccttctgtccatttgcagggttcattaggattcattatgattgatgtggtgaaattgtgtctgctctggacaaaaaagagaactagccaacggacacaacagggagtaggnnnnnnnnnnnnnnnnnnnnnnnnnnnnnnnn

SEQ ID NO: 23468 - DNA, 713 bp, Setaria italica
  Peptide Sequence Number=SeqID_89442
gtttttttttttaaggttagcatcccagatgctgaggtgcagctttatttttctgaaatttacagaaatatgaatgtggacgcatcattccgctgctattaggagtattatgaatttaattaagatcatctaaagccctactttcctgtgtatacaggttttcttttctccgcaaatgctgctagaccttcaagacgatcctgagtgtgcaggacttgctcgtagcattcttcttcaacagccagtgccgaggtcatgtctacctctgccccttgattgatggccttcttggccatttttatcgctaacggacctttctgatttatctcccgtgcaagttcaagagccttttgataagcttcgccagcaggtacacagtagtttactactcccatagttacagcttccgccgcatcgaatctacgaccagtgaatattagctcctttgctctggaccttccaacaatcctaggaaggcgttgtgttcccccagctccaggaataatagcaaggccagtctctggcaagctgaattttgcatccttcccacatatgcgaagatcgcatgaaagagccaattctaaaccgccaccgaaagcagctccttcgacaacagcaattgtaggaattgacagtgcctgcgtatacaaaaatgaaggcataccagagtaaacgaactatacaaaaaattaacgtccatgtggaggattcat

SEQ ID NO: 23469 - DNA, 241 bp, Setaria italica
  Peptide Sequence Number=SeqID_89443
agccttatgcgaacgtgtcgagcctgttcttggagggcgtgtacaacccggtcaacggccggatgtacctgatcggctgccggagaatccaagcgactcggcaagccttctcgacgctgaaagctgtggaggatggcatggactgctcgatcgagatgagggtggagtacccgccgacgacggcgcggtggctgatcaacccgacggcgaaggtgcgcatcgccagcacgcgcgaccccgg

SEQ ID NO: 23470 - DNA, 685 bp, Setaria italica
  Peptide Sequence Number=SeqID_89444
aaagagtgtacatgaccttaaaatatgtgaataactctcccatatcatcacaatttaaaattgaccttaatatgcttccttttcacaaaatcatttgcacggctaactgtttcatagaaaagctatttattgttcccagatgttggtgctgatggctcatggtcatagcatttgttcatatttctttcaggtggcaaggatatttttgttcatatatgtattttaccacatctatttgcactacagtcagataatgcagatgcacgcctttgggtactacctgacgtttcttgtgccatcagtgctctttgtgatgaacacaatgtggttcatgaagatcttaaaaggtgtgaagaaaacactggcaaaatatccatgatggatgacttgacgccaagcggatcccagaactgtcaaagacttggtgtttctggcatcaccgtgtgaccttgatttgtaaagttaaggatatcagggcaactagagaaagttaatgtgtaaagtattagcaaacaagttaggttagatgaaatcgttattttcagcaaagctggaatttcataaccagttcggtttgtaatgaagttccagcacgctgttctgcttacaccaatactagacgtacaatagtagtaataaactagaaagaagacaatttagaaataggaattagtttaattacaaa

SEQ ID NO: 23471 - DNA, 1324 bp, Setaria italica
  Peptide Sequence Number=SeqID_89445
cctccctgctcgccgccaacaccaacagcacgaccagcgcaccacccaagaaatggagctgagcctccccctcctcttcccggcctctgctccgcgcgtatagctgcgctgcgctccccgcactctcgccggcgagctcacaatctcccatccctgcgccaggtgctgcttgtgcttgagccgtgaagatggcagtcgtgacggtttacaagtatcaagctcaggcgttgatgagggactacttgcttgctgatccacttgttccgtacacatcggtgctcatcggcattgtcctctgcaagatggcttatgatttgactcggatattgagttccttttacttcaagggctatacttcattaacaaaaatacaacgcgttgaatggaacaacaggggtatgtccagcgcacatgcaatctttatcacggctgtatcattatatcttgttgtgtcgactgatcttttctctgaccggatcaagggacctattacatttcgtaattcagtcatatccacttgtgcattgggggtttctgtcggttacttcatcactgatcttgcaatgatattctggctgtatccttcccttggtggaatggaatatgtcctccatcatactctttccctagttgccatagcttacacaatgttatctggggaagggcagttttacacatacatggttcttatctcagagacaaccacccctgaaatcaacttgcgatggtttcttgacacggctggactgaaaaaatcaagtgcttacttggttaatggaatcctgatgtttgttgcatggctggtggcaaggatatttttgttcatatatgtattttaccacatctatttgcactacagtcagataatgcagatgcacgcctttgggtactacctgacgtttcttgtgccatcagtgctctttgtgatgaacacaatgtggttcatgaagatcttaaaaggtgtgaagaaaacactggcaaaatatccatgatggatgacttgacgccaagcggatcccagaactgtcaaagacttggtgtttctggcatcaccgtgtgaccttgatttgtaaagttaaggatatcagggcaactagagaaagttaatgtgtaaagtattagcaaacaagttaggttagatgaaatcgttattttcagcaaagctggaatttcataaccagttcggtttgtaatgaagttccagcacgctgttctgcttacaccatctgcgtcatgtgtataactgaagagcatttgaatggattgtttattcaacaatgcaatcccaatgctataaaaaaaaactaaaagaaagaactagacc

SEQ ID NO: 23472 - DNA, 341 bp, Setaria italica
  Peptide Sequence Number=SeqID_89446
aagtataggtgcttttgccatggaaaatcgttattttgtatcttttagatctagaaacacattttgctgttgctgttaggcccatttgttgagattaaatttgttcaatttcagttgttcattatacagaacatagatgtctatatgtagttgttagccaggatcattagtgatatggatggatgggttcttatcaattcaacaatacttggtatacatctaaaaatgtaaattgtctgtttttgtttacaacattaagcatgttataggaacttcttacattatgttctggcaattgctattttcacttgcatcttttgcccaatgggtgaactccatat

SEQ ID NO: 23473 - DNA, 615 bp, Setaria italica
  misc_feature (508)..(615): n is a, c, g, or t
  Peptide Sequence Number=SeqID_89447
cggttcttacctgacccgcttcaaataaaaaattgcactggagctgaaatcaggcttaactgcttttgatggtgttcctgtttttcagtcagatctgctggttgtgaaaaagcagaagaagcgctactgtccaatatattttcaaaaggaagacatagaaagggaacttacaaaggcgtctaaatcttcaagagggtcagccttgtctaagcaaattatggttgggagtttggaggatgtcctgaggaaaatggagataaatgatagaaattcgggttgggatgatttgatcttcattccccctgggaagagcctcaaccaacatatcaatgaagtatcagcgtgattttgttccacggtgattgctcagagtttggttagctttctttttttaatatttattttgattagctttgtcagggaaaattttcgtgtcaactgataaaaatatgtctgaaatagtttctgcattatttctattcacaaacactaatacgtgttaaccccnnnnnnnnnnnnnnnnnnnnnnnnnnnnnnnnnnnnnnnnnnnnnnnnnnnnnnnnnnnnnnnnnnnnnnnnnnnnnnnnnnnnnnnnnnnnnnnnnnnnnnnnnnnn

SEQ ID NO: 23474 - DNA, 944 bp, Setaria italica
  Peptide Sequence Number=SeqID_89448
gcgaaggaggtggtgaagcgtggaccaggaggtgtatgtgaaggtagtgtcagtgaaagggcagaagttgagtttgtcgatgcgggatgtggatcaggatacagggaaggacctcctgccaatgcagcgtggtgcagatgatgcaccaagggcgaacccatcgggtggcagtggcggtggcatgggatctggcaagaggttgggtctgtcaggcattgtgatcacggaggaggatgaggcagcaccaacatcacggcggccgctcaagcgtatgagctcgccggagagatgggaggcaaagcagctgattgcttcgggtgttctggatgtgagggattacccaatgtttgatgaggatggggatggcatgatgtaccaggaggaaggtgcagaggaagagcttgagatcgagctgaacgaggatgaaccagcattcttgcagggacagagcaggttttcaattgacatgtcacctgtaaagatattcaagaatcctgaaggttcactgagccgagcagcggccctacagactgccctcataaaggagcgtcgtgaggtccgagagcaggagcagagagccatgctggattcaatccccaaggatctgaatcgaccatgggaggaccctatgcctgatacgggtgagcggcaccttgcacaggagctgagaggtgttggcctttcagcttatgacatgccagaatggaagaaggaggcctatggaaaggctctaacttttgggcaaaggtcaaagctttcaatacaagagcagaggcagtctcttcctatttacaagttgaagaaagagcttatacaagctgtccatgacaatcaagttctggttgttattggagagactggttctggtaagacaacacaggtgacacaatacttggctgaggcgggttataccacaaggggtaaaattgggtgcactcagcctc

SEQ ID NO: 23475 - DNA, 444 bp, Setaria italica
  Peptide Sequence Number=SeqID_89449
agtactcaagttccatcagaagaaccaaatgctgaaggtgaaatagagacttgaaacaataatgcaccaactgtttgaggaaactctgtcgttacatgtggggtgtgagcataaccacaattatatgagcacagagccttctcctatgaaactggaagcacctacaccttgtgtggaaaggcaacatgctttatcagtagaaccaaacatggaagacaaaatggtgcttaacgcagacaagttgtcagctctagagggtgcatcacaaatagaaaacgttaaggcactggacagatcacggacaaatacaatccttaaagatcatctgaagaacttggtaccgtttacagaagaatggcttgctgtcatggaggctcgtgggcaggaagttttggaacaaaagactggtgctgtgcaaaattctcctcccgacacccgtaacta

SEQ ID NO: 23476 - DNA, 864 bp, Setaria italica
  Peptide Sequence Number=SeqID_89450
ccgggaaaccagggacgcgaagaggaagagggatacgaagaatagcatcttgcagcatgtgtcgaaggaggctgctatggcgtcccaggcgagcgacgccatgctgggcgccgcgaagaagaggaagaagaccggccgcagcacggccggcagcgagtcggagccggggaacctctggtagagcgtgacgaagagcacgaggtagtgcgcggcgccgacggcgaagatggcgacggcagcctcgtgccatcccatcttggcggcggccctggcggtgacgaggttgccgatgacggtgatgaggctggccgggttggcgaccatggagaggaacttgcggccccgcgtgaaccactgcccatagaccttgacgtcgagcgccaggatgggcagcgagaaggcccaccagagcaggcggtagggcgcggcggcggggcgcaggaagggcggcgccgactgcaggagcagcaggcacgagatccagggcgcgaagaggtagttcatggcgacgtggtggcggaactcggcgcgcacggcggggaagcggagcaggcagcgcgcggcgtacagcgccgcgagggctaccaaagcaagtagcgccagcgaccacagaaggaggaaggcggcggagggcagcgaccgcaccatcggtgtgctcgatgatgaggagtcgccgtcgccgtcgccgtcgccggtgagcgtgcgccacagcagcgcctgcccgctcagcgccaggctgatgcggaagtagccggcgtggaaccgcgtcagcatgctgatgctgctactgctagggatggagcgccgtttgagggatgcagctgcttcagccgctgccgccgccgccattgttgtttgactggt

SEQ ID NO: 23477 - DNA, 463 bp, Setaria italica
  Peptide Sequence Number=SeqID_89451
tttttttaaacaagtaaacaatacgtacaaccgtacctacaagacatcgaaccatcaaaattatcattattcaataaacaaataaattaaggatcagaatgctaagttctgacagctgaaacattcatttgcaccgacctgtttaggtcatcagataaatgaattaagcagagaagactcctaaacctgaatgaattgccaagtccgctcaggctatcgctcgatggccttgtacaggacgcaggtcacgtacttggagtggaacctgtgagtgtgtccgagagccaccagcggctgcgaaccccagcccttctcgatgtagaggtggtcgaggacgacgtgcctcggcctcgcgcagcagccttcttccgagctccgtgaattcagcacgccgaggtagagctgggccggcagctgaggaggctccttcgaaaactccttttctccgggaacacggagaccg

SEQ ID NO: 23478 - DNA, 237 bp, Setaria italica
  Peptide Sequence Number=SeqID_89452
cccgagcgccccgccgttgcccgaggaggcatggagcgagacgacggtgccttcagggcgatgctggtatcggtggtcagcgccttggagctcgtccggcgtgtgggctgcgtcggacatcaccgggacgctggcggtgtacgagctctgagctgcatgctcatgctgcgtgaccatacagcagtggaggtcccaacctggtctcctaaggcggctctcatttgtttagaagatggg

SEQ ID NO: 23479 - DNA, 666 bp, Setaria italica
  Peptide Sequence Number=SeqID_89453
cggaaaaagtggactaggagatcaactggcagtgctggaaatgggacagctccattaaatgagaaagctgccatgctattacaggatgttactaggaagtatttggtgcctgttgagtgtttaccttttcatgaaattatctgcttcaagaatgttagtgttctgcaatctgcgctgattggaaatccaagaagaatggttcaacttgatctactgaagtcacagagccatctgaaatgctcttgttgcagtagaactggaactgctgtatcaggatccctgcatgtcacatcaattacgtgcaatctagcccaagaatatggtgatgtgattaaccttcatgattggtacatgacctttgaaggaattatcaacagcacaaattcaaaagccaaacggaaatcctacaattctccctcgaagaagtcaaaaccctcgtctccagagggtagagctatgacccaagcaaggttcttcagggctgttactgagatgcaaatcactggccttgttcggatgccaagcaagagaaggccagatcttgttcagagaatcacattggcccttgatggttttgtgatgacatgctgctgtacaggtgaaacaattatgtacatatcgggattggaatgatcgaatctgagcaagataggctagctacaaacg

SEQ ID NO: 23480 - DNA, 284 bp, Setaria italica
  Peptide Sequence Number=SeqID_89454
ttttttttttttttttttaacttttttcgaaaccacgaccaacagaagcatgccaattttaatttgaggcaacagagtaacacttttactgacaaagccaacactttaggcttgtgtttcagtcgaagtgtaaatctgtaattagtactgatccttgagctcatcagtcttctgagttgggtgggttactgagcgctctcaccatgctcagtagattctcaaacgacgacccggccggggccggtcgccgcctccgcctcctccttccacttggccgcgttcct

SEQ ID NO: 23481 - DNA, 153 bp, Setaria italica
  Peptide Sequence Number=SeqID_89455
ggagctcaatctcctcatcagagtctgctagggagtcatcaagacttgaaaagcaactagcaaagcttgagaaagaattttctcggctaaacataggggtgccataaggagtgttgcaagggcttgagtccatgtgcaaccagttgacctcac

SEQ ID NO: 23482 - DNA, 374 bp, Setaria italica
  Peptide Sequence Number=SeqID_89456
cacggtgatccggcttacaagagcacgttcaacagccgcaaccagatcaaaggcatccttacggacatgttcattgccgggacggacacaacggcggcgacagtggagtggacgatgacggagctggtccggcacccggacatcctcgccaaggctcagaaagaggtgcgcggcgccgtggccgacggcggcggcgacatcgtccgcgagtcggacctcccgcggctcaagtacctgaagcaggtgatccgggagtcgatgcgggtgcacccgccggtgccgctgctggttccgcgggagaccatcgagccctgcacggtgtacggctgcgagatcccggcggggacgcgggtgctcgtgaacgccagggccat

SEQ ID NO: 23483 - DNA, 183 bp, Setaria italica
  Peptide Sequence Number=SeqID_89457
ctggagaagtcgtgcgtcacgccgcggagctcgccgaggccgaacgagtgcagctgcagcgggcccgccatctcccccgccgcctcgccgccgcacgccttgccgctgccgccgtctgacgacgccatggtggccgaggccgggctgttggccagggacgacaggcgccggaacgacgccagg

SEQ ID NO: 23484 - DNA, 987 bp, Setaria italica
  Peptide Sequence Number=SeqID_89458
aaccagggtgtggcaggtcggcgccgcggtcgccggcgggagccccgcgccgcacgccatgggggcggacaatctcgccgccaaagccaagctggacctgctcaggtccaccaccgccaccgccggaaccgacagcgccacccggaagcgcaatatccatggagtcctgaacgcggtgagctggggcgtgctgctgcccatgggagccatcgtcgcgaggtacctcaagacgttcaggtcggcggacccggcgtggttctacctccacgtcgcctgccagctggccggctacggcgtcggcgtctccggctgggccaccggcatgaacctcggcagggagtccgagggcgtcacctacgccgaccaccgcgacatcggcatcgccgtcttcgccctcggcacgctccaggtcctggcgctgttcctgcggcccaagaaggagcacaagtaccgcgcgtactggaacgcgtaccaccactcggtggggtacgccgtgatcgtgctgggcgtcgtcaacatcttcaaggggatgggcatcctgggcgtggagcagcggtggaggaccgcgtacatcgccgccgtctgcgtgctggccatcgccgccgccgcgctggaggccgtcacctggggcgtcgtcgtccgccggcgcaaggccgagggcaagaccttcagcagcagcgccgcctccaatggccacctgccccactgatcgctcggcgtcacggcgtgaaagtttctcaggcatctgcatccaccttcagtggcgtgtatagctacgggcagatggcactaggtatagagtgagatcccgtgattttggcctgcctgtatgtcttctttttttttggttacggtgtgtatatgtacgttgccacttgcgctgtagcttgagctgtagtgagtgaacgtgtattgtacaattgtgtttttgcatggtgtagtgttccatcaccttgctggtttcgagcttctaaaaaaaaaaaaaaa

SEQ ID NO: 23485 - DNA, 990 bp, Setaria italica
  Peptide Sequence Number=SeqID_89459
tgttcgacggaatgcgtctctaagacggaatggccgttaccgggtcggccgtagggtgcggcgcggttcgtcccctcatgcggctggtcaccatgagcggcgcgccgatcatgcagcagctgcacctggaggagcggctcctgcgccgcacggcggacaactggtgcatcatcaacgacggcacggcgccccccaccatcgtcatgggcgtttccgggagagtctcggagcttgttgagatagaaccggtcctccgggacagggtatcggtcgtgaggaggttcagtggaggtggcaccgtcattgttgatcaggggacgatgtttgtgaccttcatatgcaacaagagtgctgtcgccgggttgcagccctttccgagggacatcatgtcatggagtgggcagttatatggcaaagtgtttgacaaatttggtgaattccatctgcgtgagaatgactatgcatttagttgtcgcaagtttggtggaaatgctcagtcaataacgaaaaaccgttgggttcatcacacatcattcttgtgggattatgatgtgaaaaatatggattatctcaaaatcccgaagcgtgcacctgaatatcgactggcaagaaaccacacggatttcttgtgccgcatgaaggagtacatgccttcacggtcggccttcactgatggggtcatcacggccctgggagaacacttctcagtccaacctgcagacttagaaacagtgcttcctgacgacgaagaattcgtgccttcgacaaagctgttatctgaacaagacctagaggaaattgtttcctccaaaggatattcccttggagcacagaaagccgaagcatgaccatgattacagtgagggaatcctcgtttctgttgtgaaatctgaaatcgattgttggcgagctgtggtttcattcaacttctgggtcagatggcattatgctcactgaaccactggcattgttattacttaaccaaaaaaa

SEQ ID NO: 23486 - DNA, 639 bp, Setaria italica
  misc_feature (132)..(132): n is a, c, g, or t
  Peptide Sequence Number=SeqID_89460
gtgattatgtacaaacaattaagtctgctttcagcagtacattgctgagaacaatatcattctactctttttatataaaacccaaaactctgaacataatctgacgagctactatcagtaactaagtgcaanaccttgcatacatgcagttattcttttatagcatcatttgacacaattatgcctatatgattagttacatgctcagagattcctcttctgatcatccttgagctgaagaacatcgacatcctcaaaaacctgaagcgtcgccagctggatgaaatcagtgacctgaattcccacaggccatgggaagcaggccttctccggcaaccggattccgagcctggggccttcgtcatacccttcgcagatcatctccccgttgtcatctctgtagcagatgatccctctcaattgatcctcataaaccttcttcttgtctgtcacagcagtaaaggagaggtttgatgaagaactgctgccatgagcagaggtgctgaacctgaaggccgacttccttgtgccagaccatgggctgatcatggccatggaggaggaggtggaagaagggtgatgatggcaaggcatcctggctgccaattttggtttctagtgaggaaaggaaggtgttca

SEQ ID NO: 23487 - DNA, 689 bp, Setaria italica
  Peptide Sequence Number=SeqID_89461
aaggaatttaaatctagaaaaatggtcggatatactacacggttgggtgtcaactgaaaatgggcagatgatgggagccatactagctcgaagttatagtgacttgccaaatcattatataaaatcttgtttcctctatcttgctgtcttccctgaggattactccatatctgtatcagatcttatcaaattatggatagcggaaggcttcattccacctataacaaggcacacaggggataggacagcatgtatgtacgtaaatgatctggctcaaagatgtttggttcaagtggttagccgaagcaaggcccacggatggattgaagaaataaggattcatgatattttacgtgactggtgtgttgaagaagcgagatatgctggtctttttgatgtcatcgacaacactacaggccatgttggtgaatcttcgtccaataccatggtctcctatcgttcatcttttcaaaaattctgttttggtaacatggtcacagcaacacctaatctccgtactctgtttggctttggctttggacttccatcattctccatacccaagctgagattcctcagagttctccatgtggaaaagtcgatcctgattgattttggcagggttatcagtgggtgcattcacctaagatatctcgtgttgagagagtgtcggcaggctacgctacctt

SEQ ID NO: 23488 - DNA, 1275 bp, Setaria italica
  Peptide Sequence Number=SeqID_89462
tacctaattactaatttacttacctaattaaccctaagtcttgtagtatttccttctagtagttctccatgtggaaaagtcgatcctgattgattttggcagggttatcagtgggtgcattcacctaagatatctcgtgttgagagagtgtcggcaggctacgctaccttcttcaattggaaaattgctttacttgcaaactatagacctgagagaaacgacattcacatcagccatgccaaactctgtatgggacattcctactctaaggcatgtttaccttcataggacagtttcagctccgaggaattgtccacagaaagagctccagtccttacatttacatctcccatacgggggaggggaaagtaaatgcttctacactagggcctttttgggccaaatgacccaactaactactctcaacttgatatggtggtccatgcccgcagagatgattcatttattggcaaacatgacttttctggttgaggttacccttgatcggttcacgttgctcgataggttgcctgatagccagcttctcccgcaaggcctacgagagcttcacttagccgccgagaccattaaagaagacccgatgccaatcctggagaagcttccctgcctggtggtgctcgagttacgggggtacaaaggccgaaccatgttctgctgtgccaaagggttcccacggctgcaagagttgatccttcgtgtttcttacattgaggagtggaggttggaggtcgagacaatgccaaggctctcactcctgcacctttatggttgctgggaaatgaagaagctcccggaggggcttctgcacctgccgtctctcaaggagcttcattgcacggacatgaatcttgaagatgacgtcacctggaaaaagctggttgggaaaggtgtctcgtcgttaatgcaatcttcgattggtgcctcgtcgtcgcatgccgctcgcgcgcatgagaggagaatgtaaattgtgtgcctctctctctctccagtatttctggtgtgtttatgttacaccatgcactctgttttcccgacatgagatttcagcaagcaaacttgtgcctctgagaagaacacggttgtgattatctgtatttcgtatatggacagtggcttggcttgtaacctttaagaaccgttttaactcttctcttgtactggttggagaccaccgggcttagagcatctccaacaaagttgctattccactcttcaagctaaaatttagctaagtctgctagaaaattacgatcc

SEQ ID NO: 23489 - DNA, 943 bp, Setaria italica
  Peptide Sequence Number=SeqID_89463
tgaagctgagaatgtcctccaagttgtggactacatggagaagagaaacatgatcaagaaggactgtgtcggtgccatttcaaggtatgctcgcttaccaagcgatttgatcactctccataaagttggtaatgaaattcaacgtataaggaggagggttagtgagatattagaaagtctaagaaatttggaattcctttatcggggtaatactgagttaggcaattttcatgttgatgatgagtctctgcaagatcacggtcttgtgctccaaaattttgaagctgttactgttatcggttttgacaatgagcaaaaagaaatagttgaaaaattaactgagaaggataacaagcttagtgtagtctccattgttggcatgggtggagcaggaaaaactacacttgctagaaaaatctacacttcagataaaataaaacaacatttcgacgcaattgcttgtgttactgtatctcagaagtttgaggttgttgatttattgaaggatattatgaaacaaatcactgggggcagagatgatggtagagaagttggtcaaatggaagagatagatttgagaaacaagatacaagccttccttacagaaaaaagatatttagttgtgcttgatgatgtgtggacaacaaatacatggaaccaaataaatagaatggtcaaagtatttccagatttaaataatggcagtagagtaatgttaaccacccggaggattgatgttgctaatcatattgaaatgccaacctatgttcaccaactgaagctcttggatggtgaaaagagttgggaactttttagtacgaaagctttaccaccatatagaaggtccttgatacagaacattgatgagtttgaagagatagggagaaagattgcacggaaatgtaaaggactaccacttgcactagtcctttacatttccgtg

SEQ ID NO: 23490 - DNA, 966 bp, Setaria italica
  Peptide Sequence Number=SeqID_89464
cgtgtacaatgacctcggcaacccggacaagggcgccgagttcgcgcgccccgtcctcggcggcgagcagctgccgtacccgcgccggatgcgcacgggccggcccaagaccgtcacagacgagcgcgcggagagcagggtggagtacccggagcccacctacgtgtcgcgggacgaggagttcgaggagggcaagaacgagatgctgtcggagggcgcgctcaaggcgctgctccacaacttcatgccgctgctggtgagctccgtgtcccccgacatccgcgacttcgccggcttccacgacgtcgacaacctcttcaaggaggggctccggctgaagcaggcgctgcaggaccagctgttccagaagatccccttcgtgcgcaagatccaggagaacagcgagggcctcctccgctacgacacccccgacatcatcaagaaggacaagtttgcgtggctgcgcgacgacgagttcgcgcggcaggcgctggctggcatcaaccccgtcaacatcgagcgccttcaggcgttcccgccggtgagcaagctggacccggccgtgtacggccctaaggagtcggccatcacggaggagcacatcatcgggcagctggacggcatgtcggtggcgcaggcgctggaggacaaccggctgtacatgctggactaccacgacatcttcctgccgttcttggacaggatcaactcgctggacgggcgcaaggcctacggcacgcgcacgctcttcttcctgacggccgccggcacgctcaagcccatcgccatcgagctcagcctgccgcccatgaccgaggggtgcaagcgcgccaagcgtgtgttcacgccgcccgccgacgccaccagcaactggctgtggcagctcgccaaggcgcacgtctgctccaacgacgccggcgtccaccagctcatcaaccactggctgaggacgcacgcgtgacaata

SEQ ID NO: 23491 - DNA, 200 bp, Setaria italica
  Peptide Sequence Number=SeqID_89465
attctaggtagtttgaagcggtccgtttcgaaatcaggcatgctttggaagtattgtttgtttcggtccggcccggtttgaccttcccccactcggaaactttctggcccggattgaaaccccaccccctcccctctggatcgaatccttcacgactccacagcgcgggaagagctagcggcgcgggggagagctggcgg

SEQ ID NO: 23492 - DNA, 528 bp, Setaria italica
  Peptide Sequence Number=SeqID_89466
gtcgtccggcttctaggtttctgctctgaaggatcaagacgtgctctaatatatgaatttatgcctaatgcatcgctagagaaatatatattctcacgagcatctgatacttgttgccaagaaaacttaacacctaacagaatgcttgacatagccacagggattgccaaagggattgagtacctgcatcaagggtgcaatcaacgcatcctccatttcgacattaagccttccaacattttactggactacagttttaaaccaaagatttcagattttggactagcgaagttgtgtgcaagggatcaaagcattgtcacactgaccgcagcaagaggcacaatgggctacattgcaccagaaatatattctcggaactttgggacagtatcatacaagtcagacgtttacagcttcggcatggtggtattggaaatgatgagtggggagagtagctcagacccacagaccaagaacgataatgatgtttacattccagaatggatatatgagaaaataatcaccggg

SEQ ID NO: 23493 - DNA, 285 bp, Setaria italica
  Peptide Sequence Number=SeqID_89467
cgcacacacacgcatccacggtagtcacttggagatggccggaagaaacggtgagctgaagctagtcgggcagtgggcgagcccgttcgtcaccagagtgaaacttgcgctcaacctcaagggcctcagctacgagtacgtcgaggaggaccttaggaacaagagcgagctacttctaagcatcaacccggtgcacaagtcagtgcccgtgctgatccataacgggaaggacatctgcgaatcgcaagccatcctgcactacatcgacgaggccttcgctggaac

SEQ ID NO: 23494 - DNA, 324 bp, Setaria italica
  Peptide Sequence Number=SeqID_89468
gcctctctacccccctctctaatctctatctaattcgcgccttgctccgatctgcatatatatatagaggatggatagaaagagatggatataggtggcctgggctcgccctcctcttctactgcggcgtctgatgcttcccctgctgtgccgccgccgcagctctctttctctctctcctctgcgatgcggtgtgcaggcagctaaatgtgtacttgggattcttctcctttgcttattttaattccttttcccctctttttttttcccactgctttgtattttattttggttctgttttctttcctgcttttattattcccc

SEQ ID NO: 23495 - DNA, 769 bp, Setaria italica
  Peptide Sequence Number=SeqID_89469
tttttagactgggaggtgaagtgcgcgtcgctgccagtgacactggactcaagcacaagcctcatcctgttgtgcatggagatcccaaagtcgctgaccttactcagtaagtttgcatccaggaggatgttgcctggcttgaggtccccatgcacaacaggatgaggcttgtgcttgtgaaggaaaatcagtgcagagcaaacctccctgatgattcggatgcgcacctgccaagtgagtggcagggtgttgtcaacacagttcagacgatcttctaggcttccatttggcaagaactcgtaaacaagggcagaagcttcaggacaggctccaataagggtgactagatgtggatgcctcactctactgagtatcactacctcttgctgaaactgtgactgggcatgcaagctttcagtatctagtatctttatagctactgtagtgccgcgaagaaaacctttatagacagatccaaatccacctcgaccaatgttaagtgaacggctgaagacctgggtagcctgctccaactccagcaaggagaattcagagttcattactccataggcacaaggtgctgtgagctctttctccatatgcatgtcccttgcctttttaaccgcatcatctcgctcccgcttcactttactgtacgccaactttagtgactggacgagaggatcagacactctcatgctctctcctaaatagctggcgatagagtctgactctgatatctggtgttccagaagacacttctgctggt

SEQ ID NO: 23496 - DNA, 397 bp, Setaria italica
  Peptide Sequence Number=SeqID_89470
tcggtgatcatgcagcaacacagcaattggactcctgcaaccactggttcaggaccacccagcctacgtcctgatgtgaccggagatcagacttgatattagacaagctccaaaggctgctgttcttcaatgcacagggagcccagctcatggaggtgtcgcggggcaaccacacgagccttgtcatcaccatgaggcaaagtggacacaatcgtgtcaaccttgtccaggagcacaacctcctgcagctcaagcttatggaggcaatcaagaaagctgacagagcatgcgccttagcatggatcagtgcaaataataattttggacgcagagcttcatagcatccgaatttggtacaggtccagcatcaatggagcatgctcttgtcaaatgtgca

SEQ ID NO: 23497 - DNA, 253 bp, Setaria italica
  Peptide Sequence Number=SeqID_89471
cctccccttctcttctcatcttggaagaagacgagcaaaaagaacagatattcttcttcttttttattctcgagaataaaactgagtagatgagaagctagtagggaggcaaggaggaggagaagatgcaaaccgagaaagcataatagaaccacacaaagctagagcaagattagtagattactcgctctgcaatcctgctgcatttgcttgtgcctatcagtgtggttcttgggtgctacagaatgtcgcc

SEQ ID NO: 23498 - DNA, 359 bp, Setaria italica
  Peptide Sequence Number=SeqID_89472
acatggaccttaaacccgagaatatattactggatcaaaatatggcaccgaaaattgcagattttggcacactcattgaccaagataagtcttttttcaccaaaaacttcacgggtataagtggatacatggcaccagagtacaacaatggtgggccaatatctaagagggcagatattttcagtttcggtgtaataattctggagctaatgaccggatccagaccaaattatccccttagtgaagaatctgcggcactatttgctaacgaggtggctggaaaatggagggacagattgtcgaatgcagcctatagtcaacaagtacgcatgtgcgccttgactataggctgcattcga

SEQ ID NO: 23499 - DNA, 219 bp, Setaria italica
  Peptide Sequence Number=SeqID_89473
tttggtgaagtcatagctgagcatgataataaggaagaactaattgacattgcaagacaaatagcaaataaattgaagtgctccccactggcagccaaaacggttggtcgtttattgaagaagagattctctcgggaacattggatgggaattcttcaaaagaaagagtggctaaaccagacccacaatgatgatattatgccagccttgaaaattagc

SEQ ID NO: 23500 - DNA, 296 bp, Setaria italica
  Peptide Sequence Number=SeqID_89474
tcgctagttagcctagtaaaagcagagaagcgtgagtcttcatcatttgttttttaaaaaaatgcaggagctttgactttcatttagcgaaaggagttcattcatacaagctgggcactaaggagccctccccccaacgcacagggaaacaaggtggtgacaccttcatcatgaagatcagcaagtttgtaaacgttcaaaatttaagccattgtggatgaaaaactacataaaccggcagctccaaccaattccttgacacaatcaattgggacagaacattccaaatttgagag

SEQ ID NO: 23501 - DNA, 322 bp, Setaria italica
  Peptide Sequence Number=SeqID_89475
caagttcgccgccctcgtggaccgctacctcgcgcgccaccggcacctctccccaagcgccataggcgcgctgcgggactgccagctcatggcggagctcaacgtggacttcctctcctccgccggcgccacgatcaggtccaccgacaccctcctcgacccgcaggccgacgacgtgcacacgctgctgtcggcgatcgttaccaaccagcagacctgcttcgacggcctgcagcaggcggcggcgggggcgtggtccgaccgcggcggcctcgactcgcctatcgccaacggcaccaagctctacagcctgtctctgtcg

SEQ ID NO: 23502 - DNA, 647 bp, Setaria italica
  Peptide Sequence Number=SeqID_89476
gctccgatccagagccaggaagagggtcagtacacaaccatccctacgtatatatcatgtatatatctcttatcgctgcgtatatacaaagtatttagcacagttgcattttctcatagtaatagtacacttctgtgtttctcagcactacaacatcatatactttcgaaaagttcaaatctatcaagttttctgaataaagcgcatataatgaggaaatttatattttcttagaaaatggaattgatgaaatttatattaccaaacgaaattaataagccacataagtcctgcttgaaaatctgtcactgcgattgcaaaccctctgtgttttggagaacactttttcaagcttaaagcattcggtccctatcatcaacaaataaagtaatgtaatgtgatacagcattacagctttgcttcgtgctcatccgaagatatacaagtttatacgatctctcaatacgtgtacaagtagcatgcgacagtgaaacttcggggtggccgtgactagtgagttaaaaacgtttacaggattaagtaaccggatgtggtggctcttgcatcaagcattattgagctcctcccaacaatttcttagtcaacatggaactaaacatgtatatctcttctctttgagtgccgcc

SEQ ID NO: 23503 - DNA, 331 bp, Setaria italica
  Peptide Sequence Number=SeqID_89477
ctccttaaccctctccctcgcctccaccaccaccgcttcatcccctccacctcttcctctccccccgaggaggccgccgctcccatgcccgccggcgcccggcccgaaaagcgagagccggaccgcgaccgcgaggcctagcagtgccgttttttgggtacacggcgcgggaagcgatggcgaagccgaccccggtggcctcggcggaggaggcggctgcgctgcggcgccggctgaggcggctggtggcagcggtggcggccgggagtgcggacgcggaggccttcgacgaggcggccgaggcgctcgccaagctcagggacgccgagct

SEQ ID NO: 23504 - DNA, 457 bp, Setaria italica
  Peptide Sequence Number=SeqID_89478
gaaatcttcattcgatggttcagatcattctaaagggaggagcatgcttgtggctgcacttatggatatcatcacttcaaactgtgataatgcagactactcgtcgtttcagcctttgctgcctgcagatgctgatacaagagacattgcagcagtaattgaagtcattgagcaaggggggatgcattttgatgatcatgaggataacagcagcaatgatggtgacacaggattaaaaaggtataggtattaaagtgcttggtggaactactatattgggattctctagaggaaacaactccttggagttggataactcagatgatatgctggaagtctcacataacagtagaagattagtggcgcaacagactgctattgagtctccactagttgagaaattaagttcatctgtcccaggcctttgggatgacttgcagagggagcatgtggctgt

SEQ ID NO: 23505 - DNA, 462 bp, Setaria italica
  Peptide Sequence Number=SeqID_89479
ggcctaaagtcagaatcctgaactttcaatagtatgttggatgacatagacatttaaaaaaaatacacgtaaaagtcgtctgacacaatgtggtaatgcacaaatcaagctgcagtaaagagtaaactgttatttgctcggaatgagatgtggcatgctcttctatagcatggaaatcgacagatgaagtctaaacacatagctaatctaattatcccactcattgggccatcatattcttatttaacacaaggcaatactgaacagactgccaataaagaaactcatccttgaacaaagattagtaaatttcatgtgtatgacaatgctttgtataccaagtcagaacggtttctacttcctaagtgaagcatcacaaccattggcggagctacagggtatgccgggtggtcccgggcataccctggtggcctggtttgctgggctgggccccactcccta

SEQ ID NO: 23506 - DNA, 506 bp, Setaria italica
  Peptide Sequence Number=SeqID_89480
cggcgccgccgcggcgacgcaggagacgacgagcagaaccgcggcggccgccgccgcggcgggccacggcctccggtcccgccccattggccttgatcctgccgcgggcgccgccccggagttgaccgaatcaagcagctagcggctaacgctctcccctcctgctcgtgctgccgctgcggccgtgcgtgtggagctcgagcgccgggcggcagcgaagtggtgccgggatacttgtcgctggggagcgctttgtcgtcgtcctccgctgtgcctgtgctggtaggctgtcgttgtcaggccccgatggcgcggcccgtggaggggagggggagtagtagaataggaggtgaggaggcggggtagtcaaggtcgcggcgacggcgagccaatggagggggtgcagctgcggaattggaagcggaatctgctgctggtgctctcgcacgcacgcaggcacgcagggagagagcgagctggcgggggaggaagaggagaaaagaaaa

SEQ ID NO: 23507 - DNA, 629 bp, Setaria italica
  Peptide Sequence Number=SeqID_89481
gtgccggagtaccagttgggcgcgatggactccgacgagaccacgagcgccagcgcgcgtggccgcgtccggagcgcgttccgggcgaggtccagcgcgacgaggccggcgctgcaccccatcccggcgaggttgtacgccgcgacgtcctcgcgcaggccgtagcggcggacaacccgggacgccagcgacggcgccggggagagcatagagacgttgaagacgagcacgtcgacgtcgcggggcgcgacgccggtgcgggcgaagagcccggcgacggcctcgtcgaggaaggcgtccatctcgtccagcgcgtcctgcagggtgggcgagtcctcgcggccctcgaggatgctgcgcggggcgtaggtctcctcgccgatgccggagcggacgatgacgcggaggaggaagcggtagtcggcgaggcccagccgcttgttgcgctggatcaagtcgccggcctcctccgtggagatcttgcgggtgtcgcagggtttgtggcagacgtagtcaaggaggtagcaccgcgactgccggcggcgcgcggcggccgtccaggccaggtaggccagggcgtgcgccaggaggagcgccgtgagcagaggaagaagctccatcgctggccg

SEQ ID NO: 23508 - DNA, 848 bp, Setaria italica
  Peptide Sequence Number=SeqID_89482
atcggacctttctgccatcgcagggttgcatcatgagggagttgagaatgaatcttccaagcttcatgtatcagaggataacaggatgcccttcatttcggagaaggagctattactgagttcaaacgcagtaaaaaatatggagcatcattcggggacttcaggattcaccttatgcggtcaagagactgagaatgaggacactgctggaggtttctgctttgttaagatcagtcctgagttgagcttcttatcctctccagagttagttgtggagggtggcaaggatgccagcgagaaagaaccatgtcaattagacgaaaaggaggagaacgacgtatctgccaatatagaggaagctttggtaggtacccctctagtcaataccgctgaaccggactatggaactacaggtttctctttgcgccctcaagattccaatatgatggaggctcctgcagttatcaatattttttctgcaattcctgaatcaaaccaaccagcatctgtggaattacttgcagagaattatgtggactccaaggatgctcaaatatctgatgtgcacttaccggagcagaagggccaggaagattttctggatccacttgtggtcaattcttttgagtattcatttgtatcagagtttttgtctgagggagcatctaaacatcaaaataatgctgtcgcctctccatatgatggtggtgacgctgagaatgcaataagcgattcaatgtccatccaattcatcccagaagccaacataatggaagctcttcaggatgttcaagaaacattacccaatccacatcaccgcagtgcggctgcggagatgaccaaagttc

SEQ ID NO: 23509 - DNA, 266 bp, Setaria italica
  Peptide Sequence Number=SeqID_89483
gccttcctacgagttactgaagataaagttgggtgatcttactgtgatttgcccgtttgcttcatttctcaagattaaacccagatgattcactcaagaaacagtttgcaatttgacttttcattcaggatgaagcatcataattcatgaagcagaggaaaaacacgctgacgtcgtgcaggtactgcgcagaataaactaggaagcaatgccactatgcaagagaaattacaagtacactaaaaaatgcattatatattcgaagc

SEQ ID NO: 23510 - DNA, 353 bp, Setaria italica
  Peptide Sequence Number=SeqID_89484
gttatgtttgtgtgaaagatgaagagaagtttgtaacaatgcagtagatgcacaaaaggatacacaacagcttgctacttctaatcaggataacgggaacaaggaggaatgttcagattcccatagaaacaacatgagtgaatcaagtgttgccgaaaagccagcttctgttattgtgccccgtgcccctgcctcactcacagccgaaaagccagcttctgttactgtgccccctgcctcactcacaggtgatgtgactaaccctatagaaaatgatgttgaaaaatctatggagaccaggagaagatatcaaagaaggaatgcgaagattctattgttgcaaagaaggatca

SEQ ID NO: 23511 - DNA, 696 bp, Setaria italica
  Peptide Sequence Number=SeqID_89485
cgaccatcagccggcggacgcggagcagcgcgcgcagcagaggcagcagcggcagaggcagacagccgtgggcacgccggactacctggcgccggagatcctgctgggcatggcccacggtccgactgcagattggtggtcagttggtatcatcctctttgagctgcttgttgggattccgcctttcaatgccgagcaccctcagataatattcgacaacataatgaatcgagaaataccttggcctcatgtaccggaggaacgagttttgaagcgtatgatttgattgacaagttgcttatggaaaatccagtacaaagattaggcgccaccggtgctggagaggtaaaggctcatccgttcttcaaagatatcaactgggacatgcttgccaggcaaaaggttgcattcatcccttctacagatgatgagtacgacacgagctacttcgcctgccgccacgcctggggcaccgccgacgagcatgtcaatgctccctgtaatgagtatgacgacaggagcgataccagcagcatgagctgctgcagcagcccacacagctgtgactacgaggaagatggtgatgaatgtggcagtatggaagaatttggcgcgccattgtcggtgaagtattctttcagcaatttctcattcaagaacatctcacagtttagtcgttctaattgtaacttacta

SEQ ID NO: 23512 - DNA, 799 bp, Setaria italica
  Peptide Sequence Number=SeqID_89486
agctagttgaggcaactgatcctggccagctaagaaaggggaaagcaaaggaaagtgctgcatatacgccatggcttcgtacaccctccctcttccctggcttacctgcctctgcgtcgtggttgtcgtcttgttgctgtcgccggcagcgctccttgccgccgctgccgacgacccgacggcgggattcaaggctgtgagcctgagcgagagcaacttcgtgctacagcagccgtacgacgtgccgagagacgcgcggtacaggttcgtcggcggcgtgcggcagctgtgggtgctgtcctccgacaagccccacacccctcagagcaacaccaaaccaagaaccgagatcaggatgaagggttacaactactcttccggagtctggcagttcgagggctacggctacgttccctccggcacgacgggggtgtccatcatgcaggtgttcggcggcggcgagtccgccaccacgctgatgctccacgtctacgacggcgcgctccggtactacagccagcaggtggtcgagaacaccatctacaaccggtggttccgcctcaacgtggtccacgacgtggacgcgtcgagcctctccgtcttcatcgacggcgtgaagaagctgcaggtacccggccgcggcggcgactcgcactacttcaagttcggcgtctacatgcagcacgacgcgtccagcttcatggaatcgcgctggaagaacatccggatcctcaagaaatgaagactgatctcgattgatgataccttctctccgtgccatcattgatggcatgcagct

SEQ ID NO: 23513 - DNA, 210 bp, Setaria italica
  Peptide Sequence Number=SeqID_89487
ggtgaaggagagattcgcggtggggaccgcgcggtacggcgcgatgcgcggcgaggagtcgaggtgggccgggaggaacttggcggcggcgaacgccgtggaggccatggtgcgatctggtgggcgaggagaggggatcgcgcgcgtgcgagacggcggcggtgcgggaggtggctagggtgggacgaggcctcagatgggggagggttt

SEQ ID NO: 23514 - DNA, 459 bp, Setaria italica
  Peptide Sequence Number=SeqID_89488
cctatgacaaccttgaggcttgatgccatgacctcggtgaccgaaagcccgacgaacgcccagccatactgtgtcgctaatgtcccgaggctaagcgtgacaccgcccgccattgcaaacaagactgaaggccagttattctgagagagctgggtgaggaagttgggcgtctccggcgtgtcggggccgatctgtccgaaggtgagggcgatgagcacagcggcgaggaagttggtgatggagaagtccaggaaggtgtgctgcggcaaccggccccggcgctccagcacggccaggacaaccggccaggtgcccaggagcaccagcgccaccgccatcaggccgatggcaccgctaatgtccttcaccaagtacatctcggcgttgtctgtgctggcgaacagggaccagggacaaaccggaaggaagaaatgattggaagcctttggagctttggtt

SEQ ID NO: 23515 - DNA, 1435 bp, Setaria italica
  Peptide Sequence Number=SeqID_89489
agaagatcctgtgatagtccaaatacatggactgtagctgatgattgggttctgaagaccgctgcccatcttctgaatcggatgctaaagacagtgcaaaagtggatgatctagaaaatgtagtggcatggtaggcaaggaccacaaagaaatcttggcctctaagttacgttctaatgtttcgaccatgccacctgcaaggaaaagagtgcagaacctagaaatattttcccttcaaacaaggatatcttgctgtagcaattcttcgcgtcggagcacatgggattcatatgactgtagatggcaaacatatcacttcctttgcgtttcgagaggatttggaaccagggtttgttggtgaagtaagaattgcaggagacattaaattactctctgtgatagcaagtggtctgcctacaaccgaggactttgagcatgtcatggacctggaaacattgaaggctccacctgtgcccatagataaatcagttgatcttttcatagggatcttctctacagcaaacaatttcaaacgccggatggcagttcgtagaacttggatgcaatatgatgctgtccgctcagcaaaagttgcagtccgattctttgttggcctgcacaaaaatgaggtggtgaatgaagaactctggaatgaagcacggacatatggagacatccagttgatgccatttgtggattactatagcctgattctctggaaaaccatagcgatctgcatctatgggacaaatgttctgtcagccaagtatgtgatgaaaacagatgacgatgcttttgttcgagtggatgaaatactttcttctctagaccgagtaaatatcagccatggacttctgtatggtcgtgtcaattctgattctcagcctcatcgagatccatatagcaaatggtacataacccctgaggaatggcctgaggagagttatcctccatgggcacatggcccaggatacattgtttcaaaggatatagcaaaggaagtttacagaaagcacaaggaggggggagttaaagatgttcaagctggaggatgtcgcaatggggatatggataaatgagatgaagaaggatggcttggatgtcaagtacgagaatgatgggaggatcttggtcgaaggctgtgaggacgggtatgtgattgcccactaccaagaaccaagggatatgatgtgcctctgggacaaatttcagaaaactaaacgaggaacatgctgcaaagagtaacagaactaaggaagagcagtccatcatattacggtggttgctgttggccgttgcctgaactgacaccttcgtgctaggacaatcttgacacagccccatgtaagaggactagcagaactggaaggcagcaaagttttggataccttttagtttcgttttgtccacagttggaagagtttcaagtctaact

SEQ ID NO: 23516 - DNA, 848 bp, Setaria italica
  Peptide Sequence Number=SeqID_89490
ccgtgagtaccagttcgttctgtacattataagcctgtattaaatatggaagttacaagttacaacgtagccttgttagtaccataccagaacaaaatctactgtctaaaggaaaattacaaattggcccttgcaggggttgcatgatctggaaacatggaggttacaaagaaagaaggtgtatttcagaactaaatcagaactaatcaatattctgatcaatggaacttgtccctgtagctttttgcccggaatgaaaaaacagcgcaagtgtatatcgtggtcatagcaatgatgagtacaccaacatatgtgcacactgttgcagcgcagacatagaggtactttggtgaaaatacgctccaaacaaacaagtgattcctcatgagtagcaaaacaatggtgtatgaagtcaaagcaacagagtttatgagcaaaggaagcaaacatggcaatgtgaccattttgtccagaatatagctccatgtcaactgccgtgcagtagagatatcatcagtattgttcactgatatataaacaaccatcccaaggtataacatcaaaggtgatccatatgtaatagtgaacatcagtataccagaaagaactgtggagtaacttgaaatgccaatgaaagctccagcaacatcaatgctggcaaggctatttgtattcccaagaccaaaatgaccagccattcccaagaaaagcattgcaataacctgtacccattgcttatgcaatgttttatccaaagaaaaatgagctacactcgagactgtttgtaagaaaatgaagcaaaagaggaattgcattgatgggttgttgcagaagcaactgcagaagac

SEQ ID NO: 23517 - DNA, 430 bp, Setaria italica
  Peptide Sequence Number=SeqID_89491
gcttatggagtgattgagactgagtcaaaggaaagctggacatggttcatccagaatttgaaggttgctattggtacacctattggtttggttattagcacagatgcaggcaaaggaattgagggggctgtggatgatgtctatccaggagtggagcatagagaatgtatgaggcatttgtggaagaatttcaagaagttatactatggaccattgttcaattataatatgtggccagcagccaagagttacaccattgagaagttcaattggcacatggctaggatacaggagaagtgccctgaagccattgcatacttggatgagaatcatccctacttatggagtagaagctaatttctgatcattgcaaggtagattacatcaataacaacctctctgaatgttcaacaactgggtgaaagaagtg

SEQ ID NO: 23518 - DNA, 557 bp, Setaria italica
  Peptide Sequence Number=SeqID_89492
aacaaatgagaagcccactagaaaggcaagaagcgcaagactgcaagtggacatgatgatggcaagctggttggagttcatgaggagggcaactactctggcactgaatcacttgctgccctaagtgacagtagctatgacactgacttggctgcatcttctgactctgattgctctgatcctgaatatgaacgtgatgtcgaaatatttgatgaggatgacgaagatgatagttctgtcttttcttatgatgttgatgatccatgttttgacattggtgtggtattccctgatgtgaaacagtgcaaatcagcattaacccagcatgcaatattgaatggttatgctttccgtactgtgaagaaagacaagaaacgctttcaggtcaagtgtttgagagcagaggagggctgcaagtggacatttttgcatctaccagcagcaagaagtaccttggatgcaaggttaagaagaatggaccaattcacaagtgtagttcagtcaacaattgtggtgatacaatggccacaattaactgggtagctgaaagggttgtt

SEQ ID NO: 23519 - DNA, 668 bp, Setaria italica
  Peptide Sequence Number=SeqID_89493
ttttttttttttttttaaggataatatttcacaatgcaatgcccagatcatatttgagcataccaaaatagtggtcactgcatgcccgtatcggcatatacaatagcacatacatgtccacgtcacatttgctcaccaaaataatggcagtacatgcccagatcacatatccaggtctccatgtcatatgcacatacacagtgtaggccatacaaagcatgccaggtactattattacatgagacgaaataacttgtcatttctaagcattgaagtatgcagcaagccttgaaacacctcgtcctctccccctgccagatggtggtatttctcctccaacttgacttgtaccagcacttcaaaacaatggagtaaaaagtcaagttgatctggctagttgaacatctttcaatgatgagctcctctgcaaattgtggagatgcttgacactataagacggatgatctttcaagcatctccacaatttgcagatctttcacttctttcacccagttgttgaaacattcagagaggttgttattgatgtaatctaccttgcaatgatcagaaaattagcttctactccataagtagggatgattctcatccaagtatgcaatggcttcagggcactttcttccttgttattccttagtccttatttgtta

SEQ ID NO: 23520 - DNA, 1155 bp, Setaria italica
  Peptide Sequence Number=SeqID_89494
agacgaacgggaaagacaaaagtagtaggaccaataggaatcgaccctgatgtgaaacagtgcaaatcagcattaacccagcatgcaatattgaatggttatgctttccgtactgtgaagaaagacaagaaacgctttcaggtcaagtgtttgagagcagaggagggctgcaagtggacattttttgcatctaccagcagcaagaagtaccttggatgcaaggttaagaagaatggaccaattcacaagtgtagttcagtcaacaattgtggtgatacaatggccacaattaactgggtagctgaaagggttgttgattggttgaaggacaagtcaacaaagggaccaaaggagttgcaagctgcattgaggaagaagtattctatggaaattccatatgacaaggtttccaggggcaaagagaaggctcttgacatgatatttggaaagtgggatgacagttatgacttgctgcccacatatagagctgaactactcaaaatcagtgctaggaagcattgttgagtttgacacagaaaagcatcaaggggacgtgtgtttcaggagattttttttagctcttaagccatgcattgatggttttttggaaggatgcaggccatacattgcaatagatgccacccacctaacagggaggtcaagaggccagttggtggctgctgttgcaatagacgggcacaattggttatttcctgttgcttatggagtgattgagactgagtcaaaggaaagctggacatggttcatccagaatttgaaggttgctattggtacacctattggtttggttattagcacagatgcaggcaaaggaattgagggggctgtggatgatgtctatccaggagtggagcatagagaatgtatgaggcatttgtggaagaatttcaagaagttatactatggaccattgttcaattataatatgtggccagcagccaagagttacaccattgagaagttcaattggcacatggctaggatacaggagaagtgccctgaagccattgcatacttggatgagaatcatccctacttatggagtagaagctaattttctgatcattgcaagggctatttcaagttcaagtttggtaggtagtaaattacctacctattcttggtctaggggta

SEQ ID NO: 23521 - DNA, 913 bp, Setaria italica
  Peptide Sequence Number=SeqID_89495
agtgctcaatttttgccacccttactccagaaagaaaagaacactcaatggactcgtgtcaatgttgcagaagctagtgactgaagatgagggaaaggatttaacttctctgatgcctctatacagcccaggaaacatagaagaatgcatgcagaaaatacagcctgttaagtatggagaggaggtttgcttcaatggcatatttatgctgaaagcctctagttcaggcctggaacttggcaattctgtctggacaataaaaggtccaagagctagtattacctacctgcccagttcagtatttgtgtcggctcatgcattagattttgattacagctctctgaaggaaaatgatgtgattttgttttcggatctctcatccttgaacgacatggacgaggataacgagaaactggatgagcatgcaatgaatgaaacagactcttcgctatgtcaccgctcagtgttgagggatgatggtgctgatgcggatgaaacaatcacatttctgtgcaacaatgatgatatcacggaggagattgagagaatcagctttatatgctcatgtatcatcgatgcaataaaatctggaggctctgttctaataccaataggtcgccttggtgctattctcttacttctggagcttatatcagaaacgctacattcttccagtatcaaggtacccatatttatgatttctgaaacagcagaagaaattattgcttttaccaatgccttgcctgaatggctatgcaagtcacgccaagagaagctattctctggtgaggcattatttggccacatggagcttttgaaggagggcaaattatttctgttcccacatttacactcaaagggcctgctgtaagaatttaataaaatgtgatttgtagctagtcttcctataaat

SEQ ID NO: 23522 - DNA, 1145 bp, Setaria italica
  Peptide Sequence Number=SeqID_89496
tgacattcatctccatctctccatctccgacgttcaaattgtcgtccgtgctggcagacattttgctgcgatatatctctggcctccatcgtttctgcgtttacagaatttgacaaatttaacaaggatctgcttaagcttccattgcactcacatggactatgttctcaaacctgacacacgaatcgttgcaagtaccatgtatacagccgttcaatggtagcaaagcaacgctaggaaaagctgtataacatctggctctgatgcatccttattcatgcacgattcgaaccatgcagcgtagtggtccatttgctcatccgtagcagcggatgggatcgttgcagcccttggctgcagactgcctgaacccgaagcggcctcccttctcgaggtactgctggtggtactcttctgccctgtagaacctcttggcggggaggatctcggtaacaatcgtccgattcagaagcttctgctgcttctccagggattctctcgccgccttctcctgctccggggtgtagtagtagatccctgacctatactgggttccaacgtcattgccctggcgattgggcgtcgtggggtcgtggcgcgcccagaagacgtcgaggaggtcgtcgaacttgcaggcggtggtgtcgtactgcacgcggacgacctcgttgtggttggtggcgccggtgcagacgtcctcgtaggtcggctcgtggaggttcccctggctgtatcccacctccgtgcgcgtgacccccgggacgcgctggaacgcgagctccacgccccagaagcagccggcgccgaactgcgcgaactcgttgccgggcgcgggctggtcctcgtcggggccctgcgccagcgccgccgacgcctccgacgcgcgcgggctgccgcccagcccgctcaggcccagcttacccagccagctcatcgccgggcccgggcgggtcttcctgcgcggcgcgaggaagtggactgaggaagcgccggcgccggcgcggcggtggtggtggaagaggaggggggcggggccgtggagggcgccgaggcgggaggcgaggaggagaggggaggcggcgggtgaggtggggagcggaggcagtcggggcgacggtctttgtcctttccctttcccccttttt

SEQ ID NO: 23523 - DNA, 557 bp, Setaria italica
  Peptide Sequence Number=SeqID_89497
cgttctcccgttcgttccatcccccttctctcccctcttcctggcggcgacgactgggcgagcggcgccagcctacgccacgccggcgacgagtatccaccagttgctcttatggagaaggaagatacaaagaagaaagaggctgatgactccactcctcagcatcgccgcaaagctggacttaaatttgcacccaaagttcttcctaagaaagacccaaagatcatccctaaaacggaaccacaagaggagaacaaggccctgacaattgataagaaaatgatgtctggacttgggagcttgcagagcagttatggcccaggaagtggaactaaggctgagaaacaaggtgattattatttcaatcatctgttccttataataatcttcttaacctagaacccctgtccaggttgcatttggacgagcagacccttcaattgcaagaacttttcccactcgaagaagcttttcatcagacgtatctgctgtaaaattaccaaggagcacatgaaccatgggactacaactgcaccgattatcctgttactctacca

SEQ ID NO: 23524 - DNA, 1037 bp, Setaria italica
  Peptide Sequence Number=SeqID_89498
actcctcccacccattcctctctcctcgtcgtcggggaggaggcgtgcctactcctccgttctcccgttcgttcatccccttctctccctcttcctggcggcgacgactgggcgagcggcgccagcctacgccacgccggcgacgagtatccaccagttgctcttatggagaaggaagatacaaagaagaaagaggctgatgactccactcctcagcatcgccgcaaagctggacttaaatttgcacccaaagttcttcctaagaaagacccaaagatcatcccctaaaaacggaaccacaagaggagaacaaggccctgacaattgataagaaaatgatgtctggacttgggagcttgcagagcagttatggcccaggaagtggaactaaggctgagaaacaaggaacccctgtccaggttgcatttggacgagcagacccttcaattgcaagaacttttcccactcgaagaagcttttcatcagacgtatctgctgtaaaattacccaaggagcacgatgaaccatgggactacaactgcaccgattatcctgttactctaccactgagaaggcccaactctggaaatgcagaaattcttgatgaagaggaattcggacattcatccggcagagcccaagttagtgaactgagtgcagctgaagaacttggtctgatgcaaagggtagatacgccgcagttgctcttcttccagtttcctacaactcttcctttaccaaggcaggctgacccagatgctggcacaaatatgaatatgaatgcaaaatccatgggggacaacaggaagaggcgtctcgactcaatccatggctgtggtctgaaagagctcccagatggcttcatggggaagatgctcgtgtacaagagtggtaaagtgaagatgacgctcggtgatgtgctttttgatgtttcagctggctcgaattgcatgtttcctcaggaagttgtagcaattaacaccagggagaagcactgctgcggcataggggagatcggaaagcgtgcaattgtaaca

SEQ ID NO: 23525 - DNA, 542 bp, Setaria italica
  Peptide Sequence Number=SeqID_89499
taatttaaaagactactttaggaatttaccgacccttacgtctcgtacagcgggctagagagcctcttgaaggaccaattcctcatctggatgcgaggttatgcatgttgttagctcttataccactatcagttgatgcaattcttaaagaggaaagtgatatatttggagctgaaggaagcaaaattctttcacgaagacaagggttgatatcttctctccaggatctgatccagtattcaggacttcttgtaccaccttcttcagtggtgaatgcagctaatgctgcagcctcgaaagcagcaatatttaaggctaattatacggctggggttgtcaactctagcatggtggcccagaccgactcttcgacgaaagtttcgatgaaagctgttgggaacatgctccatcttattattgaagcctgtatctcgagaaaattgatcgatacatctgcttacctatggcctggttatgttgtatcatctgcgcctttgaaagatacaactttaccccaggaatccccttggttaaactttatt

SEQ ID NO: 23526 - DNA, 271 bp, Setaria italica
  Peptide Sequence Number=SeqID_89500
cggtctacaacaagctggaagagaagcaggaaagcaaagtgctcaagttcctgggcttcatgtggaaccccctttcctgggtcatggaggcagcagccataatggctatcgcccttgctcatggaggaacggatgataggggcaagaaaatgagcatagactaccatgactttattggaattatgctgctgctcattatcaattccaccatcagcttcatagaggaaaacaacgctggcaatgctgctgctgcacttatggccccgcctcg

SEQ ID NO: 23527 - DNA, 418 bp, Setaria italica
  Peptide Sequence Number=SeqID_89501
caccaaaaggggcctgtcgactagctaagatcagaaacatgttttggcaggtttagataatcgctaatcgcaggacatgacagctttgggaaccagagtatcaagctctgtatatagttactccagcagaaatgagaatgaagcggaaagggtgttgtttgacaatttcattttgctcattgctgttgttgaagacaaaacaacagaaatcatgtgatgtaaccgctttcatttcgtagggaaataaagtgggtgccgcatcagcagtgcaatgatggtttacaacaagcaccaatctgggagagcaagagttctggttttattaccgatgatatgttgctactgtgtaatgatttcgttgactgttgccataaacaagaattcaaccagaagaatccccagtgcttgaatcttgttc

SEQ ID NO: 23528 - DNA, 173 bp, Setaria italica
  Peptide Sequence Number=SeqID_89502
atcaggtaaggggtccttctctctgtctctcttgcttgcactctctctctctctctcacaagaatttcaggaggaagtaaacagaacgggattaagaaggaaaaaatcgcaccagttttgtatgctccaactcgatcgatctatggaccgactggacgacagccatgacacgt

SEQ ID NO: 23529 - DNA, 276 bp, Setaria italica
  Peptide Sequence Number=SeqID_89503
gttcgccgtggccgggcacagcctcggcggcgcgctcgccgtgctgttcccggccgtcctggcgctgcaccgggaggagggcgtgctggcccggctggagggggtgtacacgttcgggcagcctcgcgtcggggacgagagtctcgggaggttcatggccaggtacctggaccagcccagcaggtacttcaggttcgtgtactgcaacgacatcgtgccgagggtgccgtacgacgactccgcgcttcagttcaggcacttcgggacctgcctcta

SEQ ID NO: 23530 - DNA, 777 bp, Setaria italica
  Peptide Sequence Number=SeqID_89504
ccttcccggacgccggcgccgccgcgcgcgacacgtcgtactccttgccgaacacgaaccgcatgatgtagtagagcgacgctcgccggaggaggccgcgcacctggacggcgccggcgccggcgccgcgcagcgccgtgacgaccccctccccgacgctcgcgcggtacggcgcgaaggcctcgacctgcctcgggccgaacaggtggccggcggcgatgcgccggagcgcacgccagtagggtccgtgctcggcgaagccgatggagcggtggaacatgaggccgtaggcggcgtggttgagcgggcggtcggcgaacgccgggttgtcgaggatctccttggccacgtccgggtgggacgtgacgacggcgcggacggggccgagcgacagcgccatgagcctcttggcccccggctggcgcgacgcctcgtcggccagcgagcggtgcgccagcccggacatgaggccgaggctgccgacgacggggagccctctcggccccgggagtgtcatcggcttcgggcccttgccccttgccctccagtacttgccccatgcagggccacctgggtgagcccagtagagcagggacgcgcctgcccatgcaaggcatgcgaagatggccatgtaggtgaagctagtggctatggtggcaatgttctcgtgttgatcgccggagatggccgggattaaggtcatgggaagcacccaccagctctcaactgagctcgtctccattgtgactctcagctgctgcgttgcgttgtattgtg

SEQ ID NO: 23531 - DNA, 287 bp, Setaria italica
  Peptide Sequence Number=SeqID_89505
attccattccatcccgggcgttgacaaactagcagtttccacgacgccacaactacccggcgttgcgtctgttcttggctgcaggcctgcagcagccaggcccgcgcgatggccatggcgaccgcgctacggtcctcgccgctcgtcccgcagcatcgaccacgcttccctgtctcggcggtggcgccatggctcgtcatgctcctggccctggcagccttgtcctgctcatcgccggtggcggtggcggcgggctctccggaggtcgtcgagctgaccctcctcgc

SEQ ID NO: 23532 - DNA, 489 bp, Setaria italica
  Peptide Sequence Number=SeqID_89506
gccggctcttaatatcatacagtacccttagtaatctgatgatttcaactcttcccttttctttggtacaaagttgtggtttgttttcttccatgaaagaagaatcaactaatttcaaaatacttggagctggctgtagcatcccccctgaagggttacaagcagatggatattcagaaacttcattgcatgttattgttgacataaaattggagtgacccagtataagttcaataatttcatcagcagagaactttgcttgtgagagcacaacaagaatagatcgaattgcttttattgcgacaggatcattgaatctatgcagtagggatgatctgatgaattgactaaggaatggtattgacttcagctggtttagatgactttgaatctctgaagatagttcgataatattcttgagaattacatattccagaaaatggatgaccttttgttccttagcagagtgtgctaagatattgtcacttg

SEQ ID NO: 23533 - DNA, 511 bp, Setaria italica
  misc_feature (464)..(464): n is a, c, g, or t
  misc_feature (508)..(508): n is a, c, g, or t
  Peptide Sequence Number=SeqID_89507
ttagaagcaatttacattcaaaaatccagaagaaagcaaaactgggagagaggggtgacatcttaaagaactgcaaagtagctgtgcagagtcggcttgggcagggtaaaaacaatggttttgtttatggtcctttccaccctgctggtgcaaggaaacatgaacttgatggtggcaataaacctgggcaaagggagagagctgaggactgggagagcctttctgtttcatttcgaccacagtaccagaaccaagcgcttggtgatctttttgctcattatgtcgaagcgtggaagacttggtattctgaatttgctcagggaagcaacagcatgcaacaacacttaggccagtctgttgttaaccagtttttgtaggcaagttataggctcaagaagcagtgctgttcttagtgcttgctttagaatttgacctgtacaatctgttaaaaggtggagaaaacngagacatgacttggtagcttggcctagggttcattgtatttacncaa

SEQ ID NO: 23534 - DNA, 484 bp, Setaria italica
  Peptide Sequence Number=SeqID_89508
ttttcatgtgctgtctgggatgtggaagacccctgctgagaggtgtttcatgtggttaggtggcttccgatcatctgagcttcttaagttactggcaggccagctagagcctcttactgaccagcagcttgttggtatatccaacctgcaacagtcctcccaacaagctgaagatgctctttctcaagggatggaagcattacaacagtcgcttgcagaaactctagcatctggatccctgggccctgctggatcttctggcaatgttgcgagttacatgggacagatggcgatggctatgggaaaacttggcacccttgaaaacttcctacgacaggctgataatctgcggctacaaacacttcagcaaatgcaacgcatcttaaccactcgtcaatctgcccgggctctacttgcaataagcgactacttctctcggctgcgtgctcttagttctctttggcttgcccgtcacgggataatt

SEQ ID NO: 23535 - DNA, 1242 bp, Setaria italica
  Peptide Sequence Number=SeqID_89509
acaaaccaaatctggtggctttaccaactggtaacattgagaaactgggagagtcagctatggctgatagtcctatgactgacacatcaacagatccagatactgatgagaggaatcagatgtttgaacaaggactggttgctggccccacagcttctgattctagtgacaaatcaagggacaaactagatcagaagacacttcgccgtcttgcccaaaatcgtgaagctgccaggaaaagccgtttaagaaagaaggcctacatccaaaaccttgagagtagcagactgaaacttactcagttagagcaagagcttcagcgggctcgccaacagggtatttttatttcgacatcaggagatcaacctcaatcaacaagcggaaatggagctttggcatttgacatggagtatgcacgctggttggaggagcacaacaaacatgtaaatgagttgagggctgcagtcaatgcacatgccggtgataatgatcttcggggtattgttgatagcatcatggcacactacgatgaaattttcaggctcaagggtgtggcagccaaagcagatgtttttcatgtgctgtctgggatgtggaagacccctgctgagaggtgtttcatgtggttaggtggcttccgatcatctgagcttcttaagtcccagcctcccaacaagctgaagatgctctttctcaagggatggaagcattacaacagtcgcttgcagaaactctagcatctggatccctgggccctgctggatcttctggcaatgttgcgagttacatgggacagatggcgatggctatgggaaaacttggcacccttgaaaacttcctacgacaggctgataatctgcggctacaaacacttcagcaaatgcaacgcatcttaaccactcgtcaatctgcccgggctctacttgcaataagcgactacttctctcggctgcgtgctcttagttctctttggcttgcccgtccacgggaataaattcaattaattgataataggataattttaggtactgtctctagtatgtccattagtttcttcacattgctcatgtgttggtgagatatttggagcagaattttcttatgtacgtgttcaagtgaatgctcagttcatattgtaggtcattatgagttattggacaagtttgtaacaattttgaaaaaaccaggagttgtaaatacatgcggaataatctaagatcttatcagggatcaaattggtgg

SEQ ID NO: 23536 - DNA, 852 bp, Setaria italica
  misc_feature (46)..(46): n is a, c, g, or t
  Peptide Sequence Number=SeqID_89510
actaaaaggagcgccaggaaacgtaattgaaggcacaatggatggnggaatgctacctggtgacaaaaaatagttatcataaacacatgttattactggtaaaaacagaatacattttgatgataaatgggtaacctagatctagctaaaacacccgagctaagtttctgttagcaacataggctctgtttaggtcaagcttcttgggacttcaaaagcaaacctaagatggcttctagtaagattgtttctgaagataaactctcctccaaaagggctcgggcttatctaagccctgttttacagggaatccaaatgcccttccactggcttaagcttatatacaacctctcgtatgtttataagtttaggcttacaggagaagtccaactgcccaacaagatccagcatgttggacaaggttaagcttcaagcccctagactaaaacttaagcatggacagtatcctgaaagagtcgaggatacatctccttctgttcacgaataattgacaacgttaatgttgacttcaaactgctcaaactcttaccaataatagttttctgattatttatgtaaatagttacaaaattataacatattattgcagtatgcttcacaaaaaatctggccattttcatgttaccagatgagacgttcccaatattattattgatcaaagtcaacagtgcaaattatttatgaacaaagggagcgatctatatgctactagtctataagctattgttaactgaactagtccaaatatgcagcctgacactatctaaaggaatatcagatcaaagagcccttctactagtagttgcaacaattgaaacagtccaaagttaa

SEQ ID NO: 23537 - DNA, 448 bp, Setaria italica
  Peptide Sequence Number=SeqID_89511
taacaacaataatctgcaagtagatggatcaaaaggcaaatttatctgggaatctcagcagatgctatgaactcttgctccaaactgtagcatgttcggctatggaccgaaggagtaccaccaccattagctcttgaatatatgaacggctgtatctcttgattgtttcctcgagcaacttggcataatgaattcaacctttccattcgcaagttgtgcaatgttatctccacttgcttcatggtcggtctctcttcccctcgaagtttcaagcacatctcagcgagggatgcaacacttttaatctcttgttcagttgcttcttcgcggatatgagcatctactatttctgtgattggccttgacttcaattctgacagaaagtaattgaacaagttctgctttgacccaaactcatccgtaaaatgggctcctttcttaggagcta

SEQ ID NO: 23538 - DNA, 369 bp, Setaria italica
  misc_feature (320)..(320): n is a, c, g, or t
  Peptide Sequence Number=SeqID_89512
aaaatacatcattttcctctccaccgccgccgccaccaccacctccacctccacctcctctagttaataacactgatgtctcattatctcaaccgcggttattagatataaaggacagtgcaacgtcaaagtatctaggcacgccatctttgacacctcctcgaacaccgccagttccacccccaccccctccatctcgaacaccgcctgttccacctccacctcctcctctgtctggagcaccgcatgtcccacctccaccaccacctccttctcaaacaccgcctgctccacctccaccacctcctccatctcgaacnccgtctgttccacctccacctcctcctccgtctcgagcaccgcatcgtt

SEQ ID NO: 23539 - DNA, 315 bp, Setaria italica
  Peptide Sequence Number=SeqID_89513
tctgactcaatacagacattgtgaaacctttttttaaaaaaaaactttactgacacagcgacgccaccatgcgtgtactaaaactgttttgaaggaaaagttaaatgtgtagtgtatacgcttatttcgccttagattggcggctgttgtgttgtgacattgtaaccacattaaattaggatggcgatcttgacttggcagcagctgggtaactattagtgtattcttttggcagttgtatgattggattcttctttttcaacaaggttgtcggataggattgatatgggaggggtctagtgaaggaaaaagtga

SEQ ID NO: 23540 - DNA, 446 bp, Setaria italica
  Peptide Sequence Number=SeqID_89514
ataccatttcaccaaacagttcaatcaaagccttagctacctttgttggactaatatttgctctcctcaggaagtccaagtcattaaccttgtgtccataacaaaattccatcgtcaaaacctctctggttgtcaattgccagaacacataaggcactttaacaacactatttttcctgaagcagttggctgttctctcggaattcttagcctctagggtaaatcaagctccattgacatggatttctcaaattcaactagtattctgtcaaatttataatcaggaaaaatccaagagactgattttgacaagaaagacattgtcatagatgtctaatcttcattcgctgctccaatccaggatactggaccttgacagctacatcttgattgtcatgcaatcgacctcgatgaacctgagcaattgatgcagcagcaatcggatg

SEQ ID NO: 23541 - DNA, 320 bp, Setaria italica
  Peptide Sequence Number=SeqID_89515
aaccaccaagcgccgaaccttccccgatcattcttcttccgtctcccctccccccttttcgcatcgcccggcctgatcctgaataatcctgatcgaccttcaccttctatccatggcgctcaacttcctccggccaggcgcgcccggcgtccagccggtcggcgaccgctgcacggcgaagtcggccatcttcatcggcgtcgtcaacggcctcgtctcgccgccctacctgcagcgctgcctctgcgccggccggtgcgacgacgacagcgacgtggaggagaggtactacctgctcgcgaacttcgtggtcgtcgtgc

SEQ ID NO: 23542 - DNA, 387 bp, Setaria italica
  Peptide Sequence Number=SeqID_89516
ttttgtgatattctcttgctctacacatatcttcctctctatagcaaagcttaagcttcatccatccacagcaatggtttcaggtgcagcaggttttagggcagcggcggccattgccgttctcgctgtgctggtcatgtcttcccaagggcatccgagtaagaagccattgtgcagcgactgtccgtcgctttgcaacaccaactgcagtgccgtcgttgccgcagcgtgcgccgtcgactgcagccccccggtgggccaatgcgagggctgcaagtcccaggtcctccgggggtgctgccagagcttctgcagcagtagcaacgacaccagcaccgtttcctcctgctgccctagcgactgcatcagcggcgactgcgggacctg

SEQ ID NO: 23543 - DNA, 334 bp, Setaria italica
  misc_feature (329)..(329): n is a, c, g, or t
  Peptide Sequence Number=SeqID_89517
cagccatgttcttcgatgttttggcggcggcagccggggaagcccctgggcaagggaagaaagctgaggctgcaagggacccggccatggttcaaccgtgcttcggaattcaaagaagctgagattgtacacccaaagtgccaacctcgaagcacaggagaacgagccccgaatcaagaaggcccgccccgccgctccccctccctctcctcctcccggcgctcgagcggattagatacgggcggattggacttgtggcctccgctcctcgggctcgccacctcacacgagagagagagagagagaaagatacgtagttttttttcccncctct

SEQ ID NO: 23544 - DNA, 230 bp, Setaria italica
  Peptide Sequence Number=SeqID_89518
gtcgtcgtcgtcttccgccgccgccggcgccgccgccgcgggggtaggattagggtttggaggcggtcggggtagggtttccacgggagcagggttggatggcgcggaggtggaggcgggggtctgggtagggatgaggatgtcggtatagaggtcgccgaactcgtcttcgtcctccatcgcggcgcggcggcgggatccggggaggcggggtggaaggcggcggcggg

SEQ ID NO: 23545 - DNA, 468 bp, Setaria italica
  Peptide Sequence Number=SeqID_89519
cttccagaagtgaatataatctggctggatgcatctatgcccatgactcgagctccttcaaccaaaaattcgttctggagaacaaaactgcacagatttctacgatcaatgtcctctgtaactgaggcaattggcgctacatctggcattccatttgatgtctgctctgtcattttctgtctcttcgagcttgattcatatatcacattttgttgcaacataatctgcctcttatgctcttttatctcctcaagtaattttgcttgttgcttctcaagagagtcatttttctctctcaacaacaatacttgcttttcaagatcattattgggaacagcaatctctggtacatagaggttgataatgttgttttgtttgtatctcttgccacattgaggacactgtgcttttttcttgccgcactgttgtagccacctctctaggcaatatctgccatagacatgccca

SEQ ID NO: 23546 - DNA, 282 bp, Setaria italica
  Peptide Sequence Number=SeqID_89520
acaaagtgggcagataaaattaaaatttcagaaggggggacgacggtagaagccgaacagcccatctcatgctagggaacaactaggtgtgcgatagtggttagcagtgctttgtctgactctgtagctggcaggcaacggttattataatagtagattaagataattgtaaatcaatgctttagctcataaagtgattcacctgcctaagtatatatacaatactatgtctaattcagcgtgtctctctcacaggaaaaatgatgaagccccattggaaag

SEQ ID NO: 23547 - DNA, 1051 bp, Setaria italica
  Peptide Sequence Number=SeqID_89521
ccgcgacgccgcgtcagatagaaacaaggaacgaatcgccacgacgcccaccagcacacccagagatcaaacagaacccaccgccgcgtcgaccccggcgatcaccggagaagcagcagcggaagggcgcaggggttctccggcaacatggaggaagtggacgtgtcgcggcagctcaagcagatgacggacttcatccgccaggaggccgtcgagaaggccgtcgagatcgaggccgcagccgccgaggaattccaaattgaaaaattgcaactggtggaagctgaaaaaaagaagatcaggcaggaatttgatcgcaaagagaagcaagtcggcatcaagaataaaattgattactcaatgcagctcaatgcttcccgaattaaagttcttcaagctcaggatgacctggtaacaaatatgatggagtcagcaaggaaagagctactgtacataagccgtgatcatcaaacttacaagaaacttctgaagatacttattgttcagagtttgctgcgtctgaaagaaccagctgtgcttctccgctgcaggaaggaggatcttgaccttgttgattcagttttggagtcggcaagtaatgagtatgcagaaaaagcaaatgtatatcctcctgagatagtggtagatcgtcgtgtctttctgccatctgctcccagtcattatcaggcacctggtccctcgtgttctggcggagttgtgctagcttcccgagatggaaagatcgtctgtgaaaacacactggatgctagactgcaagcggtttttagaaagaagctgcctgagatccgtcaaagccttttcaggcaggttgccgcataaccaattcttgaaagcagaacgcggcacagtactctctggggtaccctgatgatgtccaggagcattgctttggcagctcaatagtgatttatcacactgttttggatctcaattgttattattattgtttttttgttatggaggtgttgccatcatatttcgaaccttgaaatcctgtaccgaagcaaataagagcaaaataaactgtgtt

SEQ ID NO: 23548 - DNA, 1283 bp, Setaria italica
  Peptide Sequence Number=SeqID_89522
ctaaacccctccgttccgctcccagctcaggataacactagcagcagcagaagcccgccgccgcgggccaaggaatggaagccgcggcagcagccatggcggcgctcccagcgcctccctgcacttcctcctctcctccgtccgtattcctcacccccagctcatccgctgaccggaggaaggcgccaagggcggtggccgtccgtgcatctgcggctacagcggccgcggcccgacggtcgctctctgctgggtgggatccgtccgggcgttcagcagccaggccggcggccagaaaggcgcgactcgaggagctcgacacaaccaacatgctcctccgccagcgcatcgtcttcctcggctccccggtggatgatacaagtgctgatcttattatcagccagctcctactgttggatgcagaggaccaaactaaagacattaaattgtttatcaactcacctggaggttccataacagcaggtatgggagtatatgatgctatgaaattttgcaaggctgacgtctcaactgtttgctttggattggcggcttccatgggtgcatttttacttgctgctgggacaaagggtaagagatattgcatgccaaatgcgaggattatgatccatcagccatcaggtggtgctggtgggaaagtcacagagatgggactgcagataagagagatgatgtacgagaagattaagatcaataaaatattgtcgagaattactggaaaacctgaagagcagattgatgaggacacgaagtttgactatttcatgagtccttgggaagccaaggattatgggatagtcgatagcattatagatgagggaaaaccagggttggtggctccctttgcaggagctgtgccacctccaaaatcacgtgtgtggtacttgtggaaggcttcagggccgactaggaagatcatgaaggatctgccttcggaggagaaacttattctcaatggtaatggtagtgcaactggagatgacggtaagctcaaggaggcctcggcaacttgaagcctgccttagcttgcaattcaacggaagatggctttgctatggccgaaggtgatagtaggatgatggatacaaaatagaggctactgctctacctgtatgccagatcattgcttgattacatattatggacaacgtgttagttggtagagtagagaaaggctgtttgtggagatgaaatgcaaagaaatgttttgtatgctgcattgtttcttgttctttccttgcgatgcaccattagttcaaaac

SEQ ID NO: 23549 - DNA, 239 bp, Setaria italica
  Peptide Sequence Number=SeqID_89523
catactttcggcgaggttggcggagggagatggagagcctggggaccaggagcttatcctggtcgagctcctcgtcgatccatggcgtcagagatgaggggatctcttgggcccatgttccgtccaggtgcggtgccgcccgtcttctttgagtgccagagaagaaggcaccgagatgtattatttcttgagtgagctgactgtaggaggtactgcagatgcatgagacgccgtgtgga

SEQ ID NO: 23550 - DNA, 366 bp, Setaria italica
  Peptide Sequence Number=SeqID_89524
accggtgcggcttcgacatgacggcgacgacgtcgatgcccgacgccgtgcgcacgggcttggcgcgcagccgcggcagcagcgcggcgcggtcggcctcgggcaccgcggcgatcatctccaccagcttgggcgcccgcgccagcccgtacttccggcacgcggcggacttgagcgcgttgaggtccacgtcctccccgcgccgactgagctcccccatcgccgacacgatctccgcgatggcccgcacacgggcctcctcctccgagaggcccgcggggaggaccacgcctccgcgtcccggcgcaggcttccggcggcgcggctgctccggtgccgccacggcggcggcggcggcggcggtcg

SEQ ID NO: 23551 - DNA, 326 bp, Setaria italica
  Peptide Sequence Number=SeqID_89525
gtagagagggaagcaggcaggaggtggcggttgcggagcaacaacacggagaggaatgcgcgacccggtgtgaggctctctcgcccccagcgaaatcccaccgattctgaatccggcggcgaaatcgggcgcatcgcggcccggccggccggccagcggggaagtgtgggggcgacggagttgtgggggctgaggcggtgagggttgaggagcggcggcggccacggcgaccgggatgaaggggagggggcgggaaggagacggtcaccgccaccctcctccgcttcctcctcctcctgctgctccctctcaccgctctctacttt

SEQ ID NO: 23552 - DNA, 249 bp, Setaria italica
  Peptide Sequence Number=SeqID_89526
ctcgaagacagcctcatcaggaaagacaatttgatcctttgaaagatggaatcaaggacatacaacactacagtaatgatctggtacgaataaaagcagggaaaagtggaggcatatccaagttcaaaaattcaagtccacagaaggaccatacaagtccaaatatttatgacaggcattttctgcaaactaggatttctagcaaactgagaatttctttgaagtattccaatcaactgaaaatcagaa

SEQ ID NO: 23553 - DNA, 270 bp, Setaria italica
  Peptide Sequence Number=SeqID_89527
cgaggctcctgcactggaggcagtggcagcacttcggcggcacgttcgaccggctcatcgggctcttcctccctctggtcgcggcgaggcagcggcggcgatctcaatgcggttacggcggcggcggcggcgacgacggaggcacgatccgcccgtacgtcgactcgctcctcgacctccgagtccccgacgacgacgtggacggcgcgcgccgcccgctcacggaccacgagatggcgtcgctcgtgtgggagttcgtcagcgccgcca

SEQ ID NO: 23554 - DNA, 365 bp, Setaria italica
  Peptide Sequence Number=SeqID_89528
gcaggccaccactgggactaaatgtgaacttctgccaatgattaagcagccccttatgcaagcgatttccctaaaggcacagatcaggttatctaaagtacataatggacatgacaataaaattttgcatagaatatcagaaccagcagtcaccattaccaatatgaatatcagaaatagcacccatgtaagcagcattttgctcaacatatttctctagtaaactgaatagtaggtcctcaacttgcagatcaagccagtaaacttgcaaaactaggatttttgctcctcaaactcatacaaatgtgtttgaggcctaattttcaagtacagtttcattttgtcacaagtctaggggtttaggg

SEQ ID NO: 23555 - DNA, 2495 bp, Setaria italica
  misc_feature (2276)..(2276): n is a, c, g, or t
  Peptide Sequence Number=SeqID_89529
cgtgactgattctggaaatatcattaaatgttctatacagacacaacctcaaggcatccttccggatgctcggggttccttcgaacaacgatgctaaactttctggagcaacaataaagacatttgccacgattcccagctgttcaaacttctcgtctatggagggggcattgaagctacgaacaaagtccccatattcagttatgtcacgtttcaaccgcaggccaccactgggactaaatgtgaacttctgccaatgattaagcagccccttatgcaagcgatttcccagctcagtcaaaaaggactgcttgttgagaccttcaagggcattgaatgcaacctcaagaacacgagagagataggctacaatctatgcaagcgttagttggccgatgatctggtgcagctccatcatctggtgtccgataatctgtagccttctgttctgaagacaacaatctttcgacctcagacataactgtatcaatacattgtagcagtcctttgtgtgcagccgcctcgaccactgatacagctgaccccatatcttcacaagcagatggatgagcaccatcgacaggcaggagtagtcgagatatggtatttgagaagtactgctgaagaatagatacgctactggcacaacgctgcacggcaatcatgaaggatctaaagctactctcaccagcagaagctgccgcctcagccgcagaagcagcagcagcagccactcttctactaacacttgacccgatgacatatctgtcccgcatagcagcagcatcatttaaactgtctctagcacgatcaagcccttcagttaagtattggctcacttgatcaagcaagcatgcaaatatggatctcacattagctgcaacagtagtaggctgagaaaacaacagtgtgcatctggctatggcttcctcattccaacgaacaaattccgttactacagtgacagatatcagttgctgtggtgatgtagtcaaagatgcgccttttgcacgtccgattgagccagttgactcagattgttgcttagcctcagctttcagttcagccatctttgactgatatagctgcctgagtgatgcctgctcaaattctgtgtactcgtctttgtgagcaacatatatggattcagtgagaccttcgatatccaaatccccacaaccaatagactgcaaatctttggccaattcttttgttttgttgtatgcaactgccagaattcttagatattgtagaaggcctccttcttcgagaggaggcaaactagcaagagacggctttatcagaattctatcaaggatagttgttaccctttgttctagcactcgctgcacaagtattgccatgacctcattcggagaaggaaagacagccgttattgtagttgcctctctcctcacagtatctgcaatttccttgtacaatgtagataaaccatccgcaatataattggaatcagcttgcagcccctcatcgcccagaacaacttgaatatcagtgttcattatatccacatcaataaacattggccgtgttgcaacatagtgttgcatagcactggttccccgattgaactgtgacaatattttagcacattctgccattgtagacaattcccgtctctgtgatgcagcatcaaaccgagccaataatctattctccagttcgttacaatattcttggagattcgcgacagcaacctccaaaccacggcttgcattagccgagcctacagctggtgttacaccatgtctaccaacatcctcctcggcaaatgatcgcaatttctgtgcaattgaagcagcctcagcaacacggctgtcgtcagaaaataaaggagaaagttccataaggtccccaggtgtgctgttgaactccattagatacttgatgagatctatcgtctgactagcagtttccctctgggattctgcactctgtaaatgatcaccaatttttgcagctgtttgaccaacactggatatgcgggaatccaacctagcaaagctatcaaatagtccatccacacctttctcaagctcccctagcgtcttgcgatgcttggagtcctgcaccgccacctccttcttcagattctggagcctcttatcaatctgcttgcggaggtcgacgagctccttgcacgagtgcttgaacagcccgagcagctcgtcgacggcggggaagacgggcggggccgccccgagcacgagcgggggcggcggcggcgcgggcgcggcgtcatcctccccaaaagngaatcataacgacaaccaacaaacatgcaactgccttacaaaatattaatggatggtactcagacctatgatttgaactaattaaggtgatgaaccaataggccatccaaaccaaatgattactgtctcagaactcagaagtgatcgaaactgtcaatcacactacaaatgtaatgctacaagtatgtattatctaaatgcatcacccggtattcagat

SEQ ID NO: 23556 - DNA, 793 bp, Setaria italica
  Peptide Sequence Number=SeqID_89530
atattgttaagcattgatgcaatttttgacgtcttataatcatccctgagctgaatgaacctcaaggcatccttccggatgctcggggttccttcgaacaacgatgctaaactttctggagcaacaataaagacatttgccacgattcccagctgttcaaacttctcgtctatggagggggcattgaagctacgaacaaagtccccatattcagttatgtcacgtttcaaccgcaggccaccactgggactaaatgtgaacttctgccaatgattaagcagccccttatgcaagcgatttcccagctcagtcaaaaaggactgcttgttgagaccttcaagggcattgaatgcaacctcaagaacacgagagagataggctacaattcttatgcaagcgttagttggccgatgatctggtgcagctccatcatctggtgtccgataatctgtagccttctgttctgaagacaacaatctttcgacctcagacataactgtatcaatacattgtagcagtcctttgtgtgcagccgcctcgaccactgatacagctgaccccatatcttcacaagcagatggatgagcaccatcgacaggcaggagtagtcgagatatggtatttgagaagtactgctgaagaatagatacgctactggcacaacgctgcacggcaatcatgaaggatctaaagctactctcaccagcagaagctgccgcctcagcctgcgaatatttcaagtgctgataagcctcccatacactaataacttttcgacagagccggtgccgta

SEQ ID NO: 23557 - DNA, 858 bp, Setaria italica
  misc_feature (1)..(38): n is a, c, g, or t
  Peptide Sequence Number=SeqID_89531
nnnnnnnnnnnnnnnnnnnnnnnnnnnnnnnnnnnnnnaaacttactaaaccataaactggccaggacaataatttgactggctggctagctgcaatgaccatagcgtttgtagcaacccaagtaaatttctctacataattaatgctttacacaggtaacataagtcttggggacctgatccacatgtacagctcaaattgagcaagcccaaaatgaaatgaaaagataatagataatgggaagccaaagaattaaagtaatttcgaagctcagctatacaggcggtaccaactgtcagaaaccatttgccagaaccaacgagcatttgacagccgctagacaaacagcaacaaagtgtatgccgctcatgcgcccccgtacaatcattcagctgtgatattgttaagcattgatgcaatttttgacgtcttataatcatccctgagctgaatgaacctcaaggcatccttccggatgctcggggttccttcgaacaacgatgctaaactttctggagcaacaataaagacatttgccacgattcccagctgttcaaacttctcgtctatggagggggcattgaagctacgaacaaagtccccatattcagttatgtcacgtttcaaccgcaggccaccactacaataaaacaaaaatggcactgtaaagtaaggctctgccaagataatcactttgcaatggctggcgtccacaacaattatagcagttcatggactcatggccattactgcattgcacgttcttagtcttgatgttccttaactcaaactagatatgaccactccaatcaaaacttggcaaacatgcactttcacataatccatgcggcgtcatg

SEQ ID NO: 23558 - DNA, 266 bp, Setaria italica
  Peptide Sequence Number=SeqID_89532
tatgggcctggtatcccctgcggccatcgtgttccaccgtatcctcatcatacacccgctgcggctccaccaccgaatggagagatcccatggccttgatggctgccttgagcccttgatcacgtttcaatggtgtgtacgtaaggtaaaagaaaaggttgacaatgccaacagtagcctaaacggatagtactccagaaatgaacaccgtacggtactgaactacgcgggttgtaacaccgtctctcatgtacttatgtttatcg

SEQ ID NO: 23559 - DNA, 568 bp, Setaria italica
  Peptide Sequence Number=SeqID_89533
gctcagctgctggaacgcctcgaacgccaccaccatctgctcggtgcgctgctccttgctgttgaagaagggcatgccgtcgcggcgggcgcggtgcaccaggctgatggccgacgaccgctccgagagctccaccaggtgcatcgcgtacatggtgaggcggcggcgcccggtgccccgcgacgcctccaccaggttgagcagcgtcgggatgtggcggttggtgtggaagcaggccagcacgcggagctcgttctccgcgtccccggccgtgcactccacggtgcggcgcttgtacggcaccgtcttcctcgccggcttgtagatggccatgacgatgggcgtcgtgatgaaggtggtgaacagcgccatgagcaccaggatggcgaacgcctcgtcgttcagcaccttgcggtcccggccgatgttgaggacgatgagctcgacgagccccttggtgttcatgaggaagccgagtgtgatagcctcccgcacggggatcttgacgaacagggacgtgatcaccgtgccgccaatcttgccgaggcatgcgtttgcgatgacgagc

SEQ ID NO: 23560 - DNA, 253 bp, Setaria italica
  Peptide Sequence Number=SeqID_89534
ttgaggtcggcctcgctgacggcgaacgcggcgaagcgggcgtcggcgaccttgcgggcgaggtagtgcgtgatgagctcctcgtcggtggggtggaaacggaagcccgggggcagctccatgggctggtgcaactcctgctccatggcagacagagctggcttatctgctgctgttgcgccaaccgaagcccctgtcctgttggaggcggcgcggattcaaggtgataagactagcactgctgcagatgatc

SEQ ID NO: 23561 - DNA, 368 bp, Setaria italica
  Peptide Sequence Number=SeqID_89535
tgagatatcaccagagccagttgctgctgcatctcttgggcaggtttaccaggctaggcttcgatccaacgggaaggttgttgctgtcaaagtacaaagacctggtgttcaagcagcaatttcattggacatatatatcttgaggttcctagctagtcttgcaaggaaggctgccaagttgaacacagatcttccggctgtgcttgacgaatgggcatcgagcctgttccgggagatggattatagagaagaagcaagaaatggacttaagttcagagaattgtttgggaagtttagagatgtctcagttcctgaaatgtatctggaacagtctcgaaggcgagtccttatcatggaatggatagagg

SEQ ID NO: 23562 - DNA, 304 bp, Setaria italica
  Peptide Sequence Number=SeqID_89536
ggccgcatcgagctgtcgccggaggtttacaggatggacacgatcaaggccgagatgaagaacggcgtgctcaaggtggtcgtgcccaaggtgaaggagcagcagcgcaaggacgtcttccaagtcaacgtcgagtagatctttccagatgaaagtcaaacctctgagtctgaggggctactaaactagattttctctttttttaatccagtctttaaaggatttcatcttgtgaaaataagcaacgtagaactcggtagcgattttgctttttagtgtgagatccagcggatttgcaaaaaaa

SEQ ID NO: 23563 - DNA, 1691 bp, Setaria italica
  Peptide Sequence Number=SeqID_89537
ggaatatttgactgaattgacgaaattgggttaaaccaaacgtaatcatctataatgctcttattggtggtcactgtaggaatggtaacatttctgatgcaattggtgttcttggcactatgaagtctaatggtgtacaaccaactgctgtaacttacggcagccttatgcattggatgtgtcattctggtcttgttaaagaggccaaggccatttttgcacaatgtataataaagaacattgagcttggagtaattggctatacaattatgattcaaggtttatgcaaaataggaaaaattgatgaagctgttatctgctttaaggatatgcgttctagggatatacctccaaataaattgacatacaccactctgatgtttgcctattgcaaatctggcaacaatgaagaagcatccaagctttttgatgagatggtgagctcaggcattgttcctgatagtgtttcctacaatacactaatttcagggtgttgtgaggcggattcattggataaggtgatagcaatgcctgctgaaatgccctcaagagttttcaaacaggatggttgttcgtacaatccattggttaatggaataactacaccctggtgccaaaaagaagctgcttccagtgctgaatgatgtgtaacagaggtaccattgggcatgactgctttctgagacaggtgttaaagtccaagtatgaacaggaagaacttgggagaatatgtgggctcccaacttgccttcggttgtatggcctatgcatctaggaaacatgccactcatggtttttcaaccttttaccgtcgaggacagtccaacagaagcagaaggttgaacaaagttttggacgtggtagtatgcatggtcaacaaccatactggtgagccatccgagggcacccacagaatgcacttcaggtttataactggccaacattggtgaactaaaacagcaagatatccatgcagggatgacaattaaataaaattactaagggaaggagcggaccaggttttgagattcgttgatgtatttcattcattaacctggagtatagcgtgggctgttatggtcccacctattgcattggagaggccagctcttagtgctgaactgcagaaacatcagttcatgtttgctactgaaaccaagcgtccaatttctcgggtatctgcttctgttgttattttggagcatcttagtgctagtgatgctgtgcaaattgtcttaaagaattctgtaactgaaatgcctaatagattactaaagattgcctgtgaagaagccatagcgaagaggcagttcaggtggcataaagccattagaattattgtgatttcaatttcacagcagggaccagggttaagtagcaactattctttgtcaacatctaatcctccaacctcgaccaatctgagccttgggccttggcaagcttatcatacctcaaggttaaaataccagatcacttggtgtgggcagcactggttgctactgtaatgcgatgtaactattcatgcgctactgtagcaaccggtattttttgctgccgtcctgccaaagtgtttcagttgatagctaggcataaggatagtttccttgttactcgagtttacttctttatagaattcaatatgttgaagataagtagagatagagtgtgaggtaaagtcaagcaatccc

SEQ ID NO: 23564 - DNA, 141 bp, Setaria italica
  Peptide Sequence Number=SeqID_89538
ccgacttcgtcgcaaagaaactaggattcgacaagagccctatggcatattttgttctaaaagcgcgcaagaagctgatccccagcgcaatcaatagaggagtaagctatgcatcagcaggagctgggattctggactcca

SEQ ID NO: 23565 - DNA, 371 bp, Setaria italica
  Peptide Sequence Number=SeqID_89539
agcatcctgctttgtgtcagtctgctgaaaatccgtatgtaatatactaaactagatttgtttgctacttgtaatcctacttgcaaccatgcttataaaggatgcaactggataataaatggacatctgtagattaagtttccatgtcttgatcctctgttctaaggttagctagatcttgtgcagcaactttggtatacccccaacagattgtggtccttgaggaacccttacttaaaaagagaagttactgcaaagaggttgttttaccccttcctactattagattttctgcatagtaaaatgaactgttttaaagcacttttaattagcgtgacaagattgaaatatgcttagtaaaatgaactgtt

SEQ ID NO: 23566 - DNA, 900 bp, Setaria italica
  Peptide Sequence Number=SeqID_89540
atgaagaatgaagctactggaattgagcaaataaacttagagagggagggtcagaaaagtgaattagttgttcagcgaggaaaaatcgaattgcagctcagaagtttgaagagaaaaagagaagatgaggagcggcgtctggagcgtaaaaaactgcagttagatgataccaagaagctttctgctgacaataatcatgatactgctgtggatacctccgaactagtggctgaaatgatgcaagtgaaggaagatattgggaacaaagaattagttctgcagaaaattaatttgaaactaacagatactttgcttgactattacaataaaagagcttcctacaaggactttattgaatctgcatatgctgagatggggtctattagtgatgtagagcatgaattgcagcttgtcgaagaaaaatacatgatgctcagcaggagaaagctcactatgaagatgtcatggaaaggaaggttttggctcctattaaaacggctgaaaccgagtacacaaatcttcaacagcttcatcaggagtactttgagaaagcttcaaaaatatgcattgaaagtgaagtggaagctctggggggtgttgcgggatccaccctagaacaattgagtgaggaaattaataaattgacacggagattacagcaagaaagcagaagatatactgagagcattgatgatctgagagccttgcatgacaaaacgagacagaaaatcttgaggaaacaacaaatgtatgctggttttagagacaaattaaatgcatgtcaaaaggctttggacttgcgatggaagaagttccaaagaaatgctggcctcttgaagcgtcagctgacatggctgttcaatgagcatctgggaaagaaaggtatcagtgggcacattt

SEQ ID NO: 23567 - DNA, 477 bp, Setaria italica
  Peptide Sequence Number=SeqID_89541
tcaacgacgggcttgggcgaatcaacaacgggcttgcacttgggttcttcttctttgcagcacttgggatccggtttgcacttgggttcttcttctttgcagcacttgggatcctttttgcagcacttcttgggatccttttcgcagcacttgggaacctttggacactcgggaggaggaggaggaggctttttctcctccacgatgtcgatctttatcacgaaacagccggccttgcagcggagcttgcagcagagctcgatggcgtcgaaggacccggtgatgagaaccttgtccttctcgtacaccaccttatcgaagacgaacttgccacgctcttgaatgctgcagaggatcttctcgatcttgcttctgcagcggccacatgacaggtccagcgtgatggctaccgtcggcatctctctctagtggagcagattaaaagcaagggccagtctcatcggagaggagatggac

SEQ ID NO: 23568 - DNA, 534 bp, Setaria italica
  Peptide Sequence Number=SeqID_89542
gcccggcggcgacggagaggcggatttgcctggacggccgcgggcgcgtctcgccgatccgggaggtggacgcggagacgggaccgccgcggctgagctgctcggacaccgacaggggaagcgaggcctccatcctctccgccgaggaaaagagcggcggcgccctcgacgaatcgagcagctcgaaggcgaagaagcgttcatggaagaagaagctgatcgccagcgccaagaagctgaacaagggccgcaagagcaaggaagcggattccccaggttctttccgcagcgacggcgacgcagccgacgcctccgcgcgccgcggcaatgccatcgcggcggatccctcagattcccgccgtggcacggccaatcaaacggaagccgccgttgccgaagagccggattccttgaggggttctcgccgcagcgagggcatagaggagatggttgcggcgccggtagaaatcgatgacgcgcagtcggtggtcctcgtcgtggaggaagaagaggaggaggagggcagagcaggaa

SEQ ID NO: 23569 - DNA, 407 bp, Setaria italica
  Peptide Sequence Number=SeqID_89543
gccgcaacgcgctctctgctgacatccccgcggaggtcgtcgcctccgcctcgctcctcttcctcgacctctcctacaacaacctctccggcccaatccccgacgccttcgcaggctccaccaagtcgccttccaagctcctcctcaacaaggactccatcaccgggagctaccagctcgtcttcctcagcctcgcgcaaaactccctcgacgggcccattcccgagtccctcacaaagctcgccaagctgcagcacctcgacctcgcagggaacagcaagctcaacggcaccatccccgccgagctcggctccctcgccgacctcaaggcgctcgacctctccagcaacgacctcagcggcgagatcccgccgagcctcgacaacctcaccgccacgctacagtcc

SEQ ID NO: 23570 - DNA, 749 bp, Setaria italica
  Peptide Sequence Number=SeqID_89544
agattagagcatgagcatactcttacaaaatcaatatgtttccttgctattaaaatactgtgtaggaatgccaaattgatagtgataagttcactgtagaaacaagtcagctcaaaattgtgtctaagcctaggtgtacatgacatagagaattggggtgtggaaaatataaaacaaggaaacggaagcatggattagttaaagaatagcaagggcagttagtagcaggattagagagcatgtagtgcaaaaaataaagatgaaaaaattgcctaccgaaatccattgtttttcctagatgcacctacgttattttctgatgaaaacagtaaaaaaaatgcttactgaattgcattttttgcctggttctaaacacattttttacggatgaaaaagtaaaaatatgactgctagattgaattgtttttcctggttctaacctttgcctgatgcagaatgcattcttgcctgatcagaaccataattttctaagaaagagtggatgtagaatatatacttatattctttctaattcaaaatcatattattgcctactaaagtatattgtttttcctaattcagtagcatattattgtctaactaaaatacatataacatgttgtccaaaaaatcagttccagtctatcagtcacaaccacatgtatcgaaaaagagcatactgcatatcagaggcatataatgaaagctgagccttctagttgcatcgtatctctgcatataacttcttt

SEQ ID NO: 23571 - DNA, 578 bp, Setaria italica
  Peptide Sequence Number=SeqID_89545
ccgccccgccgcgcgccgccggagtcgacgccgacgcggcccggatccatgctgattcctgttcgcgccctccccttctcctagcaccccctttcttttatgaaacttctcctagcccttctcctcccaaagaacgaaacgaaacccacacgagcgcgcgcgcgcgcacaaacacacacgcacgcacgcgcgcacacactccaacgtctgctagaaatcgcggccgccggggcgatcgagggcgggtgggctggccggctcagatgaagcaggaggaggaggcgagcttatggcggaagaagctggtgctccagagcatgcgcgtggacgtcttcatggggtacagcgagaaccccatggcccctccgtagttgaaggacacgggtggattcctccggcgagcggctccctccggtggccggccgggccggccagggactggactgcaaatagaattttcgtggagggggttgacgcagagggatgggccgatgatgggagctccggtggtggatgccgctgctagtttccttgtttttcctccctttcctttttattcgagtattttttttttgctg

SEQ ID NO: 23572 - DNA, 1292 bp, Setaria italica
  Peptide Sequence Number=SeqID_89546
ggaagggatgccttcacactccctcatccggtataaatgtaacagtgactcaattaatcaatacagaagagaatcatttttacgggagttcttcattctctaacacgttatcacacacgctagcctctactaggcaaagacagaaagaatagaggcaacgcctcacgcaagaacaaggaagacacaggcacgaaggccttcacaacagaggtaaacatggacgaagtccttcgcttctgtgcacttgaggatggtttccttgttcttcccttcgcggccaccgctgagagtcctctgcacgctgtcctgcaggacaccgtgaacgccatggtcgtcgtggtcatccacgcagtccaggccagcggcctggtccttctgttcctgcaaacaagaccacaaccagtgaaagtacctcatcagagcatactcgcacggcaacgccagtgcctagactccctacgccaacaccacaacaggaacaaactcaccgtccgatgaccttccgcatccgtcatcctggcactgaaatggaaggcattggggtcatcactgacgttaacgcaccaagggcagggactgtcaacgccggttttggccctcaggccggcccaaccgccatcggcgggcacaaggagacgcacccaagctttgtgattgggacaatggcggctcgacggggggcgccaccattcttcaaggagaatggtaccccagtatctgcatcatccgcaaccaaggatgcagaggcaaccgatgcaccagaaaaccatggccgcaagacggccgtggaccaccgcccagggatacggcgcggcacttggaacccagcaacgctgggtctctcctccaactgagaggccggccaacggctggcgttagccggcaaacctgggggcatcaagaaggaggaggacgaagaaatggattgggatggcagcgcacaccggcggccacccgcagacagccccaaccggcgagacccgcctgcaggtggatctacaagttggtggtacctgcccgcaggcggctcaaccggtggcgcccgcccgcaggcggcgggattcaaggcaacggcggccaaccgcaggtggctcaggccaccagaaggccacccgcaggccggaggtgctccatggccaaccgcccaggccggtgaaggggcggcatttgaggcggcgaaggggcacagcccgcaggtggcacccgagccgaccaaggggcgcggccgtaggaggaacggcggtggggtggtacggcccgtatgcggcaccaacagcaacggagcaaaagag

SEQ ID NO: 23573 - DNA, 731 bp, Setaria italica
  Peptide Sequence Number=SeqID_89547
ctgaaatcatagtacatctaacagctcccgttaacgtttgaggcttctagctcataaaattcagcacaagagctctaactgaaaggatacagcaacaaaattgtcttatcttttcactaaattcagcacgagttagcatctctgctgctacacatacttgcctctgtacttgggcttcaactccctatcaggtttcgcatcttgtgccggctcaaacacagcggagtggaggtttccctcctccatccacttctgatggttctccctgaactcccggtgccgctcctcagccaccctctcaatctcctcagtatagggggcgaccttcaccatggtcagcagaacccggctgtaccggtagctcagtatctgctcgcaggaggcaatcagcttgaagcaggggtgctcggggaactgtgggctggcaacacggctgtcggcaccgtcttcgccccgcaggacagggtagaagaagacaagcctgccgcccatgaccagcatcctcgcagcaaggtgaaggaggtcatggacgcactctgcaaggctgtatggcgcagtggacgggatgtggttgtcccgtttttcgtccgggaccgtgtaaggtcctttgactccttttatgatcttccgaccaccggacttccggccaccagcacggactccatatggtgggtcacaaataattgcatcgaacatctccttcaatccaggacgccaaggtgggaggttgt

SEQ ID NO: 23574 - DNA, 254 bp, Setaria italica
  Peptide Sequence Number=SeqID_89548
taatataaagttgctgctggtggccttccccaatcagaaattcagaagagggcgagcttgatcagaacccctgtggccaccacaacgaccgcggagcccactcccggagtcggcgcgcccccgctggcgcccgacggcacggtgccgccgccgctctcggcaacggtgacggcgagcttcatgccgctgctgcagaggccggtgacgttgcagatgaagtagcgcgtgccgggtcccgtgagcgtgacgacggt

SEQ ID NO: 23575 - DNA, 245 bp, Setaria italica
  Peptide Sequence Number=SeqID_89549
gtccccggcgacggagtacgccacccccgcccccgccggggtgcgcttacggcggagcagcctggccagcctccgcgcgatgccccccgtcctctgctgcggcggcgcggccgctgccatcgtctccattgctctcttctctcttctctcttttttccacacactgtcacagagtcacagagtgagctcttggtactgcggaggagctgcgctgcgctgagcttcttctagctagcgtttcttgg

SEQ ID NO: 23576 - DNA, 635 bp, Setaria italica
  Peptide Sequence Number=SeqID_89550
attgagatttgagagacggcctggcaccccacgctttcccctcccctcccaaatccccggccccgccgccgggcctccgccgccgccctcgccgcggatcacgttcgcggcggcttgccccgcttccgtgcggcgtcgacaggaggaggaggaggcgcagaggcggggaaggctgtcgctggatcttgtggcgccgccgtgcgccgggagtgatcatgagctctagaaacctcgtccgatctcccgtttcctgtagtgcttctattaatggatgcttcacttccaatacatgtcgttcaagaaactaccatcaacattctcataacactagtttgcaaagtttccaagcgtaccagactcttttgcctcaaaaattaagaaaatcagctcagcggaacgcttcatttttcacccagaggaagtttataccgcactgttcatcagaccttagtacctcatgcagagaagaagtgcccaactacttagctgtcagtgttttgcaagaccaagcaaatacaagacagggagctgttcgtaaagttcttgtcatcttgaatcctaattcaggatttcgaagcactcgggatgttttctacaagaaagtgcaatcgaaactaaagctttcaggcttcatg

SEQ ID NO: 23577 - DNA, 346 bp, Setaria italica
  Peptide Sequence Number=SeqID_89551
cgacctcctcgtggaagatgcggtggcgatcctgggcactggcgagcagctctcgggcgtacggctcgcaggctgggctcgcctccgcgaggttctcgtcgagctcgaacgcgagctcgccggcgccgacctccggccgagggctggtggccggcgcgtagtcaacgcaggagccgagcgcgttgcgcacgaagccagcgaagaggcggtcgcggtcgcggccagcgagccaagaagccggcgggctccgggacggcgaagaggacgacggaccctggaacaccgatacggggctgtggtggtggtggtggtgcaggtcccgccacttgagcggtgaggacgagtg

SEQ ID NO: 23578 - DNA, 177 bp, Setaria italica
  Peptide Sequence Number=SeqID_89552
tttctcgcgtcagtagtttgatcactttgtaataggatgtcaggctatcggttgaacaaaaagacagcaaggcacgtttggatacaacaagtgtgctgcttagaaaatggcacttggtgttgacgcgacctgcgtgctctgaagtctgcacaggctgtttccttagtttttgctttg

SEQ ID NO: 23579 - DNA, 384 bp, Setaria italica
  Peptide Sequence Number=SeqID_89553
gcctgttcagtgatattgtcactggtatttgccaaggaatcttcatctttgcgcttgccaattctagtggttggtgttgcatcgtcgccttgcttcttcttttcagctaactgagccctggattgatctcttggtagctcttgtctggctgcttcttcctggtatgttttgttatcttctggtgacttcactgctggaggtacagaagctggtccagcattcctcgtagcttgcccacccagctgatcattgggtgataccacactagtttgaatggtttcagcaataccagtcttctccttccttgtgtcagataaggaagatactggtggagatggttttgacaattgacctgcattatgtcatgattatacctatgatcag

SEQ ID NO: 23580 - DNA, 362 bp, Setaria italica
  Peptide Sequence Number=SeqID_89554
tgcagcaaggacagcagcagacaatgcagggcgatcatcatgctcactgtcaaattcatcatcactgtcaacagtaacagaaagaccttcgattccaactgctgtagaagatatatcctcctcttttattatgtgcaaaacacgtctgacaatgtttccaacagcaagctcgatggggttggcggcgatgagctgctccccgacagcgcgtacggcgtccgcaagcgcggccgcctggttggcactgctgcccatccggtgctgcgataccaccgaacgcagcagctctgccgtctgccgcgccacggcgtgcgacccctccaccttccggcgcttgagcttgaggacgaagtcactgacga

SEQ ID NO: 23581 - DNA, 430 bp, Setaria italica
  Peptide Sequence Number=SeqID_89555
tgatgcgcagactttctgcgtgtattctgaaaaaaggacacgccgccactcatgagaacaaacttattcagccggctaggcctgaaataacaaatagaaaagagaggaccggcccaccgcccacctccattgcctccggcgagctcgccggaggagccgagggacggagccggaaactggggtaaagaggtcgtgagttagggagaaaagctcccaggcgtttgggaaggtccgtattaatagctgttgctatccttgtagcgtgtaaggtaccccacaagctcgtccatgtactggtcctgccgtcgctgatcgttaagaacttgcttcagcttcgtagcgttgcttgaaaataccttccgttcctcctccaccatgacgcgccgcaccgccgccgcgacgtcgtccctgccgaaggagccgtcgccgt

SEQ ID NO: 23582 - DNA, 232 bp, Setaria italica
  Peptide Sequence Number=SeqID_89556
agagcctggcggaggagaatgagaccctcaagactcaggctggcaggacagaggccgagctgcagcagaagtatgaggtggcggtggcggagctggagctggccaaggctgcagagcaggacgtgcggatgcggctgggcctggtcaccgaggaggccgacaagagcagccggcgtgcggcccgggcctccgagcagctggacgccgcgcaggccgcgagtggggagatgga

SEQ ID NO: 23583 - DNA, 443 bp, Setaria italica
  Peptide Sequence Number=SeqID_89557
cgaaggaaaacgcaaagagaccgggtatctgggcctgcacaaaaatcccagcagcgtgggacacttcggggtcctgccggaggagaagcagcagcggctccgtgaagtaccaaagcacggagataagcagggatgcggcagcagacatgatgaacgacgactgcaggtacaggcccagcatgcggtacagccgggcgccgtacgccttcccacaaagcgtctccagggctccgctcaggcccataacgaaggcgtagccggtgacggttgcccaggagttgccgagcgtggcgccggcgaggtggacgtcgccgaggtggccggagaacatcaccgacaccagcggaatgccgtagtaggccatgttggtgagcaccatcggcaccgcgaaacgcagctgcgcctgcgcctcctccgtgtcaactatccggccaagccatgct

SEQ ID NO: 23584 - DNA, 382 bp, Setaria italica
  Peptide Sequence Number=SeqID_89558
cacgggggtgtgggtcgtcggcctctatgtccgtggcgaccacgacgcggttgtcctctgtgaggatggctacaccgccgccccagaatacagcgtcagcgacgcctccagaggccggaggtagtaggggcatggggctggagctagggctgggctgtagatcggggaggcggaagcggaggagagagccatctgagatgaggccgaggaggctgagggagctggagaaggcgagcgagtggaggcggggaagcatgggcggccagggcgcagaggcgatggggtggcccgaggaggagaagaggaggaggcggcggcgggagggctcggagtggagctgcacgatcttagagtcgtcgcggacggcggcgatcgggccccg

SEQ ID NO: 23585 - DNA, 251 bp, Setaria italica
  Peptide Sequence Number=SeqID_89559
ggcggccttggcggcaacgataacggcgccggcgccggcgccgctgttgcctcggcgtagcctggaggagaggcaggggaggtagtcgaagggggtgacgccgcccatgcgccaccccagcgtggacagcaccaggagctccatgcgccggatggagacgcagctgaactcgtactcatcgtcgtcggcgcggaactccggcagcgccggcgcgcggtactcctccatcttcgccgccagtgacacgcacg

SEQ ID NO: 23586 - DNA, 226 bp, Setaria italica
  Peptide Sequence Number=SeqID_89560
ataacctcaacaagttccgcactaaatacactctagcacggtagcacattgcctcaagggatgcaggtcacttcttcatttgacctgtcaactgacaagagaggatatatgcatctgggtaagacgctgtgtacactgagcttcagtttgaagatgcatgaaacctatcgtcagatgatcacagtagaagcatcatgtttgcttgttctttcacgtcggaatgatt

SEQ ID NO: 23587 - DNA, 434 bp, Setaria italica
  Peptide Sequence Number=SeqID_89561
ttagttagtagtagttagtaacgtaagtagtgttatatggcagactacataaaaggattagaggaacttaagataatgacagctacaatgaaagataatgaaagctgtaaggaaaagtgaggggaagtcaactaaatggtcaatgtcagctaaatggcaattcgacttagaagtggatatatctatgacaactaagggacccaaggtaaggccaaggactactataacctcaacaagttccgcactaaatacactctagcacggtagcacattgcctcaagggaagcagtgacctgtcaactgacaagagaggactgacaagagaggatatatgcatctgggtaagacgctgtgtacactgagcttcagtttgaagatgcatgaaacctatcgtcagatgatcacagtagaagcatcatgtttgcttgttcttt

SEQ ID NO: 23588 - DNA, 755 bp, Setaria italica
  Peptide Sequence Number=SeqID_89562
gagcttgagagaggcagtccttgacgctggatgccggcaacttctcggacgttgtggcgaagcacccgttcatcgtcgtcgagttctacgcgccgtggtgtggccactgcaagcaactcgctccagagtacgagaaggcagccgccgttctgaggaagcacgacccgccggtggtgcttgcgaaggtggatgcgtacgaggagaggaacaaggaggtcaaggacaagtaccaggtgcacgcgtaccccaccatcaagatcatagagaatggagggaacaacgtacgtggctatagtggtccgagggacgcagatggcatcgtggagtacctcaagaagcaggtcggcccggcttctatcgagctcagatcagcggaggaggccgtccacgccattggtgacaagggagtggttcttgtaggaattttccccaagtttgccggtgtggattatgagaattttatggccatggcagagaagaaacgatcagattatgatttctttcacacgtcagatgctagtattctgccgcgtggtgatcaggccgtcaagggcccagttgttcgtctctttaaaccatttgacgagctctttgttgattctcaggattttgataaggatgctcttgacaaatttattgaggtgtctggattccctacagtagttaccttcgatgatgatccaacaaaccataagtttcttgagagatactacagtactcctagtgccaaagcgatgcttttcttgaacttcagt

SEQ ID NO: 23589 - DNA, 331 bp, Setaria italica
  Peptide Sequence Number=SeqID_89563
atgcatcgggtgaggtgttccctcgccttcgccgacggcctcgctcctggctgaaagaggatgtccgccatgacggtgcaggagattcctatgaaggtctcaacgaggcgcgcgacggtgaatgccatgggagtctcgtcgtagcggcggcccatgatgatgacgacggaaagcgcggccgacacgccgccggcggggccgtaggcgcggctgcgcttgaggaaggtggcgaccaccatccaggggaccagcgccaggagccgcaggtccatcatgccactcagctgctgctgcgagatgagcaggcagcccaccgcgccgtagacggacg

SEQ ID NO: 23590 - DNA, 338 bp, Setaria italica
  Peptide Sequence Number=SeqID_89564
gggtcgattaaatatcgggcgccgcctgagaggccccctgatccgccggctccagctgctggcgcccgaggggaggaggagggaggacccgggccacaagggccgtcctgcgtcggcgacgaagcccagtcgaggagtcggcggccaccagtgtcgccatcggagccttctgcttgcgccggcggccacccgagaggagaagacgacgggttggaggaggcggacggcggcgcgtgcttggaggcgatggcgggatcgatggtggaggcgcgacggcgaggagaagatgacgggttggaggaggcagatggcggcgcgtgcttggagacgatggtggg

SEQ ID NO: 23591 - DNA, 381 bp, Setaria italica
  Peptide Sequence Number=SeqID_89565
aactgacaatattagtatctcctaccaaaaacaccttttctccctgaatcgatacaggaagttgattaacgattagacggtgatgactcgaacatgacaagcacgtatcccgcctggcacaagccaagcgaactcgtccgggactccgggctgacgtgctattgcacgtggctgacgtgcctaagcacctcgcgggggtcgccgctctgcaccggcgccggcgcggagccgagcgcgttgtagcggtcgacgtcgaacccgcgagcccgcatgaggcggcgctgcctggacgcgaggcgggcacggaagaagccctcgaaggacggctccgtggcggtgcgcatgaagaaggcgtatcccgacatgaagtagagcgaggtg

SEQ ID NO: 23592 - DNA, 334 bp, Setaria italica
  Peptide Sequence Number=SeqID_89566
agggaaagaaggtggcggacgaggaggaggacgacaagaaggtggcagcgaccccgcagccggccgccaaagctcaggtggtgggatggccaccaatccgcagctaccgcaagaacaccatggctactacccagcagaagagcagcaaggaggatgctgaggccaaacagggccaggggttcctctacgtcaaggtcagcatggatggcgcgccgtatctcaggaagattgacctcaagacttacaagaactacaaggacctctccactgcccttgagaagatgttcagtggcttcagtactggtgagtaacccgagatatctcaccagtactg

SEQ ID NO: 23593 - DNA, 361 bp, Setaria italica
  Peptide Sequence Number=SeqID_89567
agagcaagaggaagatccaacgactgtagggccctttatgaaaaaaccaaaaagtctaacagttttacgacgaattctgccttatggtctgtactgcatggttttgctgttaacgacgaagtaaaagaactccatgtctgttatgttagtttcgcaaaatcgtctatggaccaaaactctattcgattgtggttaaggctttgtacgagtgttattcgtatttgtgtaaatggtttgttacattgtgtgctgctactgtgagcagtcctacctagtttgcgaaacggtgttgacgaactgtttctcgttcctctatatcaatgttcaatgaagcttgcaaatgtattgtcaaaaaaaaaaa

SEQ ID NO: 23594 - DNA, 527 bp, Setaria italica
  Peptide Sequence Number=SeqID_89568
aaacaaaataaataggaattacggtagaagaagggtagaccagcagctggcgaggaaggtgctgtgccaccaaacgccactcttctcgttgaccttgagttggtttcatggaagactgtcacagaaataggggatgataagaaaatccttaagaaagttctcaaggagggagaaggttatgagcgtcccaatgagagcgcagttgttaaagtcaaaattacgggaaagcttctggatggcacagtgtttacaaagaaggggcatgatgaagaaccctttgagttcaagactgatgaagaggaagttattgatggtcttgatcgtgctgtactgaacatgaagaagggcgaggttgctcttgtgacaattcctcctgaatatgcatttggttcaactgagtcaaagcaggaccttgctgtagttcctcctaacagcacattggtctatgaagttgagcttgtttcatttgtgaaggataaggagtcatgggacttgaacatgaagagaagatagaggctgctggcaag

SEQ ID NO: 23595 - DNA, 349 bp, Setaria italica
  Peptide Sequence Number=SeqID_89569
ctggcaagaagaaagaagaagggaacacactgttcaagttcctcctaacagcacagtggtctatgaagttgagcttgtttcatttgtgaaggataaggagtcatgggacttgaacaatgaagagaagatagaggctgctggcaagaagaaagaagaagggaacacactgttcaagttgggaaaatatgctagagcttcaaagcgttatgagaaggctgcaaagtacatcgagtatgacagttcattcagtgaggatgagaagaagcaatccaagcaactgaagatcagctgcaacttgaacatgctgcgtgacaaaactaagctagaaggactacaagcaggctgagaa

SEQ ID NO: 23596 - DNA, 1835 bp, Setaria italica
  Peptide Sequence Number=SeqID_89570
cctctccccacacacggaaacagccactcctcacctcccccaccctccggttcatgtcctgctgctccccatgtcgcccccactcgagctcgactacataggcctctcgccgccgccggccgccgccgccgcagatgccaccgacgacctgaagggcaccgagctccgcctcggcctgccggggtccgagtcgccggaccgccgcgtcgcggccgccgccgcgaccaccctggaactgctcccagcgaagggagccaagcgcggattctccgacgaggcgccgccgccgtcgccagctgccactgccggcaagggaaagaaggtggcggacgaggaggaggacgacaagaaggtggcagcgaccccgcagccggccgccaaagctcaggtggtgggatggccaccaatccgcagctaccgcaagaacaccatggctactacccagcagaagagcagcaaggaggatgctgaggccaaacagggccaggggttcctctacgtcaaggtcagcatggatggcgcgccgtatctcaggaagattgacctcaagacttacaagaactacaaggacctctccactgcccttgagaagatgttcagtggcttcagtactggtgagatgtctcgggttactctccacttttaccagactcagtatgtaattgtgtttcattttgatgtggatagtgttagaagcacatcatagcagccttaaaaaatatgcttggttccaagaataatcttagcttactgttattatttcgataagttttactgaggatgacaaacaattcagtgcgccttcttttgttttgtgttctttggtgaactatttattcctcacaaaaaaataccttgctgattggtcagttattgcatccatatcaagtctctgttagaaagacattttctcttgtaaggcataataaattttggctccatgtatatcattattcgaggatatcttttagtcctgactcctgagtgttggtccagaaagctactaatcgctatgagagtgacatctctcgtatatttctgaaatttggagatctatgatccagtatgtatatctcattagttttcctcactttcttagaatcataaaaatgaatataaggttaaggtccaagtcttttcagtagaaattttagtacaagaagaggttctcttctgttttctttttattggtcttacaggttagtatgggtgtaatgcgatatcaggcaaggatggcttatctgagtactgcaaggatggtgaatatgttctgccttatgaagacaaggatggagactggatgcttgtcggcgacgtgccatgggagatgttcgctgactcttgccgtaggctcaggatcatgaaaggttcagatgcaattggacttgctccaagggcagctgataagtccaagaaccgcaactagaatggttgcttcctacagtccagagcaagaggaagatccaacgactgtagggccctttatgaaaaaccaaaaagtctaacagttttacgacgaattctgccttatggtctgtactgcatggtttgctgttacgcgagtaaagaactccatgtctgttatgttagtttcgcaaaatcgtctatggaccaaaactctattcgattgtggttaaggctttgtacgagtgttattcgtatttgtgtaaatggtttgttacattgtgtgctgctactgtgagcagtcctacctagtttgcgaaacggtgttgacgaactgtttctcaaactaggtaggactgctcacagtagcagtcctacctagtttgagaaacagttcctctatatcaatgttcaatgaagcttgcaaatgt

SEQ ID NO: 23597 - DNA, 536 bp, Setaria italica
  Peptide Sequence Number=SeqID_89571
gggggtgggcgtccggggttggtgtccgcggcgtccggtgccggagccacggccggcgccggcgccggcgaaggggtggccgccttggccgcggcgacgtccacgacgagcttcatgccgctgctgcagtggcccgcgaccccgcagatgaagtagtgcttgccggcggtcttgagggtcacggtggtggtgccggcgctgtcgctgctgagcgccttgctggaggagcaggcggcgtagtccgccgcgctcacctcgtccaccgtgtgcgcgccgccggcgtagttgaacacgagactgtcgccgattttgaacttcttgtcgctggcccaggtggcgtaatcgccgctggtcgtccagccggtggtgtcgccgacggtgtacttggtcgccgccgccgccgatgcgcagctcacaaggagcagcgccgccaaggccagtgacgcgccaccggaagccattgccgtagctgagacctgtgatcgatcgaccgagcgagcaaagcggaaaacgaaagctaggagatcagtacagta

SEQ ID NO: 23598 - DNA, 208 bp, Setaria italica
  Peptide Sequence Number=SeqID_89572
ctgaaaagtaattgtgtaaccaccacgtcctagtataagcaacgtttatacatgaatggtagtcaaactaggaacacatataacaaaacaagtagcataaagatccattttgcaattacctttgtctcttgacgttgggtttcggacaatgaataatcttttagcggatgacaggaataacctataacaaatgcacaacaacattatt

SEQ ID NO: 23599 - DNA, 245 bp, Setaria italica
  Peptide Sequence Number=SeqID_89573
ctcgtcgcgtacgccgagggcgcgtaccactacggcgagagcgcctcctgccccacgttgcatccatcttctacttccacggcgaggggcgcgctccaggcgcttggcgccagcttctcgtgcgcgcacctcaaagagcacctcgcgacctcttacaagctgcagtacagcggcggtggcgcacacgcgccgggctcctcgccgccgatggggctgcaggcgcctcccctgcacgtcggccaggt

SEQ ID NO: 23600 - DNA, 287 bp, Setaria italica
  Peptide Sequence Number=SeqID_89574
gatccgcgtagagggagaaattaaggccctgggaggcgacgagagagagggagcggtggtggtggaaagaatggaagcaagtgaggcggaggcgaggaggatcggaggaagggtgggtggggttttcagggggaaggttcgctgacaagggctagaaaacaaagcgagcgtgcgctagtattattgagcgctgatggcgatactacgcactagaaataccggctggcttgggcttccggcagcaaccactccgctgctccaagcgccacgactacgagatgagcgcg

SEQ ID NO: 23601 - DNA, 355 bp, Setaria italica
  Peptide Sequence Number=SeqID_89575
atccaggtggtgccgctgggcccgatggtgttcgtggcgagctacttccggggcccgtccatggacatggggctccggtacctcgagtaccagatcgcgccggaggagagcacgctgctcgacaagtacccgcgcgaccaccccgtgatcgccgaccccgggagtatcaaggccaaggactgggtgtcgttcatggggtgtacctgttcgagcaggacgtgcgcctggacatgaagcggttccgccctgtcctcaagaaggcactctcgcgccttagagccaagcccaagagtaactaatcatctaattgttgtttttctattctattctactagttattaattcttcttctatt

SEQ ID NO: 23602 - DNA, 934 bp, Setaria italica
  Peptide Sequence Number=SeqID_89576
ggttgcctaaagttcccctgctttgctcttttttattgaagatgggcagcatttaccatcagttctacaattttataagaatgagacaggaactgatagcaaagagatatttgcagctgctttgccatcactgcttgatgaaattgtatgttttgctgtggaatctgatcagagtgagactgatataaggacagcaaaaatttcaccaacaattcagaatattgctagaattctgacaggcaatgaaactcttcctgagtttttgaagaatgattttgttcgccttctcaatagcattgacaagaagatgcttcgttctgatgacatgaagcttcaaaaacaagctctccaacgaataaggaaattggttgagatgatgggcccttatttgagtacacatacgccaaagattatggttctgttgatttttgccattgataaggaaggccttcagatggatggtcttgatgtcttacattttttcgtaaagcagttagctgaagtatcaccaaatagtatcaagtatgttatgtcccaagttgtagctgctttcattccatctctggaaaggtacaaaggatgtcctgctcacctgagtaaaactgttgaaatccttgaagaacttgttgtgaaaaacaacagcttgctaaagcaacatatacgtgaactaccactgttgcctagtctaccatctttatcagaggtaaacaaggtaatacaggaagctagagggttaatgacactgcaggatcatctgaaggattctgtcaatggtcttaaccatgaaagcttaaatgtgaggtacatggtagcttgtgagctgagtaaattatttaatgccagaagggaggatatgactgctctcatcattggtgaagatattgctgatttggatgtaataagcttctttaattatggtctttaacttaaagga

SEQ ID NO: 23603 - DNA, 404 bp, Setaria italica
  Peptide Sequence Number=SeqID_89577
ctttggtaaggggagtgttattaggatggcgatcatgttccacaagacaatccatgatggactgcttcaagctgttgggtacaccctctgttcttatcgccaagaagagtggggaaaacaatggtaggtggggtggccaacggaggttcaacatggaaaattgctttaccctaaggggggcatggctcatcctgctccgtagccacaggagacggcggaaggctccaccaaaggtggggctccgaggccagtcgtatttggccctgaagctgcatagcactgagaccatgaaccaattggagagtaggaaaacaacgaactcccatatctcctcgtagaagaagatgatgaatagaaaggcagttatagaaaggtctactagggaaaagaaggctggggcctta

SEQ ID NO: 23604 - DNA, 316 bp, Setaria italica
  Peptide Sequence Number=SeqID_89578
tttttttagtttttataattagttcacatttaattcttttaatttgtatccaaacatccgatgtgacctgaactaaattttagtccatggatccaaacaaatttgcgcagaataaaatccactcacgtaaaacatgcacattttattcgcagaaaaaaaggcttgcgcgagcatatttcactgggcacatcgatcctctcgcaggggcgtaatcttctccttccccctgatcccatcactgctgcagcagcagtgatgggatcaggggaaggagaagattacgcccctgcgagaggatcgatgtgcccagtgaaat

SEQ ID NO: 23605 - DNA, 358 bp, Setaria italica
  Peptide Sequence Number=SeqID_89579
accctaaccttacccctagcaatttgctcctgttaccagtaaccgcttgtgcacgttatcttctcttcggttccattgcgctgcgcgattaactcttattctgaacctcgcagtataatttatctcgagctgctgcttaggctgccaagttgtctgctccagtaaagttagtttatgtaggaaatgcagtgcttggagtagacaagaactagtttcagtattttacagattggttgtccaaacgaaaaatatgctgaaggagttgagcggttcagttagcgacttacagtaatctcaatggtcaccacacgtttagtagaatatggctggtgttggggaaacatgaatgattttcttc

SEQ ID NO: 23606 - DNA, 515 bp, Setaria italica
  Peptide Sequence Number=SeqID_89580
ttacaatacaagcatcgccaccgccgaaggtagcatagcatcctctcgcggattccttcgttccgtgtcccggtggctccttaggagttagggtccggtaaaatttctaatcttggggtgcgccgtctgcgcagggaagaaggcgggaatgacggtcgccgagccggttgttgcctgcatcgccgatttggcatacaagagcgcaggttcttcccccagaaccctaccttcccctgcatttgctcctgttaccagtaaccgcttgtgcacgttatcttctcttcggttccattgcgctgcgcgattaactcttattctgaacctcgcagtataatttatctcgagctgctgcttaggctgccaagttgtagtaatctcaatggtcaccacacgtttagtagaatatggctggtgttgggtaaacttgaattgtaattgtatttcttctagatggctgtaactttacattattctcatggtttgcaacaaaggaggaggatgctccacaatttgag

SEQ ID NO: 23607 - DNA, 263 bp, Setaria italica
  Peptide Sequence Number=SeqID_89581
cgcccgctggcacgctgcgcttggcctcgttgagccacttcttcatcccctgcacgaactcttcctcctccacgacgtcgttgcgggacgtgtcaaagtcgtccatgaccttgttgaccgcatccatcttgtcaaagtcaagctcctcgaagttaatcccgacaatgagtgcgtgcagctccgatcgagacagggtgcggctctcgtccatgtctattttgtggaacagcctgcgtgtcagcacaaaacaaggttcatgacat

SEQ ID NO: 23608 - DNA, 353 bp, Setaria italica
  Peptide Sequence Number=SeqID_89582
ggaaggtggtccggaagctggtgaagagggccatgacgacgcagacgaccaggatgatgagcacctccgacgagaagtcccatgtcaggttccggaagtagatgagcgccaggaacacgcccaggcacagcgtgttgttcatcgtcacgccgccgtacacctcggagaaggtgagggagcaggtccgctgcttcttcctgctggcgaagatgatggcggagacggcctcgctggagttggtggccagcgggagggcgatgaacgagatgaagaaggacgggatgtgggtggcgtttgccgaccgctcgtggacaccgtccacaacttctccaacgccacccacatcccgtcct

SEQ ID NO: 23609 - DNA, 2079 bp, Setaria italica
  Peptide Sequence Number=SeqID_89583
actacggacagtttgcgatcttggcgatttagaacctgaggcacatttacataattgatttaaagcggcactgttttgtttagctcaagagcagaatgcagcggttgttagaatttgacggaagtacgtggtttggatacacaaggaaagatagaaagaagagcgtgattacatcaacacgagaaacagagtctgcacacatcccgcagcagtcaaaatcacaagatcaaaccgactggtggccgccaaaaacaggcgttcgcttgggagccaatgagcctatgaccagccgaagacgtagtcgaggatgtagacgatgacgagcgagagagggtagagcacgtaggcgacgaggcaggtccagagagggaaggtggtccggaagctggtgaagagggccatgacgacgcagacgaccaggatgatgagcacctccgacgagaagtcccatgtcaggttccggaagtagatgagcgccaggaacacgcccaggcacagcgtgttgttcatcgtcacgccgccgtacacctcggagaaggtgagggagcaggtccgctgcttcttcctgctggcgaagatgatggcggagacggcctcgctggagttggtggccagcgggagggcgatgaacgagatgaagaaggacgggatgtgggtggcgttggagaagttgtggacggtgtccacgagcgggtcggcaaacgccgcagcgatggcagcgcccaggaggaggagcgccacggccttggtgatgcaccacccggggttctccacgctctccaccgcttcgtcggacctgtcgatcagctggtcgtgctcctgcctagtcctctcgtggaagtcgttgataaacttgtgggagaaggcgccgcccgctggcacgctgcgcttggcctcgttgagccacttcttcatcccctgcacgaactcttcctcctccacgacgtcgttgcgggacgtgtcaaagtcgtccatgaccttgttgaccgcatccatcttgtcaaagtcaagctcctcgaagttaatcccgacaatgagtgcgtgcagctccgatcgagacagggtgcggctctcgtccatgtctattttgtggaacagctttctgatgacatcttcattgggtgtgccgtcctcgttgagcagccgaccgagtgactgcatttgggcgtgcctcaggataccggagatcacatgtttgtgcttggcgtacgcaagcttcctcctttgaatccatggctggaaaacctgatacacgcagtaggaaagcacaagcaagaacgacacgataagggccaacaagacagccaggcgctgcccatggtgggtcttcaacatcttggggaactgagcaatgacaaaggggataacagatagccccatgatccgtgctgcgtagctggtctgcacatcagttgtaatacaagtgccagtcaagctgaagcccttggtgttcgttaaatcaactgcctcaccgtttggcccggcgtcacacttgccaacaacgacacaggttccccaaagcagggtgaggaggaagacagtggaaccagcaagcagccccattccaatcaggacctgactttgagccgtctccttactcccggagaggccagatactagcacgaggagcgcgtcggggagggcgccgaggatagggaggaggagtccgccgacgagccccggccccatgatctcgagcagcagctcgctccccgaggacaggtacgtggccgccttgaacatgaggaagccgtagacgaggatgaggaagaggttcccgagcacggtggtggtgcaggggaggaatccgtacgactgctcgcacttcccctccaccgccgccgccacggccggcgacgcgaggcggatcaccgaggcgaggaggggcgccgacggggcagcgccgccgtcggagatgaggcggccgtacgcggcgcagcccaggagggagataaggagcgggaccagcgggaacgcgcggcggtgctgccggcggagagccgccattgccgcggccgcggtggtggtggtgtgcgctggggggccgggggcgtgtgactggtgggctgggctccttct

SEQ ID NO: 23610 - DNA, 332 bp, Setaria italica
  Peptide Sequence Number=SeqID_89584
ggcgatctcagaggcgatggttggcactatcttgccagagtacgaatcaccggcgatatatagaggatttgacaagaactctggatgctcttcaaaccactgcaaaattaattacagtagaacaatgcatacatgcttatcaattaaggtttctgatcattgaaaaataaattaattgcaagagataaccactttctgaggaagatgagaatttggttgacagctttggtatcacttgacacgtatcctcggtccgtgtcggaatatgaaaatccagcaccaactggagaatcaagaaaaatgacattgctcaccttggtccatgaatcttg

SEQ ID NO: 23611 - DNA, 425 bp, Setaria italica
  Peptide Sequence Number=SeqID_89585
taaatgaggtaagcagtacatgcccgcatggtacacctaagatcagtacaaattcagatttctggcgtgggaaacattgtgtgcagttctgtaaccttaggcccaataccttttctcgaaaactgtttaggcccaatacctttttctgaaaactgtttaggcccaataccttaccattgaaaaagttggattcggttattcaggcaactgtagtgaaacctgagcacagatggatggcaacagatgacttcacatgatctgatgacatcatcacaggcaatatccagtaggatcatcgcttgccaaagaagtgatctatctgagattggccacctttgcttccaaccttctgcgcctttggccacagtgcttgagacttgctatcttggaatcggccagggtccctcagaattttgaccttccct

SEQ ID NO: 23612 - DNA, 1073 bp, Setaria italica
  misc_feature (1)..(65): n is a, c, g, or t
  Peptide Sequence Number=SeqID_89586
nnnnnnnnnnnnnnnnnnnnnnnnnnnnnnnnnnnnnnnnnnnnnnnnnnnnnnnnnnnnnnnnnttttttttttttttttttgtgctccaaatttaataaatcttcaaattccaaaaagtctcctcaaacttgacatgccattgcccaccccgtgctccccacctcacttcactccaatagaaaactatacaaaaacattccacggatttcatttcccgagcgaggaaaccaaatccatggaggcccaacactacgtactatagatgatggatgatggatccatcttccatccatccatcggcggcgcgtcctcggacgacgaagacgcgagctggccaccgctcgctactggtcgagcgcgttgggtccggagcagtagctgagcacggggttccacacccactgcacgaggaacctgcgcccgccggcgccgttcacgttgtacgctgcccccgaccgcgcgtccgtcagcagctgccccgtgtacgcgccgccgccgccggtcccgtagatcccctcgcagaggtccgcgatctccgtcgggaacgacgggtccgtcccggcgtaccacgcgttggccagcgggttggacgccagctccgccagctcgtgcgcgatgacgctgaccatcccgtcgacgccgacgtcggcgttgggcggcgactcgggcctccggccgtggacgtacgccgggatggcgaacgggtacgcgcacacctccgggcaccgccgcgccgagttcccgacccacgcgtaggggagcgtgtaacccaccacggacgggaaggtgaagtagtggaagccgcagacctgcccgcagaagtcctccaccaccacctccggcgaggtgaggacgaggtacacaccgccggagtccacggggaggggccgggtgcgcgcgcccaccgcgtcgcggaccaccgcctggatgtccatcctcgacagccgcgcaccgcgggacatgcgcgcgtccgacttctccgcacccagcgacaccgccgccgacacgttggcgtcggtctggtccgtgtacagccggaccgtgcgccaccacgcggccacggagggccg

SEQ ID NO: 23613 - DNA, 416 bp, Setaria italica
  Peptide Sequence Number=SeqID_89587
tcgatgcggctgctgtcgctggtgctcgcctcggcgtcgccgtcgccgtctgcgctcgtgaaccggccgagcctgacggggagcacgacgctgctcgcggcggcctcgtctgacgcctgttgcttgtgctcctcagcgtccggcccggcggacggcgcgtccgcggcggcaaggtggtgcgccgagagcttggtgcggcagagcgggcaggtggcgctggagcggagccagacgtcgatgcaggcgacgtggaacgcgtggccgcaggccgggagcaggcggaggcggtcgtggtcggcgaactcggagaggcagacggcgcagtcgaacggccgggccgccttctccttccccttcctgatggccgcggcggcggcggatgcggcgccggacagctcggcgtacgcgaactccgg

SEQ ID NO: 23614 - DNA, 364 bp, Setaria italica
  Peptide Sequence Number=SeqID_89588
aggcgggaccgggaccgggaccgtggccgatgcgtgggacgatgacggtggggagtgggtcggcgcagcaggagacggagaaggagacggcgagagagatggtgaaggccagcttcagagggaggggaggaggccggaacagccggtgaagcatcctctgtccctcagcagcttctcctctgtccctgtgctgcagagttcactacgattttgaagcagattttcaatggagattggcgagctgcgaaggatgattggatcgagaggacaatcagtgcccagacgagctgcttgtcttgaacacgatgaacatgctgtgcgcttgctttgcgcctggtgggtggatgatttgcttgtgctgtcg

SEQ ID NO: 23615 - DNA, 272 bp, Setaria italica
  misc_feature (1)..(21): n is a, c, g, or t
  Peptide Sequence Number=SeqID_89589
nnnnnnnnnnnnnnnnnnnnngtttttcatgtatatcattatagaaacgaaaaaggttacacctgcagggctgctgcagctaattgtacaatttacatcaaccccgaagtggaacggcaaagctgcttccgtggtgtctctggctgctatctagagttgtcctttaaagcatctggcgtggaggtaccatcagaattccatcctcctcctcctcctctcccactcggtgcttgcccgaggccccggagaagccttatcgcctcctcctcctc

SEQ ID NO: 23616 - DNA, 475 bp, Setaria italica
  Peptide Sequence Number=SeqID_89590
gcagctaattgtacaatttacatcaaccccgaagtggaacggcaaagctgcttccgtggtgtctctggctgctatctagagttgtcctttaaagcatctggcgtggaggtaccatcagaattccttgcctccgagttgacagtatcgtgacccagattagctcaacacagtcgacccaaagtagcctttgctcaacaggaatcacaccatatgtaaccaagtgtgcaaaaggccacaatttccacccagcggtaagcatgggccagaacgtggacttgagctcgctgtagatagtggtaggtgattccaaccgaaggaaacccaagaccacaaagtagatgctgttccaaattgcagaccagatcgtttgatcgaatgcaacctttgcagggacaacccaccaatccttgaatgggaacagtgcctgtcaacataagaaaattatttactgcctgcatattagctctcctgtttt

SEQ ID NO: 23617 - DNA, 1619 bp, Setaria italica
  Peptide Sequence Number=SeqID_89591
ctatcccttgactgaacatttacattgcaaacaacgttttggataacacacactgaacctacctacatttgccaccgaacctactacttaatcatcatgcgaataacaacacatacacaggcaaacattgttgacagtagcaccactctttctttctcaaatttcttgactttatcccgaagtgcaacgacttggtcatccttctcctctgtgaagaagaatctgctccaactgtgctctctgaacaagaatttggtcgacctatgcccttgtgtgtgaagaagaatctgctccaactgtgctctctgaacaagaatttggtcgacctatgcccttgtgtgtgaaagaagaatctgctccaactgtgctctctgaacaagaatttggtcgacctatgcccttgtgtctgaaactgaagctctcaattttgcattatccttagttaaagcccaaaccttatctcttaaatcgatcaataattgctttacaaaagggatggtgtcatcgccatcatgccaccgccaaaaattgcatcccccaaaaattactttctgattttctacggcacatgctgcacagtttgtgtttcatgtatatcattatagaaaacgaaaaaggttacacctgcagggctgctgcagctaattgtacaatttacatcaaccccgaagtggaacggcaaagctgcttccgtggtgtctctggctgctatctagagttgtcctttaaagcatctggcgtggaggtaccatcagaattccttgcctccgacttctcatttgagtaagttgacagtatcgtgacccagattagctcaacacagtcgacccaaagtagcctttgctcaacaggaatcacaccatatgtaaccaagtgtgcaaaaggccacaatttccacccagcggtaagcatgggccagaacgtggacttgagctcgctgtagatagtggtaggtgattccaaccgaaggaaacccaagaccacaaagtagatgctgttccaaattgcagaccagatcgtttgatcgaatgcaacctttgcagggacaacccaccaatccttgaatgggaacagtgcctcacagacatgatagtagtaatgcgaaagtgacccatgaagagtgaacccaacaaggccggaccgaaacatcctagcacggtcgaaatcaaagatcggtttgccttcatagcactgcgcgatccaatcaccgagggagtagactaccccactgatcatcatcttggccagaaccgggtttgccttgagtgcctcctcgtatgccgaccagttgtgctccggcatgtaccgaaggatctcaaagatcgtccacccatgccagtagtcctggtcgacggtgaggagcttggtgagcgcgtaggtgctggccccgagcacgatggccgtgttgatggcccgatccagcgccttgttcccgtccccgccgccggaggcccctgagcccgccccgccgccgccgccggcgaagccccccgcccacgtcgccctggaaggcgagcccgccgatgtcgagctggctcccccctagcggctcgtcccgcggctcctcgagcctccccggcaccgcctcgcccccgggccccgggagcacgtccgcctcg

SEQ ID NO: 23618 - DNA, 541 bp, Setaria italica
  Peptide Sequence Number=SeqID_89592
aattatgccaacatttacgtagcacgagtttgtacatgttccaacacgtacaccggtgtccggtgatgcgatctatctatacaacgaacgagctccgcatcctcgccggcgtcgaggcggcgcgtcgtgttggcgcatcggcggtcacctcctgctgctccggctcttcgcgagcgggtccacgccgccgacgacccacgtctccttggcgatgtcaagtgacaacttcaggaagccgggcgccgagctcatgaacaccagctcctccctgtcctctgtttcaccgtctcccggcgcggcgtccgcggtcggcttctcttgctcgacatcgccggccagcagcccaccggtctctcccctcgacatggacagccccttcgccggcgcggagcggcaccgcatgagcagcagggcgttgggcggcggcgcggagggcgcgttcgcgctctcgtccgtctgcccctcgtcgtcgtcttcttggtcgccgccctcgtggtccccggcgcagtcttgctccaggggctcctggccgccttccagc

SEQ ID NO: 23619 - DNA, 343 bp, Setaria italica
  Peptide Sequence Number=SeqID_89593
aaggcaggaaaacggagctgtggcctgctaacccgccatcatttagaggcacgcttcacaagtactccatggagatgacgggtcttgcaaggcggctgctcagattcatggcgattgaccttggcgtcagccaagaggccctccttgacgccttcttcagtggggacgccgagaaggggcagagcatggggatgcaccactaccctccgtgccgccacccggagaaggtgctgggcatcccaccgcacaccgacgggctgggcctgacggtgctgctgcacgccgacgacacgccgggcctcctgatcaagaggggcggcaggtggttccccgtgcggccgct

SEQ ID NO: 23620 - DNA, 631 bp, Setaria italica
  Peptide Sequence Number=SeqID_89594
gctaacccacccaccctcaggcacgcgctcgacaggtactccgtggagatgacggaccttgcaaggcgcgtgctgggtttcatggcggccgacctcggggtcagtcgggacgcgctcctaggcgccttcttcagccgggacgaccacgacgacgacaccctgaagcccaagatgcagagcgtggcgatgcaccactaccctccgtgccaccacgtggacaaggtgctgggcatcgccccgcacaccgacacgctgggcctgaccttcctgctgcacgctgacgacacgccgggcctgcagatcaagaggggcggcaggtggttccccgtgcggccgctaccgggcgccttcgtcgtcaacgtcggcgacatcctcaatgttctcaccaacggcgcgtacgccagcgtcgagcacagggtggtcccggacgctgagaggggccggaccaccgtcgtggtgttccaggatgcttccgttgatgggatggtgaagccgttcccggagctcctcgggggagatgaggcgcaggcgcgctataattccatcgggaagcttgagttcaccgagggccacttcagagcactgggcgaaggcacacggttcctagagagcctgaagaagtagaatgctc

SEQ ID NO: 23621 - DNA, 570 bp, Setaria italica
  Peptide Sequence Number=SeqID_89595
ggccatggagtaccggccctccgacagcagcggaactgatgatgatcttccaccatcatatccaaatagtaggagtaacagaggcagtggacgtgtcagtggtaatgggagagctatagttcctgccagttcatatgctagggcaccgacagatatggaagcacaaattcaacaacttgagcaagaagcatattgctcagttcttcgtgcattcaaagcccaatctgacgccattacatgggagaaggaaggtctcataactgaacttaggaaggagctaagggtatctgacaaagcacacagggagctattaaacagggtcaacaatgataatattatctgtagcataagggaatggagatcaacaggagggcttcaggcaagcttgtccaataatccgcagccaatacatgaccctgttcccagtcctaccacctctggccgtaagaggcaaaagacatcccaatctgttcctgctttacctgcaccgcctccagcgatgcattcacagcaactggctacaccaacacaaccatcatcttcaactgctaggaaagcagtccctccagg

SEQ ID NO: 23622 - DNA, 659 bp, Setaria italica
  Peptide Sequence Number=SeqID_89596
cacccgttaattggtcgtaaagtgatgattcggtggcctgaagataacagcttctatgaagcagttatatctgattataatgcagatacggtgcgtttttaccacaccagggtagttgctttcaattcaagccagctctttcttagggattttaattgcagggcctttatgcgctggtttatgacatgaatacagcaaacgaaacctgggagtgggttgatcttaaagaggtacatggacattatttataatgcgaacactgtcacttggcatttttcttatcttcctttttatattcttttgactcttttagtgtgataccggaagttggcagttccagaaaatcatgtttttagatgttagtgacaccagtttgtgaacttgaagataggttttgctgtgaataattaccaagttgaccaaaaaaggcatatccatatatgccagcatggacttgtgctgatgaatgataaaattgatatgttaagagaattgcacaagctggatagtagaaaaaaattactgttagcatattcttctgtgatgtgctctcaattgtgtaatattgttgtttgaaaaagttgtagaataatatactagactgatgcagatgcagtagccttgtaataacagatttttattggttactgcaaaggttt

SEQ ID NO: 23623 - DNA, 1720 bp, Setaria italica
  misc_feature (1691)..(1720): n is a, c, g, or t
  Peptide Sequence Number=SeqID_89597
atgaactggcaggaactatagcatatgaactggcaggaactatctgtcggtgccctagcatatgaactggcaggaactatagctctcccattaccactgacacgtccactgctagggcaccgacagatatggaagcacaaattcaacaacttgagcaagaagcatattgctcagttcttcgtgcattcaaagcccaatctgacgccattacatgggagaaggaaggtctcataactgaacttaggaaggagctaagggtatctgacaaagcacacagggagctattaaacagggtcaacaatgataataggcttatctgtagcattctaaattccttcctttgtatttaagggaatggagatcaacaggagggcttcaggcaagcttgtccaataatccgcagccaatacatgaccctgttcccagtcctaccacctctggccgtaagaggcaaaagacatcccaatctgttcctgctttacctgcaccgcctccagcgatgcattcacagcaactggctacaccaacacaaccatcatcttcaactgctaggaaagcagtccctccaggccctaaaggaaaaaactgaaaccaggtcataaggtaccaggtggctctgcatccaagcccatgtcatctgcagcgggtcctagtggaagaggaccgcacatgaatagaaattttccaggtgctgctgaagctcaagcacagaatgttcacccgttaattggtcgtaaagtgatgattcggtggcctgaagataacagcttctatgaagcagttatatctgattataatgcagatacgggcctttatgcgctggtttatgacatgaatacagcaaacgaaacctgggagtgggttgatcttaaagagatgggacctgaagacataagatggaaagaggatgaaatatctgggatagacttgaagatgtatttgcaaggccgaggtcccccaactagtgggggtaggaagccaggtcgcggtgggcccatgccaggtccaggaagaggaagaggattccaaaagaacatgtctaagaaagattttccacctccacaaaatggtgttggcaagagaagttccgatgacattgatatccttcacaccgagagcctaataaaagaggtggagaaagtttttagcgtgaataatcctgatccccaggaagtagagaaggcaaagaaagcactgaaggagcaagaacagtcactgattgacgcgatagcgaggcttgctgaggcatcagatggtgaaagcgatgggcacaaccatgggcgaaggaatgcattgtatgctggtaaccagcatcaagcaaactacgttgatgcgatgcctgttgatggtgaccaagctgatgccatgtaaacacagcagggacatgtatacacaacataagaaaactgcctgttgtacaatccattgctaatatttgtttcagatgtaggtggctgtaggtttgtaccttctgtttggagaatcttgaatttttgggtagactgtatttcagaatgctgaccatgtaaagcttagatgtggcaccaaggttttttcctttttgttggcgtgatctcagctcctatatgcattaaaggaaacagatcacgctttgtaaaaatactatgtttttcctttcacatttcgaactgcagcaagcattcgtcacgcacaaaacaaaaaaaaaaaannnnnnnnnnnnnnnnnnnnnnnnnnnnnn

SEQ ID NO: 23624 - DNA, 1974 bp, Setaria italica
  misc_feature (1966)..(1974): n is a, c, g, or t
  Peptide Sequence Number=SeqID_89598
aaggagtctgcttccgtctgctggcgcgtcttgcttctttcttggctgctcctgctcgcgttcttgggtgcggtggaagagcggtgatgggttttttcagcaccgtgctgggtttctttgggtttggagtgggagtgaccctggggctcgggattgggtactacctcttcatctactaccaaccgaccgatgtgaagcaccctgtaatcacggcacttgttgaacttgatacaaaatcattggaaaacatgcttcctgagattcctctttggataaaaaatccagacttcgatcggattgattggctgaacaagttcattgagactatgtggtcctatcttgacaaggcaatatgtaaaatggcaaaggaaatcgccaagccaattattgctgagaacactgcaaagtataagattgattcagttgaatttgagacattaacattaggctcattgccgccaacatttcaagggatgaaggtctacaccactgacgaacaagaacttataatggaaccttcagtaaagtgggctgggaatcctaatatcactgttgtagtcaaagcatatgggctaaaagcaacggcacaggtaattgatttgcaagtatttgctctcccacgcataaccttgaggccactggttcctagctttccatgttttgctaaaatactcgtttcactcatggagaaaccccatgttgactttggtctgaaactcttaggagcagatctgatggcaattcctggcctttatggatttgttcaggaaactatcaagacccaagtagcaaatatgtacttgtggcccaaagtactcgaggtgcaaatcatggatcctgcaaaagcacaaaagaagcctgtgggaattctctttgttaatgtagtacaggctgttaaactcaccaagaaagatcttctgggcaaatcagatccatatgtgaagttaaagctaactgaggacaaacttccatcaaagaaaacatcagtgaagcgaagcaacctgaaccctgaatggaacgaggaattcaaaatagttgttaaagacccagaatctcaagctctggagcttactgtttatgattgggagcaggttgggaagcatgacaggattggaatgaatgttatcccactgaaagacattactccagatgagacaaaatctattacacttaacctgctcaagagcatggatgcaaatgacccagcaaatgagaagttccggggacagctcactgttgatctaacgtataagccattcaaggatggtgattctgatgttgagacgagtgatgagtctggtgtcattgaaaaggctcctgatggcatgccggaaggtggtggtttgttggtagttattgtccatgaagcacaggatgttgaaggaaagcaccacaccaatccatatgtgcgaattttgttcaaaggcgaagaaagaaagacaaagcatatcaagaagaatagagatccacgatgggaacaagaatttgagttcgtttgtgaggaaccacctataaatgataaaatgcaagttgaagtcattagcaggccaccaagtcttggcatacactcgaaggaaagtcttggctacgttgtcattagccttggtgatgttataaacaacacgaggattaatgagaagtaccatctaattgactcgaaaaatggccgcattcagttggaattgcaatggagaacatcctaaaagacctcacgggctgaagccgtgaacctgtaaagtttgtctttctatttgaagctttccacacatgtacctatcagcatttggggacatcttttttagttatttgtaactgcttatatcataattccaagttgttctggacatcatgttttctccagttttagtagatatggttctgaacggaaagagcttgtcgtgattaatcacagaattcatattatgcaaaattatttttttagttttctttagtaaaaaaaaaaaannnnnnnnn

SEQ ID NO: 23625 - DNA, 404 bp, Setaria italica
  Peptide Sequence Number=SeqID_89599
tttttttttttatcataaaataaataaaacaatcacgcgtcgactgaagtttttcccttcttcttggagagcaagcacctcgtcgatgaccctgttcaggtttgtttccgctggcgcacccggcagcgttaccttcacggccttctccttccattcctccgctcgccggcgcatctccttccccttctcccttccatggcctcctttatgatcaccgccacctcgtcgcgctgcacctcgccaccgatctccatcccgacgccccactcggtgcgcttgtaccggcagttggtctgctgctcggcgaagaaaggccagctcagcatgggcacgccggcgcagaggctctccagtgtcgagttccacccggagtgggtcaggaacactcccaccgcctcgtgctg

SEQ ID NO: 23626 - DNA, 1365 bp, Setaria italica
  Peptide Sequence Number=SeqID_89600
ttttttgaaacaaatctcaactttcttggcattgatattttgcaattccagaagccatgttattgtttacatgatggcgcaaggatcctcatcacacttgatgtcatccatctatttattctaccggtttcatacttatacaaagcatgctacataaactcagaacaataatcaacatgagaaattttcatagacgatagcaatttgtcggaagaaaaaaaaagttggagcaatcatcatatcactgcaaaagataaagggtttgccaggagattggtggataatcctgcattacacaattaagtccaccaccaccagtgctagcggttgataggggtatgcatccgctcaacgatcctattcacagcatctcgagtcattactagggtgtcatgctggaggatgctgtaaacattgaggccaatggaaggaagcacattcacataatggagattttgagtagccagctttaactttttatcgatatcacctccatcaactaataacaccttctttgtgttgtccatctggcttatatagttcacaatgttctttgtcttgtggctaggaacttccaagtcctcaaatacaaacagctacagaagaaaccatacaacttttaatagccaaatcagaaaactcaagaaacacaaatattaagccgtaacgtgcagatcaaaacgggcacaagtgaactgtaatgtgccaatattaaacctaaatgtttaacattatatttatgtacaagaaatgtttaacatcacccaagattacatattgcaaaggaataaattcagttagttgatgaatattaaaaaaactcaaccaacctagaggagctaggtggctttttaaattaagtcaaatttgagttgggaaggattcaaacctaggtggtgggatacaccgcctccagatgaacgttccttccttcagcagtccgagcagataggttatcttcagccccagacgccgaaccttcttttgcaacttgattgcatggcttcgtggtttaggcccatgcatggttgcaccaccacggaactgagggccacgcagtgttccatgacgtgctcttccagttcccttttgcttgtaaggctttcttcctgtcccacttacttcgctgatagtttttgttgaatgtgttccctgttgtcgtttagcaagttgccaccgtacaactctgtgaacaatatccttcctaattggaacatcaaaaacatcaccatccaaaaccatgtagccaagggctacatggtggaagtttgttactctagctactagatcttcatattggccgatcgttctcttaggtgtcccaacagtttggctagacaacaactctggaggaattagaacttc

SEQ ID NO: 23627 - DNA, 233 bp, Setaria italica
  Peptide Sequence Number=SeqID_89601
gaggccctcgttgtcgtgcccgcacccgatggcgacgcgcggcacccgcgcgccgcgggcgaaggagagcgtctcggtggccatcgtcccccgcggtgattgacccgtcgccgtaggcgacctggtagaggcacgacccgcggcgcttgttgcagccgccggagtcgaggcggcggcagagcggcgcggcgcgaggggacggtggcgtaggagcgggagcggcgcgggtcgaa

SEQ ID NO: 23628 - DNA, 712 bp, Setaria italica
  Peptide Sequence Number=SeqID_89602
cattggaaagttagtaaagaattacaaggaactgacttctggaagctgagaagggcctacacctttggtgtacaagaatatgttgaagctgcaacgctgtgtagattttgcaagactggcactctattaactcttgctgaaatcaatgattctttactagcactaagtgataaatctgttgagcccttacagataaatgtgcttgactatcttttaggggttgctgatttgtcaggagagctaatgaggcttgcgataggccgaatatctgatggggaggtggaatatgcaaaaaagatatgtgcatttgtacgtgacatttacagggagctgacccttgtggtgcctctaatggatgacaataatgagatgaagaagaaaatggaggttatgctgcaaagtgttgtgaaaatcgagaatgcttgcttcagtgttcatgtgagaggttcagagtacattcctctacttggatcatctgcagatccagattactccttttttggtgcctccgactttgaccaatgaaggctttgaagcaagagcgcctaactgaatgttaaatgggtaactttggaagaaaatagttgcgtgaaggctactttaggttccatcctgtttagtgattttatcacctgtttatgttgcacatctcggagtctgtaaatcttctacctggtaatcatgagaatcatgttgcaagactgtcttttag

SEQ ID NO: 23629 - DNA, 285 bp, Setaria italica
  Peptide Sequence Number=SeqID_89603
acaaagttacaaatgcacaatttgacaagtgttgtccctgtcccagtactacaactacaccgccacctccattcactactagaaatatgagcattcgtccttgacattagtaccgaacagcttttcgtccgatactaacgcgcgaaattagtacaaattttcgatccttggaggctttatagtaccggacaataacactagtacccgtggagtactatttagtaccagtcggtaacaccgaccggtactaaatgatgcatttactatcgggcattttggacggta

SEQ ID NO: 23630 - DNA, 1090 bp, Setaria italica
  Peptide Sequence Number=SeqID_89604
cgccaggctaccgctccgtgcagccgggctccatcagcctccccgcgtcgcccagcggcttcggcgtccccgtggccatccccgtggggccgaacggcggcggtgacacggacggactccggaggcaggccatggcgaacgccgcggcgcgcggcgaggcgcagcagccgcaggaaaagcagggaggtgggagcgtccggttcgcgcaccagccggacaaggtggtgttccgatcgcagcccatcccaggcggccagcccgcgggccccggcagcgcccgggcgggccgcgctggtagcaggggtcgatgagccgggacaagcgctacgactcgttcaagaccttctccgggaagctggagcggcagctgacccacctggccggcgcggcggaggtgcgcgaggaggggaggacggcaacggcgacgacgacgacgacgccatcaccgccagccgcagcacgtccttgcccaaggtcgaccgcttcttcgcggcgctggacgggccccgagctcgacaagctcaagtcgtccgaggagctggtgctgccgtcggacaagacgtggccgttcctgctccggttcccggtgtcggcgttcggtatctgcctgggggtaagcagccaggcgatcctgtggaagacgatcgccacgtcggctcccaccatgttcctccacgtcggcaccaaggtgaacctggtgctctggtgcatctccgtggcactcatgtgcgccaccgccgccgtgtacgcgctcaagatcgccttcttcttcgaggccgtccggcgcgagtactaccacccgatcagggtgaacttcttcttcgcgccgtggatcgcgtgcctcttcttggccatcggcgtgccgccgtcggtggcgacggagctgccgcggtggctgtggtacgcgctcatggcgccggtgctgatcctggaactcaagatctacgggcagtggatgtccggcgggcagcggcggctgtccaaggtggcgaacccgtccaaccacctgtccgtggtgggcaacttcgtgggcgcgctgctgggcgcgtccatgggcctcaaggagggccccatcttcttcttctccgtg

SEQ ID NO: 23631 - DNA, 529 bp, Setaria italica
  Peptide Sequence Number=SeqID_89605
tttctttagttttacgcaatcccacaccagtacaccaatatccaactcgagcagaggcagagctgagcggcgatgctccgcctactcaccgcctactcaccgctccgcctaccctctacccgcggcagcgctcgccggaggagcgccgccgccgccgccgggaccatcacgatgcgggaccggagcaagaaccggaagccgacgcagcgcggccggtacctcagcacagaggccatccaggccgtccagtccctcaagcgcgccgccctccgtagcggctccgccgcgtccgctgccgccgcggtggagcccaagctgcggcgcctcctcaaggccgacatggtcgccgtgttccgcgagctcgccgcgcagggcgaggccctcctggccctccaggtctttgacgagattcggaaggagcattggtacaggcctaggttgctgtggtatgtagatcttgttacagtgcttgcaagcaaaggtttacagtctgaggtcgacaaagcctgttcatacctgaagagggaac

SEQ ID NO: 23632 - DNA, 422 bp, Setaria italica
  Peptide Sequence Number=SeqID_89606
gacgtagagcggctggacgtagtagaacacggagcagagggtgagcgcgagcgccattttgaacccgtgcgccaccttcctagggtcgtcggcgccgatcttccacgccgtccgggcgacgccgaagatcctgtcccgcgccgcggccgccagcgacagcagccaccgccacgccgccgcggcgaagccgaccgtcctgtgcatcggcgccgccgcccacgagaataataacgacgacaatgccggcgcgcagcacgcccgccggctgcccttggtgttctcgtgctcggcgtggagggcggccggaacggccaccctccactcggcgccgccgtcggcggcggtttgctggtgagctgctgcccctgccatgctcgtgtggtgtgtttagctgcaaatgtgtgtgtgatgctcctgttgga

SEQ ID NO: 23633 - DNA, 272 bp, Setaria italica
  Peptide Sequence Number=SeqID_89607
cgcagaagcagattgcgggcagccatagactagcttgctgagccaagtagccaactgctccgggaggaagacgaaagggagaaaggtcaacaggccactagctggctagtgtagcttgaaccaaaaggatccatggccttgggagacaactccaatcctgcctcttacatccacacggtgcagcacctgatagagcggtgcatgacgttcgggatgagcatggaggagtgcatggaggcgctggccaagcgcgccgacgtccagcccgtcgt

SEQ ID NO: 23634 - DNA, 470 bp, Setaria italica
  Peptide Sequence Number=SeqID_89608
tttatcagtgccaaagtgctgcatgctgaataatccaatcaatatgaccacagagacgatgacaaccacatctgatgagaaaaaaaaaggtagcaagaattcagtcatccacaaattgatctcagtatcatgatcgcctgtcttctctaccagaccacactaaataaaactattcagtgtaccaattaacaaaacggaaggacaaatcccaaattacagttaacaaaacagttaaacatatgaaagaacaaggtagatgcttataaaagcagaaaaaaatactaacttccaggtttcacatgtaccatttctcattttgggctcttccacttgtattcctccagtcgcagaaagaactgatatggcaggagtgaggattccatctccaacggccatacaagtaccaaaagaacaataataagaatgacattctttctgagttggtgcccctctaaccatctttgatactt

SEQ ID NO: 23635 - DNA, 746 bp, Setaria italica
  Peptide Sequence Number=SeqID_89609
agtatactagcgaaaagaaaggcagggaaacacaaccacggtaaaagcaatctgcataccaagatttgatgccatcagcaggagcaaaaggattatatttctgtacttatgtgaaaagggcttgtacaattatagatttgcctctaaaagggttccttggttctcataagaaaattcatagctagtaaagaaagacatgcaacaacttgtacctgaatagcttgtacagggaaatatgaaagatcagcaaacagtgcttctgtccctgtaatgctgagcataattcctcctaaagaagcccagctagtcctccctcgcttgaagtaccgatagacataaataggattaaacgccttgaggacagaccgatcgtatttgtagatgtttacagcgcctagtattccaatgagaatgaaccaaactaacactattggcgcaaaaagccagctaactttatcagtgccaaagtgctgcatgctgaataatccaatcaatatttccacagagacgatgacaaccacatttccaggtttcacatgtaccatttctcattttgggctcttccacttgtattcctccagtcgcagaaagaactgatatggcaggagtgaggattccatctccaacggccatacaagtaccaaaagaacaataataagaatgacattctttctgagttggtgcccctctaaccatcttttgatacttgcagcaagagatttctaatcagcatcgaacagatgaag

SEQ ID NO: 23636 - DNA, 1136 bp, Setaria italica
  Peptide Sequence Number=SeqID_89610
ttgtcttgtatttaggtaattagttgttttattcttttgtctattgtccggtctaaagtctagacttgtattcctccagtcgcagaaagaactgatatggcaggagtgaggattccatctccaacggccatacaagtaccaaaaagaacaataataagaatgacattctttctgagttggtgcccctctaaccatcttttgatacttgcagcaagagatttctcatcatatgtgtggcgactgtatgttgttaggtcttcatctgttcgatgctgattaggaatagtgtttatctttgcatgccggcaaagcagtgaataaagagcaaatgttccaccttggccattatcatttgccctcaagacaatgaagacgtatttaacaagtggaatcagagtaagggagtaaataataagcgagagtgctccaataacttgttccgtgtcttctatttcatgagggaaaatgttgtagaagacatataaaggtgatgtgcctaaatccccaaacaccacaccaaggctttggaaagctaactgtaacagcacaagtgttgggtatgtcttttccctgtacatgttcctcaatctcccggcctctgcatccatgggctgatcgagattcctttccagctcccacattgtccccctaccggtatcctcatttgttgagctagtagtctccatgggttcagacaaatcagcagcacagtcctgccgccttgaaaacttcaaaacaaaaccccaaaagattccgggattccagactcgccaagatcggaacttgagccgattcgcgcgctcaaaacatcaacccaagcagccggcgacgagcccccgaccctcccaaaagcattccaatccaaggcggagtttcaattgcagcctcaatcccctcctattcacctctgcgcagagactcgcgggcgggggcgggaccgggaagaagagaagccgccgcgctgtcctccgggaccggcacgctcacaccgaccacacgcggagaggcgctgcccgcctgcccacctcgtggcgaagaggatcggaacaagaagaagaggccgaggaattcagctcgggcagggatggtgattggatgtagggataggatagggtaaaggtattgcgttttttctt

SEQ ID NO: 23637 - DNA, 260 bp, Setaria italica
  Peptide Sequence Number=SeqID_89611
gtgatcagaaactatgctggcgatacgaaacagatccaagtgatgagggggtaaaggtgtaagctttacctgttctccggcgaagctttggctgccctctcgaagtaactggacgcgcgctcctcgtcgcggtgcacgtcccagaccagcttggcgtactccgacaggagctcgccgtcgtctgggtcggcgagaattgcgcgggagtagtactcctctgccctccggtaatcccctttcacctgaaattgaacgcgcag

SEQ ID NO: 23638 - DNA, 1357 bp, Setaria italica
  misc_feature (1)..(39): n is a, c, g, or t
  Peptide Sequence Number=SeqID_89612
nnnnnnnnnnnnnnnnnnnnnnnnnnnnnnnnnnnnnnnttttttagaaggtacgaaacggtttttcttagagtattcatatcatgttactagtactggtttaatcatatccagcagcagcagatcatcaagacatcaacatttaacaaacacagcacgacagtaaacgaagtctaatcatctcatgtctacaccgccattcgactcgaacaactgggccttctatataacagcaggctagcttcgcatcttcgcttaaggataaagaagaaatttaacagaatccgggatctgcttgctcattgttgaagctaatattattaatcaagctactgaaacgaacagagactataatgctagcttgattcagagacaggcagcgactctattcagttcaggttgttgccgaagccagagacgaatgagcaggagcaaaccccacgtagccaagcgcgccgatgccgctctcctccggcacgtcggcgtcctccgtgtcccacaggaacgcggcgtgcgcggcgaggacatggctgttctccggcgaagctttggctgccctctcgaagtaactggacgcgcgctcctcgtcgcggtgcacgtcccagaccagcttggcgtactccgacaggagctcgccgtcgtctgggtcggcgagaattgcgcgggagtagtactcctctgccctccggtaatcccctttcacctggtacaggaactgcgcgtagttcctcaagaagaggccgttgcaggggtcctcctcgatcatcttcttgtaatgcatctcgatgccggaccggtcccctccgttgccagaagtgaccaggttgctgccaccgccgccgctgccaccgaacccgccgacgccgtcgtcggcgctgaggaggcccgagccgaggcggtcgatcccgaggcccctggcgaggaacagcgggtgctcgtgcgagtacgtgctgccgccgccgacgaagccgctgaactgcccgaagctcagctcgcgctccgctgcctcgaaatcgtcgtcgtcctcctcctcctcgtcctcgtcatcggtggacgcccgccggtccgtgaaggactggatggtctcgagcggcaccggccgcggccgcggcgcgcacttgccgggcggcgggaggaggtggtggtggtcgtccgcgcggctggccagggaggacaggttaccctccgagctggtgcggcgcatgccggagccggcgccgagcgagcgctcgtggtcggatccggatccgtggccggccaggtggcaggagatggccggcgggtggtaggcggccgccggcgactcggggaagtggacggccggggaggagaccgccggcgactggggacaagaccc

SEQ ID NO: 23639 - DNA, 287 bp, Setaria italica
  Peptide Sequence Number=SeqID_89613
tctcttccaccggccactgcaccagttgcttcccttcggtgtccagccacagggctctcggaaacgactgaattccagtccatcccttggcgccgtcgtaggagcttccgtccgtctcgtcgacccacgcccagagcacgcgccggttcttgcgcgcgtcgaagaaggacttggccacgaacaggtgcccgtggtagatccggcgccagttccggacgtcgccaccccgctcgccctcctccaccggcgagaacgtgtcggcgccgtcgttgtaccacccgaccacg

SEQ ID NO: 23640 - DNA, 556 bp, Setaria italica
  Peptide Sequence Number=SeqID_89614
atatcatctgctttgacgatgaacaaactgatgaacacccaactgtccccatcacgtcaagaacaacatgttgaggaacggagacttcgaggacggtccctacatcttcccgaacacgccctggggcctgctggtgccgccgatcatcgaggacgaccactcgccgctgccggggtggatgatcatgtcggacaccaaggtcgtcaagtacgtggacgcggcgcaccacaaggtgccgcacggctcctacgccgtggagctggtcgccggcagggagtgcgcgctggtgcaggaggtgcgcaccgtgcccgggcggccgtacaggctctccttctccgtcggggacgccgccaacgggtgcggcgggtacctggccgtggtcgcgtacgcgtcgcgggcgacgctgaacgtgccgtacgaatcccacggcgccggtgggtccaagcgcgccgagctcgagttcgtggcggaccacaacctgacgcgcgtggtgttccagagcgccaaccactacatgaagccggacgcgacgctctgcggccccatcgtcgacgac

SEQ ID NO: 23641 - DNA, 218 bp, Setaria italica
  Peptide Sequence Number=SeqID_89615
gcaatgcaaatcacgacaattttctcagatacacatcggtagcaaattatagcaaaaaatgacagaaacatacgaatttgagcaggcccgatgtaaactggccctcatgcaggttgagatgcggattaccaaagaaacgaaattggaagaattcggggaccaggaatcgcaacacaccgtcggggggagggggagacgagatgtgagctgcggcggcg

SEQ ID NO: 23642 - DNA, 1030 bp, Setaria italica
  misc_feature (953)..(1030): n is a, c, g, or t
  Peptide Sequence Number=SeqID_89616
ccatgtttagcacagcttttattgaagacaatctgttggtgcttgatagggaccagattgatattctatgggacacaaaacaccgatttcctgtagacttcagagttgaggctatattttctgatatggacatgagtacaacaattggcaaatctaagttatgaagcgaggagaaagaaagccttgcaaaggttgatgatgccttcagtcatctggattggtcaagcaaaaatgatcacatcacaaatcatgaaccagaccagaagggattacacaatgaacatgatggctttgatgcaatacctctagaggaaacagaaaccagcaactcagcagctgaacatagcttgctggatagcagatcagttcagattcatcatatagaaccagcagataaccattattctacgcattctttaccagaagcagaagctcctggaccaaactctcaaggagattaactgttcaaggatacatcagcacgggatgagccagaagtggatggcactaagaatgaacccaattcagaaacacctaaagatgcagaagctggtggtgctggagctgcagaatggtctgacaacaactcagatgtgttcctgtcagattcaccctcaagcagtgctccatctagcccgccaaagttcgacgaagatatcctggaagaagctggaatggttgaaactcgatcacaaccgactgaactgaagatataacgggtgtgccaattccttctactgcaaattggggctcacctgatccaagaataaatggatgatggagataccgaaaatgtacttgaacagatacgtttacacaacactatgggaaaaagatggtcggtcagaccataagcatgtacagttcatttttctcaaacatgtatgaaagatttaagatatcttcaaattttgttgaaaatgtgcgtaccggagtagaacttcaaattaccnnnnnnnnnnnnnnnnnnnnnnnnnnnnnnnnnnnnnnnnnnnnnnnnnnnnnnnnnnnnnnnnnnnnnnnnnnnnnn

SEQ ID NO: 23643 - DNA, 815 bp, Setaria italica
  Peptide Sequence Number=SeqID_89617
ggggttggaggtgttggcggactcccatccgccgatcccatccgtggcgccgttgatgatggccacctcgccgttggggagcaggatcatgtcccccatcacccggggcgacggcatctcctcgacgacccacgacgggtttgggtcggtgatcctgagccgcccgcacgtcctcagcgcctcggggaactgccccctccccacggcggcggcggcggtgttccgcgtgccaccgcagatgagcacctcggcctccgtcgggttgggcttcagcgggagcaacaccgacgagccggcgttcgggttgttcctcaggtcgccgccgtcgccgagcgtggcgtagttccggacgattcggccgctcttgtagtcgaacaggatggcgcggttgctagcgaagatgaagaggttgccgtctacgttgaggtgcacgaacgggtacaggctgttggtctggcgcaagaataacgagaagtcgtcactagtgggaacacctgtcctggggtagaactcgtaggtggactgtcccagcccgccgacgatgatggcgcggccgtcggggagtttctggttggtggcgtaccaccgatcctcggcgagctcgacgggggccggctgctcggtccagtcgcagctcgcgtcgttgctcccgttgcacgcgggcatgaggcggatcttgcgggtgccgtccttccacccgccgttctggacgagggtgccgtcggtccggacgtggcccgacgagcaccaggtgtcggtgaagatggagagcccgcggaaggtgttggaggtgacgctgtactcgacggactgca

SEQ ID NO: 23644 - DNA, 281 bp, Setaria italica
  Peptide Sequence Number=SeqID_89618
ggggctcaaggccaaggaggccgagaggaaggcggcagccacagcggtacccaagccggatgacgcggaggcagccgcgcgcctgctgccggagaaggacggcagcggcggtgaccacaaaaacttgaatgcaatccatgatgaacattgattctgttgtactgcattttattcttctcggctatagcatgtctgaaactttgatttagttcatgatcgatttctgctgtttaagttttgcggttcttcagtacaggaaatgcaaaggataaatgattcgg

SEQ ID NO: 23645 - DNA, 541 bp, Setaria italica
  Peptide Sequence Number=SeqID_89619
tttggagtgcacgtagatcatgaacctccggaacttctgagccatgtgcagaggagaggtgtcgttgcataaggtcttcggagacaagatgtcaccgtcggcaagctcacgtttgccgaggcagtagaaatttcaggtagtcttgcggatgggcatcaaagagatcctggctctgaagagtatccgcgacaatcttgtacatcatagacatggtttgcccctgccaaaagaggatttgctgcatggcagccgtggttgggatcccttcaggccacattggtatgacaatgtacactgcaaatcgctcctttgccttgatcttgcttgcgatcttcaaggccagctcgatgggtattaaattatccgcacctgcatttttacatgaaggccagcagaatgaagacccgatgaaatactggttctcaatgtatataaaccgctgtgcagatctgatggctttcacataagcactatgtatgctcctgtcaatctttaaattctttgcacaaacaagattctgtgattctgcctcctgaacaag

SEQ ID NO: 23646 - DNA, 344 bp, Setaria italica
  Peptide Sequence Number=SeqID_89620
ctgagacttacaatgcagatgtgacagcattgagctattctgatgagcagcagaagccacaggaacatatctactcttaccatcagtcatctcttgactcaactgctttggagaacccatttgggaatcctaatgcagacattttacttactctggtagttcagcttcggcaagctgtccttgaagcagcagtagccgttaggctggtattaacacgtgccaggcagtaaaagccttgttctgttaggctaaacagggtttaagagagcatttctataggatgattaaaaggggtagctcagtatcttgtctgcatcagagtcaccaaaaggatagctttaagg

SEQ ID NO: 23647 - DNA, 307 bp, Setaria italica
  Peptide Sequence Number=SeqID_89621
ttcggcatcctcttcggcgccatcgtggcgctcgtggtgtccgccggcttccggaactcgtacccggcgccgtcgtaccaggacaaccccacggcgtcgctcgtcgtccccgaggccgactacgtgtggcgcatcatcctcatgttcggcaccatccccggcggcgctcacctactactggcggatgaagatgccggagacggcgcgctacacggcgctcatcgcgcgcaacgccaagcaggccgcggcggacatgtccaaggtgctgaacgcggagatcgtcgaggacgacgcggaccgcgccggg

SEQ ID NO: 23648 - DNA, 1942 bp, Setaria italica
  Peptide Sequence Number=SeqID_89622
aatttgctataaagcgttaagttgacctcatcgatacaaccgtttcagtatgacagcaagatctcttcaattaagcattcttcgtccattacagtgcgccttgctcccagtatggacatatatataaatgtagttacaagtctcaagtctgttgatgatatatatatatgtaacatatatgacaatatacagaaaagaaaaaaagaaaaagaaatttggaaaagtagaggagaaaacccagtaactctgcatgtgaaaattttcctgataacgacgaaaattttcttgcctgagaattatttactgagggaatggacctgagtctcaccaccttgcccaacatgctatcgaacctgacattcaaaaaccttcctttttcccgttttggacatgaacagaagaacgcaaaaattgcaagtgaatcgagcttgcttgtaacctatcaatgctcttattgtgatggtagagaaaaccaccctcgccacagcttctctacagaggccacagcttcttattcacattggagaggcctatcggaactgtgtcaaagtgacagaaaaattgtgctgagagatcactccactcagctcagaaaaatcagcgaccaccaccagggcttgaactgccaacacctgtagtagaagtctgagttcgcataatggtatctggagggaatcccccttttggcaagactgctccaacaggctcgggtgctgccactggtgatgctacttgattcatagatggatctttggttgaaatatattctggggaagacggagatggagccagagtggcaacagagaaactgagaggatagggagcaattggcatgtcagataggggtaaagcagatgaactgtagcctagtgtacccattgggtgatcatatttgcatgcaactccatatctgcaatatccattttgggcatagtatgcacaaggctgagcacccggacgaagcggaaggcagagagggctgaacatataattggacttagcagcactccaatctcgaggatgattatatttacatgtagctccaaatttgcaatctccagttctcatgtaatactgacactcaggctgccctggccgctcagggaatccatgttcttgatggttattgctcgattgtccagttgaggaagaatatggcatgtatggactgccataagcaattgtggcggaagatccatggtgtcctataccatacagtggtccggcttgaacggtttgctgcgctccacctgatgctacaggatttactgatgccggataagggctccatccttgcaatggaaccattccagatgagagcatcatcggagtgtatgagcctggcatatatgatccaggaactacaggtgaccttcccatttgccaatttgcaagaggagcatatgtatggggggagggcacagatgctgattgtaatggtggatatattccaggggtcacaggaataccaccaaattctggatgatgaaatttacatgtagaaccaaacttgcactgcccagtcttcatatagtaggagcattctttctcacccgggcgtagagggaatccattgttgtttagtataacagattgcactgatccatcttgcttaggatggtggtatttgcaattggaaccaaatttacaagtgccagtcttcaaaaaatactcgcatacgggttgaccctgtctctctggaaagtctggtgctgctccattcttggtacctccaccaaactcagtgccgccgcgatcgcgggggtggttgtagcggcagcgctccccgaagccgcaggcgcccgtgcggaggtagtagccgcagtccgcctcgcccgggcgctccggcagccgcgcgtccgcctcccgctccccgtcctccccctccccgccgccgtccagccccagcctcagcatcggcccttcgaggccggtgccggga

SEQ ID NO: 23649 - DNA, 1083 bp, Setaria italica
  Peptide Sequence Number=SeqID_89623
ccacttccacgactgcttcgtccagggctgcgacgcctccgtgctgctggacggctccgccaccggccccggcgagaagcaggcgccgcccaacctcacgctccgcccctccgccttcaaggccatcaacgacatccacgaccgcctcaccagggagtgcggaggacccgtcgtctcatgctccgacgtcctcgcgctcgccgcccgcgactccgtagtcgtgtcgggagggccgagctaccgggtgccccttggccggcgcgacagcaccagcttcgcgacgcagcaggacgtcctcggcggcctgccgccgccgaccgccaccgtcccggcgctcctcggcgtgctgtccaagatcaacctggacgccaccgacctggtggctctctccggcggccacaccatcgggctcggccactgcacctccttcgagggccgcctcttcccgcgcccggaccccaccctcaacgccaccttcgccggccacctcaggcagacctgcccggccaagggcaccgaccggaggacgccgctggacgtccgcacccccaacaccttcgacaacaagtactacgtcaacctggtgaaccgggaggggctcttcacctccgaccaggacctcttcaccaacccggcaacaaggcccgttgtcgacaagttcgcgcagaaccagaaggccttcttcgaccagttcggctcctccatgatcaagatggggcagatcaaggtgctcacggggtcgcagggccagatccgcaggaactgctccgcgcgcaaccctggcaccgctggcctgccatggtccatcctcgaggaagcagagagcctcatcttctagtctggctgctcgtgccatggacggggactcgactcgccatgggcagtgctgggagtaactagctgctaataggcttagccgtggtcggtgtgtgtaagtgggtactaatgttgacaggccgggccgggccgggccgagccccaaaagcacgtagcttggggaaataaagtgaccatggcaggaatcaaagtacggtgtacagctactactattttcatcttactactaaagatccaagacaaaaa

SEQ ID NO: 23650 - DNA, 152 bp, Setaria italica
  Peptide Sequence Number=SeqID_89624
agccattggtgaaggttgtaacaaactttttgagattggactaagcaaatgcagtggtgttacagatgaaggaatttcatctcttgtagctcgatgtagtgatctaagggcaattgatcttacatgctgcaatttcatcctgagacacgcaa

SEQ ID NO: 23651 - DNA, 314 bp, Setaria italica
  Peptide Sequence Number=SeqID_89625
tctggtcaattcgtttgctagatgataccaagatattgagcttagacaaacttagctgggattctgtgtctcctaaagttcgaccatcatcaaatggacgttgtcctaagttgcgaccgtgcaaaggtcattgtctggttccatgggggaagaatgtcattcttgtgggagggaaaagtgacccaccttatgacaagatatcagtatggaccttcaatacagaaactgagctctggtcacatatggaaaccaagggcgatgttccggtgtcgcgaagtggccatacggtgattagagcaggtcctgttcaattc

SEQ ID NO: 23652 - DNA, 466 bp, Setaria italica
  Peptide Sequence Number=SeqID_89626
ttttttacttagtacctccaccgctcacactcctcgagctcccacacttaccactagagcaaatttacgccggaggttggagctgttcttgttcgccctgctcatctttctttcttgctccgatccaagaagagggtgacaagagattgcggcggtagggtttggttaaatcgttcgaggtcttgggaaaaatctggggctgaactgaagagaggtcgcaatgccgaagatgtttgggttctctcggcgccggatgaagctggggaggttaaagggtcatctgcacgatcctttccatggctcacggagcccttcacgtcaaactaagcgttttagtcaccccaatggagaagatccagtgactacatcagtgagtggccgcgccgatgaccttgcttggcgctgctcatctgatacatttgatcttaatgggcgtgcttttgagagctcagagaattgggcggtg

SEQ ID NO: 23653 - DNA, 526 bp, Setaria italica
  Peptide Sequence Number=SeqID_89627
gctgctcgccaagaagtgccccgagcttcgcagcgttgacatctcctacctcaaggtaagcaatgaatcccttagatcactctccactctcgagaagttggaggatataacaatggtctgctgcttgtttatagacgatgatggcctacagatgctaagcgcaggcaactcactgaagagtattgatgtatcgaggtgtccccatgtgacttctgaaggcttagcttcacttatagtcagtcaaagatttatccaaaaaatcaatgctggacacagtttgcatgagatagagacttgctttctatccaagttatcaacaatatgcgagactttgactgttttaagactcgatggccttgaaatttttgcctcaaatctacagtccatcggtgacagctgcaaaaacctggttgaaattgggctcagcaaatgcaatggaattacagatgatggtatagcttcacttgtagtcaactgcagctacctaaggactatcgacgttacttgctgccatcttcttaccaat

SEQ ID NO: 23654 - DNA, 470 bp, Setaria italica
  Peptide Sequence Number=SeqID_89628
gggctcgccaaggtcgctgtcgggtgccccgggctggagaagctcagcgtcaagtggtaccgtgagatctccgacattggcatcgagctgctcgccaagaagtgccccgagcttcgcagcgttgacatctcctacctcaaggtgagcaatgaatcccttagatcactctccactctcgagaagttggaggacataacaatggtctgctgcttgttggtagacaatgatggcctactgatgctaagcgcaggcaactcgctgaagagtattgatgtatcgaggtgtccccatgtgacttctgaaggcttagcttcacttatagtcagtcaaagatttatccaaaaagtcaatgctggacacagtttgcatgttccatgggggaagaacgtcattcttgtgggagggaaagtgaccgccttatgacaagatatcagtatggaccttcaatacagaaactgagctctggtcac

SEQ ID NO: 23655 - DNA, 719 bp, Setaria italica
  Peptide Sequence Number=SeqID_89629
agttcttaagcgaaggaaaacctggtaacaaagaagaggtcctttgggtctagggttatctcctattaaatttgtttacagaaattaaatctgagttgaagagaaactagtcatgcttgatttagcaccaaaatgttttatcaaatttgttcctctgttggatgttcttcgcgcattagtttcgccttctttttctctggcaacaaatctactaaaccaaataaggttcgagttattatgactgccagccatgtatggattcattacttcgtatttttattagaattcaatttggagtctttcgctagagaacatgggatttctgagaacattcaggtgtgtttgttaaccggtgtaaattagattataaatttttttatggtttatggttaagtattcttacttttctaactaaaaattgaatatagggatgatgcaagggaacaattcaactaatgaaataaacacgtcttatttactcacgtttttcgataaggggacctttattaataaaacaatgactgaaataacatttctattgcactcatgtaagaacaaaattgagttgataaactttcaatgcataaacaatgacagacttgcaatgcatatgccggacgttaggtctggtccttgcagaatttgtaattgccaacattctgaatttttatttgaaaagaaccgtctttttttatgctactttgttaattgtccttttt

SEQ ID NO: 23656 - DNA, 513 bp, Setaria italica
  Peptide Sequence Number=SeqID_89630
ttccgtacttctagttgttgtagttagttgtaacgtctttgtcttgttagaatcctgctctttgataaatgagaagggattagagcggattgcaacttgttgctccaatcttaaggagatagacctcactgactgtggagtgaatgatgcagcattgcagcacttgggtaaatgctctgaactgcaaatattgaaattaggcctatgctcaagtatttccgacaaaggcattgcttttattagttcaaactgtggaaaactcgtggagcttgatctctaccggtgcaattcgattaccgatgatgggttggcagcattagcaaatggctgcaagtaagattaagttgctaaacttgtgctactgcaacaagattactgatagtggtttgggccacataggctctatggaggagctgacaaaccttgagctgaggtgcttggtccgcatcacaggcgtagggatctacctacaaattagacaaatacggaatagacaaagaagacctagaataa

SEQ ID NO: 23657 - DNA, 964 bp, Setaria italica
  Peptide Sequence Number=SeqID_89631
cacactgtaagttcagctttatctctaactttcttttagttagtagtattattttttttatttttatgttgtctctgcatgttagttgatattggagaatgtggggctgaatgggaggaactatgtctgtgtggtagcatagtggtagttttattagccgaaattaaaatttgtgtagtagtatcattttccgggaggtttcaggtagattttttttctaaaaatagaaatgtgagttggtgagtagtttgctacttcttatagcttgggttaactaccatgttagctctgttgttagtactagaacagaaaatgatggcagtgtggtaaattctaaagatcatgtgctcagttgcgccaattgtccttattatccagaaacaaaatcctaactaactattatccaacagtcaatttctcagctgggcttggttggatttgtttatctctttctttattaaaaaatagaaagatgcgttgagaaatagttgtgacatcatattgggttgagttaattgccatatcagcttcatgttactaatataaaatattagtttgagggttgaccgaaaaaaataaaataattttggcaattaggatttaaagtgcaatctatttttgttttgactggttgctgaattttttttgttttcagaatgcactggcccagccactgccataacttggtgacggaattgaattaatgatacctgctcacttagaggatttttttccaactatcatcctgaatctgatcgagaagaaagttgacatcagtacaaactattcagtgtgcatgcaggatgtgcgattcttcatactagagagatctctaatggacttgacacaacagcgcatgggttctgtgattgtctatggagagatgctttggtgattgatgccatgcctcttgttgtgcaagtaaatgtaataagcatgtacgttcgttttcagaattgtgtaa

SEQ ID NO: 23658 - DNA, 1129 bp, Setaria italica
  misc_feature (1)..(38): n is a, c, g, or t
  Peptide Sequence Number=SeqID_89632
nnnnnnnnnnnnnnnnnnnnnnnnnnnnnnnnnnnnnnactttttgataagggaagctttattaataaaacaatgactgaaataacatttctattgcactcatgtaagaacaaaatagagttgttaaacagaacttgcataaacaatgacagaaaaaatctagagtggcgccaagtgggtctcaaacccagctcttgatgctgccgctgtagttgcttcgcttgtcgaagtacctgtcccagatcatcacgccgccgtagttgctcgccttctgcgccaccgggagcaccgccctgcgcagcgccgccgggtccgtgtaccccgtcttagccgcctgcagcgacgccggcacgccgacgtagatcttggtgaacgggtacgccgccgcccacttcgcccactcggcggcgctgaacccggcggcgcagtccgtgtcgtcgtagaacctgacgtggatgcgctcgaagatgcccgtgtcgagcgcctccttcacgcggtcgtcggggaaccggcagtgcgccgtcgccgtcaggtgcaggagcttcccgtcgccggcgcggatgttgtgcttcgccagctcgagtgcgagggtgctgtaccgctcggcggcgccgccgtgctccaggaacatgtcgacgccgtcgagccaggcgttgccgaaggggcggcgcgtgtcgttgaggctgccgccgaagtaggtgttccagaggtggtcgaagagggcgagcgccgattggttggtggggagcgagtaggcgccgccgaagccgccgatggagatggagacggggacgccgaggaactggcaccgcttgatggcggcgcccatgccggcgagcgagtggccggagagatcgaggtggtagttgccgttgccgccgtagacgtcgaggaaggacatgatgaccatgctgtagaggccggagtcgcaggcctcgcggagggagccctcgtccctgtgccggccccagaacaccgtcacctgaccggtcttcccctgcgccgacgccggaccggcgaggaagctgatgagcacgacagagagaagcgccgccgcggatacggctagcgacggcctcccgcgtgtgaacgccattgttactgatgacttgttcctgtgcaaagtgcc

SEQ ID NO: 23659 - DNA, 608 bp, Setaria italica
  Peptide Sequence Number=SeqID_89633
ccggacgttaggtctggtccttgcagaatttgtaattgccaacattctgaatttttatttgaaaagaaccgtcttttttatgctacttgtaatgcctttttatctatgaagatatgatgatgcggataagatttgcggatagccactgcctgaggcatctttttatcattgcagagagatctctaatggacttgacacaacagcgcatgggttctgtgattgtctatggagagatgctttggtgattgatgccatgcctcttgttgtgcaagtaaatgtaataagcatgtacgttcgttttcagaattgtgtaatttaatcaactttatgttacattcttagatcaatgttagacccatgcatgtattgtaccttcgattctctattcggtccaagtactaggtattatttgttggaattagagatatcgtcgtatgtatcttggatcatgtaatcctagagatataggtgttgagactttggtttggttgttagagatagagataggaatcttgtaaatcctagagatataggtgttgagtactttgggtttggttgttagagatagagataggaatcttgttgtaatcatataccaaaccaaaccg

SEQ ID NO: 23660 - DNA, 1853 bp, Setaria italica
  misc_feature (6)..(6): n is a, c, g, or t
  Peptide Sequence Number=SeqID_89634
gcgggnggggggggggttaaagggtcatctgcacgatcctttccatggctcacggaacccttcacgtcaaactaagcgttttagtcaccccaatggagaagatccagtgactacataagggagtcgcgcgagtttttttggccttcgccgagcactcggcaaacttactgtttcacgtagtgcgctgcgccgatgaccttgcttggcgctgctcatctgatacatttgatctcaatgggcacgcttttgagagctcagagaatggggcggtgctgttaacagagggcgacaaaccaactccacgttttgatcttgcagcagccatggtagggagcaacatggcagtcttcggtgctgattctggccatcgtttgctagatgataccgagatattgagcttagacaaacttagctgggattccgtgtctcctaaagttcgaccatcatcaaatggacgttgtccgaagttgtgaccgtgcaaaggtcattgtctgggttcaagtaaagaaacgactgggcttgacactgtcctgctcctcccatcatcaccatcattagggaacttcaccaaggagacctcaagcacacaggaaccaagagcgcaagctgtatcgccgacagacaactcaaccgaacatcttatgtcctatctgcaagatcccaagtcagtaaggcttctggctgagaaaagcagagagatttgaaaggtgtcttacctagacagcatggaggaatgcgttgctgcattagcaatgccgcttctggtggttgaagagaatatatcagctccaacgaagagatcgtgttataactctatcgttgacgaggctcttcagattggagatacgaatgtgacaaatatgcttctgatgggaaacactgatgtcgatgaagctgatcctgaacaagacacagaaacttacttgtgctgcagtgttagttcaagcacacaggagccaaggattttgtggctcctgctgaagaatgttgctggaaatttccaggggaaaatgcatgatcttacaccagcacacagcgctgcagccaagcgcagttacaagacttttcagaattttgttgcagggaagaacgtttctatgagctttgtgaaacccctttggcgttttggtgctaatacaaaagttcagaatttatgaaagcatgggccaatactcatggcagcagtccaggacatgtgttttaatataaactctgcaagcatggtaccatgtaaggggacagctcacttcaaaagaatcaagttttgaaaaaggacagctgcaacagacttttggataatgaatctgatcgagaagaaagttgacatcagtacaaactattcagtgtgcatgcaggatgtgcgattcttcatactagagagatctctaatggacttgacacaacagcgcatgggttctgtgattgtctatggagagatgctttggtgattgatgccatgcctcttgttgtgcaagtaaatgtaataagcatgtacgttcgttttcagaattgtgtaatttaatcaactttatgttacattcttagatcaatgttagacccatgcatgtattgtaccttcgattctctattcggtccaagtactaggtattatttgttggaattagagatatcgtcgtatgtatcttggatcatgtaatcctagagatataggtgttgagactttggtttggttgttagagatagagataggaatcttgttgtaatcatatccaaccaaaccgaatatctgcaacaccctaggttgtaatatgttgggattctccctatatattaacatgcaaccgtggcgagccaagataggtaaccacgttctaattaaaaaaaaaaaaaaa

SEQ ID NO: 23661 - DNA, 401 bp, Setaria italica
  Peptide Sequence Number=SeqID_89635
ctgaacgcgcagcagccggcgggcggcgtcatgggcggcctcgcgagaaccgcctcccacggccgcagcagcgagggtggtggcggcgatggcggcgggggaggtggaggcgacgccatgacgagggacttcctgggccttcgcgccctctcacaccgcgacatcctcggcctcgccggcttcgactcctcgtgcatgggcgccgtcgccgccaacgccaacataaactgctacgaacggcagcagcatacacaggcgcatgcgcagcagcatcaacagcaaagcagcaacgagccatcgcacggcatgggaagccataggccatagctaagctctcgctagctagctacccttcggccagctactttcttcttcctcgcaccagtcctcatcatccgtca

SEQ ID NO: 23662 - DNA, 1288 bp, Setaria italica
  misc_feature (1)..(85): n is a, c, g, or t
  Peptide Sequence Number=SeqID_89636
nnnnnnnnnnnnnnnnnnnnnnnnnnnnnnnnnnnnnnnnnnnnnnnnnnnnnnnnnnnnnnnnnnnnnnnnnnnnnnnnnnnnnttttttttttgggagggaaaaaacacgattgatattccttaacgatgagcattcattcatagaccgattgcagctacacaatagactcactccagctacccactcataggctacatacgacacaatcctaatctcccgacatctcactattaacagaccagatcgatgaaagaaactgcattggtgcgagaaatgaacagaatgttgaggaatgaaatctctgcagcacaaaacgaaccaatccaacccaatgcagtatcaccaaccaatcgatcgatcaattctcctccttgttgtcgtcttgctccttggcgtccttgtcctcgatgagcttgagcttctccccgtcctcgagcttgtccttctcggccttgagctcctcggcctccttgatccagaggtcggcgaactcgcagtccctgtatcgctcgaaccatggcccgccgcaggtgtagtgtatggccctggggtgcgtggccgggtcggcggggtcgaccctgttgtggccgacgaggaagttccagacgaagggcacctccccgatctcgtcgtcgttgagccaggcgaagcgatggaggaatgcgccggtctgggtgctaacggcgtcgggcgtgagcgcggcgacgttctttgggtgggcgcagttgtagagcaccatggaggaccagttcttgcgcgggtacgtcgtctggatggcgccgtccatcttggtggcctcggcgggctcgtacacgtgcttgacgcaggcgacggcgaggcggtcggcgtcggcgcccggcgggacggcggcggcgaggaggtcggcgacatcagcgaggtagaggaagtcgcagtcgacgaagagtgcccagccgcggtagccggcgaggtacggggtgaggaagcgcgtgaaggagaactcggtgctctcagtgggcccgcgcgcccgccagtagagccccgcggcgcggaggtccggctggcggacggggcgcacgtcgagcggcatggtggcgtgccggagcaggctgcggcggcacacctcgtacgcctcgtgctcccgcgggtcgtaccccacgaacacgcggaatggctcccccgccggcggcagaagcggcgacggcggcggcgccggcgacatggatgggtgcgggaggtggggtgcggtggaatgggatggggacggagacggaacgggcgcgggggtgcccgggccttttaatg

SEQ ID NO: 23663 - DNA, 227 bp, Setaria italica
  Peptide Sequence Number=SeqID_89637
acgggctgctgccgagaggggtgctctgtctgaggccgtcactattcttgaagattgccggagggtattatcacagtcctttgcaagccagaatggggaccgtctatgcatggcccttgatgcagagctaagagagatgcaggagaggatggcaaatcgtcaactctatgaagcttcgagggaggcatatatgctgtctggactgagctctcattcagtggcagaga

SEQ ID NO: 23664 - DNA, 1668 bp, Setaria italica
  Peptide Sequence Number=SeqID_89638
gcgaccaagatgcatggaggatcaccaattcaccatggttggcgttacatttcgctgccgccaggcgccagccatggcgcaccagctgctaggcgtcaggctaaggaggcgtacatgtggggcgggaggcgcggcgtggcgacggcgacgagcggcgtggccttgggcatggtcatgccgtagacctcccgggtgtcgacgtcctcgggtcggaggccgtcgggcggggaccagtcgaagcagtggaagagcctagcgagcgccatgagcaccagcgccacgcccagcggcgcaccggggcacttgcgcttcccggcgctgaacggcaggatcttgaagtccggcaggtggctgatctccacccggccgccctccgccgtcggcaggtgccgctccggccggaactcatcgacggcgtcccacacgcgcgggttccggcccagcgcgtgcgtgttgatgaacacgcgcgtgcgcgccgggacgtggtaccccatgatcgtcgtcggcttcagggactcgtgcgggatcaggaagggacccgccgggtgcatccggaaggactcccggaccacgcaccggaggtaggggaggtgggcgaggtccgactccaccaccatcctgtcgcgcccgatcaccgcgtccagctcctcctggatccgccggagcacgcgcgggttcttgatcacctccgccatcacccactcgttggtcactgatgaagtgtccgtagccgcagcgatcatgtcctgcatcagagctttgatctcgacatcatccatgtgctccttcccgttctcaccaggcaaagatagaagcacatcgacgaagtccatctcttctttggtatcgtcatcatccagggaagccgcagcactcttcttggcctcccaagccttcctgtgttcatcaattatcttctggtggaagtcgtccaccttcttctcgacctccctcatcttcttctcgcacccatatgggtcaacccacctccaagccggcaagtagtccccgagatagatcaggcccagcaggaagaacagctcatgggtgatgtgcatgaactccatcgcttcaccagggcctgcggactggatcccgaagtactgcttccccagcaacatccttgtgacgttgttcatggagaacgcaccgagaacctctctgaggttcacgggcttcccagactgagctttggcccatacaaactggcagaggtgctcagcctcctgagctcggtgagcagcaaaagactcgagcctcttggttgtcagcaggtgctccatgcaaactctcctcatccttttccagtttggccccagcggagcaagagccacatcgccacacccgtaggcaagatggacagcagccagtgtccgaggtcgtgaagcaaagacctcatcttgccggatgagtatttcacggatgacttcaggatcgtcggtggtgatggcatcaatggttcctaggcggagatagacaagggggccatatttggtgcagaatcgagcaaagtctttgtgtggaagagggctcaactggagaaggttaccaaagattggccatgttggaggtccgggtggaagcctttgcctcatgctgttccttcccttcctacctaccaaaataaagatccataagcataagaggatggagagaagaactggatcc

SEQ ID NO: 23665 - DNA, 445 bp, Setaria italica
  misc_feature (351)..(351): n is a, c, g, or t
  misc_feature (356)..(445): n is a, c, g, or t
  Peptide Sequence Number=SeqID_89639
cgcgcttcttccatgtacattgatttttctagcattagcaacatgaccgcagattgattagcacgcatggctgcaaaactgtatagtgtgttagggccatgcttcttgaactggatgctcgtggcgctcatcaagagctagccgctgctgctccaggcttgaggctggaaaagtgcatgcagtttattaacactgattctttcgacgggagcttcatagaaaactcaatggatgattaggatcacatgtcaggattttagttctccttgcaatgagtaccagatgcatttctcatttctgtataaagtaatcaagcctcacggttcatagttcagcatgatgtttttaaanattgnnnnnnnnnnnnnnnnnnnnnnnnnnnnnnnnnnnnnnnnnnnnnnnnnnnnnnnnnnnnnnnnnnnnnnnnnnnnnnnnnnnnnnnnnn

SEQ ID NO: 23666 - DNA, 285 bp, Setaria italica
  Peptide Sequence Number=SeqID_89640
gttcacgtaagccattgctgtggactaagaacttggctagttggtgaattgcaatttacattgcatgggtcattgctgatttgctacgggtttaactgctgataagcagggtcagtaggacagcaggcatggcaaattgtagtcctataacaaggtttgtctgaccctaatcacttcagtttacaacataatactctgaagtgagtaccaaaaggattgcgcgactgatggggtagtggaagaacgaagtgtatgcagcaactttcggagaagtctacaagttgt

SEQ ID NO: 23667 - DNA, 253 bp, Setaria italica
  Peptide Sequence Number=SeqID_89641
ccctgccttggccggtgtcagtcatgttgctattcagttccctgcatatgagaagattaaagcttatctggctgagcgaggtattactcttaacctattttcttttcccagaatgaaacacttagttgtttgtgaagacaagattgaatggtttattttgaaccattgattgtttgatgctttaacagataatactactgttgaagcattgagttttggtgatgttgctgttgcttcatctctagctaaagtt

SEQ ID NO: 23668 - DNA, 1339 bp, Setaria italica
  Peptide Sequence Number=SeqID_89642
gcgatatgccgggggacgtccccacctcgccggcgccggcgccgccgtcagcgtcttcttcgtcgcagcaccaccaccatcgcggccccacatccgcccgcggcctcctgtgccacgccgtcgccggcgcctccgctggtgttgtggcggcgacgttcgtttgcccgctcgacgtcatcaagacgaggttccaggtgcacggctggcccaagctaggcacaggcacaattggaggtagtgtaattattgggagcttacaacagattgctcaacgggaaggatttcggggaatgtatcgtggcctctccccgactgttctggcgctcttgccaaactgggcggtctattttactgtatatgagcagcttaaaagcttgctttcttccaatgatggcagtcatcaactctctttaggggcaaatgttgttgctgcatcatgtgcaggagctgcaaccagtattgtaacaaatccactttgggttgtgaagacaagatttcagacccaaggaataagagccgggccaatcccgtataaaggtacacttgctgccttgagtagaatagcacatgaggagggcatccgtggactatacagtggtctcgtccctgccttggccggtgtcagtcatgttgctattcagttccctgcatatgagaagattaaagcttatctggctgagcgagataatactactgttgaagcattgagttttggtgatgttgctgttgcttcatctctagctaaagttgctgcatcgaccatgacatatcctcatgaggttgttcgttcaaggctgcaagaccagggagcacactcagagaccagatacaaaggtgtaatagactgcatcaaaaaggtttattacaaagagggcgtggctggcttctaccgtggatgtgccacaaatctgttgcggacaacccctgctgcagtgattactttcaccagcttcgagatgatccacaggttcctcctcgatctaatcccccctgaacctgagccgcacatccaaccgctgaagcattgaccatacaacaactgtaccctatccatgctgccaatggaaattaggaaccccagtaagtaaccatccagcaatgctgttcaccatgccctctggctcttgtaaaagagagaattcttttttcccggatatacaacagtagctgccattcgaaagttgaaagcttagtgtaggcagggtgtatgtaatagatgtgttagcatgcattttggggaggtatatgtggcgatgttgggtaatgttgtcttgatgatgatgatgaaaaggaagaaaagaatgttactggaaatagaaaaaaaaaaaaaaaacaaaac

SEQ ID NO: 23669 - DNA, 488 bp, Setaria italica
  Peptide Sequence Number=SeqID_89643
taatcttgaggttgacgctcgcttgagcaagcccatataattttcaaccttctatatggggagatttcttcctgcgctattccgacccagcagcttcctccaagcaacagatttggatggcagaacgagcagataaaatgaaggaagccgtggcaaagatgatagcaagttcagttgcttgggaccttcatccgagactacaactcatcgatgcattggagcgcctgtgcctggttcatctgttcgaagatgacaatcaatgctgcattggctcaaattaagactgccaatgttactggatgtgatcttcacacggtagctctgtggttttatctgctccgtaagcacggatacagagtgtctccagacatatttgtgaggtttaaagatcaagatggaagtttttttgcgaacaatcctgtggaactattgagtctttacaacgctgctcacctcggaacccatggagagacaatacttgatgaagc

SEQ ID NO: 23670 - DNA, 367 bp, Setaria italica
  Peptide Sequence Number=SeqID_89644
gactttctcaaaacagaatatgtcttatattgatggattgagggaatactaattttgcaaataccatttcatgaatttgttgtggtattttcagacatatttgtgaggtttaaagatcaagatggaagttttttgcgaacaatcctgtggaactattgagtctttacaacgctgctcacctcggaacccatggagagacaatacttgatgaagccatagtttttacaagaacgcatttagagacaatatttccctctctggaaggatcattagcacatgaagtcaaatgtgcacttgagactttcctcccaagaagggtcagaatttatgagtcaaagtattatatctccacatatgagaaagaggc

SEQ ID NO: 23671 - DNA, 304 bp, Setaria italica
  Peptide Sequence Number=SeqID_89645
tggtggtggtgctcggcagggcaacctgaagacaagttgccgatatcatttgtagcaggcagggacctggttgtagataacatgcgcgttggcatgcgggaccatcttgtcgagcgattcttttgtagtatcattctgtcgcgcaatgcattctgtgcaatgcaagctcatctttgcattgttctttgatactggtagctgctgctgctgctgtgacatcgataaatcccgccctgatcaggttatgtagcagtaatggaattggaatggtaatggtgtttgaataacaaaaaaaaaaaaaaaa

SEQ ID NO: 23672 - DNA, 305 bp, Setaria italica
  Peptide Sequence Number=SeqID_89646
gttcagtgcgcaggcaggaaacaggcaccgcaacagcttgtcttaacaccacctgttcgacggaatgtccctgtgaaccgaccccatggcggaggcttccggcgacgcgcgggtggtcccggagggcgtttccggcgcggcgtgcaggattaacgccctccccagcgacgtcctcacccgcgccatctccttcctggacgcacgccagctggtgcaaacgtgcgtgctgtcgacgcggtgacgtccggctggagatggaacagaatttgcaatggtgcccaatattcaacaatcttactaccctg

SEQ ID NO: 23673 - DNA, 468 bp, Setaria italica
  Peptide Sequence Number=SeqID_89647
gagctgtggacggatcaagagcgaattctcgcttcttcaagtatgcatcacctatagaccttgaaacctgtataatgcctttgatgcgccaaacaccattcttaagaacaacaatttgcgaatcgtcaggatgaagagactgaagctcctgcctaatctcttccatgccagcattgtggtctcttgttaactgctcagcaacaatcttgtttggtccgttcgaacagccaacgactgcccgagaatcaccaagattagccagatagagtgtccctctccatataataccaaccagacagcaggatccaatagtagtcatagcaggctttatcaaatgtgtcctgcgcacaagcgacatgaagccttcctctgtagcagaaaaggcgtttcgaacaacatcctcagacattgttccatgttcttgtgcaagacggacgatgtgcgcggaaaggtggttggagatgaagc

SEQ ID NO: 23674 - DNA, 388 bp, Setaria italica
  Peptide Sequence Number=SeqID_89648
cgggtacacggccgccaacgccgccatcctcgaggccgtggagggattccccgtcgtgcacgtcgtcgagctcggcacgacgcactgcatgcagatcccgacgctcatcgacatgcttgccagccgtgccgagggccccccgatcctccggctcacggtcgccgacgtcgcgtccaccaccagcgcgccgccgccggccctcgacatgtcctacgacgagctcggcgcgaagcttgtcaacttcgcgcggtcgcgcaacatgtccatggacttccgggtggtgcccacgtcgccgggcgacgcgttcacgtccctgatcgaccagctccgggtgcagcagctggtctcggacgggaccgaggcgctcgtcgtgaactgccacatgctg

SEQ ID NO: 23675 - DNA, 250 bp, Setaria italica
  Peptide Sequence Number=SeqID_89649
ttacctaagactagctcatgtttctcctcatcaactcccacgagcaaggaatagaccatcccatactcctactttcactgtccggtctggtgatgcaggagaagaattactcagatggcttaaggtgccattcatgacatcaaacagttccttaaacacaacctctggctcaccactgagattttcttccttgactgaatacactcctaaatacgttgaattgttttgcgagctatcacagaaaggtgga

SEQ ID NO: 23676 - DNA, 222 bp, Setaria italica
  Peptide Sequence Number=SeqID_89650
ataacgaagaatccagaattggggtacgtagggttgtttctgatggacaattcccagttactactgatattccggacacattggattgatgggcctggctaagcccctcgtcttcaccatgaagtgggtgactagagctctgctgtaacggcccttccttaccaattgaaggaacttctatgacctttgagcccttctctaactttgggctgcactcgctgg

SEQ ID NO: 23677 - DNA, 2903 bp, Setaria italica
  misc_feature (2878)..(2903): n is a, c, g, or t
  Peptide Sequence Number=SeqID_89651
tggtaatttgtattgttgtattggtacttatttccttttgtcttcgttgggtagtttgtattgtaggtagtaaactattgtagtcttagttctttaggtaatttatttgtatttttccactctgtgtatttaccaccaccaaacttgatttcacttcccagcatcaggaatgggtagaacaagaagcaaaagaggtggatgactcagccgaacttctgttctctgaagttctaaatgcactacacaaaatttcaggaggaaggccaattacaggttcttttgatggcaacttgaagattcttgagttgagaagaaatattggagaactggaagagatcctgctggcagagaaggctgactttatggagtcactaaagaatctactgaaaagtgatatgagaaaaggacagcccttcattgatattcttgaggttaacaaactaaggaggcatctattgtttctgtgttacttgtgggatcaacggctaaaattcattgcaaattcaggtggcaagtactgtgatgcactcgctggtttacggattggaagtgggaattgtgattttaatgataaatcagttaatgctagtgcagccccaaagttagagaagggctcaaaggtcatagaagttccttcaattggtaaggaagggccgttacagcagagctctagtcacccacttcatggtgaagacgaggggcttagccaggcccatcaatctaatgaaaatagcctgaggaatgttgaagagttgaatcatgctaccagtgcagatgttaaggatcgactggataacgaagaatccagaattggggtacgtagggttgtttctgatggacaattcccagttactactgatattccggacacattggatgcaaaatggagaggtcagaatggacctgctcctgattcgacttcggcgaaaccactacattcagctgaaggcacaggagtcgatgttaaaagccaaaccaaggctgtaccatcccatactcctactttcactgtccggtctggtgatgcaggagaagaattactcagatggcttaaggtgccattcatgacatcaaacagttccttaaacacaacctctggctcaccactgagattttcttccttgactgaatacactcctaaatacgttgaattgttttgcgagctatcacagaaaggtggagcaagatttttcctgcctactggagctaatgacattgtcatcccagtatttgatgatgagccaacaagtgttatttcttatgcacttgtttcacccatgtactgcttccagttgtctgatgagagcataaaaaatagagagaaagattcttcgcttccattgcctgtctatgattcagggaattttaacccatttcatttatttgacgaatttggatcccactatgatgttacttcatcagtatctggaggtagaggatccgttgctcctgatcaggtgcacttgagtgtttcttttgaagatggtgggccacttgggaaagtcaaatataatgtgacatgctattatgcaaacaagtttgaagcactgagaaggtcttgctgtccatctgagcttgactttttgaggtctatcagtcgatgcaaaaaatggggagcacaaggtggtaaaagcaatgtggttttttgcgaaatctttggatgatagatttataataaagcaagttacaaagacagagctcgaatcattcctaaaatttggcacagaatattttaaatatctgtcagagtccataagcactggaagtcctacatgcctagcaaaaattttggggatctatcaggttaccattaagcatgtaaagggtggcaaggagtcaaagatggatttgcttgtgatggaaaatcttttgtttggacggaatatcaccaggctgtacgatctcaagggatcttcaaggtcaaggtataatgcagattcgaatggtagcaacaaggtccttcttgaccagaatttaattgaggcgatgccaacttcaccgatttttgttggtaacaaggcgaagcggctactggaaagagctgtgtggaatgatacttcttttctagctggaattgatgtgatggactattccttgctcgtgggagttgatgaggagaaacatgagctagtcttaggaattattgattttatgaggcagtatacatgggacaagcaccttgaaacatgggtaaaatcttctggcattcttggcgggccgaagaatgcctctccaactgtggtttcacctatgcaatataagaagaggttcaggaaagccatgtctgcttattttattgtgattcctgagcaatggatgcctgcaataatcaatccaagcaaatcatcatcaaatgtttgtgaagaagattctcaaagggctttgcaagaatgataagattttatgtgcattatgttggattgacaatgccggttttgtcctgctcctgttgtaaagagtgctgaactggtcaggcaggcttggttactccaggtggcattccaagtgatcttcctacttggaccgcagtctcttgtgctaattggcacagatccgatcgcatcattgacttcctcccaagcatcggatgtgtatattctcgaaattgtaattatgccctagtttagttttctttctctcctctttcgtcttaataaatcagtttatagtgtcatcgctcctctgttgtcgtcgcttaattttggttcgatgtacagaacgagcagggcagtgagttcttttgtttttgtaagtgctataagcggtcgttgtatattaagttctccatctgtcatttattcggggggctattgccatctgtcataaaaaataaagttagtttcaggcagaaaaaaaaaaaaaaaaaaaaaaacaaaannnnnnnnnnnnnnnnnnnnnnnnnn

SEQ ID NO: 23678 - DNA, 225 bp, Setaria italica
  Peptide Sequence Number=SeqID_89652
atttatttgacatatcatcaacctaaacccactctaccctgcatctgttcattttagacgagactctgatgacagaaagttgtttttattttaagacatcaatttctctaattaataatagtaccaactaccatacatcattaatagttgatgtttactttgtccattttgttgaacatggaattgatggtttgcagctccgctttttctacaacaccgcctggc

SEQ ID NO: 23679 - DNA, 266 bp, Setaria italica
  Peptide Sequence Number=SeqID_89653
ccgccgtcaagaggtcaacgggaaccccgccgcaccggacttctcgacgtcgcccaccgccgatggggtcagaggcctccgccgctgaggtggaccagctgctccggtcgcagatcccgttccagagcgacggcgagctcgtcctgccgccgcgcgatggtggcggcgttgggctcgtcctcgtcgacgtcagcaacggcttctgcaccgtcggcgccgggaacctcgctcctgctgcaccaaacaaacagatagaaaaagatggg

SEQ ID NO: 23680 - DNA, 245 bp, Setaria italica
  Peptide Sequence Number=SeqID_89654
tgcaaaagaataaccggacaacagggtaagtatctagcagtagaccaacaaatcagtctcaagcaaacaacaacatgatatacaaacagataggaggtcatgtgttcatcatattggtagtactgtagaacccacaaacagcagccacatgtcatcaaccaagcataacaattagtaaaaatagcatgcatgatcatcaggaataccaaagaatcatcaaacagtacataacttaaatctgtata

SEQ ID NO: 23681 - DNA, 211 bp, Setaria italica
  Peptide Sequence Number=SeqID_89655
agcaggcagcagcacgagcgcgcggcaacagccaagaatcgcgagaagaaaagcaatggtttattagctagaaaagagatatctaaggattctttgattcgtttgatcctgaagtattacttctacttctaccactgggggtgatcggaatgtcggatcacccttagttttgtgtttactaggtaattttcagtttgtataggcaaatatt

SEQ ID NO: 23682 - DNA, 393 bp, Setaria italica
  misc_feature (388)..(388): n is a, c, g, or t
  Peptide Sequence Number=SeqID_89656
gcagtacggcaacacaaggtgctcgtccgtcatcctggtcatggaggagatgcggcggaggtcggaggagcttgatcggcacacggcgggagagggcctcgactgggggttgcttgtcggctatggcccaggaatcacggtcgaagccatcctcctcttcgcgctgccagataaagctgtcaacaaattatcggtcacatgaacgtgccttactaataactcaaaatatggtttgtttgtagttcggtatagtttggcccattttctttctcttaagaagacatgccttcgttcaaaatgtaaggtaccgtttggatttggatgtagatattgaagtttagaattcggaattggcattaggtaaaccaaaaaaaaaaaaaaaaaaaanaaaaa

SEQ ID NO: 23683 - DNA, 422 bp, Setaria italica
  Peptide Sequence Number=SeqID_89657
tcggcagcaagaagccggagctgttcgagccgctcaaggcccaccagtcccccaaggtatgcgctgtcatgtcctccgataatccttgtggagtagcgaaatgttccgtcctgcgtgttcttgttatactcgccagaaatttccgaagctgtagccagtttctgaatccggtagattttgcaaagtctcgcggggatctggattggcaaccatctcctagtatcacatcgggaatcacgggtccccatttgccacctaccctgccgttgtccgttgatctagcggccctatccgcgtacaacgccggcgtgcgtgtgtgcacacagcatttggtctgggtcaaagttgacaaaatgggaaagaaaaaataagtgatagaagtctgctctaatacgtatgctagaataaagaagttcataaat

SEQ ID NO: 23684 - DNA, 164 bp, Setaria italica
  Peptide Sequence Number=SeqID_89658
ttcctaagaacccagcaaataatccctcgctccatcggagaccgggcagtttcggcgcaaggaagatgcctcggactcgccgtcaacactttcttcgatctggagcatgggtactgcgaattgtacatgcgcaatggctacgtgaagcgcacctacttcgtcgg

SEQ ID NO: 23685 - DNA, 496 bp, Setaria italica
  Peptide Sequence Number=SeqID_89659
atctcaatcttgtaaaggcttttagaacagaagctccttcatttgtaatttcactaccccatataaaaccttaaggtctttacaggtattgacacgactcgagcatcttgatatatggggtagtgaaattacaaatgaaggagcttctgttctaaaagcctttacaagattgagattcctgaatctttattggacaagtgtcaatcatttacccgttcctccaaccatgcggtgtctaaatatgagcaagtgcaaaattcattctatttggtacgaggattctgaagttcctgttgctctagaaaaccttattgtctctgaagctgaatttggcaatattgatcaagtattttctggaatccaagcagactcactgttatatttggacatgtctagttgcgatttaagcaacttgtctttcatggaaaagatgaaaaatttagagcatctggaccttagctccaacagaataactgatgacgcaattgaacatatt

SEQ ID NO: 23686 - DNA, 339 bp, Setaria italica
  Peptide Sequence Number=SeqID_89660
aatactaaccaatacaacaccaacaataattaattagatcgggacacacatacataccccatatccttacggcgattaaacaattaacaaacgttcgtctcatcattcgtagctcgatcgatagagatcgatctacaggtacttggcgtccgtgaccatggcgatgccgttgccggcgccggcggccgcggaagcggtggcggtgctgccgcgtccgaaccttgcgaccgcgcagtcggtttcgaagaggcccgaggagacgaagttgtcggcgcctcccatgacgggcatcttggcggtgacgttgagcctgttgacgtagtcggtgcggtaggtctg

SEQ ID NO: 23687 - DNA, 532 bp, Setaria italica
  Peptide Sequence Number=SeqID_89661
caatttgtcccagataaaccgtacgtcatggataaattattattactgcgtgctagggtagcttaatcattattccgtgccggtgaccatctcaatggccggtcctcctccgatggttgcggggcggcggccgaaccgtgcgacggcgcagtccgtggagaagagatcggaggagaggtagtccggcgcgccgcccatgaccggcatgttggacttgacgtcgagcttgttgacgtagtcagggcggtaggtctggccgaggacgccgtggacgtcgtcggtgaggtcgtggaacttgaagcccaggtcgaggtgcgcgaggctgtcgtcgtcggtgacgccgtagttgtggatccgcgagtcctcagcggtgatgggcacgacgttggccatgatgcggaagacgcccctgagctcgacgacgacggtgttgacctgcgcggtcctggtgacggagagcgccggcgcggtggggggtgcccacctggcgccgacggagcggggcagctcgacgtcctcgtcgtcgaaggcg

SEQ ID NO: 23688 - DNA, 292 bp, Setaria italica
  Peptide Sequence Number=SeqID_89662
agtagtccaccagcgccttcgcgagcgcctcccggaccacgcgcgccggggagcgctgctcatcttcctcctcgccgcggacagggtgccggggcctgaacacgtgcagcgagcgcaccatgtgccgcatccccacaacgcggtcgacggcggagagctccagcgagccggacggggtgtccgcagccgggcgcacgtacgacctgctcgtcctccgcaccgttgactccatggtcgtcgctagctatccgaatgcgtgctcctctcgtctctcgatccacaggcgagaaag

SEQ ID NO: 23689 - DNA, 318 bp, Setaria italica
  Peptide Sequence Number=SeqID_89663
gctggttatgcccctttttgttttgtacacactcgtaactgaaacattctgtaccaagaagctgaagaaaaccccacggagcagtaatgccaaccatggtcatcggagacataagcgccggcatgctgacaaatagacaataggtaaacacttcaggcttgtcttcggtgtgtcatattgtagttgaagaagattgtgaagtttgaccatgttaccttaactaaaataaacgtaaataaccaaattttaactttaagttaaggaaactaaacaaaaaaaaataaaactttaaagaaaataaagttaaagtaaaggaaa

SEQ ID NO: 23690 - DNA, 1040 bp, Setaria italica
  Peptide Sequence Number=SeqID_89664
ttgtttcttaaatttcttactttcactggcgcgactacgggaaacctgctgtcaatagcttattgcagaaggttctgtgtatcttcctaggaattattcttatttaaggatgaaatagctgacttaaattgatactgtatctatccatttgacatttataccttgtgaaataaacaactgcaggcatcagaaaaatcagcccaggcaaagaaatgggctgagccccatctggaaactgctaagacgaaatggatgcctgttgctaaagaaaaaataggttaacttgaagaaaaatatggagccttatgtccaaatggtctcagagaaatcagtggaggtttatcaaacatcaagtgattttatcaggcctcatcttgtaaatgcacataaagttgctgatccctacttccaggaagccaagaaattatcaaaaccctatattgatcaaattgctacagctactaaaccacatgtcgagaaaattggaactactatgaagccttatactaaaagagcacgtcatgtatatggacaatttcgtgagacagctgctacatatcatcaccaggctcaggaaagtatctcggattaccttcaccaacatgaatttacaaaacaatttgcaacagaagagctggtgtggtatctggctgctgctttgctggttatgcccctttttgttttgtacacactcgtaactgaaacattctgtaccaagaagctgaagaaaaccccacggagcagtaatgccaaccatggtcatcggagacataagcgccggcatgctgacaaatagacaatagattgtgaagtttgaccatgttacctttcactgatgagttcgttgtcaggcatacacataacacactacatggtgatctggggccatcgctgaaccttgatgtgtatgtaagagttacaatacacacaagaactgtgtttctgcccagttgcgtgggcagagttgtagttgccgtttgtatttcatcacagtagggactgcgagcttaaatctatgggtgttcatttcattggcaaaa

SEQ ID NO: 23691 - DNA, 1595 bp, Setaria italica
  Peptide Sequence Number=SeqID_89665
cggcggcgcaggacgcggcggtggagggcgtggcgccggcggcggaggagatcgccgcgaacgcgagggccaaggaggcggcggtgctcaccgccgagctgggcaagctccgagcgaagatctccgcgttagagtcgcgcattgcagaccagactctggagttgaagaccaaggatgatgcaattgaaacgctggatatgattatcaaggagaagtcacaggagataactgctatgcagaatgaagtaacttccctccaggcgaagggatctttagctgcagaggagcaggcaagcaaggccaatgcacgggctgttgagcttgagaagcagatcgagaaactcaagaaggatattacagcacaaaaaggcaaaaaggcagctctcgaggctagggttggcgatgcagataagaaggtgcaagagctgaatacgaagctggagaaactccagaggacgagcgatgatcaaaagcgcaggattcagaagactgaacatgctcttaaagttgccgaggaggagctgatgaaggtgcagttggaaacaacaacaaaagcaaaacagctaaaagaggttcatggagcctggttgccaccttggctggcaacacatgcagcccactctatggaggtgatgtcaaatcactggaacgaacacgggaaacctgctgtcaatagcttattgcagaaggcatcagaaaaatcagcccaggcaaagaaatgggctgagccccatctggaaactgctaagacgaaatggatgcctgttgctaaagaaaaaatggttaacttgaagaaaaatatggagccttatgtccaaatggtctcagagaaatcagtggaggtttatcaaacatcaagtgattttatcaggcctcatcttgtaaatgcacataaagttgctgatccctacttccaggaagccaagaaattatcaaaaccctatattgatcaaattgctacagctactaaaccacatgtcgagaaaattggaactactatgaagccttatactaaaagagcacgtcatgtatatggacaatttcgtgagacagctgctacatatcatcaccaggctcaggaaagtatctcggattaccttcacctaccaagaagctgaagaaaaccccacggagcagtaatgccaaccatggtcatcggagacataagcaatagcatgctgccaaatagacaatagattgtgaagtttgaccatgttacctttcactgatgagttcgttgtcaggcatacacataacacactacatggtgatctggggccatcgctgaaccttgatgtgtatgtaagagttacaatacacacaagaactgtgtttctgcccagttgcgtgggcagagttgtagttgccgtttgtatttcatcacagtagggactgcgagcttaaatctatgggtgttcatttcattgcattggttatttgttttagccatgtggcatgtgtttgagcttgtgcaagtccgccaagtcgtgatttgttatgccgcacatttgttgatagtttgtagtagcttccactgccagtgaacgcatgttttcgacatctaaacttaaggtactccgtgaaccttcataatt

SEQ ID NO: 23692 - DNA, 296 bp, Setaria italica
  Peptide Sequence Number=SeqID_89666
ttacttcgatattaaattctttctcccgtgcacggacttgagaagttcagtgagcacggcagggcagcttgcttccaggtgcttgtatccctctgtcgctaacacggcgtgaagagtctctggactcccaacaatgaagtcgatacacttggccttgagccgccggtagttgtgctgctcggctaaagctagggttctcgccgccatgtcgacgtaggtggcaccggattgcagcttgcgtttgcatatcagcttcagcctgtccagctcgtacctgtgagccgccgcaagcagat

SEQ ID NO: 23693 - DNA, 251 bp, Setaria italica
  Peptide Sequence Number=SeqID_89667
accgaatccccaaccaaaacccacgacacgcctgacgagcggagtgatcgcggcacgggcggcaatgggggcgactactcgagccatactcctctcctgcttccacggcgggggtggcggctccgaggtgagccggcgcctcgcgctgcgcccgcggtacccgtcaatgccgcggcgcccgaagcgggccgcggtttctggcggctgcggcggcggcggaggaggaggcgacctggaggccgcggcaggtg

SEQ ID NO: 23694 - DNA, 285 bp, Setaria italica
  Peptide Sequence Number=SeqID_89668
acatccgtcttcctgcaccaaacgggatgaactcgaagtccgtccctttgaagtcgacgtcgttgttctcgaaccgctccggcatgaactcctccggcgcgtcccaattgctcgggtccctgccaatcgcccacgcgttcacgagcaccatcgctccagccgggacgttgaagccgaggacctggcatgggctccggcactcccgtggaattagcagacgtcgccggagggtgcagccggagcgcctccttgatgaccagtgggaggtaacgcagatcactgagc

SEQ ID NO: 23695 - DNA, 583 bp, Setaria italica
  Peptide Sequence Number=SeqID_89669
actgagtgagtgagtggcttggaaggaaataagaatttcaagaattttgtccagccgatgactagtcaatcacactcaggaagtagccaaacgcatgcagccacgagcagaggacgctccttgcgaccgtgacggccggcgaagaagcggccgtcggccaaactaacgccattcattgaggtccacatgacatgacttaaacaaatttgacagccacctaccactccgttggagcttgcacgtccagccaagatcaatcgaaaacccacctcaggtcgcctgctagcgcccctacccgcgccgcccgcctgccccgtcaatcggcgagagacatggaggcggcgcacgtgctggtgttcccggtcccggtgcagggccacatcaacgccatgctcccattcgctgccgctctcctcgacgccggcgcccacgtcacattcctccacaccgaccacaacctccgccgcgtcggccgagccgcctccgtggccagctcgccgcgcctccgcttcctctccatcccggacggcctccccgacgacagccggcgctcggtgggcgacctaggggagctcgacaggtc

SEQ ID NO: 23696 - DNA, 672 bp, Setaria italica
  Peptide Sequence Number=SeqID_89670
gaaacatcttatgataaagttttcaggctgttcgtttgtgctggctgcataggcagctgcagctgcacggtataacaggcccacaggtcagcctcatgctgctcacttggttgttgcagctgcagccacagcgctgcagcagcaatctctaccgaacactctctttgtttgatggctcatggagctttgatgaacaaccttatctgtattcatttgaacacttgtgctgatactcattagtcacgcactcatgctgccgttaagacatggtgttcgaatggattgaatgcaggtcaaagctttatttagacatggatgcatcaaacaggttttgttttttggttgtaacctgttatgtttctaaaacatctaatggaggttactatgtttaggcacctttaacaagttaacatgcacttttattagagctgaccttttgtttcaaaaaaaagaagctgacacttttgtttaaaaaaaaaagaagctgacactatacaagtattcttgaagtgaaggaaaaaaaagaaagcataggagtacatcataatagttactacagacttttacagctcgatgtagctatgtgatctaatactttgcatcgttcagaaataatttgtcatctttgcttatcatgtttcaacatgaataatctgcaggacaattgggtta

SEQ ID NO: 23697 - DNA, 246 bp, Setaria italica
  Peptide Sequence Number=SeqID_89671
gggaattggtgcaagctgttcatctcaggggtcaacaaccggagtgggttctcgacaggtggatgaaacaacccgtttagaatctagcactgttgtttcttcaccaggccatcatcttgagcatgccatttggcagcagaaccattcaactgtcccagtggatccagttctggaaattcctcctgagttcgatccagattctgctgagtttatgtcagacgtaagtgattatgccacagaataacg

SEQ ID NO: 23698 - DNA, 400 bp, Setaria italica
  Peptide Sequence Number=SeqID_89672
cagcgtcagcgccgcgccccgcgcccgcggccacgacagcctcctgcaggaggactacgccaacacccgaaccaacccgctcttcgactccgcggcatccccatctccgccgcagcagccggcggggtctgctactgccgctggcggcggggatgcgcctacgcgggacagagggcgcgagccgctcaaggttgggggacgcggcggcggcgggagagcgcggtcggtgtccgtcgcgccgcagcggcgagacaccgcctcggcgccgtcggtggacagtgctggcgctgtcggcgggaggagggcttcgcgggcgcggtcggtggccgacgaagtacgcccgtaccgctgctctgagacagatacagaggcaagggatgcggcaaggaaactgcagtca

SEQ ID NO: 23699 - DNA, 584 bp, Setaria italica
  misc_feature (19)..(19): n is a, c, g, or t
  Peptide Sequence Number=SeqID_89673
ggtgtccgtcgcgccgcancggaggcactccgcctcggcgccgtcggcggacggtgctggcgcggtcggtggccgacgaagtacacccgtaccgctgctctgagacagatacagaggcaagggattcggcaaggaaactgcagtcatggaggagtcggcattcgatttcagagagcaaacaaaggggaattggtgcaagctgttcatctcaggggtcaacaaccggagtgggttctcgacaggtggatgaaacaacccgtttagaatctagcactgttatttcttcaccaggccatttggcagcagaaccattcaactgtcccagtggatccagttctggaaattcctcctgagttcgatccagattctgctgagtttatgtcagacgtaagtgattatgccacagaataccgaaagaaagatgttgtcgaaatccctcttgattttgatacagatgctgctgaactggactctgatgtgaggaacaatgccgcaaaacagcaccgggagcaaatggaaaatttctcttgagtttgatacagatgcttccgagctggtttcagacatatggcacatgaagcaaa

SEQ ID NO: 23700 - DNA, 360 bp, Setaria italica
  Peptide Sequence Number=SeqID_89674
tcgccggaatcccgcttcagtaaacaatgggtaacctcatctcacagctgctgcggaagacgaccagcgacggtggcttggatgtgcacagggagcggctcgaggggtcgccggaagtagtggatctcacgttggagccggaccttgaaccggagaaggtcgatgtcgtgaggaggggaattggcgattggagcgtctccgcactggagtctccaacgccgccggagaagagggcgccgttccacaatgaggcactcgagtggacgagattgcgtgagtcaggattcgaggtgagtctctaggagctcaagcatactgaattccccggtgtgctctgtgctgtactgatctcttcttctt

SEQ ID NO: 23701 - DNA, 1278 bp, Setaria italica
  Peptide Sequence Number=SeqID_89675
acctgttccgattcatgtcaagcaggccggagaagctctcgacggattatttcatattcttgctgaagaaggttgtagcgactggtgatttggatctcaagttggtgacgagggtcttgcggtattatcggcatgcgggcaatgaggtcaaagactcagcttttgattctgttctaaagtcgttgaggagtgtagggaggcttggggagagtggcagagttctgaaggcgatgcaggaaggtggttttgaaccagatagtgctgaacatgaaaaggctgttattgcaatgtgtgatgctggcaatctggaagaagcacgaaattatttgactggtgtggaagaatcagggcataagttgggtccaaggatatggtcttgtttagttcagaagtattctcttggtgaaaatgtggatatggcagtctcgtgcttccatgaaatgctggaaaaatgtggcaatgagaatgtgggttctgctcttgaggcactggtttctggattatacaagaagaaaggggcaaaggaagcattccaagttctgaagaacttgatagctgagaaggctgtagttccttggcaaactacctacaagtatttgatccacaagttgatccgccaagggcatctgaaacaagcatttgaagtgctaggtttaatgaaaagccatggttatccaactttcgttgatccttttatcccacatatttcaaagtctgggactctggatgatgccctgggtttgctgaatgcaacatctttgagggggttgccatcaagaatagtttatgtgcgcttatttcaagctttgttcaaagaagagaggcatgaagttgcccaacagttgctttcccagtctcctgatagcatccaaaaccatgctgatgttcgtgatgttttcaataggatgaagctggaagaacctgtcacagcggcattggcagagggttgatgcatgctaaattgagtttttgatgcccgcattttgcatggcaagctgaatttgcctttttgactttgtaataggggccgatatcagaagttgggatgtcagaaacttcttagctgaaatgcttgcactattttccaaagtaataagttacattattttctttgaaaatttctctgtggtttcttttctttctgtttgagccaccatatttccatgccttatgctggcagtttagctgccttatgaatcaatatcttttggctttgtgctactgtgtcataggaagatacaaatttgaaatctgcgtgtacaattatctggatcggca

SEQ ID NO: 23702 - DNA, 279 bp, Setaria italica
  Peptide Sequence Number=SeqID_89676
cgccggacgagcagggcagcaggccgaatcggttcgaggcctccgcggggggcttcgcggcgcgggatctgccgcgcaggagttgacggtgtgattcgggaggtggggttttggcgggcggcgccgggttcccggttggccgattcgggcgagaggctggggcgcgggtgcgggcgatcgggccactggagctgcacccactggttgcgggccatggccgggatcgacgccggggagggggcggccgccgcgccgccggagatgtcgccggagcagcgc

SEQ ID NO: 23703 - DNA, 450 bp, Setaria italica
  Peptide Sequence Number=SeqID_89677
ccaccatttcaaaacatcgaaacagacattttggggaataagctctccttcaaggtatgtaatgacttctcccaattcctcatgtgctgcttgctcaatgtaactttgacttgtgtcagttactggtaagctaccatgtatatctaactgtaaatcattgtttctctgattaaagttctcacgattttgctgatcaacatgaaaagagtactgaagaaagagctcatacaactttccacgcacttcaagaatatactttttggcatgactaccaaaggcttccttaaagcaaatgacaagaaacctgattttatatctgggatctagtacagcagctaaagacagccataggtaccatttcctccaaagctggtcaaacttcagctgcattcgctcaatatctaaaacttggtcaatgtttgccttgctagatgaacggcgtagagctat

SEQ ID NO: 23704 - DNA, 401 bp, Setaria italica
  Peptide Sequence Number=SeqID_89678
ccagccatccaatgtttctgatcaattaggagtagcggaggctcaacatacaatgggatgatatactgttgatcatcgtcgttgcccataacagaggccaggctccttctctttctcctgccattggaaggcggagagtgagctgatactacccaagaaagacaaagaccaagaagtttgccagcaacaagaacaagaacaggaggaagagaagtgtgaaaagggtgcattggtgccccgacaagagcggctggtgaagaggtgtagcaattgtttgtcctgcgaaacaccgcgatggaggaatggtccatcagggattcagatgctgtgcaatgcgtgtggcctgaggcttaagccagagaacaggttcgccaccatttctgaggagcattatagccaag

SEQ ID NO: 23705 - DNA, 1110 bp, Setaria italica
  Peptide Sequence Number=SeqID_89679
tttttttttttcgttcagcaaccaccagatggtatcgaatccaacatctaaaacacctaacaaattggtttctcaaccaggacactgctagagctaataaagaggcctactaaccagactctgctctcatcttctgagcaccaactaaactacaatctaagagacctacgcttccaatgtgacagattgaggagaaattcttggccattgttcactccttgtatgcaatggcctgccgcatctgcatgaccttcttgtgagagttggagtgcaagcaactaacaaaagttgggctgttggcaggtctatactccggcagcagcctgccggacttgtacctcacaccgcaggcattgcatagggtctttggacccaacggaccgctcctccactgtggggtcttggaggacatgcaatgggtgcacctcttctctgcctgctccgatgaaagctccttactcacatatgtcttcttgatcatcttcttcttcttatctagccgttttcctggctcttgttctttcttggtttcttggctataatgctcctcagaaatggtggcgaacctgttctctggcttaagcctcaggccacacgcattgcacagcatctgaatccctgatggaccattcctccatcgcggtgtttcgcaggacaaacaattgctacacctcttcaccagccgctcttgtcggggcaccaatgcacccttttcacacttctcttcctcctgttcttgttcttgttgctggcaaacttcttggtctttgtctttcttgggtagtatcagatcactctcagccatccaatgtttctgatcaattaggagtagcggaggctcaacatacaatgggatgatatactgttgatcatcgtcgttgcccataacagaggccaggctccttctctttctcctgccattggaaggcggaggtggtggtaacttcggttttccagcaccttggtttgccattgtaggagcaggtcttgcgaagacaggatttgtgtaggatgttgagctagaaaaacagtcctctacatagccagagagccactctaggttgctctcatcactctccaaggcggcggcctggtgcgggaacaggtccc

SEQ ID NO: 23706 - DNA, 516 bp, Setaria italica
  Peptide Sequence Number=SeqID_89680
ttttttttttttttttttccagcaactataaatgtaataagcacatttaaagatgctcccagcgtctattgtcagtgaatacaattcaggcctcactgcctcagtaccagaatgagattgaatggcatgacacagaatcacagctccaataatagtaaatgaccccacttgaacacacaattaagactacatgcacaacggggaaaacacaaggtaacaatttaacatcagatgtcaaattttcctacactattgagacactgacaagccacaagctacattggtcccaaacctgtttcaccatctaaacaacacaactagcagcatgaaacagcaaggggtggatgcagggtgaaaattgccagatcacttcttcttcttagaaggtggctggtcctcatcttcgtcttcatcttcatcatcatcatcatcgtcatcatcatcgtcatcctcaccatcgtcatcaccatcttcatcatcgtcgtcgtcgtcatcactccctccttcacctattta

SEQ ID NO: 23707 - DNA, 252 bp, Setaria italica
  Peptide Sequence Number=SeqID_89681
cgtcccgtgtcttccatctccctgctcttcccgttccgtcctgtgagctgtgacgcgtgggggtgagaaagagatcggattccggagcgaaacggccaaggacgcactcgattgctacttggtttggtgctgctgctatcgcttccacccctctatctccattactcgagtaatggtgaggaggcagtagcgctcagtggagcagcggccggcagcgcggcggaggggaggggacatcgcggaggagtcaca

SEQ ID NO: 23708 - DNA, 408 bp, Setaria italica
  Peptide Sequence Number=SeqID_89682
ttgcgtgtctcagaagattttcttaaatgtttcgatttgttgcaattgtgtaaattgtacagatttgagttcatctcaatgtttcaatatgcgatttttttggacttgttggcttgttgcaatagttgatactggagttgcaacatgtaatttctgggtgttgcacgaggtgatttgagatgtttcagtggcgataacgagctactccatggcattgagctcctcgactgtgggaccagctgctagattccacggtaggtctggctcccccaacagcggattccacggtggggggctggccattccacggtgaggagccagcctcgctgatagggagcttctttgtgatggatacgaggctcctttatggacaaggtctctggatctgcactggacttttcaatgttg

SEQ ID NO: 23709 - DNA, 715 bp, Setaria italica
  Peptide Sequence Number=SeqID_89683
gtgcagagccccgatcgagcaacacgacggtttttatcgcttttcgcctgctgtcctctcgtgccgtctccgccttcaatcagagcggagcggggcatcgatcgctccaccacccaccaagaggggagcggagcgcagcggcgaagcgatggggcggccgaggcccaagagaggggagcggcggatcgacgccgccattgaccacctcgccgaatacggcttccccaagccccgaatccgcaagatcatcaacaacctcctgcagctgtatgggagggatggctgggtcttcctggaggagggatcatacaaaattgtgcttgacacactcctggaagaacaggagcagctggagaaacaacaagcagcagcagcggatgaggcatcactacaaaaagatatggaagtgtcaccagcagtgcatagtgaggcactgactgaatctcagtcagccgttgaaccacaagcttttcccaacagctcacctccccgggaacatgtactgcctccagctaaaggagctgctcgtgcaaggcctccctgccgtggatggattagcgaagagtctgatacggagagtgaactagaggatggagaaatgatctcccatgcacaaaggccatttttccccaaaaaaggatataccaaatcctgcggaaagcttgccttattctaagaggaagcgaccaactagatgggatgtgcgccctaataa

SEQ ID NO: 23710 - DNA, 1077 bp, Setaria italica
  Peptide Sequence Number=SeqID_89684
actcgataaatctctcaagatggaaaccttctacaggtcacgggggatatttcttacaatggttatagacttgatgagtttgtaccagagaaaactgctgcttatattagccaatatgatttgcacatacctgatatgacagtaagggaaactttagacttctctgcccggtgccaaggtgttgggagtagagcggaaatactcaaggaagtgaagaaaagggagaaggtggccgggataatacccgaccatgacatagatctatacatgaaggcaacaataactggagctacagagaaaagcctacagacagactatattttgaagatcatggggctagacatatgtgcagacactatggttggggatgcaatgagaagaggaatatcaggggggcagaaggaaagactaacgacagcggagatgattgttggaccatcaaaagcatttttcatggatgaaatatccaatggtttggatagttcaactactttccggataattaagtgctttcagcaactggccaacatcaacgaatgcaccatgcttatttcacttcttcaaccaacacccgaggtgtttgatctatttgatgacctgatcctaatggcacaaggaaagattatctatcatggccctcgaaatgaagctcacaatttttttgaagagtgtggattcagatgcccggagaggaaagggatggctgactttctccaagaggtattgtccagaaaggaccaaaggcagtactggtctggtacagatgaatcttacagatacatttcttctgataaattatcaagcatgtttgaaaaaatatcagaaacggagaaaattagaagaggccactgtacctcacaagagcgagttggacaaggaatctttgtcattcaataaatattcactaccaaaactggaactgctcaaagcatgtggagcaagggaagcactctttgtattctaaaaggtaatatgtttgtttatgccttcaaaactgttcagctttcagttattgcagtcattacaatgtctgtattcttccggactcatatgacaacagatttaactcatgcaaat

SEQ ID NO: 23711 - DNA, 492 bp, Setaria italica
  Peptide Sequence Number=SeqID_89685
acggcagctattcatacaatcagatttcaaatcgctcagagatgtaacaattcagatgcgttgacaacatcacaacgtccgcaggcgcaggcaggcagcatcacaacatccccgctcctgccagcggactggatccaccctgagccatgtcttcccggtcgccgaagcatccgccccaccggagtctacggcgattcccctccgcctgctgtctcctagtcctcacgctcgctctcctcttcgcctccgccgcagccaagtcttctcggcgccccatctccgacaacgagatacggcagaagaaggaggcctgctacacggacgtcgagaacgggctctgggggtgggtgtgcaggtcctcgccaacggagaaggagaactgcgtgctgcgctgcctctccccggagtgctacgacctcatctacggcggcgacccgcttgaggaaggggaactggattatgtccggagccaggagtacaagtactgcatgc

SEQ ID NO: 23712 - DNA, 296 bp, Setaria italica
  Peptide Sequence Number=SeqID_89686
cgcacccacaggctgcccggccgtgcagttctcccgcgtgaactggcacgtgcagtaggtgtacgataccttgcagagccacgaggtcagtgtcgtcgaggttgacgtttctgaacttctgctggagcttgtccagggagtcgaaagggcccggcaggtttctggcgctctggacgttggtcgtcgtgccgtctcggcggccaagaagcacccgccagcgtggtcctccagactgtgccaagttccgtggacgaatccgtcagttcagggcgtcaggagagatgtgaggagctaga

SEQ ID NO: 23713 - DNA, 341 bp, Setaria italica
  Peptide Sequence Number=SeqID_89687
tgatgttgcccatcttgatcatggattccacaaagttcctgaagaaatccttttggttgctcgcgaatcggtgaacaatgggtgcggtggtcgccggcgcagcttggtccgacagcatgacctggtccgacggcagttgagcttggccgcgcacgaggttgccgtaatacttgttgtcgaacacgttgggtgtaacacggtccaagtcctctagcgcacccacaggctgcccggccgtgcagttctcccgcgtgaactggcactgcactttgccaaatgtgtgcgctcctgaagtaggtttttttttttgaaatcagtgtgcacgccatatgaaaatttta

SEQ ID NO: 23714 - DNA, 734 bp, Setaria italica
  Peptide Sequence Number=SeqID_89688
gtcgcgctcaggcagccgggcgcgtcgccccccgggagcatggtggccacgctgcggggccggttcgagatcctctccctcaccggcacggtgctgcccccaccggctccgcccggcgtgagcggtctcaccgtcttcctctccggtgggcagggccaggtcatcggcgggagcgtcgtgggcccgctggtggccgcggggcccgtcgtcttgatggcggcgtcgttcgccaacgcggtgtacgagaggctgccgctggagggggaggaagaggagacggccgcggccgccggcggagcggagccgcaagatcaagtggcgcagtcggctggaccccaagggcagcagccgacggcttctcagtcctctggtgtgactggaggcgacgcgggcggcggcggcatgtcgctctacaacctcgccgggaatgtaggggcctaccagctcccgggagacaatttcggaggctggagtggaggcggcgggggcggagtccggccacagttctgatccatgccttgctacaccgaattctcatcaacatgaagaagacgtacatcacagaggttcaaatggtgcagaagctagtctagctatccggaactgagagctgaagctagccttgatggaactgaggtcaacacgatatgcatgctggatggttcattggagagacctttcatctgggtgctataatataatgcatgtgtctgcacatgaggaggaagcattgg

SEQ ID NO: 23715 - DNA, 704 bp, Setaria italica
  Peptide Sequence Number=SeqID_89689
tggggattgggtagggcgggattttggctgtggacgagtggagatgggatggctggtggtggcttgggagtgttggtggggctgtcaaaactgtaggggaggaaacatttcgcctgtgcagagaactagtagatggcatcgttatggtcagtcgagatgctatttgtgcttctataaaggatatgtttgaggagaaaagaagtatccttgaacctgctggtgcccttgcattggcaggggctgaagcctactgcaaatactataacttgaaaggagaaactgttgttgcaataactagtggagcaaatatgaactttgaccgacttagactagtaactgaacttgctgatgttggtcgaaaacgggaagcagtgctagctacatttctgccagaggagcagggaagcttcaaaagattcacggaattggtataccctgtgatagtaatgccaacatgatatagtttaaaatccaattcaattcttgtgacttctcattctgcaggttggccggatgaatattactgaatttaaatacagatacgattctaacgctaaagatgcccttgttctttacagcgttggcatttacactgacaatgagcttggagcaatggtggatcgcatggaatctgcaaaaactgaggactgttaaccttactgacaatgatttggcgaaggaccatcttagatactttattggag

SEQ ID NO: 23716 - DNA, 2070 bp, Setaria italica
  misc_feature (2048)..(2070): n is a, c, g, or t
  Peptide Sequence Number=SeqID_89690
agggaaggaagggtagtagaaggaagatgcgagaggaggagcagggaagtgcctcgtggcgggattccgggagcgaggcgcgggcgcggcggatggggatgggttcggggacgcggcgcctgggggaggaggagggcccggcgcgatggagtacctcaccagcgtgctgtcgtccaaggtgtacgacgtggcaatcgagtcgccgctgcagctcgccaccaagctctccgaccgcctcggggtcaacctctggatcaagcgcgaggacctgcagccggtattctcattcaagctgcgtggggcatataatatgatggcaaagctctcccctgagcagttggagaggggcgtcatctgctcatctgctggaaaccatgcccagggagttgctctttccgctcagagactgggatgtgatgccgtcatcgtcatgccggtgacaacaccagaaatcaagtggaaatcagtggagaggttgggtgcaacggtagtcctcgagggggactcatacgatgaagctcagtcatatgcaaaattacgatgtgagcaggaaggtcgcacattcatacctccatttgaccatcctgatgttatcactggacaaggaactgtcggcatggaaattgttcggcaactgcaaggtccactgcatgcaatatttgtacctgtgggaggtggtggattaatcgctggaattgctgcttatgtgaaacgggttcgcccagaggtgaaaataatcggagtagaaccctcagatgcaaatgcaatggcattgtcattgtgtcatggcaagagggtcatgttagagcatgttggtggttttgcagatggtgtagctgtcaaaactgtaggggaggaaacatttcgcctgtgcagagaactagtagatggcatcgttatggtcagtcgagatgctatttgtgcttctataaaggatatgtttgaggagaaaagaagtatccttgaacctgctggtgcccttgcattggcaggggctgaagcctactgcaaatactataacttgaaaggagaaactgttgttgcaataactagtggagcaaatatgaactttgaccgacttagactagtaactgaacttgctgatgttggtcgaaaacgggaagcagtgctagctacatttctgccagaggagcagggaagcttcaaaagattcacggaattggttggccggatgaatattactgaatttaaatacagatacgattctaacgctaaagatgcccttgttctttacagcgttggcatttacactgacaatgagcttggagcaatggtggatcgcatggaatctgcaaaactgaggactgttaaccttactgacaatgatttggcgaaggaccatcttagatactttattggaggcagatcagaaataaaagatgaacttgtttaccggttcatttttccagaaaggcctggggccctcatgaaatttttggatgcattcagtccttgttggaatatcagccttttccattatcgtgcacagggtgaagctggagcaaatgtattagttggcatacaagtgccaccaaaagacttcgatgaattcaagagtcgtgctgagagtcttgggtacgagtacatgtcagagcacaacaatgagatataccgactgctgttgcgtgatccaaagatttaatgcaccacatcacatgatgaatggatggctattttcctttgcccccataaattggtgagactttgcaaggaaggttcgactccaaggtagaaggcacaccttgctgcttctgttggagtaaagccatcgccatacctatttatgtagtgctggtttggcttttgttaacttgttagattgtgtagtgcatctgttgttgtgtgtctgtattgtggtttatggtatcaacttactggtgcaagtcacctagtatttctcaaataatgataataaatatgtaacccgaatatctgataataattatgtaattgagatccgggctgcattgtttcaaaaaaaaaagtaaaaaaaaaaaaaaaaacttaaaagaagaactagccaaggnnnnnnnnnnnnnnnnnnnnnnn

SEQ ID NO: 23717 - DNA, 480 bp, Setaria italica
  Peptide Sequence Number=SeqID_89691
ttcgaaaggcacaccctagcttctgaatcttgtccgtgtcatatgtgaagtcgtcttgcacttccacaaagccttttgggccaacgggatgttggatgcatagtccttagtatgtccataatatcacggacccttattggggttgaactgcaaatatatcgtccagatgcctttgaattttcataagccaaaagaagagcatcagcaacatcacggacatccactagatttctaagtctattttcaatggtctcgtgatcccctgcagaagaacagtgtttaaatcctccactaatacagtgagtaaagcagcttgagctttaatcagacttctgattaagatgcttaatttactgctttataatgaaacaagtagcagagtcacacgctaatatgcttttatactcctatagactgttcaagttgtccattttgcttagttcagggttcttaagtaggtcttaattaaaactttggtaa

SEQ ID NO: 23718 - DNA, 1053 bp, Setaria italica
  misc_feature (1)..(50): n is a, c, g, or t
  Peptide Sequence Number=SeqID_89692
nnnnnnnnnnnnnnnnnnnnnnnnnnnnnnnnnnnnnnnnnnnnnnnnnncttagaaaattctgaattggcagttcaattctgaaattacttatcactcagagggtcatacaatacgactatttaatctgttccaactcccaagcacagccatggtaaaaaaaagggaacgtaaaacgaaacaagaactatatatgttgctccagttctgtttctctcaccattctctcgctggttccacacaagcgtattctgctttaccgtgttggaaacgaatactaggtggcaagtgcaagcagctagcagccggaggctcacttcaggatgccaagatccatgtagcaaatgatgctgtcccggatggtttcctccatgggcctgaaggcacaccctagcttctgaatcttgtccgtgtcatatgtgaagtcgtcttgcacttccacaaagcttttgggccaacgggatgttggatgcatagtccttagtatgtccataatatcacggacccttattggggttgaactgcaaatatatcgtccagatgcctttgaattttcataagccaaaagaagagcatcagcaacatcacggacatccactagatttctaagtctattttcaatggtctcgtgatcccctttgatataatcgaggaagattttaacacttgtatttaatgtagattgcatcaatggcccgattaccaatgatgggcaaatggttaccatgtccagcccagtttttgctgcataagcagaagcctcacgctctgacaatattttagaaagcaaataccattcctcattctttctgcaataatcttcatctgaccaactgtcttcatcaaaggccttgcccttgggccacttaggattattgaacacagcagcaactgaagagactaacacaactctcttaacttttgcctcatagcaagcttttaatacgttcaatgtgccagtaacagcaggagctattacgtctgcctcaggattggagggctggccgtatgggacagggctggcgacatggaaaacaccctcacagccggcga

SEQ ID NO: 23719 - DNA, 631 bp, Setaria italica
  Peptide Sequence Number=SeqID_89693
ggtcgacatatatagattttgttgacttaattatttcatttcatgcatggcacggatcagatcaacggacaataatccgccatgcatgcaaagatttaagaggcgaatgtggtgaccccaccgccggcaacgccgccgcggcggaacctggagacggcgcagtccgtggtgaagagacccgacgaccggtactttggtgcgccgcccatgatgggcatcttcttcctgatgtccagcttggtcacgtagccagggcggtaggtctgccccagcacgccgtccacgtccctcgtgaggttgtggaactggaagcccaggtccaggtgcaccaggctgtcgcgccccgtcttgccgtacttgtggatccggtcgtcctcctcggtgatgggcacggcgttggccgagatcctgaacacgccgtcgagctccacggccacggtgttcacgtccttcatgcgagtgaccgacaggccgggcagggcctgcttgttggactcccagcgggcgttcctgacggcgtcgatgtcgacgggctcgccgtccaaggtgatctggatgtggtcctcgtcctcgtcccattcgacgaccctgcgggcgccgacgtagaggcggtggccggcgccgaaggtga

SEQ ID NO: 23720 - DNA, 388 bp, Setaria italica
  Peptide Sequence Number=SeqID_89694
cttagaagaacacagcttcacttcacacacaaggccaccacgacaatgcaagcacgtcgctgtctggggatggagccacatccgtctcgataaaaattggccgtggttgagcctcttccttcaccttgatcaatcatggatgtatacgcaagaatcgaaccaagagaggttacacactacactcttcttcactagagactacaagctacagctttggctgaatcagaaatcctactgtcagtacgagctgctgtgggactgggaccccggtccctgtttcccctgcttcttgaacaaggaccggccgcccgcgccggcggcgggcctcgtgtccgtcagctccttcacgacggcggccatgggcggcctctggctggcctccctggcc

SEQ ID NO: 23721 - DNA, 239 bp, Setaria italica
  Peptide Sequence Number=SeqID_89695
ttcaaatagtttcttgtgttactttgagttattcactcaagcatctgtgctttcagacaatggccaagcaagggaaaggaaggacaagacacaccattctgaacatgtgtgtatatcttataccagttacaatttccaaaaaaaatgctgtagtagtggcctatgccatactgatcttcccagctgctgttacagggtgagaaagaagaagagaaggaagaggttaaaacaatcagtgg

SEQ ID NO: 23722 - DNA, 299 bp, Setaria italica
  Peptide Sequence Number=SeqID_89696
aacagaactggtttagacctaacttctgcttaatcaaccaagatagatccccagtctttatatagaggaaggtgacttgacccttagtaaattatagatgaattcttataggaatgatccgatctttcctaacttgcatgggatgaacttcctaattgatgatgatctgacttgggtggcaaggtgattggggagctggtggtgtgattaggtggcatgctgccttcacacccctcccctggtgataattgggtgggcctaattggcctgtcacagtaacttgtagttttgagttttga

SEQ ID NO: 23723 - DNA, 159 bp, Setaria italica
  Peptide Sequence Number=SeqID_89697
catccatggcgtgtatgtcgggcgcccctctggtcacggaggacccgacctgccacacgtggttcaccaccttcttcatccccgtgtccagccgcagcgtggcgtacaaccggaccttcccgccaacgcccacgtcggcggcgaggccggtggcctgga

SEQ ID NO: 23724 - DNA, 497 bp, Setaria italica
  Peptide Sequence Number=SeqID_89698
tcagctgttgaacactcaagatcggacataggtcattgacaatctcatcataagatattcttagtaatatgcgggtgctaatgacagaggattctaacaatgctgaaagcagttcatttttgttggatgataattcaagcatcccgttctcagtggatgatatcaccaactcagtgcaagagaaggatttctcagatatgaaaccagccgaggagctactcgagaaccctgccttccagttttacaggactagggcttgtgatgtctcgagctttatactgctagatatcttgtcagatcatttcttgatttgttgtaaatttttccaatcctttctacctcataactgcatttggtatatagctttcctttctttttccttgcactgtttgatttacagtatataatttacaaaatctataactggggagaggctactaacattgcctctccccctccttaccacccttgggtaaaagattggttgatgttgacct

SEQ ID NO: 23725 - DNA, 637 bp, Setaria italica
  Peptide Sequence Number=SeqID_89699
tttattttgtttaaattttattactattattacttgggtaattattctttgtatttgtcttgttaaattcctttccgaagactgccccatctatacgacactcagatgatgcagcaatataaaggggcagattttggtgaattaagtcctcatccttttgccgttgctgatgttgcatatagagtgatgttgaatgaaggaataagtcagtcgattcttgttagtggagaaagtggtgctggtaaaacagaaagcaccaaaatgatcatgcgctatcttgcttacatgggtgggaaggctgcatctgaagggcgaaccgtggagaagcaagtacttcagtccaatcctgttcttgaagcatttggaaatgcaaagactgtcagaaacaataattcaagtcgtttcggtaaatttgttgagatccagtttgatcagaaagggagaatatcaggagctgccgtaagaacttatctccttgagagatcccgtgtctgtcaaatatctgatccagagagaaattaccattgtttctacatgctatgcgctgcccctcctgaggagcgtgagagatacaaacttggagaccccagaacatttcactaccttaatcagtccaactgcattaagcttgaaggcc

SEQ ID NO: 23726 - DNA, 4894 bp, Setaria italica
  Peptide Sequence Number=SeqID_89700
aagtttgggttgaagaccctgatgtggcctggattgatggggaggtcataaaagtcaatggagccacgattacggtcaagtgttccaatgaaaagacggttacggtgaaagcatctaatgtccatgctaaggatcctgaggaagcgccatgtggagttgatgacatgacaaagcttgcctatctgcatgagcctggggttcttcagaatttgaaatctagatattttatgattaaattttatacatatactgggaatatcttgattgctgtaaatcctttccgaagactgccccatctatacgacactcagatgatgcagcaatataaaggggcagattttggtgaattaagtcctcatccttttgccgttgctgatgttgcatatagagtgatgttgaatgaaggaataagtcagtcgattcttgttagtggagaaagtggtgctggtaaaacagaaagcaccaaaatgatcatgcgctatcttgcttacatgggtgggaaggctgcatctgaagggcgaaccgtggagaagcaagtacttcagtccaatcctgttcttgaagcatttggaaatgcaaagactgtcagaaacaataattcaagtcgtttcggtaaatttgttgagatccagtttgatcagaaagggagaatatcaggagctgccgtaagaacttatctccttgagagatcccgtgtctgtcaaatatctgattttgagtagtattcccgttgttcttgttctaaattattcttgtattccagagagaaattaccattgtttctacatgctatgcgctgcccctcctgaggagcgtgagagatacaaacttggagaccccagaacatttcactaccttaatcagtccaactgcattaagcttgaaggcctagatgaatctaaagagtatcttgaaaccaggaaagctatggatattattggaattagttctgaagagcaggaagcaatttttcgggttgttgctgctattctgcacctggggaatgttgaatttgtagaaggggatgatggagattcatcaaaaccaaaagatgaaaaatctctgtttcatttgaggacagctgctgagctcttcatgtgtgatgagaaagctctacaagattcactatgtcaacgcgttattgtgactcgtgatgagaacatagtaaaaactttggatcctgaagctgccaagggaagtagagatgccctcgcgaagactgtgtactcacggttgtttgattggcttgtgaataagatcaaccactctattggtcaagatccgaactcaaaatgcttgatcggagtgctggatatctatgggtttgaaagcttcaagacaaacagctttgagcagttttgtatcaacctgacaaatgaaaagctgcaacaacacttcaatcagcatgtctttaagatggaacaggaagagtacaccaaagaagaaattaattggagttatattgagttcattgacaaccaggatgttcttgatctcatcgagaagaaacctggtggaattgttgcccttctggatgaagcttgtatgttgccgagatcgacacatgaaacatttgctcagaaattgtacacaactttcaaaaatcacaagcgctttgctaagccaaaattatctcggtcagactttacaatatgccattacgcaggagatgtcacctatcaaacagagttatttctggacaagaataaagattatgttgttgctgaacatcaggctctcttgagtgcttcaaaatgtgcatttgtttcgggccttttccctcttttatctgaagattcctcaaaatcttccaagttttcatccatcggttcaaggttcaagcaacaactgcaatctctcttggaaactctgagtgcaactgagccacactacatccgttgtgtaaagcccaataatttgttgaagcctgcaatttttgagaaccaaaacgttctccagcaactaagatgcggaggagttatggaagcaattaggattagctgtgctggatatccaaccagaagaacattctacgagttcatagaccgttttggtattcttgcgcctgatgttttgagtggaagttctgatgaggtcagtgctgtaaggaggctgttagagaaggtagatctgcaaggttatcagattggcaagacaaaagtattccttcgtgctggtcagatggctgaacttgatgctcgtagaaatgaagtgttagggcattcagctagcttgattcagaggaaagttcgctcatttttggcacaaaagagtttcattgcactgcgacgatcagctttacaaatccagacagtttgtcgcggtgagcttgcaagaagagtttaccacaacctgcgcagagaagctgcttcactcaagatccagacttggtaccgtatgcatactgccagaaaagcatacaatgagctttctgcttcagcagttaccattcaatcagcattgcgcggtatgtgtgcacgtaaagagttgcacttcagaaggcaaacaagagctgcaattattatccagagtcgctgccgccaattcttggcgaggttacattattcaaggacaaagaaagctgcaattactacacagtgtgcctggagaggaaaggttgctagaaaggagctacgaaagctcaaaatggctgcccgggaaactggtgccttgcaagcagccaaaaacaaacttgaaaagcaagttgaagagcttacatggcggctacagttggagaagcgcatgagagctgatcttgaggaagctaaatcacaagaaaacgcaaagttgcaagctgcactgcaggaggtgcaacaacagtacaaagaaacaaaagaaattctagtacaggagagggaagcagccaagaaggctgcagaggtagctccggttattaaagaggtccctgttgtagatgcagagttaatgaataagcttagagatgaaaatgacaaactgaagactttggtcagttctcttgaaaagaagattgatgatactgagaagaaatatcaagaaacaagcaaagtcagtgaggagaggctcaaacaggcaatggatgctgagacgaaaattgttgacttgaacatggcaatgctaaggcttcaagagaaaatatccaccatggaatctgaggagaaagtgcaaagacaagcactgttgagcacacctgtcaagagcatgtctgaacatttgtcaattccgattgctccaaagaatttggagaatggctatcatgaggttgaagaacaaaaggaaccccaaagtgcaccacctgctattaaggaatatggaaatggtgatccaaagctgaggaaatcttgcgctgacaggcaacttgagaatgtggatgcacttattgactgcgtagggaaaaaccttggatattgtgctgggaagccaattgctgcttttaccatatacaaatgccttcttcattggaaatcttttgaggcggagaagactagtgtttttgaccgtctcattcagttaataggatctgcaattgagaatgaggacgacaattgcaaccttgcctactggctgtcgaatacatctagcttgctattcctactgcagagaagtctcaaggctgctggtgctcctggtagcgtttcacgaaagaaacctcctcagccgacatcattatttggcaggatggctctaggcttgcgttctgcatcttttgccaatatgcatgtggaagcaacagatgttgtccgccaagttgaggccaaatatcctgccttgctttttaagcagcagctaactgcatatgtggagaagatatatggaatcgtacgagacaatattaaaaaggaattatcatctttgatttcgctatgtatccaggccccaagaacaatgaaagctagcatgctgcgggtttctgcaagattatctggtcaatctcagaatcagagcaacaactggcagaaaattattgaaagcttggataagctcttgaggacactgcaagataaccatgtacccccagttttagctcagaaaatatttacccagatattctcgtacattaatgtacagctattcaacagtctactgcttcgccgtgagtgttgctccttcagcaatggagagtatgttaaggctggtctagctgagctggagttgtggtgtgcaaaggcaacaactgagtatgcagcatcttcatgggatgagctcaagcatatcagacaggctgttggctttttggttatattccaaaaattcagaatatcttatgatgagattgtcaatgacctatgtccgatcttgagtgttcaacagctgtacagaatttgtacacaatactgggatgataagtataatacccaaagtgtctcatctgatgttcttagtaatatgcgggtgctaatgacagaggattctaacaatgctgaaagcagttcatttttgttggatgataattcaagcatcccgttctcagtggatgatatcaccaactcagtgcaagagaaggatttctcagatatgaaaccagccgaggagctactcgagaaccctgccttccagtttttacaggactagggcttgtgatgtctcgagctttatactgctagatatcttgtcagatcatttcttgatttgttgtaaattttttcaatcctttctacctcatatgcgccttcgtttagtcatcttttcttttcagctagtttttgtaaaatccatatataggttatttgttagggttgggatgggattccccccttacagttagaaagggccgtatcttttaaagcggggcaaatgattctttgtaggtcaacatcaaccaatctttacccaagggtggtaaggagggggagaggcaatgttagtagcctctccccagttatagattttgtaaattatatactgtaaatcaaac

SEQ ID NO: 23727 - DNA, 393 bp, Setaria italica
  Peptide Sequence Number=SeqID_89701
gtcgagttacgccgccgtggtaggcgtcatacgcgacgccgtggcgcgcgtcgacgccgaatacgtccagtccttcgtcgacttcggcgaggcgttggaacgcagcggggagcggctgaccgcaacggcggcggttgcaggcacggcgtactgcccggacctggaggtggacagctggctggggttcggattccacgatctcgacttcggtggcgggccgccgtgcgcgttcctgccgcctgtcttgcctctagaggggctcatattctttgtgcggtcatgcacggccaagggcggcgtcgacctcttcgctgcgctccacaacgagcacgctgatgcgttcaagcagatctgctactctttggactgatgataggcaacaacaactacacc

SEQ ID NO: 23728 - DNA, 233 bp, Setaria italica
  Peptide Sequence Number=SeqID_89702
caggaggtggtgccgctgcgcgcgcgcaacgtgctgggcgcggacaagacccgcgtcgggatgcgctggatcgagctcatccgcgccgcgctcaaccggtcctcgcagcgagtgggagccggcggcggcggagatagcgggaggcagaaggtgcacccggtgcgcgacggcggtgccggcgccggcgaggagctggcgcgtgagtaccggtgcgtggtgagcaagcagatggt

SEQ ID NO: 23729 - DNA, 1319 bp, Setaria italica
  Peptide Sequence Number=SeqID_89703
gtgataggatactgtatcgagatagccgtcctgtatcaatagctgaatgctcattagactgtcctgttgttgctgcagttacagcgtaagattttgcagaacctggcctttgtattcgtttttttatttgttttgaggtggagagagagttacagggcttatgtgatccttctgtagtatattcctccagacttgatacagactgtcctgttgttgctgcagttacagcgtacgaagcttgcatggatgtcacagatagtgatcataagccagtgaggtgtacatttagcgttgatattgcaagagtagatgagctgacaagaagacaagagtttggaaaaataatcgaatctaatgaaaaagtgcgctctttgctccgtgagtcacatattattccagacactatcgtcagcacaaacaacattatattggaaaatcaagaagatgttatccttcgaataagtaataattgtgaaacgagtaaggctgcttttgaaatcctgtgcgaaggccaatcaatcacaaagcaggatggaactaaatctgagcttcctccaagggcttcctttggctttccattttggctcgaggttcaaccatcagtcggtctcattgaaccgggagaaacaatggaagttgctgtgcatcatgaagaattcttcacaaaggaagaatttgtcgatggagtacagcaaaactcatggtgcgaagccaccagaggcatgggggctgttcttttggttaatgtcactggcagcgcctcgactgagaccatcacacacagaatcaatgtccagcattgttgcccagtgcattcagctcccccacccgttaacccacactccattaccgacaaacccagtgatgctgtgtcaggttccaagaatcaccagtcgaatcacttacaacgttctgactttgcaaactttggcagctcagaggtgcatgatttgtgtggtgtgcgaaagcggaacatgtaaaattgagtccagtttctttcttttggtgttgtagttgttctgtcaagtgtttttgcccccggtggagtcttagatttcttgcctaagttggggagaagtggctctgctcgtcatcctgttcggtacatatgcctcaccattctttgtgtagcaaaaaaaaaggataaaagaaagaagggatgaatagttactatcagttacctgtagttaaatttgagtttaccttttgcttttgaagtagtacatgcggagttaaaattatgttgttagagggtggaatgtaattgtaaaaaggaagttgtgagttctgactgattaacagtctgtataaagtacttc

SEQ ID NO: 23730 - DNA, 429 bp, Setaria italica
  Peptide Sequence Number=SeqID_89704
gggtcgtcctcgtggtgcagggacagcgccgtgcccgcgccgcagggagcccagccgacggcgttcacctcgaacacgacgtcccccattgaattgttgaaagttgaaagaacaaacggtgaagcaaacgcagcactctcattggcccgattatatttatagagaagataattattgtcacttcagaaacaaatgggagtttttagatcttctgatatctcggtgtacccttctccgatccacaagtagtagcggccatctgtgcaatatatagataccatctcaaaaagtatgtacttcacggcgccgccgattgcatgcaagttgcagccgccatcgtcgtggctgcatggttggggagacgatgatgcatgatgcacttggttgaggcgtggggcgtccccaaaaatccatgtgcatggcttcaag

SEQ ID NO: 23731 - DNA, 361 bp, Setaria italica
  Peptide Sequence Number=SeqID_89705
gggacggaaggggagcttgtttgctcgtgattggttttgcatagagctgattgaggagacgggtcgaggcagccccattgaattgttgaaagttgaaagaacaaacggtgaagcaaacgcagcactctcattggcccgattatatttatagagaagataattattgtcacttacaagaaacaaatagggagtttttagatcttctgatatctcggtgtacccttctccgatccacaagtagtagcggccatctgtgcaatatatagataccatctcaacacaccatggagttagcatgcagcagatggagtatgtacaaagtatgtacttcacggcgccgccgattgcatgcaagttgcag

SEQ ID NO: 23732 - DNA, 698 bp, Setaria italica
  Peptide Sequence Number=SeqID_89706
ggcgcggcccgcggcgaggacgtaccggccgctgggctcgtggccgtgctgcccaacgcccgccgccgtggggagcctcgccgggtcgtcctcgtggtgcagggacagcgccgtgcccgcgccgcagggagcccagccgacggcgttcacctcgaacacgacgtcctggtgagtgcaggccatggtaggcgacgatgatcggcggcgaggcagctagagaatggagccgggagtttggtattgggacggaaggggagcttgtttgctcgtgattggttttgcatagagctgattgaggagacgggtcgaggcagctaccgtatttaaaggcatccggccgccatatcgtggcagaaaaaattataccgctagctacttgcttgcaatgcaacaatgtgtagccaagagcaacttacccccattgaattgttgaaagttgaaagaacaaacggtgaagcaaacgcagcactctcattggcccgattatatttatagagaagataattattgtcacttcagaaacaaatgggagtttttagatcttctgatatctcggtgtacccttctccgatccacaagtagtagcggccatctgtgcaatatatagataccatctcaactggaaaagcaaaccaagagctttagtctccaaattattggatagcacggccataaattattccatacaatcaagaaca

SEQ ID NO: 23733 - DNA, 337 bp, Setaria italica
  Peptide Sequence Number=SeqID_89707
agaaggcgagcccggactcgcgcaccgcgtgaggaagctcccccggccacgccgtggcccaccacgtggaaggcgccccagtccgcgcacgcggcgcggacggcgtcggcgggggtggaggacgagaggtcaactaccgggaccgagagcgcggaggcaacggggggagggcgagggggtcgggcggttctcaggtggctggatgtaccgcgccgggaggcgggacaccggacacgcccgtctcagcgagggcttggacgcgcgccggcgcgatggtttccatcggagtggcggcgaaggcacctttaggcgatgttgtagggggtgttaaaagcag

SEQ ID NO: 23734 - DNA, 150 bp, Setaria italica
  Peptide Sequence Number=SeqID_89708
tggtactgtcacctcttccaaggtcctcggaagctggggcattgtccaattttcctcggaggaagaggcgaacgcgagtctcgctgccaacgagaaggaccttaatggtcgcgctattaaggtggagaagctcaagaatgctccccgtaa

SEQ ID NO: 23735 - DNA, 460 bp, Setaria italica
  Peptide Sequence Number=SeqID_89709
tttacctactaataactttacaacaataattaaaaatcccttactttaagttactaacacaagaaatcaaacagtagataaatccttccattagttataggttatatataaccctaaaactgtaattttaataagtgcacactggcatactgaactatgattattatcttaacacgttgcatcgactacacacttagtgagtaccaaaaaatttggcttgagtcaaaatatatatttatatatacgactggtcatctcaacttacacatcttaaaacataggcgccatgtcttccaaatttattagcatcagatatcattgtatactaattgcctaaaagttaatctctgcattctcaaacaaattttggttgtagcatatggcaatcaaatcttaaaagctttaaccgctgctatgcataaaaggtattgaactttgccacaggcatgttattactaga

SEQ ID NO: 23736 - DNA, 687 bp, Setaria italica
  misc_feature (1)..(31): n is a, c, g, or t
  Peptide Sequence Number=SeqID_89710
nnnnnnnnnnnnnnnnnnnnnnnnnnnnnnntttttttagtttctaatactatatagtagccatttatatatataaaaaaaacactatggtaaccaacgattatgcacagttttcacataactgctacaagttccaagctctcagaaactataacaaagttaacatacatgcagtatgcaaaattgtcatgccgcttcagcagttgtttccttgggcaaaattacaacaattatacagtcagatggatggggtggaagtgcaagcatgccacacgcatcaggtgtaggaggaaggatgaatagtagccttgtccacatggaattcacagcaggaactcttatcacaccagcgcattctctgtttatcagataggatataaaatcctggaaccctttctgatcaccatctgaacaaggcaacagtcggcagacttctctctgcacagtggaaaataagaaattatggtttctcccaaaaaaatcagttcccacagtgaaagcacatgtgcattttcctctataactttcacatattaaaatccttctaacttagtccacagaaatcaaacagtagataaatccttccattagttataggttatatatttttacttaggttggtagttattagagaaagttgtcttcacgtgctggaaatctgtgcgctttgtcatatctagtttttca

SEQ ID NO: 23737 - DNA, 385 bp, Setaria italica
  Peptide Sequence Number=SeqID_89711
atttgtacacagacgactccgctgaattttcattgaatctagctaaaatcggagttaggaacagacggactcatcatagtgaacatttcctggctgcttgccttctcatcaccagtagcctagacagatgaaataaccgtgactattaacacgcaccgcaaggtggtagtccatgaacaatcggctggcgtggcataccatgaagcccaacccttccttggtcttggtcagggtggcagatcagtctgtcgccacagactcacagtgccactactgaaagataccacagcgcagctggctcacgcagaaggccaggtaataaaacatctctgtactgagtgccaagccttctctgcaaccagttgaagcccatccgatcaaaaac

SEQ ID NO: 23738 - DNA, 725 bp, Setaria italica
  misc_feature (1)..(43): n is a, c, g, or t
  Peptide Sequence Number=SeqID_89712
nnnnnnnnnnnnnnnnnnnnnnnnnnnnnnnnnnnnnnnnnnngtttcttaatgatgaaaatatgagacatccactaactccatagattagttaccttacataagcatgcatggtgtaatgatgactatgacctatgcaactggcagtcttgattaatattttcacagcacacatgaatgattgctgtacactcactatactgttcggggaggttcttgacttcttgttgggcattaatctcattgacttgaattaaagtagctgttggaccagattctcattctagaaaccaaaatgacttgggcatcaagtaccaaaccactccactgtcaagatataacaaaatcgacatttgtacacagacgactccgctgaattttcattgaatctagctaaaatcggagttaggaacagacggactcatcatagtgaacatttcctggctgcttgccttctcatcaccagtagcctagacagatgaaataaccgtgactattaacacgcaccgcaaggtggtagtccatgaacaatcggctggcgtggcataccatgaagcccaacccttccttggtcttggtcagggtggcagatcagtctgttgccacagactcacagtgccactactgaaagataccacagcgcagctggctcacgcagaaggtcctaggttaatttaaaacttattttcttttcttttgttttacttttgtttagtttgttcctt

SEQ ID NO: 23739 - DNA, 530 bp, Setaria italica
  Peptide Sequence Number=SeqID_89713
cgaggagatcggccgatcgattgccagacggatttggtatatatattatatatatacatcttctctttgatgattaaattagaagaagggagggagccggccggccggccggcgtatcttggtgtcagcgtgtcgacgtaccagctcccccccgcgtgcggtgtcgtacgttaaccctaccgaggtcactgtgcacggcgcagtcatgtgcgcgtccgcgacgggggccctcccccttctttaacgggggcgcgccctgaggttgccgggaggtagaagaaagcttcggaagccttagctttcaccgggcccctggcaggctagagacgatgcgatctggctgctgcgcagcaaggccaaacaaacaaaaaggaaagaaagaaatgtacgtgctgctgctgctttaatttgtgtaatttgtcttgttaattagtgtggccgcctgaattcagattgtgtaaaagaaatggagatccagctacgtacgggaatatatagtagaaacaaatctcaagtcttttttcgtggga

SEQ ID NO: 23740 - DNA, 313 bp, Setaria italica
  Peptide Sequence Number=SeqID_89714
gcggcgacgccgtgagcgaggaggtcgccgcccggggcgggtcggttctggaggtggaggcggcgattgcgaggcacgccgccttctgccggtcgctcgacgggcgccggacgccggtcgctgccgagcggctcatcgcggcggtgcggcggctgctccgcaacgccgggggcaaggaggagaaggctgtggtggtggtggagatccaggaggcctcatgaccgcctgcctgagacggatcgaagatttgttcttgcaggcggagctagctagctagctagcactagtgcttggtttttttttgtttgattaa

SEQ ID NO: 23741 - DNA, 433 bp, Setaria italica
  Peptide Sequence Number=SeqID_89715
aatcgattttattcacaagaactccaggatgttctacaatcctttcaatggaaatatttcattgcaaccagagccttgtccaccttatgtttctgggggcattttagctgatgaaatgggattggggaaaactgtcgagcttttagcttgcatttttgcccatcgtagaccattttcaatggacttttctatctcccagaacaaaacagaaatgagtcaaataaagaggcagaaagtagagagggttgagtgcatttgtggggctgcaagtgaaagttttgcatacaagggtctctgggtccaatgtgacatttgtgatgcttggcaacatgctgattgtgttgggtacacacccaaagaagacataccttttgacaccgctgaaggtgtagcatcaaaaattaaaaaaaagaacatgaaagcctaggattgg

SEQ ID NO: 23742 - DNA, 796 bp, Setaria italica
  Peptide Sequence Number=SeqID_89716
cagctgatgtaattctgcctcgcaaagaagcacacaagaggcaagaaggttcggcaagtggttctatggatgatgtctttgccaaaattgtcggtccagacacaagggacacgaagcgaacttatggacctgtgccctgcaccagtgagctccgtggaaagacagctgccaaggtgtctttgaggctagctcatgcggctaaaaggaatgcagaggaggaggcggccacactgaagaagaagatgatggaaatggaagaaaataacaggaagcttcaggaggatctggcctgcgcgaagagtccagctagtagtggtgtgaaagacaggaggaggatgtcaactgatgatctgcagaggaaccaacccgtgaatcattaggtctcccagctatccacagacagtgcaaccctgtgtctttttccaagacaagcctatccagaaccaaagaagaccacagaatgttcaaagacttcactctctgtttttgtagactggtgaaatgcatcactttttgaaacggtcagaatctaggcattttcaccaaagatgcactcaagcaaattggtagtacctgaaagttatggttctgaatgggtaaccaggtgttttgattattggtgaacatgcaaactggatgttgactaggggctggtttggcagggctccagctccagcttctcctgcggcttcagtgaagccctaccaaacaatttggtcaaaaacggctccacccctaaagcactagaggagccggagccgttttatatggagaagccggagtttaaaaaaaagtt

SEQ ID NO: 23743 - DNA, 1117 bp, Setaria italica
  Peptide Sequence Number=SeqID_89717
ttacaaacaatagacaagaattctctttctaacataacataattctcgtccagtacaccgtaatgtctgtacctcatcaaagctcaaacaaacttgtccccaattcaaatggattcaatctaatccctacctatccgaataacgcctagttaagagtcaggctacacactatctgttcaaaagggcatggtcccaatttgtcacacctcttaatctagagtagcgatttccatccagacagtcaaagctacagaatgaaacagttgaggccagaggatggaagactgactatacggatcccactgcaggaactacaagtgatcgtaatgcatcactttctgaagatgcggctgcatattgaaacaataagcattagattgctgtgcactaaactggagcaggtatcattctcttttctgcggcactgcatccttggcagcaaaccaacaccaagaaaatgtagacgaccaatctgatcattagctgcagttccttgtaacccaccatctgaaaacagttaccatgtaattttcagagatcatatccaggggaaagtcatcaaagcagcttgtgttagcaacttctctgggtataggcagatgctagcatcattgtggcctggaagtgcactgagctgaaactgaatgctcctgattaactttcccactccagagtataatttgttcgtctttaaataatatgggaacacagggaaccaaatccctcagcttcacaccaattttcttgcagtcactagtcccaacatgagagcaatctagtctgacaacttccacagtcttaaaggcctctctcactttatcaacaacattgacatagacaccattcctagtcagtttcgtaagtggtggagaatttaaccctttgttcctcaattcttttgtttcctcaaaagtcatcccttcagcaacattttgcacaagcctaggataaatgggagctaatggtttccacaacatcaatggtatggcaggcctctgttttggatcatagttccgaccacgatgcaagataaggatgtttatgttgcggtatatgattttgccacctgttttatcctcgagatggaagcatatgttgtccaatgtcaaagtagtta

SEQ ID NO: 23744 - DNA, 695 bp, Setaria italica
  Peptide Sequence Number=SeqID_89718
cacaattgaagatgtaacaagaaacaaggacagttcagtctctagtgaagaaatcaaacaacttttgcatgggactagagatgcaagtgaagcaaatattgaaagcagctataaatcattattacaggaaaatatagaaggttcactagaagatcaggaagaaactagcagccatgaaaatgcccccatggatggtaatctaactggtgaagatacaactgaaaacttagaacaaggatacattgaggtgccaacggtagaggtggcaatgcaaggagaaactacatcatcaacagaatcaattgtcagcacttatcttgatgctgatgactctgagatcaaggaagttgtaatagaagataagcctggacaaagagacagcccaccagatgtgcagccattagatggcataaacatagaggcatccacgaatgacaacatacaaacacaaatatcacatgacaaggaagaaatcagtgcaatcagcaaaattgcagcagtgaagcttatgattgaaagtgatcaggcacttgaggatgataagcttatccatggattgggaaatcaggatgaagatagtacagaatggacatcatgtgataatctctataatggtgaagttgttgcaaagtgtcagtcatctttaagaaatccaactgcaataagtgaccaagaactgggaaatgagacaaaag

SEQ ID NO: 23745 - DNA, 232 bp, Setaria italica
  Peptide Sequence Number=SeqID_89719
cggaaggtctgtataagcaattaacagtggaggaggtggtgcgacgtcggagaagcgctgtggacatggacggggtgcatgtaatggggagggacacattttatcagatgctgttgcactgcctcccgtcagggaaggttggctcaggtgagcggcaggggcagcaatgtgctcttccattccgtgtattaccatgggatgcagaggtgcatgccgcattgtttgtgcatca

SEQ ID NO: 23746 - DNA, 311 bp, Setaria italica
  Peptide Sequence Number=SeqID_89720
gtgtttcttctcagcccttcccatcgccactacactgcaaaatgtgctctcacaaaagctacagtctatagcacaccgattggggacttgcgagtagatcaggaagtcaccgaagaactcaacaatacagggaaatttgaattaatggaccttagtgttgatgaagctgaacatggtttcgaaatgcttttaccctacctttctaaagtctttcagggccacactgtaaaagttgttcctgtccttattggctctcttgattttgagaacgaagccatgtatgggcagctgcttggtaaatatctagatga

SEQ ID NO: 23747 - DNA, 335 bp, Setaria italica
  Peptide Sequence Number=SeqID_89721
ttttttttctagagaaatgtagtttttttttcttaaatgaagaacgaccgtacaggcacaggcatacaacacgagtctcgaaccagacgttcgcgacgcctaaacgtgaattcagagtgcgtaaacacaatcaaccacaaccaccaaacggaaaaggcacggcgcacgggaacgggaacgacagcactgcctcttgcctaggccatcagggcgaggccgacgagccccgcggcgcacgccagcacgcccatcgcgagcggtgcctccccggcgctggccccgccggtgctgctcggggtggccctggtcgtgggcgccgtcgtgggcgtaggaac

SEQ ID NO: 23748 - DNA, 298 bp, Setaria italica
  Peptide Sequence Number=SeqID_89722
cctccaacgccggcgactacgacggcctcggctgcctgaagaagttcaacgacctatccaccaaccacaacaaccagctcaagacccagatcgccagcctccagtccaagtaccccaacgcccgcatcatgtacgccgacttctacagcggcgtctacgacatggtcaagaaccccggcagctatggtacgttcctcttcctgttctttctcagttctcagccgtagccgtcgaggttgagccgtcgcgctcgtgtcgttcccggccgcggcgccgacgagcaggagacatgtggtcc

SEQ ID NO: 23749 - DNA, 334 bp, Setaria italica
  Peptide Sequence Number=SeqID_89723
tgcagctctaccagcgctgtgctgagcagccgagacctttgcacaggcagacgcaccaccgtctcctttcgccagttgctggctttggtcgcattggtcggccggcagcaagcgtccgcggatcatggggagccaccgaacggctactggtgccgcgccggcgtcggcgctgatgctcaccctgctcttcgcgtcgtgggtgctcgccgcggcgcagaactacagtgccatcttcaacttcggcgactccatcacggacaccggcaacctgtgcactaacggcaggccgtcgatgatcaccttcacccacgccgccctacggtgagacctattt

SEQ ID NO: 23750 - DNA, 853 bp, Setaria italica
  misc_feature (813)..(853): n is a, c, g, or t
  Peptide Sequence Number=SeqID_89724
accaactggagctggaagctgatgggtccgttgttccagatcttgtcctccgtctgcgggcagaactgcaagagctacctgggcaactccctgttcgtgttcggcgagttcggtggcaacgactacaacgcgatgctgttcggcaactacaacacggaccaggcgagcacgtacactccccagatcgtagagcaccatcgccaacggcatcgagaagctgatcgcgatgggtgcgaccgacatcgtcgtcccgggcgtgctccccatcgggtgcttccccatctacctcaccatctacggcacctccaacgccggcgactacgacggcctcggctgcctcaacaagttcaatgatctctccacgtaccacaacaccctgctcaagaaaagggtcgacatcatccagagcaggcacaggaaaacggtgcggatcatgtacgccgacttctattccggcgtctacgacatggtccggaacccgcagaattacgggttcagctcggtgttcgagacgtgctgcgggtcgggcggcggcaagtacaactaccagaacagcgcccgctgcgggatgcagggagcgtccgcgtgcgccagccccgcatcgcatctcagctgggacggcatccacctcacggaagccgcgtacaagcagatcactgacggatggctcaaggggccctactgccgccctcccatgcttcacagctaaataagccaggataggcggtccgtgatttatatttattatttatatagagttggattggattaattgaggaggggattaattgttggcttatcgatttcgcttannnnnnnnnnnnnnnnnnnnnnnnnnnnnnnnnnnnnnnnn

SEQ ID NO: 23751 - DNA, 1481 bp, Setaria italica
  Peptide Sequence Number=SeqID_89725
aacgaaacaaaagaataactaaggaaaacaaaacggaacccaatacaagacttaccaagactactacttaactaaaccttcttctacttgctctgctccggccgccgctctccgtgcattgcgtgataggctgagatgaggagcggtcaccgtatggcgggtgcggcggcgctggtggcggtggtgtgcgcgtcgtgggcggcggcggcggcggcgcagaagtacaatgccatcttcagcttcggcgactccatcacggacacggggaacctctgcaccaacgggaagccgtcgcagatcaccttcacgcagccgccctacggcgagacctacttcggcacgcccacctgccgctgctgcgacggccgcgtcatcgtcgacttcctcagcagcaagttcgggctgccgttcctgccgccgtccaagtcgacgacggccgacttcaagaagggcgccaacatggccatcaccggcgcgacggccatggacgctcccttcttccgctcgctggggctctccgacaagatctggaacaacggacccatcagcttccagctccagtggttccagcagatcacgtcctccgtctgcgggcagaactgcaagagctacctgggcaactccctgttcgtgttcggcgagttcggtggcaacgactacaacgcgatgctgttcggcaactacaacacggaccaggcgagcacgtacactccccagatcgtgagcaccatcgccaacggcatcgagaagctgatcgcgatgggtgcgaccgacatcgtcgtcccgggcgtgctccccatcgggtgcttccccatctacctcaccatctacggcacctccaacgccggcgactacgacggcctcggctgcctgaagaagttcaacgacctatccaccaaccacaacaaccagctcaagacccagatcgccagcctccagtccaagtaccccaacgcccgcatcatgtacgccgacttctacagcggcgtctacgacatggtcaagaaccccggcagctatgggttcagcacggcgttccagacgtgctgcggctccggcggcggcaagtacaactaccagaacagcgcgcggtgcgggatgtcgggcgcgtcggcgtgctccaacccggcggcgcacctcagctgggacggcatccacctcaccgaggccgcctacaagcagatcaccgacggctggctcagcggggcccactgcagcccggccatcctccactagcgaagcaaaagcctccccctccctcgagggcagcgaagcgagcaagaggaatcaaccaatcgattaaatatttattttttaatcattatatgtgtttagttgccggagaaaaaaagggtctcggcaactgtagcatgtggaataatgtcaccgttcgtccttgctgtaacttatcaccggttgtcatcagttacaaaatcaatcaaaatggtacaggttttcgttacacaaaaaaaaaaaaaaaa

SEQ ID NO: 23752 - DNA, 1404 bp, Setaria italica
  misc_feature (1369)..(1404): n is a, c, g, or t
  Peptide Sequence Number=SeqID_89726
gatcaaccaatcgcagtgctagctcgtcgagcactcgccaagacaccagcaatggcggctcggcttgtcgtcgcgttcctcgccctgtcctccgcctgcttcctggccgtctccggccagaagtacaacgccatcttcagcttcggcgactccatgtctgacaccggcaacctctgcgtgaacggcgctcccgccggcctgacgctcacccagcccccctacggcgagaccttcttcggccgcgccacctgccgctgctccgacggccgcctcgtcgtcgacttcctcgctgagaagtacgggctgccgctgctgaagccatcgaagcaggggcggcgcggacttcaagaagggcgcgaacatggcgatcatcggcgcgacgaccatggactcgggcttcttccagtcgctgggcatcgccgacaagatctggaacaacgggccccttaacacccagatccagtggttccagcagctcatgccatccatctgcggctccacgcaggcctgcaagtcgtacctgtccaagtccttgttcgtgctgggcgagttcggcggcaatgactacaacgcccagatcttcggcggctactcgccggagcaggcgagcgggcagagcgcgaccatcgtggacgccatcggcaagggcgtggaccagctcatctccctcggcgccacgtccatcgtcgtccccggcgtgctccccgtgggttgcttcccgatctacctcaccctgtaccagacctccaacgccggcgactacgaccagtacggctgcctgaagcgcttcaacgcgctgtcgagccgccacaaccagctgctccaggccaaggtgtcgagcctgcagagcaagtacccccggcgcccggatcatgtacgccgacttctacagccacgtgtacgacatggtgaggagccccggcagctacgggttcagcaccaacctgagggcctgctgcggcgccggcggcggcaagtacaactaccagaacagcgcgcggtgcgggatgtccggcgcgtcggcgtgctccaacccggagtcgtcgctcagctgggatggcatccacctcacggaggcggcgtacaagaagatcgccgacgggtgggtcagcggggcctactgccacccggccatcggggcatagagggactattgagctccgggaaggaatcaagggttggattggatggctactcaagttaggggaaagggatggggttgttaattgtttattttctagctggaaaacaagaagatgatctgtgagaatgaataatcaattaagcatagttttctttgtgttcatcacgcgacagcaatgcgaacagcgaatgccacttgtgtagtgtgcgattgggaggaaaactnnnnnnnnnnnnnnnnnnnnnnnnnnnnnnnnnnnn

SEQ ID NO: 23753 - DNA, 311 bp, Setaria italica
  Peptide Sequence Number=SeqID_89727
aagtgggagaggttgaggagacgcgttggatcaatgcatggcggcaattcagggaccgtggccagaaccaaatggcagagtccttgtgggagcaggagcaggaactgccatctgttcttatgccatggttgttctccatcttcaatagttgcactctcaccgaacagttgcagacgttgcagcttgtggagatttcctagtgactccacgaagtccgattgcattctcttatccttgaaaaggccagtaaaaatcctgagcgccctgagttcacctaggttgcccagatctttcacaaactggccgattga

SEQ ID NO: 23754 - DNA, 443 bp, Setaria italica
  Peptide Sequence Number=SeqID_89728
tctgtccaggtggcgatctgcatactctgcgacagagacaaccagggaaacatttctcagagtatgctgcaagttatgctctctgcaaggtgcaaaattcccgaatagagtctaatagcttttgagtgatgtgtagagaacaaagtgcgcctagattctatgctgcagaagtacttctagctctggagtatctacacatgttgggagttgtctacagggatctgaaaccagaaaatgttcttgtgcgtgatgatgggcacataatgctttcagattttgacctctccctaagatgtgcagtctcacctacactcatcagaacatcagctttcgatactgatcccagaagagcgggtggttctttctgtgtacaacctgcttgcatggaacctacttcagcgtgtattcagcctgcatgcttccttcccaaattattcggtcag

SEQ ID NO: 23755 - DNA, 2570 bp, Setaria italica
  Peptide Sequence Number=SeqID_89729
ctccacttcccctcctcacgagaggagagagagtgcgtgcgagtgcggagttactcggggactgatacgagcgagcagtggtagcgcgacgccagtgagcggtggtggaggcaagtggaggattcggagctccgggatctccgctttcccccattcgagtgtttggacagggtggagttcgtcctactcccaggagttgcttcgcttggtgctgcacagaattagcgcggaagcaggtggagtgttctctgccctgaaatctgctcaccgggtgccaggaaacaggcggttgaagagaattgcttgggaattcgccaagacgcgaccaaatctttgcaggtgcttgtgcacttgttatgctgagactgaatggaggcggtagataagattgccgagcccaaagaccctttggtgctcactgctcggaaggttcagagcttggagccaccaataccgataaaggcgtcatggaaagggaagaactcccagcagcaagaagagaaggatttgccagctgatggtgaggagagcttccggagcctggattcctctgatgagggtggccggagctccttctctggagctagtcaccctccagagcctattgatatggatattatgaagacagtctatgttgcaatttgacgaggagaggtccgagccaccggtgagtttagtgcgaggagtgtcgatgaaggggcctttcatggatgacctctcgatccgtgtcgcaggcacaaaggcaaatctggtggtaggtgccgaaggtttggctgaagagaggaatgtgtctggttctgcagtggcatcagtggccacagcacgctcatctcaggctacctctttgcctcaggactccgaagagaaggagtgtgtctgggatgcttcacttcctcccagcggcaatgtcagccctcacagtagcattgacagcatgggtgtggtcactgccatgagcactcttaacagctgtgcaagcacatacaaaagtgaagctgtagctagtgaaggaatgctcactgtggagagaaactgtgaaagtgtaaagggtgtccgaggcgacttgctagaaagtgcaaaaactagcatgagtcgagcaagtgatagcagtggtgttagtgatgacagcagctggagccatataactggaggtgccagcaagcctcacaaggggaatgatcctagatggaaggcaattcatgctgtacgaactcgagatagcgtgcttggaatgagccattttagactactcaagcgtcttggttgtggtgacattggcagtgtttacctctccgaattaagtggaactcggtgctactttgcaatgaaggtaatggacaaggcatccttggcaagtaggaagaagttaaatagggctcaaactgaaagggaaattctacagcttctggaccacccattcctcccaaccttgtatacacattttgagaccgacaggttctcttgtttggtgatggaattctgtccaggtggcgatctgcatactctgcgacagagacaaccagggaaacatttctcagagtatgctgcaagattctatgctgcagaagtacttctagctctggagtatctacacatgttgggagttgtctacagggatctgaaaccagaaaatgttcttgtgcgtgatgatgggcacataatgctttcagattttgacctctccctaagatgtgcagtctcacctacactcatcagaacatcagctttcgatactgatcccagaagagcgggtggttctttctgtgtacaacctgcttgcatggaacctacttcagcgtgtattcagcctgcatgcttccttcccaaattattcggtcagaagagcaagaaaaagattagaaagacaaggtctgagttgggacagaatgttggcaccctgcctgagcttgttgctgaaccaacgtcggctcggtcgatgtcatttgtcgggactcatgaatacttggcccctgaaatcatcaaaggtgaaggccatggaagtgctgttgactggtggaccttcggcatcttccttcatgagctgctgttcggtaaaaccccattcaaggggtcaggaaaccgtgccacactgtttaacgtggttggtcagcagctaaaatttccagagtcgccgtccacaagctactctagcagagacctcatcagggggctcctggtcaaggaaccacagaaccgcctaggcgtgaagcggggggcgacggagataaagcagcaccccttcttcgaaggcgtgaactgggctctcatccggtgcagcactccacctgaggtcccaagacccgtcgaggccgagctgccggtgaagtatggcgtggcggaggcgatcgggagcaacagcaagagaatagttggcgctgacgtgaagtcaggcggaaaatacctggacttcgagttcttttagagtagtgctgccccagtggtggctattgtttgcatgctgttggtgtatggtcagtttgatgtcgtgtgattcgatgtggtggtttgtgtctcagcatcgatgcaaaattctcagatctgaattggccagaattagatagatgtgtttg

SEQ ID NO: 23756 - DNA, 191 bp, Setaria italica
  Peptide Sequence Number=SeqID_89730
aatcacctcatgagcagcgccagagctacccttcttaccatgcgaaggaggcggcgccaccgcgagtttgtcgccgaccttgttgccaacatccttgcgtgccttggctgccggcgatctcgtcacgccgagggcttcctccccgctcaagatcggcaggaggtaccaccaaatggaggtgcagcagatgg

SEQ ID NO: 23757 - DNA, 282 bp, Setaria italica
  Peptide Sequence Number=SeqID_89731
caaatccacgatttcctcaaaaaaaaatagcaaacccaggattggtgaacagccgttggttcagtgtgtttgttactttccaccagaagctaagtcagaattaaaattggtgaactgctccaatcagtggggttggctaagtagaaaagattatgcgagatccaaaaactattatttttcttcctagaacaggaatattgaattgggactttgggagtcaaagggaagttagaccatccttgggatctgaagagaataaatgtcaatcagccacgagggggg

SEQ ID NO: 23758 - DNA, 577 bp, Setaria italica
  Peptide Sequence Number=SeqID_89732
aaaaaaagctcacatggacactacaaaaggctagttggtacactagtacatcaacagtaaaaggtatgaaaaaccagaagcaacaacaagtgaacaatgagacaccaagcatacgtgcgcgatcgaaacgcaagacgaaccggctaggcgtttcagcacttgagtgtcttgaagcacgggaggtgctgcagctcggccagcttcacagtcggcgcggctggccctttgatcgggccgcatttgcgttcgtggcggcggtgcaggctgcagggcaccgacacctcccgcttcagctggcagaggcacttctcgttctccaccacggtacagcactgctcgcggatctcgtcatgggccaggcagttggtgaagtactcgatttgcgtctggcagctctcctgcgcgggcgcgccacctgagtagtatgcggcagcaggtgcggcggctaaggcgcagacgactacggcgaggacgagcacggcagcaaggttcgccggtgccatggggctcaaactgaaggtagctatgtttggggtcgaagcagctgggatagtctgtgactctatgagcagtcctg

SEQ ID NO: 23759 - DNA, 1887 bp, Setaria italica
  misc_feature (1838)..(1887): n is a, c, g, or t
  Peptide Sequence Number=SeqID_89733
acctcggccaggggaacgtccatcgctgccaaaaatgtcaccaactggagtggaacgtgctacatcacaccactcatcggtgcgttcttggctgatgcctacatggggagatactggaccatcgccagcttcatgatcatctacatcattggcctggcgctgctgacgatggcgtcgtcggtaaaggggttggtgccgtcgtgtgacatcagcagaacgtgccacccgacggagccgcagacggctgtggtgttcgtggcgctgtacctcatcgcgctgggcactggcgggatcaagccctgcgtgtcgtccttcggcgccgaccagtttgacgagaacgacgcgaaggagcagaagagcaagagctccttcttcaactggttctacttctccatcaacatcggcgcgctggtggcgtcgacggtactggtgtacgtgcagacgtacgtcggctggggctggggcttcggcatccctgccgtggtgatggccatcgctgtcgtcagcttcttcatcggcacaccgctgtaccgacaccagcggccaggaggcagcccaatcacgcgcatcgcgcaggtgctcgtcgcgtccgcacgcaagtggagcgtggccgtgcctgccgacaagtcgctactgcacgagacccccggacggggagtgcggcataaaggggagccgtaagctcgagcacaccgaccagttcgggtgtctcgacaaggcagccgtcgagacagccgcggacaggacggcggcgagcccgtggcgcctgtgcacggtgacccaggtggaggagctcaagagcgtggtgcggttgctgccaatctgggcgaccgggatcgtgttcgcgacggtgtacgggcagatgggcaccatgttcgtgctgcagggcaacacgctggaccagcgcatggggcccaagttcagcgtcccctcggcgacgctctccatggtggacacgatcagcgtcatcatctgggtccccatctacgaccggatcatcgtgcccgtggtgcgctcctacacggggcgcccgcgcgggttcacgcagctgcagcgcatgggcatcggcctcgtcatctccatcttctccatggtcgccgcgggcgtgctcgacatcgtgcggctgcgcgccgtcgcgcggcacggcctttacggcgacaaggacgtcgtgcccatctccatcttctggcagataccgcagtacttcatcatcgggtgcgcggaggtgttcaccttcgtggggcagctcgagttcttctacgaccaggcgccggacgccatgaggagcctgtgctccgcgctgtcgctcaccaccgtcgcgctcggcaactacctcagcacggtgctggtgaccatcgtgacgcgcatcaccaccaggcacggcaagctcgggtggatcccggacaacctcaacctcggccacctcgactacttcttctggctgctcgccgtgctcagcctcctcaacttcctcgtctacctcgtcatcgccagctggtacaagtacaagaagacggcggattacccggacgccaagggggagcagaaccaggagcactgatgagcagttgagcacgccatgaaacagtgcagggatagtggctgactgaaaggggaaggtggaaacaaattgatttctctgtggttggctttctgtttgttcgtgtgagttcgtgtgtttaaacgtagatcactgtaggtgcctgggggaatcaattgtttggatgtcatgtgatagttttatgtgcaatgcttgatcccaattatcaatatctatggaataagttgagctaacctaaaaaaaaaaaaaaaaaaaaaaaaactaagaagaactagannnnnnnnnnnnnnnnnnnnnnnnnnnnnnnnnnnnnnnnnnnnnnnnnn

SEQ ID NO: 23760 - DNA, 549 bp, Setaria italica
  Peptide Sequence Number=SeqID_89734
tatctcattccctccgagccctcatcaggctgctgacccggtcccgggctcaacgaaggctggctcctgggcctgtacggaagcacaaaatctccagtagtagtgctcggcggcaatgacgccatgtcgtcgctttcacgcttgctcctccccttcttcatcaagaaacaacagcagccagccgctgctagcaggagaagcacaccggaaatggtcgcgacgacgatgatgatcagcttgcccttgtgtgagcgctcgtggttatctgctgctgcggccttcagggcgtcgatgtcggactgcgcgagccgaatgtacacgtcctgcacgacgatcgggtactgccgcatgtccagcaggtcgacggtccagaggacgcagccgacgccgaccccgccgctgttgttggcggcggcgtacgccccgcagctgcagttgccgaggcacgcctgcctgcactggtccagcgtcatgccggcgtacaccgtcgcgtccgtcgcctgcggcagcttcatccggttcaccacccagaacccgtcgctgctcccg

SEQ ID NO: 23761 - DNA, 522 bp, Setaria italica
  misc_feature (424)..(424): n is a, c, g, or t
  Peptide Sequence Number=SeqID_89735
ctgtaaattatattccattcgatgtggactggatcactgattccgactattaaccttatctttcttttcttactagtaggttaggaaagcaatatgaaaaaaactaattatgtacactaatctggattagtatgactaagttttaaaatattgcagcactattctctctgacaatcaatcaaagtacacagttattaaaaatatagtgatattgaagttcttcctatttcaatactaatatctaacacttctatgtatattagtaaacagagtatttgaagattgactaaacatagtgtagcatagcagggtattgttcattctctcaaaactcgatagtttttttctgacaatatgagccaggtttctgtttaatatgttgtcagtcctttcaatactttactgcttgatgtagccaaaaagnttcggcttagctaattacctctttatgatttgtgatgcagtctgatggcaatcctttgttacagaagtttctttagcattggagtgttggaaaaaagc

SEQ ID NO: 23762 - DNA, 685 bp, Setaria italica
  Peptide Sequence Number=SeqID_89736
cagaacattagcaaacatgacataaaaagaaatgaaaagggaaatttcagatcgtacaaaaaaatttggaagggaacagatctcatgtagactgaataaaaaatcaaaggaaaggaaaattgcattgcaatctcgttattaaagctcgacatagaggaaaatggtagaaaaatgcatgcacaagtttccaatctcaggaaaaaatcacagaacatgctgatgagatgcatctcgctgtgttacttgccattgcatgattcgagctgctcctccttgcgcgtgccttccctgccgatgccgagccatgtgccaccatgggagacatggaggagcttgccgccgctgacgaggaaggtcggggatggctgccttcgcagcagatccaagggtggatgagagaaaggaggaagaagtacgtcacccggtcatggaggacccgggtctggcggctccgtagatccagcggcgcccgccgcttcagccggtgtcgagacccacgcggaggagatcgctctccccggatccggggtcaccttctcaccggtgcccatcgcaggcaggtcgcgggacctcgagctccaccatgaagctcatctccaccagatctggcagaggacgacggtgtgcgggcttcaactccacggatccaacagcctcatgaccctcatccatggtgggaccgggg

SEQ ID NO: 23763 - DNA, 543 bp, Setaria italica
  Peptide Sequence Number=SeqID_89737
agatgatctacaaatccttgcaaagaaaaccaaaagctgtgcatgctatttctcttggacaattcttatgacgaaatccagcttaccttccatgaagatgagttcccaaagctcaaacatctaactgtcaagtgcctgaagatcagggaaatcagcttcgccgagaaatctgcttgtaagctcgagaagatcatctggtccttcatcgagctgaaatctctctctggcatcgataaacttccggaattgaaggagctagtgttcaacggtgacagtatccctcttgaggtgaggagagacattcatgcacatgacaagaaacttatacacaacaagacgcagcatcaggacaaagagtaaggatcggcacctgctaaggaaatgtcttcactcttctccatccttcatccattcgtcgctgattcccaggactgctactagcttgtgtgtgcaagcagctcgatcttacgtatgtgtgattcgcccataattcctcgttcatgcttgtgttgtgttgtgttgtgtgtgcatttcctccgtgcg

SEQ ID NO: 23764 - DNA, 452 bp, Setaria italica
  Peptide Sequence Number=SeqID_89738
gtcaccatcttgaagcggcttgacacgaagacgcagaatagttagttcttttatttctccaagtatctcaattatcttaccttcttgtgatatggtcatctctaattccagttttgttagcttgtgaagatctttgatccacggtggcactacttttacaaggccatacatcttaagggtctgaaggttctttggaggtgaggagatatcctgcaaacaacattgatctccctttctgagccacagtgacaaggattccagatggacgtgacatgagaaggcttcactgacttgcttgcagtttttcttgttgataccagacactccaagcttgcgcaattgggtgagcatcttgagctctttaatggtggccttgcggggtgtgatagcagcgttgacaacaccaagagtgtgcaatgccgtcaattttgttctaattcccttgtctaggt

SEQ ID NO: 23765 - DNA, 2084 bp, Setaria italica
  Peptide Sequence Number=SeqID_89739
ttcgagcgcatctgcctcaagcggatgaccatctccgatgacgacctccacctcgtcgccaagtcgttcccgctcttcagggagctctcgctcgtgtgctgcgacggcttcagcacggtcggcctcgccgccatcgctaagctctgccggcatcttcgcgtgctagatctcattgaagattacgttgaggatgaggacgatgagctggtggattggatctccaagttcccagagtccaacacctctctggagtcacttgtctttgattgtgtcagcgttccgttcaactttgaggccctggaggtactggttgctcgctcaccagccctgcgccggttgcgtgtgaaccaccatgtgtcagtagagcagctgcgccgtctgatggcaagagcaccccagctcacgcactttggaactggtgcattccgatctgaagctgcccctggtgggggtttgtctgtgactgagcttgctacatcttttgctgcatccaggtcgctcatttgtctatcaggtttccgggatgttaatccagaatacctcccagcaatctacccagtttgtgccaagctcacttctctaaacttcagctttgcaagcctaactgctgaggaactcaaaccagttattcgcaactgcatcaatcttcgcactttctgggttcttgatacggtgggcgatgaaggccttcgggctgtggctgatacatgctcggaactccgtgagctgcgagtttttcctttggatgcctctgaagattctgagggctcagtctcagatgttggtcttcaggcgatctcagaaggctgccggaagctagaatcaatcctctacttctgccagcggatgacaaatgcagccgtaattgctatgtccaagaactgtcctgaccttgtggtgttccgcctctgtattatgggccgccaccggcctgatcggatcaccggggagcccatggatgatggttttggtgcaattgtgatgaattgcaagaagctcaccagactttcagtctctggcctgcttactgataaagcttttgcatacattgggaaatatgggaagctaataaagactctgtctgttgcctttgctgggaatagtgacatgtccctgcaatatatatttgagggatgcactaagttgcagaagcttgaggtcagagatagcccttttagtgacaagggattgctctcaggactgaactacttctacaatatgaggttcttatggatgaactcatgcaggctaactatgaggggctgcaaagatgtagctcagcaaatgcaaaatttggtggttgaagtaatcaaggaccaccctgatgatgaaggggaggctgagattgttgacaagttgtacctgtatcggtcactggcaggaccaaggaatgatgctccaccatttgttaccctcttgtagtactgctgttggaacctgctgtacccacgaacatgtttgttcaattattcctcatcaagtttttcagagccagcgagggaagcttcctgtggatgattttcaagttgccgcaggaatgctcctgtaaatcaagaggctgctgattattcttttctcttgatcttcattgatcgttgggctggcagggcggcattctgagttggggcagttgaggagcacgtccaaagcaagtcatcggagcgcttggcgctggtcttacagtatagcaatgatgagtagggactgattgcacagggactgactgcacactgactccagtcagctggcttcggatggttcttcggcactcaagtctcaagctacttgtatcttgccatctccctttttgttttctgctcagaccaaggaatggcaatgctgcctatgtccgaagcttcaatgttccatcggccattatgttttagattatccaaaactcggctacgctatttttctccctttttctacgttttagcactcatgagttattttgtagacctgtagaccattatcccttttcttggtctccaccctctgctatttttaatcaagaagctattggaggaatttgaaatttctattcggtctaaaaaagagactagccaaggacacacagggagtag

SEQ ID NO: 23766 - DNA, 202 bp, Setaria italica
  Peptide Sequence Number=SeqID_89740
attttgtctacgaatctcatgactagtttgagctactatgcgaacattaattacattaaattgaaatagtaatacatgctagtgcattggtacttgttatgagtaatgtgaccactagtttaaaaatatcaccatcactgcttatgagtttaagaatatcaacatcactgcttatgagttaattggtttgtagtcttttcta

SEQ ID NO: 23767 - DNA, 806 bp, Setaria italica
  Peptide Sequence Number=SeqID_89741
acatcggcctcgccggcttcgaggtcatcgacaccatcaagcagaaggtcggcgccaacacctcctgcgccgacatcctcgtcttcgcggggcgcgacgccgcggacatcctcagcggcggcaagatcttctacaagctcgacggcggcctcaaggacggcgtcgtctcgtccgccgcggccgcggacgccaacctccccgagtccaccttcgacttcaccgatctgcagaacaacttcgccgcgtccggccgcgggttcaccgtcaaggagctcgtcgcgctctccggcgcgcactccatcggcgtcgcgcacctctcgtcctaccaggaccgtctcgccgccgacgccacgcccatcgactccgactaccagttggcgctgaacaagacgacgcccctggagttgctcaagaaggggcagaacccgacggtgcccaacaacccccgcgacgcgagcgccgcgttccagaaggacgccgcctacgaccccgtgacgctgggggtgagcccgaccaggaacgtcctggacaacagctactaccacaacaacctcgagaacaaggtgctattcaagtccgactgggtgctgcgcacggacggcgtcgccgccggcaagctgcaggattacaaggacaacgcggcgatgtggaactccgacttcgccgccgccatggccaagctcagcggccttcccccccagggcaagaatttggagatcaggaagaactgcaggttcaccaaccagcagtactactactagaccaagctagcgcttgctttaacaacggaatgaatggcgccaata

SEQ ID NO: 23768 - DNA, 257 bp, Setaria italica
  Peptide Sequence Number=SeqID_89742
cgaatggggtcttccttcttccttcttccttcaattagtgcaaccaatcccaagctccgagcagaaacttaatcagagcaaccacggagatcagatccgcgacagctgccgcgcgcaatggcatccccggcgaacggagcgctggaacggtgcaagagcgccatcacggccgccacgtccgtggtggccgcggccatgctgctgcgccgcctcgtcgccgacgtcctcccggccggcgcgcggcccctggtcggcac

SEQ ID NO: 23769 - DNA, 235 bp, Setaria italica
  Peptide Sequence Number=SeqID_89743
aaactcgaaaatcgaaaccggcgccgccgacccgccgcatccgccgccgccggccgaccggatcctcccgcctcccgctccccgacgcggtcgcgtcaactccacctgcgcccccgcgacctcgtcgctgcgagcgcacatgaccatgatcacgcggtcaaacctcagaggcagagacccatcccgcccgctccgctagcaagtagcagcaaccccccacgacccctccaccacc

SEQ ID NO: 23770 - DNA, 634 bp, Setaria italica
  misc_feature (557)..(634): n is a, c, g, or t
  Peptide Sequence Number=SeqID_89744
aactaacaaataacctaaggaaccaaagacgaacgggactagtagcccatcggggacgggtacctcaagccgtacgtgtcgtcggtgcccgaggtgacggtgacggacctcgtcgaggacgacgagtgcctcatcctggccagcgacgggctgtgggacgtggtgagcaacgaggccgcctgcgaggtggcgcgcgcctgcctccgcaggggcagggagaagtggtgcgccgaggccgccgcgctgctcaccaagctggccctcgccaggcgcagcgccgacaacgtctccgtcgtcgtcgtcgacctccgccggaagaaccactagcgctcgctcgctcacgctccgtggtagtagtacagtgggatgatgcacaaaaaagactgggggatgtagttgtagctagtaattgtactaatagttttttctttttttggaatcattttttggctgtatttctccctgaatcaaagttcagaggagcgcttagattaattattattatggtgtaaccggaattcgatccggataccatttcggatgaaaaagggtgttcnnnnnnnnnnnnnnnnnnnnnnnnnnnnnnnnnnnnnnnnnnnnnnnnnnnnnnnnnnnnnnnnnnnnnnnnnnnnnn

SEQ ID NO: 23771 - DNA, 817 bp, Setaria italica
  Peptide Sequence Number=SeqID_89745
ccgcgctgctagccgtcgtcctccagctctaccgtcttaggaagccgctcagtgtttgacgttacaaagggaggtcacattatggtcctggaggaggttatcatcactttgctggcagggatgcatcacgggcgtttgtttctggaaattttacaggtgacggcctgactgattctttacatggtttatcaagcagtgaggtaaacagcattgttgattggaggaaattttacttcgagagatacatatttgccggtaaacttattgggcgctactacgacaatcaaggaaatcctacaaagtacctgaagggtgtagaagtaaaggcaaagagaggtgcacagcttcttgaaaagcaaaagagtgaggaagctaaaatacccagctgcaattcaaaatggagccagcaagaaggcggagaagtttggtgcgatacaggctacccaagactagtgagaaggccaggcgacatagctctgaccggacaagttagccaaaggtgtgcctgtttccaggaagacgagctcaacaaaccagggctagtggcgtaccaagggtgcgatcatttgtccaagtcctgcaaagtaaactaggtccgccgtacatctccctttccttggtccacaaacttgttgctccgtgttacagcagcagtgacatccgacaaggcaccagccacgcatcatgatcgtctgcctgtgctgttccagtccagtcgtgcatcgatcgatcctctcgaaatatctggtgcagcgtcgtgtttttcagatgtgaagatacgcaattgatttggaggatacgtgcaatcgattcgtat

SEQ ID NO: 23772 - DNA, 247 bp, Setaria italica
  Peptide Sequence Number=SeqID_89746
caatgacagggcggtgccagttcctggcgacgaaggaagagggagacggctggggatgggcaaagttcatggcggcgaagtcggtggaggactggtacctcgtgaagggcagctgtttaatcgaggcagatgttgccatcgttggctcgtccaagatggcgtagagatccaaattgggatgtgcagcgtggcttttgtttcgttgatgctgtctgtctgaactatgaatctgaatgtgctgtcagta

SEQ ID NO: 23773 - DNA, 349 bp, Setaria italica
  Peptide Sequence Number=SeqID_89747
tactcgggcgaggcgaagaggaagcagtcggcgtcgcggacgctggcgcggaacgcctcgacggcgggcgggaagcccctgtcgccgtcggtctcgaggtcggtgttgagcatgggcaggccggcgacgtcgacgtcgtcgacgcgaagccccgggatggagtccgcgcacacctccgcggcggcgcggatgaggccgcggtgccaggaggccttgcggatggagccggagatggcggccacgcggaggacgacgggcttcgccgccgacgcttccattgtcgtctctatcctcgatcagttcctctcactcctcaattctactggctactggcgatcgagcacactct

SEQ ID NO: 23774 - DNA, 486 bp, Setaria italica
  misc_feature (434)..(434): n is a, c, g, or t
  Peptide Sequence Number=SeqID_89748
cggcggttgctggcgcggctccgcgacgcctacgtgaacgccatgctccggctcgcgtcctccgccgcagtcgccggctacggcgccgccgggccttactgcaccgcggccgaccccttcgcgcggccgcggccgctcaccggggattacgacgagaaggcgctcgtcgagatctaccgggccatcctcgcgcgcggggaggccgcgccggtggtcgcagccgcccggctgcccgcggtggtctgatgatctgccggacccggcggcgatgccgatgggagtgcaggagctcgtcgcgctcctctacgcttcttgttcttgcctcatgcaagactcgtgtatgctagaatttccttttgttacatatatagcgcatgaacttgtatgttaaaatggaaattctattgctactaaacaaaaaaaaaaaaaaaaanaaaaaaaaaactgagacacgcaacaggggatacaaggcacacaggggatagg

SEQ ID NO: 23775 - DNA, 636 bp, Setaria italica
  Peptide Sequence Number=SeqID_89749
tttttagttccaacttccaagggaacgacttgattaaaccttagttatacatgcatgaataatatagcagcagcagctagccagctaatggaaaattccatcgcctaataaacaaactcctacatgaaatgacatacaactgatcgaccagatcaatggagagtgcgtgttattagaaagctcacacacctcataagcaccatgatatatcactctctcatcgcctcgcttccttgctcctcctcgctctggagccgctgggccgctgccggcgcgaggaaccccatgaacccgccgccggcgccaaccagatggctgaacccgatctgcccagccattgccgctggctggtggatcgcggcgagagggtctagccaagtgcgggcggacgacgcccacccgccactggactgaaggggttccccttgggagaagagctggctctggtgctctagcccttgccgcggctgcgcgccgaacatgtagccgtcgccattgccggcgccgcggccgtctcccgcgccgctctccgaggcatgccacggcggcattctctggccgtgctccggccagcctgggacgcctgcaccagagatcataccttgatggctgaagatctggtgctggttggactgg

SEQ ID NO: 23776 - DNA, 486 bp, Setaria italica
  Peptide Sequence Number=SeqID_89750
caagaaggacgtcctcctacctgcactactgctgcagggaggccgaaatgggccatgcatcagtgaccagcctgccaaacagcgacgagtggtcgagagcagcatgcatcgtgctgaccaaacgccctgtgcgcggggcgaggaggctgctgaaccctatctcgtcggcatgcgtacgcgatggttcccttgcggatgacgtgaagctttttcgacggctgtcgatgctttggtggttcgttcgggcggcgccctcaccggacggacggaagggaccagccgcaacagctgcgctgcgctgctctgctctgctgaacggacctgaacggacgggacgccatcgatccgtctgtgggcaggcgggcacgacgagtacgtttgccggggatcacatggttcacctcgcgggagtcggcgacccgcacggcggggccgcagggagcggaggacgaggagaggaggtcgagcgtgagccagtactcgacg

SEQ ID NO: 23777 - DNA, 267 bp, Setaria italica
  Peptide Sequence Number=SeqID_89751
ccggcgtgcgcccagacgacggcgatgggaacgcaggtgagcccgagcaccaccatggcgcgctgcttgtagacgccgagcaggttgtgctgccgcgctccgaacgcctgcccgcacagcgtgtccagcgcagtcgccatgccggtgatgatactgaagccggtgacgctggcgacggagttggcgagggaggcgccggcgaggggaagctcgccgaggtggccgacgaacatgagggacagtatgttgatgatgttctgcagcaag

SEQ ID NO: 23778 - DNA, 270 bp, Setaria italica
  Peptide Sequence Number=SeqID_89752
tctttctttgcatctgtatcatctgcattattggatgcaatatcttcagcatagactacacgcatacttttggcaggatgctttccagagtacaatgtttgacccacataggtgctattgtttccaagggtgatctttgtgaggaaagtcctgtcaagtgtgccagcagcaacagtcacaatccagggtgccgagttgatcacggtctctgaataaggcccagagtttcctgcagagcagaccaacaacaacttcccttttgcaacagca

SEQ ID NO: 23779 - DNA, 357 bp, Setaria italica
  Peptide Sequence Number=SeqID_89753
tctgggagagtgcagatgctttcatggatattctgggaaaggatgtgaggaggttctgaaattggaatgcaacctcccgagttccccagaatggcctgcaggacgatggatagtttccatatgtgcagctcactgtgacacaaccagggcaatgtgcttctgtggtccaggaacaaaatacccagatcgccctgtggcagaagcttgtggttttaaaacaatttttcctgcaaaacctgatgatccaaagcttaccgattggaaaacacccgacctggaaaacgtattcacgacaaacagaagtaagttaggctggtgtaatgtggtccctgaggatgcatattcgtccaaagtgaa

SEQ ID NO: 23780 - DNA, 1151 bp, Setaria italica
  Peptide Sequence Number=SeqID_89754
cctacgcgagttgtaggatgcttgcttaattaatacttgaattgccatgaatgggttaaaattgagcaactatgaatgattattcaaacttgagcaagaatgctagagtcatgttgagattggatctcacttgacttagacttgtttgagttggttaaggaccgatcttggtagctggactcttgagcactattccatacaaaccacatacttaatatgggaatggtaagccaagtagcataagtcgcaccttgccttgactggattcggtgtgggatgggatgaggtgtgatcggccatgtccggtgcatctatatatttctggccgtttgttcatagtccggtgtgggtatgtgaacgattggggcatgaatcaaaggccgagggtatggtcgttggtcttctgcctcgtgtgggaaaagttgtacacccttatagggtactaatctattgcaataacctcactccaggttccggagcacgctcctgagttttgaatttaaaaatagagttaccgaatgggttcatggaagattgagctcatgacatatgatcactttacttatgcaattatattggtgcttgatgtagaattatagatgctattcttttgcttattcacttaacaaaacatgctcgcattttatggtttaatgataaaacttgacaaggctcatgcatccaccaaatatatagtattatggataagccttgcaagtacgtaacgtacttattgtgttatcgttaagttgtttttgcaggtttccttgtgagcggtggccggtggctacatccatcccgccaaagctagcaaagtggatggatggtggaggtcgctctaagcttgtgcaggtggtgtcttatgggtaaggacatcattgttgcaccttgttactttatattttccgctgtgttttaactctcaatcttagaaaaacaggataggatagccacctagacttaggctacacctatgttggttaagaacctcactttaatcggtgaaaacgctcttgttctaattgttatatgttgtaattataatctctggatttttgtaagatgatcaagacttctaaacaaggtttaaatttgctctcatatgtatccttgtgatggttgccatgattgttaaaacggttattgtcgtt

SEQ ID NO: 23781 - DNA, 234 bp, Setaria italica
  Peptide Sequence Number=SeqID_89755
ctgcgcaaccttgtccttgatctcctcctttgtgatgaccccttgttcattggcacagagcttcagtcctgtcttccacacattgcacacgtagctctggttgcagaactggtcagaaaagtaggggcagcacaagaacgggacaccatggagcacaccttccatcgttgagttccatccgcagtgtgtcatgaaacaagcaactgacgggtgtgagagtaccctttgctgggg

SEQ ID NO: 23782 - DNA, 759 bp, Setaria italica
  Peptide Sequence Number=SeqID_89756
tgttctagcctgctccaggatcctgatcagtggcttgctgctgcacctccgcccttcatccaacggcgtgttcccccacctgtctttggcctgaacatctgctccgaaatctatgagcatgccggcgacaaggtgcaggccctcgccggcggcgatgtgaagcggcgtcctctggtcgtagttcttgcagttggggtcgacgccgaagctgagcagccgcttcagcaggtcgatcctgccgtccgtgaggaccctgcacaggtaccctccggcatcctctaggttcagggctgcaccgtgcttcgctaggagggaggtaatcctgtcgtgccctgacttcagtgctagcagcatcggtgaattcccaaacttatctatgctgttgacgtttgctcctctctgaatcaggaacctaacgatatcttcatatcctcttaaggccgccacatgcagtgctgtccttccatcgtaatcgggtttactcggatccgctcctgcactgatcaagcctttcaaacggagcaagtctccatggtaagcagcattgttcactccaatgacaagatctgcttcttgccttgatatcaggtatgccatatctgattcgagctgattccctttggactcgctttttctccccttcaggaggttgctcaagatctgacggttatccttggagtatacttgcaggatgctggtcagggactgcctgtcgattctcaggacgctgcaaagctcacagaccctgactgagtatgg

SEQ ID NO: 23783 - DNA, 263 bp, Setaria italica
  Peptide Sequence Number=SeqID_89757
gcgaagccccccagctccgtccggcccgcttccaaaagcacaccaatcctcctcgtgcttgcagccgatgtcggggcggtagaggaaagcagcggcaccggtgctccggccatggcctctcgccccctccgcccatgaccccatgccattcttctactcctaccaacgccccagacacatgcaccgtccttcttccctgcaacttccacacaccctcccaacttgaacctcaacgtacgaccaaatagacttagacgtagacc

SEQ ID NO: 23784 - DNA, 747 bp, Setaria italica
  Peptide Sequence Number=SeqID_89758
tctccccaaatgtcaagtgtgcatacacctcatccgcgatcacaaagatgccaagcttcctcgccatctccgcaaccttggccaaatgctcataggtgtagacgttgccacaggggttccccgggttgacgatgaccatggcaaccgtgttcctgtcagcaagtgcctgcacgccatcaaggtcaacctcccagcctctctctgccacaaggtcgaagtaccgggcctccatgccgttgaggacggcgcgcgcctcgtagaacaggtagcctggccttgggagcaggacgttggcgccatggcgagccaggacggagcagacgatctcgatggcttgggtgcagccgctcgtgaggtagacgtcgtcggctgatagctcgtagggaaggtcgcgtgacaagtactgcgatatagaccttcgtgccagcttgaggccgacgcaagtggcgttggcgtaggagttgtactccccggatcggagcgcgccggcgacagcgtccacggcctccggcgccgtccggaagcacgggaacgccgacgggtcgccgtgccccagcgggatcaccggccgctcgccgtcgccgccgccgctgtcctccaccatcccggcctttatgctgcccagcacgccgcgcaccgagagcgccgtcacgccgaggagggagtcgttcggagcgaagttccacgcggcggcggcttcgttgccggcgccgttctccatcgaggaccggcggttgtgtccttttg

SEQ ID NO: 23785 - DNA, 460 bp, Setaria italica
  misc_feature (446)..(460): n is a, c, g, or t
  Peptide Sequence Number=SeqID_89759
tcctgtcgttgcttggcgggagcttccggaacgtcgacgtcgacaggctctgaagcaggcaacgctcttgaggctcgatttctcttcttctacagctctttttcttcaaaaaacaaagaggaaaaaactactagtatttcttttttatcgtagctgttagattggctgtctataaaacatgctcttgtatgcaaatcgaacttatatggcgaacttaggttagttttggtccccttgtgtcataaaaggctaagacatggatgtgtcgggggctgttacatacatgtcgagttattcgtggcaggtcccaaagcttttgggattggaaagctttgtagctgcagttgttgtgaataagatcaatgggtaatgatcaaccatcaaattgtacttcttgcaacactctgctgaaatatcagctgacgatcgaactatacctcttgatnnnnnnnnnnnnnnn

SEQ ID NO: 23786 - DNA, 166 bp, Setaria italica
  Peptide Sequence Number=SeqID_89760
cgaccacggcgatggccccgcctgggctcggtcggtccagcaaccagcggcacgggaggctcggatgcaggtgacgcggcggcgcgtgctcctccggctccggccgctgcggcggcgcagtgcgtcggcggagaagcgagtggccgcatactgtagaaggtcccgg

SEQ ID NO: 23787 - DNA, 904 bp, Setaria italica
  misc_feature (879)..(904): n is a, c, g, or t
  Peptide Sequence Number=SeqID_89761
acccccgggccctcgcctgcggcaaccccactcctgcacctgcgacagcgccagccccagccccagcccctgtaagtaggtaagtcagctggggtaggtggggttccacacctccgactactacaagatccgcgccgtcatcgcggacctgcgtgtccgcttcgtccaggtttaccaggctaccgatttccgcaacactgatgctgctcgtgagattctgaaagaaataaagggagttatggaactatccaagaaaatgaggctcaagcttggtgctacatctgagcctgtgaaaccaacagagaagcctgcagctggacttgtgaaggatgagcccgtgaaacaatcagagaagctttcagctggacctgtgacagaagagcccgtgaagccagcagagaagccttcagctggacctgtgaaggatgagcctgtaaaaccattagagaagccttcagccgaacctgtgaaggatgtgcctatgaaacccaccgagccagctccagctccagctggagaaaacaatcaagttcccggggtaggccagactacaatttctcctaataatgcaggtgttgattcggcggtcaagaatgataactcagatgtccagcagtgaagattataatggaaatccaacccagtgagatggcggatgacgaagatgcagaaggaccagttgattcccctaccagcttgagttttcttgcctcttgtggagataatttagtgtgtatgtgctaaccaaagaagaggggtgagcacgtcaagatgcaaattagattgccgtgttaacactcattcattctgtaatttgttgttgaattgcccatgaataattttgtcatcaaatagtagcttgtgtagctggatcatacnnnnnnnnnnnnnnnnnnnnnnnnnn

SEQ ID NO: 23788 - DNA, 249 bp, Setaria italica
  Peptide Sequence Number=SeqID_89762
gagcgcgtgggtcggtgggtgggcgggtgggccggcggcagcagagctgcgcggagccacgggctcggcgcgcgagatctctccggcgccggtcacggcgaccgttggggttgcctccggggtggcattgcgatcggggcgaaggagctggtggcgcgagcggcaaattggctcgattcgcggaggcggcttcgcggctttcgcctccttgctcagtcacggcggaggggggaggggagcggggaaaca

SEQ ID NO: 23789 - DNA, 314 bp, Setaria italica
  Peptide Sequence Number=SeqID_89763
gagcgctgcagcagcacagatgctctgcaggaggcagcgcgcagcagctgtatctgatagaaaagccagggagcaccacagatcgtcagatcggacggtgcaaaattcaggtaacgggagctcgtgaatccctaataaaagcattctaaacttttgcttaatctaaacaatgataccaataacaaagaatgaaaggaagttgactctgcaaggcctcgtcaggcctccctctcgtcgttcctccagttgccgtgcatcttgggccccgtcggcccatcgccgacgagcaccttctccaccagcttggccagccg

SEQ ID NO: 23790 - DNA, 260 bp, Setaria italica
  Peptide Sequence Number=SeqID_89764
tcctccaacctgttacaaatgtggtgttgccggccatattgcgcgtaattgccctcagggaatagatgataacttcaaagcaaggagagatggattgaacttcagggaaaaatggcagctgaggcaaagaagatttgggtctccctcaaggaggcgaccagaagttcatgttcatccattggatcaaacaaatcatagggttcaagatggtaggaaaccattttctgagaggaatatgagactgcctaggttgagtaatg

SEQ ID NO: 23791 - DNA, 440 bp, Setaria italica
  Peptide Sequence Number=SeqID_89765
gttcgcatctctcgttcagagttcagacttcccttgcgtatgaacagctccatgacagccacaacataaagctccttttgccatcgattgcatgcctcggtctcctctaccattaagcaattgaaccctagatatccaggaagccggcctggtgcttccggaggcagccatgatcccgcccgttgctgatccggcgatgctggagggcgccgctcgctcgccgctgctcccggcgaccgaccctcggcgtgctgcggccccagccggcggcgccgggcagaggcgcccgtcgtcttcgaccgttctccccgccgtcgtctccgccgtgctcctgctcgtcctcgcggtggtcacgatcctcgcgtcgcagcacgtcgacaacgggcagcgggtcgtcatgccgccagctggcggcgacgtcgccgccgccgcgggccgcg

SEQ ID NO: 23792 - DNA, 395 bp, Setaria italica
  Peptide Sequence Number=SeqID_89766
cgcccgccgaggcggccgcggccgtcgcccgcgccgtggaggcgctcggggtggcccccgtccacctcgtgctccacgattcgtccctcgcggccggggcagcattcgcgtcggccaacccgggcgccgtccggagcgtgacgctgatcgacgccaccgcatccgtgccagcgtttccggccgcggtgttcgacgtgcccgtgctggggaggctggtgctgcgagtgccggcgctgttccgtgggctggtgcggctgtgctgcgtgcgggggatgggggccgaggaggtggaggcgcaccgggagacgatggcgggggggaggggaggacacatgaggtgattgaagcttggaaggcgatgaatcacagctttcaggttgggtgaatgggagggg

SEQ ID NO: 23793 - DNA, 782 bp, Setaria italica
  Peptide Sequence Number=SeqID_89767
gaagaaagagaggatcgacgagatcaggaagctgaagcagcgccgtgaagagctgatgttcagtttgcaggaggccgagcgccgcatggacctggcccgtgtggccgacctcaagtacggcgccctccaggagatcgacgccgccatcgccaggctcgagggcgagacaggggagaacctgatgcttactgaaaacgtcggtcctgaacaaattgcagaggtggtgagccgatggactggcattccggtgacccggctcgggcagaacgacaaggagaggctggttggcctggctgacaggctgcaccagagggtggtcggccaggcagaggccgtgagcgccgttgcggaggcggttctcaggtcgagggccggtcttggccggccgcagcagcccaccggctccttcctcttcctgggcccgactggtgtggggcaagaccgagctcgccaaggccctcgccgagcagctgttcgacgacgagaacctgcttgtccgcattgacatgtccgagtacatggagcagcactctgtcgctcggctgatcggagcaccacctggctatgttggccatgaggagggcgggcaactaacggagcaagtgaggaggcggccgtacagcgtgatcctcttcgacgaggtggagaaggcgcacgtctccgtgttcaacacgctgctgcaggtgctcgacgatgggaggcttaccgacgggcaaggcaggacggtggacttccggaacaccgtgatcatcatgacgtccaacctcggtgctgaacacctc

SEQ ID NO: 23794 - DNA, 709 bp, Setaria italica
  Peptide Sequence Number=SeqID_89768
aaagacttgcatcatagcaaccattgcaccttcagtacactgccttgaggagacgctaagcacactggattatgcacatcgagcaaaacatatcaagaataagccagaggtcaatcaaaagatgatgaaatctgctctcatcaaagatttgtacttcgaaatggaccgtcttaagcaagaactatttgctacgagggagaaaaatggtgtttatattccgagggaacaatacttagcagatgaagctgagaagaaggctatgtcagagaaactggatcgtttggaacttgttttggaatcaaaagataagcaattagatgaacttcaaggactcaatgaatctcagaaacttttgagtgcagatctaactgataaaattcagagattacagaaaaagatgaaagaaactgagtgcaccctagcagatcttgaagagagatacatgcatgcaaatgataaaattaaggagaagcagtatttgatagaaaatcttcttaaatcagaaaaagttcttgttggtgaagcacaaacacttcgatctgagctggagaatacagcaggcgatctatatgggctattttcaaaattagaaaggaaggaaaagattgaagatgcaaatagaagtatagttcaacagttccattctcagctaactcaagacatgagtctcttacatagaacagtctcaacctcagtctatcaacaggag

SEQ ID NO: 23795 - DNA, 251 bp, Setaria italica
  Peptide Sequence Number=SeqID_89769
acgacggcgccattggcacacggccacagccacagccacaagcaccaccacgaccctctctctctctccgtcacccggcacgcagcgcagcgacgagccgagccgagctctcctcctccctcacctacgcatcaagaacggccttaatagccggaaggcgaacaccaccgcgtctggccagccagcatataccccgcgcacagacacacagacacgcagagagaagggagagagcgcggaagaacagctca

SEQ ID NO: 23796 - DNA, 384 bp, Setaria italica
  Peptide Sequence Number=SeqID_89770
ttaattaagtgcaagtcctcgttttggacctgtcaagatcagcgattcatcctacacaacttgcatgataagttatccaaatataaaaaacgaatatctgcaatacaggtagaataaaattccagccacaaagcataagaaagctgttaccaagataaaattgtgaatgttcaaatgctatactcatgtacatcccatagggtagtatcattagactgactagaagctagattgttctgcagtgttattatgtctgatgccatatctaaaccatatgatattaccctctccagtctccaaacgaaacagtaacagtgacatatccttattatttcataactggactcatgtttaactatcttatactacgctcaaggggaaagt

SEQ ID NO: 23797 - DNA, 268 bp, Setaria italica
  Peptide Sequence Number=SeqID_89771
aaccaagcaggcagcaagccgcaggacacaagcaaacacctttgagggttttgaggaagagagagaagctagcaagggagagagacagagagagctcctgctcctcctccttcctccacactgcattgaatcccccattccatctccattgagatcatcgccactcccaatccagcaggggggcagcaagcaagcccttgcttggtgcattgtgcactgcccgagccccaaacaccgcgcagtttttcatgcggctgccgttgccatt

SEQ ID NO: 23798 - DNA, 553 bp, Setaria italica
  Peptide Sequence Number=SeqID_89772
aatcttctcactcttcccgcaattcatggggtagttgccgatgtctcatccactcctcagtatctttctgctttattctccattcctcaacccttgcagtgattgattgcaggtaggtctggacttttccaatcaaatgcgcaaacaagacaagaccgaccatcgccaagaatatagcatacagtgtctccccaagaaaggtactcacagtcaatgtttggccatagcaacttagattctgcaagccccaccaaaggcaatagacatatttcttcaggaagctctgattaggagtttcgttgtataacagtggctggaacataccaaagtcaaaatcgggtttgctactagcattacatctagaaaagactaaggttccgttccaactaggatctggtattacaccacaatacagataccgaatttcagtctcattgcaatattttttccaacatgcgaactggcgatcaacggatagaaggtaccatagtgctcctaaaacatggctagcaatcatgtataacagcagattgtatgcagctcctttgtccta

SEQ ID NO: 23799 - DNA, 2044 bp, Setaria italica
  Peptide Sequence Number=SeqID_89773
tttttgacacagcaatctgtgtggtgcaacattttttttcccgaaagaaatacatccagccttacaatttacagactccacagttacaggcaacgtactcacaggcttcaatgttagattcgtaagctatcagtctatgtaaataatgtacttttcttcggtttcaagaattctataggcacagggcgtctgaatttacaacatgataacaccagaacaacatctagttaacttacaaccgttcaacctatctcagtcagaagcgtcatcgcatttcgagctttgagttaccttcctcgcatcaacacccaattcaattcattgtatcaagttggcttgtagtgtcatgcgtaaatagagcaactggcagcagagtcagcagcagatgcagaaataaccacgaatgtagcataggaccttagtcatcaggttcagctgagaaatccggttcgtctggcttccttagctttggcaattccttcgttctctgaggagctttcctagtcctagctatgaatttgagtgcgaggctattcttgggtggagattcatcttcctcatccacttcatctaatctgacggaattgaatgactccctcatactcaagtcctttgccatcttcctcctcttgtaccgccgccaagcagcttggatgaagcacgaggcccaagttcgccagtggtgcgagtagtaccggaaagtgtgctgcaacttcttgctgtgcagccgcctgaactgattggcaacaaacttgagatcctcagcctggagggcaaaggcttctacttctatgagtgccttcacggtccgagtggatgaaggcaagttggtggtaggcttcggggcaagagcccatccaagaagttcctcgccacagaaatcaccaggttttagagtgattgaattgaagaagcccgagcggccaccattcgttgtggagctttccagtttcccacgaatgataaagagcatctcagtcactgggtcaccctcacggacgatatgcgtgccctttgtgcaaagtgatgatacaagacgctcacagatggcatcaagaagctgatcatccatctgggagaaaaatggaacccgtcgaacaagacccaagcaaaggtggcgcttaatgtcacgccgaagatctgctggtagggcctgcaatattgactcttcattcacaccccgagtggcaagccacttgtactggataaatcgtctcaccctttcccgcagttcatgaggcagttggcggtgtctcatccactcctcagtatctctttgctttaatctccattcctcaaccctcacagtgatagattgcaggtaggtctgcacatttccaatcaaatgcgcaaacaagacaagaccaagtactgccaagaatatacaatacagagtctcaccaagataggtactcacagtaagagtctggccatagcagcttaaatctgcaaaccccaccagagggaatagaaatacttcattacaaaacgttcagcaggtgcttgattcgtcaatgcaggcaggaacatgccaaaatcaaaactgatggaggtattgctagcattacagttactgaagatggtagtggtatttgcccaagtactatctggggtgtcatcacaatctaggaacttaatatcacaaccagtttcatccctgcaattcttcttccagcaggctgtctggcgatcgacagatagcaaataccacagtgcaccgagaacatgactagctatcagatagagcaccaggttgtatgcagccccttcccaagcagtcttggcaacaactccagtagttttgacaatttcataggttaaggggaatatgagatacaaccttgggagatactgagcaagaactataagcaccagaatgttattgttatgttcagaagtggaatactttatagctggtatcacaaaccagataatgatctgtggcaaaggcaatgcagccaccacatcaactgcaaagtcagatctcaaatacttccatgcaatttccttgggattcgtgacaagatctcctcttccaaacacc

SEQ ID NO: 23800 - DNA, 327 bp, Setaria italica
  Peptide Sequence Number=SeqID_89774
gtgctgttttcacttctggaatcgagtgataaggctgagagtgatgaagatgttatggatgacatgtcagggcaaaatgagattgccgaaaggtttcctggaacctctctctcatggtcctcacaaatttgtacagatcattgttgcagttaagatccttcaccaattctttggagccatccacaaagggaacacaatggactaagatgtatctttcttcaataagcttttatgacaaaaagaatactccctgtcaggactttgcacatcaattttgctgaacacaaatttgaccccttctcctccaacaacttgaaaaccaagaaa

SEQ ID NO: 23801 - DNA, 496 bp, Setaria italica
  Peptide Sequence Number=SeqID_89775
gggatgctgctgattgggatgatagtcctttcttagtaggaattttcagattctttgaccgacttcgagtgtgcctttggttggtgctgttttcacttctggaatcgagtgataaggctgagagtgatgaagatgttatggatgacatgtcagggcaaaatgagattgccgaaaggtttccactaattgtagcaacctggaacctctctctcatggtcctcacaaatttgtacagatcattgttgcagttaagatccttcaccaattctttggagccatccacaaagggaacacaatggactaagatgtatctttcttcaataagctttatgcaaaaagaatactccctgtcaggactttgcacatcaattttgctgaacacaaatttgaccccttctcctccaacaacttgaaaaccaagaaacttatcgtaccacatgatcgctttctctaggttcttgtcccttgaagctgagaatgatacgaaagggacaag

SEQ ID NO: 23802 - DNA, 821 bp, Setaria italica
  Peptide Sequence Number=SeqID_89776
actatttggggagggtagcaaagcaacggctgcgtgaatctacacaacaggctgctgattacataatattgtgtattgctggaatatgcattgggacaattgctagagttcgagatgattcatttggttcagattcttatggatataccataatggcagtttctctgttatgccagcttgcggcgttgcggtcattttcacccgaaaagttgcaatattggagggagagagaatctggcatgagctctctagcttactttctcgcaagagatactatggatcatttcaatactgccgttaagccaataatcttcctctcaacattttatttcttcaacaacccacggtcaactcttagagacaattatttggttttgctggcactaatttattgtgtaaccggtataggttacacttttgctatttggtttgagcttggattagctcagctgtgttctgcaatagtgcctgttgtgctggtcctcgtgggcactaaaccagaccttccgcgggttataaaagaattgagctatccgaagtgggctctagaagctttcatcattgcaggagcaaaagagtattcaggtgtgtggctgatcactagatgtggagccttgcttaaaggtggctttgatatcaacgattttggtctttgcatcaccattattatgctttatggtgtgctcttccggcttatttcattcgttagtctgttgaagatgaaaaactagatgccttgccatcttatggactagagagataaagacaagtgttcgcttattgtgctcactgtttaccttccctggcctcgagccctacct

SEQ ID NO: 23803 - DNA, 991 bp, Setaria italica
  Peptide Sequence Number=SeqID_89777
aactgttcatcttgaaaagaatggtagtgatgaattgctgaatcatgcataaaatacatctctcaccctcactatccgctggttgaatcacttctactgtaacccacactccctaggaggcggcccattcttgtacctcttggggtctttgcagtaatcatatatcttgttattggagtccacttgtgacatttgctgtttccgtgactcatccagctgctggttgaaccaaccggagcctgggagacacatagggttgttcccaaattgggggcatgagatggccctgtagttccggaagtatgctgtgaatggctcctgtgaccagtcggtcttgacccgcccgccttgcgttgcccagtcatccgcattccagatggtggcgtacaccctcatcggataatagtatgggtatggggcaccatacatctggttgtttttgatctgccggtacagcttgtcatcgacaaggaataagatccagtctttattccagatgatggtgtacttgtggtaatcttgagtgggatcaaaatcaaacttgtactgcttctctctgccaccttgtcctctggcatacatgttagtgtgcatggtgtagggctggccggtgctgttccccaagaactcgatgtcgatctcatcatggtactgccatgccccctctgttatcatataaaacgtggtcacagtgccagctgagttccgtgggacgagcttgatctccacgtcgatcctgcagaactggcatgtcttcttagagcggaacgcagagctagtcgagcggtcgagtgtcagcgcgatggccttttggccagagctgtcagtgaccatctttgcgttgccccacattatctctaggtcatctaggtcatcagtctggccaccagtgacatgggtgatggctaggataaggtagatagccgctagggaggctaggagttgagtcctagcctgccccatggctgctggtgctgttgggtaggtacag

SEQ ID NO: 23804 - DNA, 248 bp, Setaria italica
  Peptide Sequence Number=SeqID_89778
ctcgagtgctcatcacgcccctgaacaggggagggagctcgcgagaagggaggccggccggcatgacgggcggcacgaggccgcgtcgcctgctgctgctgctcttgctcgtcggcgtcgctgctcgagcggcttcaggcgtcgtcaccgacggcctgttaccaaatggcaacttcgagcagggtccggacgcgtcccagatgaacggcactagggtgacgagtccaaacgccatgccaaaatgggag

SEQ ID NO: 23805 - DNA, 450 bp, Setaria italica
  Peptide Sequence Number=SeqID_89779
aatcctctccagcagtccagcacatagcttctcgaattcctccctcctgatcacccccctcgacatccttctcctccatcaagcactcaatgttcaccacagcctccgcattcgcgctcagaaccttcttcgccttctcgcacgctgcccttaacctcatactggccttcacattccccacgacatcaatcttatacctgtccctgaactcctctgcaaaatgctcgaacagcacctcgtcgaagtccctgccccccaggtcagcgtcgaatccgtgcgacagcaccctcatccccgacgcgtcaaaggccaccaccgcaacctgcgtgtcgcattgcccgacgtccacgaacgcgacgtggctggggccccgcgctgccgaggtcggagcggtagaggccgtagcctagcgcggtggcggcgaggtcgtgcatgaggcggagcgggcct

SEQ ID NO: 23806 - DNA, 1427 bp, Setaria italica
  misc_feature (10)..(10): n is a, c, g, or t
  Peptide Sequence Number=SeqID_89780
atgtagatcntaaatcagagtctcagctgcctcatgctagctacttacaagctagtgcccagtgtttcttcacttcacgaaacttctctagccgctgaacgactgactattcatggacatggatggcccccgtgcaggcgccttgtaactgacgaactcaccttcaggccagtcaagattcagggcagattggctcgatttctattggcagacccctctggaactccacgtacgggtatgccatcggaacgtcatcgccatcgattctccatctataattgagcacaaggtgatggaggaagaaagcagcctctactttggcaagctccgatcctgggcagagccggggccctccgccgaacggcgtaaacctcttgcttgccccttggcttgagccctcccatctgcagggctgaaaatgttgtgcgtttccatgaagcgaggggttcagatgaacagcactgaagacgggtaggaccttccagccagatggaatcagatactctttgtatctgacatctttgagagccttcctgtggacgaacttgacgatgttgccgcatctcagagcctcattgataacatgttgggtatattccatcttcttgtagtcttctgaagtcaagcactcctccttccctttgttggatcttatgctgtcgtgctccctcttgaccaggtccagatcttccgcagactgtccaagaaaatacacgaccatggagatcaggagcgaggtggtctcgtatcctcccagcagggagtccagcacaaagctcactttctcctcatcggagagctcattgctcgacaggagcacgtcaaggaaatcgcccttcttgcatgaccctgcactcctccgctcctcgatgatgcccttcacagtgctggatatcctctctctggcctggacagccttggcatatggggtccctgggatgtagagagggaaggagatgaggcccttcatgaaggccaggaagtcctccagtatcctggcagtgaccggctcctctggcgacaaccccagcacctgcttcactatcacactgaatgcaaactttcttgcctcctcgcagaaggtgatgaccttgacgcagccgccaccgccgcactccttgccaccggccgcctggcgccatgagccgacgacgtgcagcgcgatcttctcgatgtcgccgaggtagctgggcttgagcttggtggaggtgacgagggcgagggcgaggttcctgaggcgcttatggtcctcgcccaggaccacaagcatggaggacttgcccaggatgccatggatcggcctggggtagctgcactggaacagccgctcctcgttctgcaggatgaagtggttgaggtcctggtcgcacgacaccaccgtgggggtgcagaacaggtgggacttgaacacccgcccatacctggcg

SEQ ID NO: 23807 - DNA, 293 bp, Setaria italica
  Peptide Sequence Number=SeqID_89781
cctggccgtagaggcggagcacgagggtcttgaggtacttgtacatgaacccgtgcagcgagccgacgttgtcgcggccgaagatctcggtgaaggtgtccgggtaccagctctcgaacagcttcccctcctgctggaacacgaagtagttcatgtccgggtccgccgacaccaccacctgccgccccacgatgctggtcttgaagatgctcccgtaccgcctcaccctctccttcacgaagggggagacgtcgcaggtcgggttcggcgcgaagaactgcagcgtctcgccg

SEQ ID NO: 23808 - DNA, 476 bp, Setaria italica
  misc_feature (1)..(17): n is a, c, g, or t
  Peptide Sequence Number=SeqID_89782
nnnnnnnnnnnnnnnnntttactttattgacatgaggattcaaatttcgcaccttgctgacagtaattagcagtaacaacaattaatcagacgaacctctacattctctatgcatcgcctagccactagcgacatcagtcttatcagatcacacacatacacacacggtccacgatctacagagagaatggaaaacctattgccggtaacaactacctctatgtgtgattgcgcaattcaattgcaatggtcaacaatcacgaatcaggagcgagctacattccaggaatctaggaagaaggggaaaaaatcttatcgcattaacctacatttgaattgttccctgaaggtggtctcaacagcgggtggtgattaggagccgacgagttgggcataccagggttgaacatcatactgggtgccaacgaggatgatgtgccagggtggattgctgagagcggctaggttcgttagtt

SEQ ID NO: 23809 - DNA, 977 bp, Setaria italica
  Peptide Sequence Number=SeqID_89783
ttatgccaatgcgagatgctgctcgagctgcctgtgtgtctcgttcctttctatattcctggagatcccatcccaacctcaatttcagcaaggatacattcggcttgattgaaaatgcatgtcaaaaggatgaatcaggtcgatttttctatattaaagttgatcacattctgaaaaagcactcaggcattggtgtgaagaagctcaagcttcagattgattcagattacagtgcaaaggactctcgttatctcaacaagtggcttcagaaagccgttacaccagggattgaagaactcacacttatatttgccccattcggagcaaactacaatttcccttgctcacttctgttgaatgggagtggagactcaatccgatgtcttcaccttggctgttgttccttccgcccaaaagtgacactcggttttagaagtctgataagactacatctttgttttgtgcgtaccacaggggatgcgttagggttcgttctttcccattctcttgctttggagcggttggaactcaggtgctgctatgggatagtttacctgaaggtacctcgcctactgcagcacctcaactacctggaggtaagcgggtgcatcgatctgagagtgatagacaatgaagcaccaaatatctccagcttttcatatggagggtacagcgcagtacaactctcacttggaaaaactttgcaaatggagggttcagtttcttatgctcgtactgaacctccatccagcatgccaaatcttgaagctcttgccttaaattcacaaacagagagggcccatgcaccaatgctgcaaagtaaattccttcgcctcagacacttgagcattgctcttactgcggcaaactatgattatttgtccttggttcctttttgatgctgctccttctctgggagacttttgacttgaatgtgagtcggcattcatattgctatgatttagtagctatggtgg

SEQ ID NO: 23810 - DNA, 813 bp, Setaria italica
  Peptide Sequence Number=SeqID_89784
ttctcgaacacgcaagagagctgcgcatctttgtattaagagagggaaaaatgggccaaattacaaacaacatcaccccactttgagccagggcaggggattttggggtttcacaagaaaagacttacagaaaacaacactaaggagtcttcatctcacttggtcataattggataatatgtctggctggatcttgacttggggtgatggctatgttgataaagtgataaaagacagacaagtgggagatctttctgctggccccactgttagtaagattcagatggtatcatcctcttgctacaacaaatgctatccattttgccccattgaggcagcactgctgagaatgactagccatttgtaccctcttggagaagggattattggtaaagtagcacttacaggacaacattgcttgatttctgctaacgagctttgttcaagatctatgcctaagtaccgagaagactgggagcttcaatttgcagcaggaatcaagacagtactgcttgtaccagtggttcctcacggggttcttcaattgggctctttacataaggtttttgaaagttcagcattggtggcactcatcaaggacttgtttcatgagctttatgatgatccggtttctcatacctcattatctgttgggcctgcctactcaaatactttgaggtcacctactgcaactctatcaaatgaacatccagacgtcaacttgtttgagatcgatagttcagctgagcttttgaatgatcacctcagtttgacacatgccttcagttcaccggaatttccaatatcagaaga

SEQ ID NO: 23811 - DNA, 420 bp, Setaria italica
  Peptide Sequence Number=SeqID_89785
tagccggaggcggcggcggttggcgtgcgggcgaggaacacgcaacgcaattgcgactgattccgacgcgctaaccctagcgcccccggtctttatggcggggcaacaaaggattgggtggtggaggtgagaaagaatcggacaccgcgcgctcgtgtacacgcgatgacaggctatgtcgctgacgctgtttggccttagggcccgctcgaagctctttggcccacatgtcagtggaagtttaggggcaggcgctggaaagcgtatcggtgagggcggtcgccgcgtccctcgcgggccgtgggccgctcgttgtgcctgctttacccaaattgttccgcgcacctgtttcctgcacccaaaatgtcgatggcatgtggggctaaactttttccgtggtccacctgtcagtggtattac

SEQ ID NO: 23812 - DNA, 1065 bp, Setaria italica
  misc_feature (1)..(86): n is a, c, g, or t
  Peptide Sequence Number=SeqID_89786
nnnnnnnnnnnnnnnnnnnnnnnnnnnnnnnnnnnnnnnnnnnnnnnnnnnnnnnnnnnnnnnnnnnnnnnnnnnnnnnnnnnnnnaggaaacatgtcagactaggttgctgactgatatttaacaatcaataacaagtgcatcgttacagtttgtacaccttaactaagagcaattcttattctataaactatcactgtacatatatacaactgttatgactcaatttactcagtaacttcgtgcgctatcatacaatgaaaatacaaaatttggaagtataatgctaaacccatgctatccttctcccagatttgctagcgaaagcatacggcacaatgagatgtagcattttatccatgctaatctcaaataagacggggctgtgcacaaatattgagatgaggcctcaaagtaagttggttttgcagtagaaggacaatcaagtgatctgattagctcatggactggtaggactttgaattttgttggtggattcatagcaacattgtgcaccttatgctcatagatcttcccattcttgtcgagtttatacacagaagcgccatcaaagcgaccgagcccgtcccacggaactcgaggaatgccgtgggcaatccagcgaatcatgataaggttctcagcaggctgccatatactgactatatcaacccacagtgctttgaaaaagatccggccagtaaaacgtagtgcccagaatatccttttgtaattttccaggcccttgaatgtattcaaaggatctttgaagacaatgtcatctctgtagatgtcgaagctgggctccttgtagagcacatcggggagctcctccctgagcgtccggatcgcgtaccccatgttgaggtagtacctctgcctctcctcctcgtcctcctcccgccgcctggacgccgccggcgactccgagggcgtgaccggcgcggcgaagagcggcggcgttggcgggaccggcagccggtcctcccgcacggggtcggcgaccctgatcacccgcctcttccccgcctccccctgcttcacgcgggcccccgaagccgccac

SEQ ID NO: 23813 - DNA, 791 bp, Setaria italica
  Peptide Sequence Number=SeqID_89787
caatccctctttcattattttaacgaatgtttttaacacaaaagaacaagctgacaaaatcaacgcaaaaattgaacacactggtacaaactgccacacatgaacaagtagaacgctctaggcaccgagagtgaagttgaagttgctgcacgtcgtctgcctcccgaagagcaggctactgaagccgagctgcttcttctcctcgtcgaacaccagcaggttgttctccatctggaaccctccgatcaccaccgccggcgcccccttctcctccttcgccatcttgacgaagccgaagcaggccgtgttgtcgttgacctgcaccatggagttggccccgaacaacatccaggtggcgccgctctccagcatcagatccacctgcggcacggcgtagccgagccgcgtcgaccccagctccctcgagtcgtagcagagctcgaacggcggcaccggcggcgtgacgcgcttcctctccgccgtggccttgtcgaacgctttcacgaccgggccgtacacgtcggaccggagctccgtgtacgggatcctcgagctcaggccgacgacgagcggcccctgctgcaccttctcttggttcacggcgatgcccttggccgagatgaagtagccggggtgcccagggttcctgcggagcggggtggttccggccagcgtcgtcgtgacgtccgggcgccccggcgggaggaggaagagcgggcccccgccgaagatggcgacgccctggccgccgctcgggaggcagagcgcgaacttgttggcgaccttctggg

SEQ ID NO: 23814 - DNA, 375 bp, Setaria italica
  Peptide Sequence Number=SeqID_89788
tatgacttcatacatgttttgctctccgttcgagaggagtacggcctcacaagagaacagatgaaagctctcctgcttgacgtgtttttcgcggggatagagacatcagccgcggtgctcgagttcaccatcgccgagctcatgcggaggccacacctgatgaagaaactgcaagctgaggtgaggagcagcgtccccaaggaagcagacgctgtcaccgaacccgacctagccggcatgacttacctgagggctgttataaaggagtctcaccggctacacaacgtgactccgttgctcgcgccgcgtgtctctatggctagctgcaacatcgatggctacacgatcccagctggggtacaggtcttgatcaac

SEQ ID NO: 23815 - DNA, 375 bp, Setaria italica
  Peptide Sequence Number=SeqID_89789
ccaagtttttttttttggtaattggttgaattgggcgttgttcctgttgaaacttgcgaagcagaagctaatggatcatgtcattcatgtgtgacacccatcatcctaggctctctggtagcttacttgaggcaaccattcatttgcaggccaacatccaagcgatgaatgggaggagcaacaacgatattggtcttcaccacgggcgccaccagcgagcccgacagagtcgcctcggaccccaggtgggagccaaaagaaggcggtgctgggaaaggtgaagagcaaggctaagaaatggatgcacatgctgcatcacaagaagaaacctgcacaggaggagatgatgtggactcccagggctggtacccagtc

SEQ ID NO: 23816 - DNA, 264 bp, Setaria italica
  Peptide Sequence Number=SeqID_89790
caggcgtcaagggcattatccaggcaacaccgctgggagaatggatcttcaagagcaagagcaagcagaacagctgcggcctgcaaggggcttgcaagggcttcatgtttggactccaggtcacggagctgctggagatctggcctgagcaggtcacccatggcaggagatgggtgagcatgtcattccacagctgcaacttaatggtctctgtcgttatgactggatgcgagaagcgcttaggaacaaaactagaaaggtaat

SEQ ID NO: 23817 - DNA, 277 bp, Setaria italica
  Peptide Sequence Number=SeqID_89791
tgctctcctttctttctgggttcaaagagtctagatagttttccaaaaaattcaccgaggctgagatcggacaatctccttttctgaatattgcatcattcctatgtgccagaccctccagaagagtagcttcaatttttacttctgaggtctttactgactctattgaggagaacaaggatccaattaggtcccgtgtaacgaaagtatgcttcgcccgggagggtccaggtgtgccgtagggtttggtctcctttctatgtatgaggatttcttg

SEQ ID NO: 23818 - DNA, 616 bp, Setaria italica
  Peptide Sequence Number=SeqID_89792
gccccggaatctggatcaccgacatgcatgtgatgcgatgccccaagtgcaacctcaacagctgccgagggaacatgcagattctggacgcacgccactctgagctgtcctggaggaggcgtactgggatcagacctgggagtacgaggaactcggcgagcacttccaggacgaggaggtcgccgacgccttctgtgccatcatcaacgcaaagcacctcgcttccccatccactgcagttgttctcagcaagtcctgggccgggaagcgcgacgacctgctgaccaagcagtgtgcctctgcaaccggtgctgccatccacaccaacctccagtccaatgcagggttggtgtcccagttcgaggcgatgcgggacacagcccgggacgggcagatcgtgtccgtgaggatctcgcaggtgctcttatgattcttccctcggtccatcggttctcgcagtggattccttctgcaccgtagaatgtgttaacgcctagctgctgtgagttatgctagaatagatcaggcctctatgttattgctataccgttttctagattatagagatgaagttgatcagatttcggcttaatgtaatgtcgtgcttcacttcgaa

SEQ ID NO: 23819 - DNA, 310 bp, Setaria italica
  Peptide Sequence Number=SeqID_89793
ccgagggggcaaggagggagcggagcgccccggccggtcgtcacggtcggagatgaggggcggatccagaccgaccccggccgccctgttcctcctcgctgccgccgggatctgcgcccagttcgccacagtttcagataattaactgcctacaacatttgcagtgctagccggtgatcccaaggatgataagaaaactgaagctcagccgaagggtcatactggcaaaacagttttgtttgtcctcctaggagtgggggcagtcattctgttgtcattttttattttcaagtactggcagaagaagaaa

SEQ ID NO: 23820 - DNA, 959 bp, Setaria italica
  misc_feature (897)..(959): n is a, c, g, or t
  Peptide Sequence Number=SeqID_89794
caaacgccaaggccaaaccggcacggcagccgcaggcctgcagagaccgaaccaccagcaccaccgcgcccgagccccacccaccaccgcaccgcagccagccgaggggcaaggagggagcggagcgccccggccggtcgtcacggtcggagatgaggggcggatccagaccgaccccggccgccctgttcctcctcgctgccgccgggatctgcgcccagttcgccacagtgctagccggtgatcccaaggatgataagaaaactgaagctcagccgaagggtcatactggcaaaacagttttgtttgtcctcctaggagtgggggcagtcattctgttgtcattttttattttcaagtactggcagaagaagaaaagggaggagcaacatgcacgtctgctaaagctatttgaagaggacgacgacattgaggttgagcttggtcttagagattgataatcttcaatgtacagcaagagtatcttggctgacaaggttttgctggctggctctcaaagcatttccatgttaatgtaaagaatttgttgtatttaaactcgacagacctccacaagaatggtctactgtactttagttttatatatggtgaacatctctgcgtgctggatgcatgagaatagctttgatgaggaaatatcaaggtttggagaacattctttgattttaaagttttctgaatatacatatgcctctactaaagcaactcccagactttggtaatccttttgtgcagtagttccatgtgtattccgtagatgcatattataggtttacaaggcttcaattggaattagtttgtgtttgcggacctgctcttatgttcagtagatgtgctactttctgagggttccatattataattcctgatgcaatnnnnnnnnnnnnnnnnnnnnnnnnnnnnnnnnnnnnnnnnnnnnnnnnnnnnnnnnnnnnnnn

SEQ ID NO: 23821 - DNA, 264 bp, Setaria italica
  Peptide Sequence Number=SeqID_89795
cgttgaggccggccttgaattggaggagggcttgtgtttccacgccgatttggcaggtagagcccaggaagagggagaggagtgtgatgaggcagataagaatttgtgctctcattgcgaggtgatgtggtgttggcagatctctgaagatgttgattacatgggttcttggtgctggcctgaatgtctgtggttcaggagacctgctgttctcgatgaggtcgcccctgcctctgcctttcctctccgcctctgtctttttct

SEQ ID NO: 23822 - DNA, 667 bp, Setaria italica
  Peptide Sequence Number=SeqID_89796
gaagtcctcacgggggctggaggatcaggcagagacaatgcattgcttggaacatatgaagttgtagagggaacagaagctgctgaacttgatgttccctcgtggatggttgacgaatatgtgcctaaactaggagaggcactctcactgtttgtgggtctgaatcttgagttcctgatcaaaagtaactgtcagctctaaatgatgcaacgaaaagaggctaagtaaagaatgagaagattggcatggtcacagtgtgacctgcgagcgagcagagagaactcgtcatcttcgtcttcctcctcctcgtcatttaaaacattggttgataccattgttggagtaactgcagctgtaggagcaacctttcacctaggtttggagtggttcctgctggcaattcactcaccacatctgttacttcggctggtaagaggagaacctgatgccattgcatcatgtttctcaagcagaatctgtaatttatcatttaagtcaagagcttggcccaagagttcctcatccctgtaatacagaagagcttcaggcaattaatttggaagaatagactgacagtaggtaccaaaaataacatatttacaactactatcctgaaaatcatccctgtgtaatgagtgcttgctactagtcaacattagtatgctag

SEQ ID NO: 23823 - DNA, 1523 bp, Setaria italica
  Peptide Sequence Number=SeqID_89797
atgactagctgttgagcaccttgattcaaggctggttcaggtgttagttggggtatagggtggtgatgggtttgacgatatggtgagtgcaagaaggtcactcataacctggtcttctggagaagtcctcacgggggctggaggatcaggcagagacaatgcattgcttggaacatatgaagttgtagagggaacagaagctgctgaacttgatgttccctcgtggatggttgacgaatatgtgcctaaactaggagaggcactctcactgtttgtgggtctgaatcttgagttcctgcgagcgagcagagagaactcgtcatcttcgtcttcctcctcctcgtcatttaaaacattggttgataccattgttggagtaactgcagctgtaggagcaaccttttcacctaggtttggagtggttcctgctggcaattcactcaccacatctgttacttcggctggtagaggagaacctgatgccattgcatcatgtttctcaagcagaatctgtaatttatcatttaagtcaagagcttggcccaagagttcctcatccctcagtgaacttaccagactcaagatcttttttggtctgaccgacattggtttacaagttccgtgataatttcatcattgacagcatcatgatcatttggatccacagctctcagcatctcgcctaatagttccgcagcccccagcatacgttccaagtctggcatgctcagtgaagccccgttagatgacatcacctcatcaagcgtcaaggaagaatcgacttgcattccataccctgcttgaagatatgatggcaaagatgctgggcgcgtgaccggaggagtaaataccggtgcagcatcaggtgagcgcttaggaaattctactccagctcgcttcaattcagcatatgcccagtaataatgagggtgctttccaccaggcccgccaaatgcttcttgccaagagtccaggagtgtcaggattttatccctcacttgcatatctgcctttttcttcacaattttcatcatttcgtccagtatattgcgctctatgacttgaacatgcacgcgatccccacagttctttattagagtctctaaaagcgtcagagcaagaaattgaacattcgcattcttgtgctgaatacgttttttcaaagctttaatcacctcttttgcttgcccgtgatcggagttgactgcgtcgcagatgtcgatgttgagggtccagtcggggcccagcaacagctcgttggtggccttgtccaccctcaccgccgccgccatccctgcgctctctcgatcgatcgacccgaccccttgcgcgcacgcctccctgaaggcgaagaaaatccgatccccacggcaacgacgggggataaaggaggaggaggagacgcggaaagggggcggcgggtattcgtggggcggtggcagtggagaatgagaatggagacggaccgatcagtggcagacgtctgggtggtcgcgtcggttaagtctaactaaaaacgggtc

SEQ ID NO: 23824 - DNA, 351 bp, Setaria italica
  Peptide Sequence Number=SeqID_89798
agagagtcgatgcggctgcacgcgccgggggctcttctgataccccacttgtccatggccgaatgcgatgtggagggctataccataccctccgggacacgtgtgatcgtcaacgcgtgggctctaggcagggacaccacctactgggagagtgcagaggagttcatgccggagcggttcatggaagaagccgtggatgctgcctccgacttccaggggaacgacttccgtttcttgccgtttgggtccgggcgaaggatgtgcccgggtataaacttcaccaccgcctccttcgagatcatccttgctaacctcatctaccacttcaactgggagcttccgccggggtcg

SEQ ID NO: 23825 - DNA, 149 bp, Setaria italica
  Peptide Sequence Number=SeqID_89799
tttccctttcttgtttcctttctttctataactccttttggaggcttgtcatcatcatgcaaaatatcagaatcagatctcagaatggtagtggcaggtcgggagaacttctttgcaaccacatggcgaggggggactgctaccgatga

SEQ ID NO: 23826 - DNA, 415 bp, Setaria italica
  Peptide Sequence Number=SeqID_89800
acgttttttaactaaactagaaattttaggaaaagaccgaagaaccaaccggttcggtttggtctaatcgaatgcccacccctatgcaagacttgaccatgataatactgattatgcaagctgtaaagcatcccaactgaattcatcaaaagtaaacctgaatggaaaaccatgcctagataatagattggatagtagaagttaactgttgttaagcagcatttcttcatgtttgtactaattgtctgatctcttttctgcagcactcactgagcctattgatatgtaagtcaatcccatcagataattcttatattttgcaacttagtaatcaaattcgtcatttttatcctcaactggaacttagctgattttttctctctcacacagatatagtgaatggattgatgagtgt

SEQ ID NO: 23827 - DNA, 520 bp, Setaria italica
  Peptide Sequence Number=SeqID_89801
ttttttgcgcgattgaaagatgccgatgattgaattgaagacaagaagttgaaacatggggaagagaaagtcagctgctaagccacctcctaagaagcggatggacaagctcgacactgtcttttcctgcccattctgcaatcatgggagcagtgttgagtgccgtatcgacatgaagaatctgattggcgaggcttcttgtagaatctgtcaggagaacttcagcaccactgttaatgcactcactgagcctattgatatatatagtgaatggattgatgagtgtgagcgtgtcaacactgtggaaggtgatgatgatgcgtgagctttgccccatgcggatgaaacggttacttgcaactgtgtaatgtactggcattctcgaatgccatagtcaaccatagcttgaaatgacgccataaggttggcatacacgcattttagtattttagtgagtttattaagtgctagacaaactgatactgcctaatggcgtatcaaacagccaatacaccctttt

SEQ ID NO: 23828 - DNA, 800 bp, Setaria italica
  misc_feature (787)..(787): n is a, c, g, or t
  misc_feature (797)..(797): n is a, c, g, or t
  Peptide Sequence Number=SeqID_89802
aagattcgtcttttgcttcatccgattgttcccgtgtggtccatgcttggatcgattggttttctatgcattggaatttcgtactcctgtaatcctattacatgctgtttgtgcctttttaattcaatttggatcttttccggaattttaggcaactctacatcttgcgattttttatgcgttccctggtgactcggttcatttggtcggaaccgaagaccgaaccaaactaaccgagaccgaagttctcggttccaagaatttgaaggaaccgatcggttcacgttttttactaactgaattttggaaaagaccgaagaaccaaccggttcggtttggtctaatcgaatgcccacccctatgcaagacttgaccatgataatactgattatgcaagctgtaaagcatcccaactgaattcatcaaaagtaaacctgaatggaaaaccatgcctagataatagattggatagtagaagttaactgttgttaagcagcatttcttcatgtttgtactaattgtctgatctcttttcttgcagcactcactgagcctattgatatatatagtgaatggattgatgagtgtgagcgtgtcaacactgtggaaggtgatgatgatgcgtgagctttgcccccatgcggatgaaacggttacttgcaactgtgtaatgtactggcattctcgaatgccatagtcaaccataagaacttaagaaaaaataaagaaaaacgaaaaccaaaaataaaaaagggtaaaagtaaaaattaaaagaaataaattaaanaaaataaaanaaa

SEQ ID NO: 23829 - DNA, 1400 bp, Setaria italica
  misc_feature (1387)..(1400): n is a, c, g, or t
  Peptide Sequence Number=SeqID_89803
tactaaattactaattgggtaagtctagttgtttgtagttgtccgttattcgtactattgtaagtaattcttgattggcgaggcttcttgtagaatctgtcaggagaacttcagcaccactgttaatgcactcactgagcctattgatatatatagtgaatggattgatgagtgtgagcgtgtcaacactgtggaaggtgatgatgatgcgtgagctttgcccccatgcggatgaaacggttacttgcaactgtgtaatgtactggcattctcgaatgccatagtcaaccatagcttgaaatgacgccataagggtgtattggctgtttgatacgccattaggcagtatcagttttgctagcacttaataactcaactaacgggcggcgccggttcggcgtgcgcctcaagcggtaaaggccaaggactcgtgggacccagccgtcagtgagctgccaacccaaaaccccgcgttgcccgcacccctttccgttataagggcaactccaatcgtctctctccttcctctcgagagatttcaggcccccgagcgatccccacacgcctcccacttccaggaggcccctccctcgagctctcacccggcgacggcaccgacgaccgcccctcccgcgcctccccggagttgtcagctcgcaagcaggaagacaagaagttgaaacatggggaagagaaagtcagctgctaagccacctcctaagaagcggatggacaagctcgacactgtcttttcctgcccattctgcaatcatgggagcagtgttgagtgccgtatcgacatgaagaatctgattggcgaggcttcttgtagaatctgtcaggagaacttcagcaccactgttaatgcactcactgagcctattgatatatatagtgaatggattgatgagtgtgagcgtgtcaacactgtggaaggtgatgatgatgcgtgagctttgcccccatgcggatgaaacggttacttgcaactgtgtaatgtactggcattctcgaatgccatagtcaaccatagcttgaaatgacgccataagggtgtattggctgtttgatacgccattaggcagtatcagtttgtctagcacttaataaactcactaaaaatactaaaaatgcgtgtatgccaaccttatagatggttgtgtttgtgcctatggaactagcgactatcgaagatgatgtaacggtggttttctgtgagtacaatcgtgtgttttaaactatatatatttcagttccagcaaaaagagcgatgcgaattgcaccgcacgaaatgaccgccgttacatcatcttcgatagtcgctagttccataggcacaaacacaaccatctataaggttggcatacacgcatttttagtatttttnnnnnnnnnnnnnn

SEQ ID NO: 23830 - DNA, 586 bp, Setaria italica
  Peptide Sequence Number=SeqID_89804
cctatcccctgtgtgccttgcctcccctgttgcgtttttcttcgttgagatcgaaacaactgcccgatgtaaagtctgcactggatctatttgcaactagaacattgatggcatatcagtccctttccaatccattggtatataaatccgagcaccagcagatgcttgagctatgctcaagtccattctgtgatccttctggatgggaagaaagctcatgcttgaagtttttgttggataagagagatgcttcgctgggcccatggatacctggaagggattcgtttgaggatgaattacgtgcttttgatggtggtgctgatgggtttctaccatgcgtgtgggatgatgaaatcagcaactttcctcagccagaatcggttcgcaaaatgcttgtcaaccagatgcttctctgttatggttccatctttgcatgtcaggaaaacgctgtcaagataaggcttttgaacaatcttgaccagtgcctgaagtctgggaagaagtacccatggtttacgtgtcttattacaaatgcatgtgttgctatattatcagggtttgaaggaatttccttgtacttttacgt

SEQ ID NO: 23831 - DNA, 408 bp, Setaria italica
  misc_feature (158)..(158): n is a, c, g, or t
  Peptide Sequence Number=SeqID_89805
gggaatggtttagcaggcagttcctcgtctttggtgagctaatagaaacaacatctgctactgtgccagatacgttatctcctcgatttggtactgcagacaatgcattgactgatgggaatttcagccagcttactactatcaggttcaacctacanctttgcacagtactacgacagagagacactccatttacttgatatgcactaataaatgatttctcatacatttgcttctgacagttagccgcaacttacttgagagagaagaggtatgccattgagtgctcatcgtcaacggcaaaccttacaacggaagctaatggaatacctgagtcagtaatgccttctgtatatgttggccagtatgtgcgcttgtttgagcaaggagatacagttagtgtgctac

SEQ ID NO: 23832 - DNA, 257 bp, Setaria italica
  Peptide Sequence Number=SeqID_89806
ccccttctaccgagaatctggaaccctcacgagctcacacgaaattgtagagaaatggtagtcacccgattttgacaccgttccaaattgtagatcgttttaacttttctaggttgatagatattattatgcacttagacacactatatcatagatacttaatagtatctatgaattaaaaaaatctaaaatgacctacaatttggaacaaatggagtataaatttgtcgcctacaatttggaaaaaaaaaaaaaaa

SEQ ID NO: 23833 - DNA, 450 bp, Setaria italica
  Peptide Sequence Number=SeqID_89807
tagtactaattccttcatcaagtgacacatgcttataatcatctcagaaggctctgtacaatcttatggcacgtatgacaatgaaataagaacatgtaaatgcattcatcaaaggcccccacagacaagtagtctactccaactagtttgatgccggtattatcaaccaaccattgtgcaccatccttcatgaagccaacgtaacttgtatcaaactctttcttccacataagctttctgtccgtatttagggttcggaagagtactcgtcgaacacctttaggaatgtgaagggatgccatgacaccagctgttatgttcttgtctctgggaacgtcaaccaacagcgctggtcctgcaccaccatttcaattcaaaaggacaaaaaggaaaacacaagctcaatcgcattactgttcgtctcacgaattaattcagatctaattttac

SEQ ID NO: 23834 - DNA, 403 bp, Setaria italica
  Peptide Sequence Number=SeqID_89808
tgcaggagtagactacttgtctgtgggggcctttgatgaatgcattccagctcatttagtatttcttgaaaaaagggaggtcatccttgtggaagccttaaatctggagcatgttacccctggaatatacaccttgcattgcttgccactaagattgcggggtgctgaaggttctcctgcaagatgcatcctcatcaagtgacacatgcttataatcatctcagaaggctctgtacaatcttatggcacgtatgacaatgaaataagaacatgtaaatgcatatgacgaaattagaaaccatgactcccatcatccattcacccttccaaccctcttccaaccctctttcttggtatcattctcatcacaactctattcaagcgtggttggattatgagtttc

SEQ ID NO: 23835 - DNA, 858 bp, Setaria italica
  Peptide Sequence Number=SeqID_89809
gtgccataagattgtacagagccttctgagatgattataagcatgtgtcacttgatgaggatgcatcttgcaggagaaccttcagcaccccgcaatcttagtggcaagcaatgcaaggtgtatattccaggggtaacatgctccagatttaaggcttccacaaggatgacctcccttttttcaagaaatactaaatgagctggaatgcattcatcaaaggcccccacagacaagtagtctactccaactagtttgatgccggtattatcaaccaaccattgtgcaccatccttcatgaagccaacgtaacttgtatcaaactctttcttccacataagctttctgtccgtatttagggttcggaagagtactcgtcgaacacctttaggaatgtgaagggatgccatgacaccagctgttatgttcttgtctctgggaacgtcaaccaacagcgctggtccgttgaggacggcgaggtcgagcgtgtcgacgtcgaagccggcgtcgtagtagtgctcgaagacgtgccccggcgcgtcgacgtgggtgccagagtgcgccgtgagccggagctccgagaagttggcgatgtcggagccgttgcgcatggaccgcgccagccgcaggaacccgccggtgccctccgccgactcccacgccggcatgtcctcgcggtagtagtggctgatgtccacgatccggccgccgtcgaactcctcgcgccgctccggcgccggcaacaccgccgcctctgcctcatcctctgccacgccacatgcatcctcgacgccgtgcgcgtagcccgggtgtgccgccgccggctcgccaccggaggcgacggccgccgccgggagcagc

SEQ ID NO: 23836 - DNA, 312 bp, Setaria italica
  Peptide Sequence Number=SeqID_89810
aggggccattcctcctccctcgcccgtcccatccagtaggctcctcctcatcttcctcctccctcggcccttgttcacgcggaagaatcgctggcgaggagcgcaattgggatccttgcatgcatggatgcggcgcagtggcaccaggggctagggctagggaagcccatggaggagatgctcatggctggaaacacaaatcctaaccagaacccgaatcccccgccggctgctccctcagcggcaccagccgcccagagggctcctggcgctccggcagcagccgcgccagcgcccgcggccgcgggggct

SEQ ID NO: 23837 - DNA, 238 bp, Setaria italica
  Peptide Sequence Number=SeqID_89811
cccatccagtaggctcctcctcatcttcctcctccctcggcccttgttcacgcggaagaatcgctggcgaggagcgcaattgggatccttgcatgcatggatgcggcgcagtggcaccaggtaagctaatccgaacaaacatctcgatcgaatcggcgatagctagccgcgagttgcgtcgggggtcatgcgtacgagatctctcacctgccgggatggatcttggcgtgtcttgttc

SEQ ID NO: 23838 - DNA, 290 bp, Setaria italica
  Peptide Sequence Number=SeqID_89812
aaaaatgaaagaaattacccaggaacactgggaggggcagcttcccaaagaccaatgtggtgtggataatttatcttgtagatatggtgctacacaagatgaaagcccttgctcttggtgccaaagtggaccgggagctccgctcgttcaagaaacgcctggcgtcgtgcgagtccgctagagattgtctcgccgatcccttcttcagtgatctgctgttggaggaggatccacaggtcactccaatgccgcagctggaatacgatctgtgaactagcagatcgaatagc

SEQ ID NO: 23839 - DNA, 335 bp, Setaria italica
  Peptide Sequence Number=SeqID_89813
tactcccacaactcaccatcttctgccgggtggggtggtggtggtggtggctggtgcctgcctctgtctgcagggaggaagccatagttgtagcaagcctccacctccattgctgttgctgagctcgagcccgactaaactgcctcaacaacaaagatgaagaggagggcactagcagtagtgtaacaaactgaagagatggagcagagcacagagggagtggagaccagttggatcattcggagttgctcagcctcttgtgtgtttatatatgggctgctctgaaccgcccctgccctgccttgttctgttgtacgactactcacactgagtcg

SEQ ID NO: 23840 - DNA, 848 bp, Setaria italica
  Peptide Sequence Number=SeqID_89814
tatagttgattaacttttacctttattgagagggagaatcacttgagtttgcaattaatgggtcttgagaaacaaaatggaaaatgctattaccatctcctctatttgttggtttctgtgcatataaactagtgattgcttcttctttgattaatgtaaagacagatgaagtaagttccatagaagtgagcatgatttgcgccatattttattgatgcagttaaaataattctgatttgttgtttatcgataccatgatacttcccttgttaaattgttgacattctttcctacctcaaacacatctactgtttttctttcaaaaccaatgcactttgattgcatagattctatgggtctgcctttcatttttaattctcattcatatgctagttattaattgttatttctaaacttaaaacaaaaatgatgttgcaatgtgaatggcggcttaaatgttgatggtaaaataaagccacgctagcctgatgcttctttggaagtggtcacggagacatttaaagtgctatctgtatgcgcctggagtttacctttgttctaccaaaaaaatagcatggattcattgctagaggcatggcaggaggttgatccagatgaatactcttatgaggagctagttgcattgggcgaagtagttggtacagaaagcagaggtctctctgctgatacacttgcttctttaccttcagtgaagtacaaggcacaaaatgttcaggatggcaacactgagcaatgtgtaatttgccgtgtggaatttgaggatggtgaatcttgattgccttcctgcaagcactcataccatcctgaatgcataaaccagtggctgc

SEQ ID NO: 23841 - DNA, 717 bp, Setaria italica
  Peptide Sequence Number=SeqID_89815
tttgttctgcttaaatcactccagcctgtcaaagcatttacgtctttctattagtgttttagcagtagtagccgtttcctgtttattcattcattgagctaatgtttagtcagtgttgagttgttatactctgttaatcaagaaaacttggtgccttcaacagatttgtaagttttattatccgtggaagctggcaaaaccgatgtagttgctgcagaactgtagtcaggtcaagttagtttcctgtcaaatagtctggcacagtgacaagctgtaggctacagctgtatgcatattgttagccatttcagcattccttgctatgtcgatccttatcttgcaatgaggctgtagctttatacatattgttatgttagtctgtttaatcattcctaccggcagatcctgccatgttgatcgttactgtgaaaagtaactcctagcataccatctgctttatggctatttcaacatgttttacagaaacatgatgtgaacacttctaaccgtaacagtatctgttggcccaaaatcttacaaaatatctctgattattgcaggtatgccctatgtgcagcgcagaagtttcaacctcaggcaacaaggaggcgtaagcgtgaccgctctctcatatggccattttcggcacttgatgggaataactagcggcgtcacagtaccatctgtattgttgaaacaaaagcagaaaaacgtata

SEQ ID NO: 23842 - DNA, 1061 bp, Setaria italica
  misc_feature (1012)..(1061): n is a, c, g, or t
  Peptide Sequence Number=SeqID_89816
agggaagactaccgtggccgggagctacgagtacgacgaggagccgaggaggactacgaggaggagctggagcaccacctccgcgtccaccaccacgagcaccccgcgggcgatgttgatggcgagggcgagggcgccgagggctccgagggtgccgaggggagcgactacgaggaggagttcgaggaggatgaggaaggggagccagaggtagatcccgcggactttgaggacgacgaggcatacgcccgtgcgctgcaggatgctgaggagcgtgaggtcgctgcgcggcttatggctctcgctggtctcagcgattggcgagcagtggatgtggagcatgaggaggatcatgtgaatgatccacaggaggcatggcaggaggttgatccagatgaatactcttatgaggagctagttgcattgggcgaagtagttggtacagaaagcagaggtctctctgctgatacacttgcttctttaccttcagtgaagtacaaggcacaaaatgttcaggatggcaacactgagcaatgtgtaatttgccgtgtggaatttgaggatggtgaatctttgattgcccttccctgcaagcactcataccatcctgaatgcataaaccagtggctgcaaataaataaggtatgccctatgtgcagcgcagaagtttcaacctcaggcaacaaggaggcgtaagcgtgaccgctctctcatatggccattttcggcacttgatgggaataactagcggcgtcacagtaccatctgtattgttgaaacaaaagcagaaaaaacgtatcagaaacatgcaaggagattgtgtttaaaaaaaacatgcaaggagatcaagaaatatctaatcctcgtttctgtttttctcctggctctgctcattgaactttctttgccttgccgctatgctttatgttcccttgggacgccttatggctgttgtacgatccataagatacactaattatattatatatattatatttagtcattacttttnnnnnnnnnnnnnnnnnnnnnnnnnnnnnnnnnnnnnnnnnnnnnnnnnn

SEQ ID NO: 23843 - DNA, 1064 bp, Setaria italica
  misc_feature (1059)..(1059): n is a, c, g, or t
  misc_feature (1064)..(1064): n is a, c, g, or t
  Peptide Sequence Number=SeqID_89817
ccagggagcggctgcagaaggtgtgcgacgagctcgccaggggcggcacggcggtggaggaggaggatgagctccggcgggaggccgaggccgccgcgctggaggagctggagagggagcgggagatgctgcagctcgccgacgagctccgcgaggagcgggtccggatgaagctggccgaggcgaggatccagttcgaggagaagaacgccgccgtcgaccgcctgcgccaggagctcgaggccttcttgggcaccaacagcaccaacgaccgccaagaatcgcctgtccacgacgagcaccgccatgccgtcgacgatcaccggtcgttgcagctggttcttgcgtccgaattcggcgtcgacggcatcgatcgtgtgatcacggacaagaccgggcaggaagaagacggcaacgacggcgaagccgatgacgatggctcggaaggcagtgacatcgagctcaacatggacggcaacagctggagctacatgaccaccgcctccagggcgacgacggccaagaacgcagcggcgtcggtgcacggctcactttcggacagagggacggaatgcggcgccttcgaccgggggtctcatggcgtgagagatgcgctggaactgaaggagtgggacgacgggtgcagcgacgacgacaccagggacctggacgaggacgcggagaggtacgaggccatcaagaacctccgggaacagatgctggccggcaacggcttcgtcttcctatcgcaaggggagccagacgccgacagagatcggcatcgccagggtttggtatctcagattgaagacgggggactctggtgaggcaaatggattggtgttgttgaacggctgacggtgacacccggctctgtttcttcagaatttgtgcatagttttgattttggtgttccatttgcacagttgtagtagagttctctctttgatgtttggatcaatactgcacctccataggaatcttgtttcaaaattttaaatgttattgctgtggcattttgcctcagtgtcagattagaaaccaccaaaaaaaaaaaanaaaan

SEQ ID NO: 23844 - DNA, 366 bp, Setaria italica
  Peptide Sequence Number=SeqID_89818
ttagttaccgttaaactttgtttacttacttattttcccttagtcttatatcagctgctactggttcatggtgatgaacaaagtcgtcatccttgggcatatttcctttggaatatacttcgtgccaaacactcaagtctgctatctttgcagctccatcctcagatagcaatatggcacttgactttatgtctgggtgtgttatgggagggttgagctcatgcatgtgctgggtgcagtatgctactcccataatgatcctcatcctaccattccaatcaataggatcaaatccctcaacatggaggtgttcgtagagtgtcccattgggcgcatattccatcaccatcatcctcatgaaggttc

SEQ ID NO: 23845 - DNA, 733 bp, Setaria italica
  Peptide Sequence Number=SeqID_89819
cccggaaaccggcgtccgccgcgccccggccccgaccgccgctgcgtctcgtcaggaggaggaagaggaggtacgcatcgaccgatccgtcaccttgatcgcacgcgcgtagccactgtagtcgtagaccgcgttgtctgatgtgacgcgaccctcgtgcttccgcctcggtcccgcgtagcgggctagcggcagcaggtccgcacttgcctgcctgccggatctgtcactgttgctgctgggttgattttccactcgtagcgtagtagtgttgtcacatcgtggtagtaaaatgtaagaattggtgataattgcaaagatactgtacgaatttctgcattttcatccgcattttctgtgttttcgtatcacttcgttatgatccagcagtagtaatcatctctcctgcactctctcgccagtataatccagcgggatcaccgggccagcaagatgtcaactgccaccgccccaagattgtccgtccccaaatccggggtgagcttccagaccgccgctccggcggccagggccccttccttcgtcggcttcacgaggcaggcaccccacgcgtcggggctccggctctccagcaggttcgtggcctccgcggcggccgtgcacatggtgaagctggtcgggccggacggggtggagcacgagttcgaggcccccgaggacacctacatctgagacacgcaacagggggatagtgacgaaggcacacggaggg

SEQ ID NO: 23846 - DNA, 906 bp, Setaria italica
  misc_feature (881)..(906): n is a, c, g, or t
  Peptide Sequence Number=SeqID_89820
tttcccctttacccccaactacctcctcccctcgcgatccagcccccgcctccgccccgcccggaaaccggcgtccgccgcgccccggccccgaccgccgctgcgtctcgtcaggaggaggaagaggagtataatccagcgggatcaccgggccagcaagatgtcaactgccaccgccccaagattgtccgtccccaaatccggggtgagcttccagaccgccgctccggcggccagggccccttccttcgtcggcttcacgaggcaggcaccccacgcgtcggggctccggctctccagcaggttcgtggcctccgcggcggccgtgcacatggtgaagctggtcgggccggacggggtggagcacgagttcgaggcccccgaggacacctacatcctcgaggccgccgagaacgccggcgtggagctgcccttctcctgccgcgccgggtcctgctccacctgcgcgggcaagatgtcggccggcgaggtcgaccagtcggaggggtcgttcctcgacgacaaccagatggccgaggggtacctcctcacctgcatctcctaccccaaggcggactgcgtcatccacacccacaaggaagaggagctgtactagagtgctcgtgcgttcggtgcttcaatggcggcgcagtcgccgagaccatgccataccatggtagagattgttgtggggaaagggctagctgttgatgtctactgatgaacatctgtttcatgagatcttgccatatgtgctgtgacaataattgttgtaacgcggttctgcaattcaaactgcaagtgtttttcgagcagcaatggcaaaaactgcacattatgatggaagtaaaaaaaaaaaaaaacaagagacacgacaacgnnnnnnnnnnnnnnnnnnnnnnnnnn

SEQ ID NO: 23847 - DNA, 278 bp, Setaria italica
  Peptide Sequence Number=SeqID_89821
cctagccatgactccaagcgacgctcccggtggctgccctcgcgtggtcctattccccctcccctaccagggccacatcgaacccatgctccggctcgcagcggcgttccacgcccgtggcctcgccatcaccgtcgtgcacaccgagacccgcgcgccggaccgccggaagctgcccgtggactacgacttcgtgtccatcagggacggcgtcccgccggagctcgccgagtcgagcgacgttgcgccgttcgtcctcacgctgaacaggagctgcg

SEQ ID NO: 23848 - DNA, 713 bp, Setaria italica
  Peptide Sequence Number=SeqID_89822
ccccgctcttaggcttgcagtatataataagtagaggtacaccttcagttactcctcacacaccacactggcacaggtgatggcgccagctagctctcacgccattgcaacgccatcaccacggtgaccagctggtgcgtgataacgcgccacggcgcagtcgggcgcgaagaggctggacgtggcgaagttgctctcccctcccatggtgggcatggatgccttgacatcgaacccgttcacgtagtcggagcggtaggtctggccgaccacgccgtgcacgtcgccggtgagcgtgtcaaacttgaaggccaggtcgaggtgcgcgaggcagtcgtcggtggtgacgccgtaccggtgcaccctcgactcctcctcggtgatgggcacggcgttggcccttatcttgaacttgccgtcgagcacgacgagcacgccgttggccgccttggtgcgggtgatcgacagcatcggcacggcgctggacgtccatgtcgcgtccacctcctgcgggaggctcacgggcacgccgtcgagggcgagctccatgcggtcgacgtcgtcgtcccaggcggcggtcttccgggcgccgacgtagaggcggtggccgtcgaagagcacggcgatggcctggatccaggtgaagtcccgagacatgccgtcggcgccgcgcttgccgatgaagtgggcgttgatgtggaggtcccggtcgg

SEQ ID NO: 23849 - DNA, 952 bp, Setaria italica
  misc_feature (1)..(26): n is a, c, g, or t
  misc_feature (101)..(101): n is a, c, g, or t
  Peptide Sequence Number=SeqID_89823
nnnnnnnnnnnnnnnnnnnnnnnnnntttttttttttttttttaagtctacagaaaacatcataggtttatgtatgtctcattcagttttacagacaagtncgacgaagttgagcactagttatttccccaaactctcatttattccgcgggctcgccaggtccatcggaggaacgcaggaatggatgggggagaatggagataaagggggaaaaattgcttcagggaagaactctatacatgtgcactcaaagcatccttttcagaagctgccttcataggtgatctcagtattttcagaaacatcagctgctgggcttctgctctgcaccaggtgatgccccaactgatgtcacaaaattgcagactgcgcatttcacagacctagctccatactggtacataagcagcatacggcagttcccgcagtttacatgtgcaacttgattcgcttccatagccaggttaacagtgtggcagcaagaacattgtacacttgtcgcgccacgtatgtacatcaggagagtgtggcaccctccgcaaactaactgtgccatctcagttcccggagccggcacggcggtgacggtgctgcaaactgcacagcagacggacgtcgcaccagctggatacatgagaagattccggcagccggtgcagacaagctggctttgagccccattgggcggcgtgaacggcaccggaggagttgggtacggtgcaaggggaaccggcattgccgtaccggctgccttatccgtcgacgctgctcgtggagaccttgcagattccggcagctatcaggcggcgaaaaccagcttgtttgacctgcatgaaaccctaatagcaatgcttatggctgccgcatgcataagagcagttcatgggttagcacatcttctctcactacctccctccctttctctctgccttctgtctatgtgacacagag

SEQ ID NO: 23850 - DNA, 219 bp, Setaria italica
  Peptide Sequence Number=SeqID_89824
ggcggcatgagggcgaggtgcgcccgcgacgggaagcagacgagcaggtcggtggcggcgccattgctgctccggccgcccttcatcgccgcgacggcccggcgagccgctgctcgatcggagctccctcccagcgtgcggctccgcctgtgaagcatgatgatgctgtgtgtgagtgagccagaggatgatctgtttataggtgttagttaaaaagca

SEQ ID NO: 23851 - DNA, 369 bp, Setaria italica
  Peptide Sequence Number=SeqID_89825
gcggaagcccaaggacgtctgggccgtgcgcctcgccgccggcatgtacctgctggacggcaagtttttcaggcccttggatgctgatgaagacaacgaggagtcgtcacggggtgaatgacaaaccgatgcctcaatggcatgccgcgctctgtgcgaacatgtcaatagtgaaacgaggtgattgcaaccgcaggattcatggcatgtaactctgccgaaagcgcgcaagcataatcgtgctgttagtgtaatgttcttggagtttaaattcatagtttcacagacattcaaaactttgtccctaggcaattttcaatgggaacgctagaacttactcgggtgtttctttttcaaaaaaacaaaaaa

SEQ ID NO: 23852 - DNA, 242 bp, Setaria italica
  Peptide Sequence Number=SeqID_89826
gccgccccaatccctcctcagccgccgccgccgttaccccccagccggccaccatgatgcacatgaccttctactggggcaagtccgccacgatcctcttcgacggctggcgcacctccacgtggctcggctacctcctctccctcgtcgcctgctcctcgccgccgccttctaccagtacctcgaggcgctccggatccgcgtcaagctcgccgcgggaggggacgcgggcaagcagcagg

SEQ ID NO: 23853 - DNA, 340 bp, Setaria italica
  Peptide Sequence Number=SeqID_89827
ccacagccaacaacctgctcctattttgccagatcaactcagatatatcggtcagacaacactggtcatgctttatctcatcctgaaacatttctctcaggtggaacgcctggacagggataaggatgtcattcaaattgccaggaccccatttatgtggtcggtccttgatcatacgcttgaaaccatggcatgttttcatctcatgacccgttgctccaatgtgaacttcaggacaaaacttgcatgaatgcacaggaacagctttgagcagtgtggagacgccctcagtgacaatctccctagccctcatgacctcctccgcgaccgggatcatccg

SEQ ID NO: 23854 - DNA, 450 bp, Setaria italica
  Peptide Sequence Number=SeqID_89828
gtttcaggatgagataaagcatgaccagaggtttgactacgcccgagtcccagctgtacacgagctctgccatcaggcaggtgcagatatacctgatgaggttttatacagaagtgaacagctatctacaacggtcagaggccacagccaacaacctgctcctattttgccagatcaactcagatatatcggtcagacaacactggatgcatgggaaagcctgagattaggtgtcacgaaactccttttggtgtacccatctaaagtttgtgagcattgctctgaagtgcatgtcgggccatcagggcacaaggccagaatgtgtggagtttttaagtttgagggctggaaagggatgcacaagtggaagaaggccggagtggatgacctagttcctcagaagatcgtgtggcatcggcggcctcatgacccaccagttcttggttagta

SEQ ID NO: 23855 - DNA, 277 bp, Setaria italica
  misc_feature (257)..(257): n is a, c, g, or t
  Peptide Sequence Number=SeqID_89829
agcttcttcccatctcccaagctagtagctaactttttcttccataatccacgagaactgcatacaatggccgtagttactgtcactcgtaaggagaccacaattgtcgccatgagcattgtgttgattctgtgttggttagggcagtcggcgactgcgacatattgcagtgattactgtgcctccatgtgcatgtcggtgtgcaacaatgccgcttccagctcttgcggtaacgttaagaacacagttatgcaacngtgtgtgccctctgctccag

SEQ ID NO: 23856 - DNA, 425 bp, Setaria italica
  Peptide Sequence Number=SeqID_89830
atcttcatgggtcatggctgtttcttgcataatggtatagcgaggaagaatgggggaaattaaactgagatggtaaggaaccaaaccttaatagatattcctaaactccagagtgattttggttccccttcctttttttaggaaatcaatcttaagagtctggagatgttgcaacccattaactgacaaatgtggttgcagctattgtctcagttccatagcatattatcagcaagttttattcgtcttgcaacctaattaattttattttgccacataacttggtccttgattttttatggaaaactggaatgaacaattgacgtttacaatgtcagagagctaattggtaaatggtaattacgatttgtcagttttctaactagttgatcttaggggtgtttggttatttagtccaagggggt

SEQ ID NO: 23857 - DNA, 266 bp, Setaria italica
  Peptide Sequence Number=SeqID_89831
atgatcgacttgaagaccttgaagattttattctgagacggcttactgctggtgctggcacccttgggctgagtctgcctgtagagaggtgtgcagcagaagaaggccgcgacggagagggccatgacccctgtggggatggcgaagccgagcacccagccgaagttgtcctggacgtaggacatggtggagttccccagcaggctgccgctgcacaggccgaagtaccaccagttgaagaacatgcccttcaccttgcccttctc

SEQ ID NO: 23858 - DNA, 316 bp, Setaria italica
  Peptide Sequence Number=SeqID_89832
ggccccgcgcaggcgcgccacagctccgcgaacagctccggctcccgcccttgcgccatggcctctgcttctctcgcagtccccgggaggagggggagagggaggggacaagcgaggaagagaagaagcagcagtgtggtcaccgcaccggtggtggctgtgcgtgtttgttaggctcgccccattaaagaaaggcgcggtggggcttgttgaggcaagggcgcaaggccttgtcctcccttgtggccttgcgggagaggaggagagattgggaggcgaaggaggagggaggaacgaggaagtgggcgcggcggaa

SEQ ID NO: 23859 - DNA, 416 bp, Setaria italica
  Peptide Sequence Number=SeqID_89833
cccgagaggcgcgccaccttccggaacccaccgcccccgtccaccgcgtagttgatgtcgaacccggccatgccggcaccggacacgagcccgatgcgggtccccaggggcgtcggcgcgcgcaggtcgtagggggtgccggacacaggcgcgacctcgcccgtggggatcatgttccggtccacgggcgtgtaccgcgacgcgaacacctggatgacctggcccaggacgtcgccgctgccgtggccgcccacgttccagtacgcgtggttcgccaggttcaccggcgtcgccttgttcagcgccgtggcgttcatccgggcgctcagctggtacgggcaggacagctggtaggtcacgtacacgtctaggtcgccagggaatccttcaaaaccatcggatccgtggtagtagag

SEQ ID NO: 23860 - DNA, 979 bp, Setaria italica
  Peptide Sequence Number=SeqID_89834
gtccggcgccaccttctccttccgctcgccgcacgagcaggccatctttgagatcgcgcgcaacatctggcgccccacaataacacggccgcgatccctcggctgactctgacgatgaagacgccgccgcgaataccagccccaatggggaagtcaagtcgccgtcggggcgacagcgacgccgcaggcgcgcgacggatttcgcggcagccgctggcactgcccctgccaccagcatggtgcagccccctcagccagtgcaattgcctgtgtcagtgcctgtcaagatggaagactccctcccagcactgccccagacacaaatgcctgtgacagtgaccatggatggctcagagcctctcaggttgccagtcatgtcacctcaatcaggtgtttcggatgctgagaagagttgcctgactccactacttaaggagatgatacgtgcagtgataaatgtcggaactaaccccttcggcacaaaactgccggagccgccacttgggttgcccatggaaggggagaaatggaggaagcagcggattttggagttggaggtgtacttgaagaggatcgagctgctgcaggatcaggcaaaggcaacactggaggagctcaagtcctcaacccctgggacttgatccatgataagatgagagctctttcgttttaggattcttgttatgattcttagtgtagatgcttaggtgttttgcatatttttacgtccataaaagaatattgttaactgggttggggcttggaactagtttctttatggttctaattgttcatgtgatattagctgccatttctggttttctctgataggttccttatgctttgtttgctttgatagtggtatgctttgagtggacagtatagtaccctatagaaagaagaacatttgcaattaatttattaagattacagattaattaacttaaaaaaaaaaaaaaaaaactaaaaaaaactaaag

SEQ ID NO: 23861 - DNA, 157 bp, Setaria italica
  Peptide Sequence Number=SeqID_89835
ttccccagaggccccaaactagatggctggcaagggtgtacttctcaatgcttttgatcagattttccacctcctctgcgtcagatttatcacccgatgagctcaggtatgtctgcacaaattgcttctgctcattggtatctggatatttagtgta

SEQ ID NO: 23862 - DNA, 313 bp, Setaria italica
  Peptide Sequence Number=SeqID_89836
cggtctgacgtaatcctcttctttaatgaatcaattacagataaaacatagggggaggcagcattttcttcttcagctcccacagccgtaatactggtaacctgcgcggcgctggtggatgggcgcgaccggcctgcggacgccgaggccgacgcggaagaggccgccgccgccgccgccgccgcttccatcgcccgcggaaaccctagccccccgcgcgcgctctcccgccctcccacgcgagttgggcgcggagtcgcttagattaaaaaaaatgaaacaaggatttggtggggggagaggagggggaggg

SEQ ID NO: 23863 - DNA, 1465 bp, Setaria italica
  misc_feature (1310)..(1465): n is a, c, g, or t
  Peptide Sequence Number=SeqID_89837
actgttgtacatttacatagtgaaggttttggtcttggagaaaagcacatcgcatcccttagataatctgagacctcactagttttgccctcgcaaggtagcatggtaggagtttaaagcaactgtacagggtattgctgtgttgctgaactacattgttgttatcaggggttgtgattaaaagagaaagtagactgcttatctcaatctcacatgatgatgaagtacttatttgtgaatatgatagtacttatttgtgaatatttattttggtgtatcttgagaagatcttgttggattatgtatttgtcaaagtaaccttcaggtgctaaacagccttttcccaactgaagaccaatatttcaatattttctttatagtatagcactcctaacatctgatattagtgtcagcacaaaccagaccacatatgaaaattttcggtatagatcagatggcaggcctaatgtctatgatcgaggatgtccgagtaactttcaagaagttgtcttcgccaagatacaaccttccaaacataagttccgggcatacgtacaagaggaagtacgagctccaccagctaacaattctggagagatggaagaggaacaagttggtggtcctcgggcaaaagtgggagatgaccttgatattgatgatctgtttaagatttcgcaaaggcatgaccatggggacaatgatattgaaatgggaggtggaaacgccaattagatggaatggtcagtttcagactccaaagttcaaaacaatgcagatgcacacagatatatagttagaagcaacgcacaacgctaggattgggccaaagaagtgaaattttgggatgtgccacgagttattgcaactaattattttgatctctgaatcttcattgccatcacagagagatgctcactggctggtttattggctcataatgtccattactaatctgatgaactgatgattctgcagctggagaggctgggccaatatgcattcaatgcttgcttgttcgatcacttcaagcagggacggccagtttccaacgttctcatgaatgtatgtttcagtccaaaattagggcaactgctgtctagtcaggtgttatcagtataattctttttgtaaatcactagtgcaggatacttaggatgctactcgtaggttctcttgtgcatttgacccagcgtttgtgatgaattcttaaccttgcatccttccttctgaggatgttgtatatatcctggttgagaaaactcaagatggtgtagtgaatccagattgcattttcgaaataaaaaaaaaannnnnnnnnnnnnnnnnnnnnnnnnnnnnnnnnnnnnnnnnnnnnnnnnnnnnnnnnnnnnnnnnnnnnnnnnnnnnnnnnnnnnnnnnnnnnnnnnnnnnnnnnnnnnnnnnnnnnnnnnnnnnnnnnnnnnnnnnnnnnnnnnnnnnnnnnnnn

SEQ ID NO: 23864 - DNA, 715 bp, Setaria italica
  Peptide Sequence Number=SeqID_89838
taataataataaacagaactgtcaccttctaaatcaatgaaatggactacactattcaagtgcacaggtttgttgcatggatcaagaaacgatacagaaacttactggagccatccaggactacaaaccaaggttcgtgacaacataacccacaatgttaaatacttatttatcaaatcagaagtaggaagtaggaactgagtgaggacccaaacctaaagggtcaatgcaccagagatactctgacaaggaatctccaataaggccaccttcctccccaagtatgaggtggttttttgaagttcttcatgacaacttccaaaattactgattcactcaacttatctgtgtctgtcaccaagtctgcaacacctttatagtggatattgcgtggtttattaacagcttccattataacatcggccccagcttttgcggcggcctcgatgacgccgagcagctcggcagcggggatcgggccggtggtgggggcggccaccttggggtaaccggcggccggggccgcctgctccgacgctaccgccatgatggggcgcgccttgccggacctggagccgagcgcgcggaggcggagggtccgcgacggcggcaagttcttggcggcatccttggggaggagggcagaggaggaggaggcggtggtggtgggagcgagaagataccgtgccattggtgctccagaggtaaggttttt

SEQ ID NO: 23865 - DNA, 282 bp, Setaria italica
  Peptide Sequence Number=SeqID_89839
aggaaataagttcaccagctagccacataaaccttggaacccagacaaacaaatctgtgcacataggtgaagcccttcagatgcaaattgaagtacaacgccgactgcacgagcaactagaggtacagagacatttgcaactccgcattgaagcacaagggaagtacctacaatctgtgctagaaaaggcacaggagacacttgcaaagcagaatgcagggtcagttggcctagaaactgcgaagatgcaactatcagaattagtctcaaaggtatcgacag

SEQ ID NO: 23866 - DNA, 931 bp, Setaria italica
  Peptide Sequence Number=SeqID_89840
ctgcccgagtatgctgaagaagaaccagaatatcatgttgcccaccattatgttctggaacttctcttgaagatatctcgtcaagaataccaacggtatctgaaccatgatcccaaaaaatgcccagaatttgaaaatgtggcatggcacagcaacacatatctcatgaaacacagctgaaaccagaaaggcgatcagaatagctacacccctgggcaagcctttccttatgcatggaaaatatatatgtcgaatgatccacttatgaacaggcatgttccacattctccagtactcttcaacagttttggcattccaccagtccttatagaattcacgatcaccaaaacgaagaagttcagctagaatgttcagccataaatggaaaaagcaatagaacatgcaaagccatacatatagtgttggcacagagagtttcaagactctctctatagcattcaagaaattccccttcagtggatgcttagaattcttcacaatcggatttatgtattgctcaattatgaagcccatcaggcctgtaaaaacaaggcacttaacaagttgtcggatcacccagcccttcctaatacatgtagttcgaggataagttggctggtaacaaagtgttggggccaacataaagtacactagacttttaatggttggatctttcatattctcaggatcaacatgattgccatatgaagcacccttcagagtacttttggacaatacccttatatcataatttgtatgtgcataagagacaagcttcatccacatgatgcttgcaagaaacattagtacaaatccagatagtactgctgagtcacacttaagaatcacaacaactggatagacaatgacagatgttgtaacaatgatatggagaagaataaccacatgttcaccaatgagcttccttctt

SEQ ID NO: 23867 - DNA, 532 bp, Setaria italica
  Peptide Sequence Number=SeqID_89841
tctttggttctttacttagttcttatttagttgtcgttctatttggttctattcttggttgtactagtaaattacagcactaatgactgtagccaagaactgcccaaatttcataagattcagactctgtatccttgagccaaagaagccggatgccataacaaaccagccgttagatgaaggatttggtgctattgttcgtgagtgcagggggctaagcgactgtcaatatcaggtcttctcaccgataaggttttcatgtatattggaaagtatgcaaaacaacttgagatgctttctatagcatttgctggagatagtgataaggggatgatgcatgtgatgaacgggtgcaagaatctaaggaagcttgaaattagagacagtccatttggtgatgttgcgctcttggggaatgttgccaagtatgagacaatgcgatccctttggatgtcatcatgcaatgtcactatttaaaggggttgtcctaagttcctttgtcgttcgtaagtatgaccgattgctcaattgt

SEQ ID NO: 23868 - DNA, 647 bp, Setaria italica
  Peptide Sequence Number=SeqID_89842
tctttggtcttacagtcattagtgcgtcattggtcatctggtgacagaaatacagcactaatgactgtaagccaagaactgcccaaatttcataagattcagactctgtatccttgagccaaagaagccggatgccataacaaaccagccgttagatgaaggatttggtgctattgttcgtgagtgcagggggctaagacgactgtcaatatcaggtcttctcaccgataaggttttcatgtatattggaaagtatgcaaaacaacttgagatgctttctatagcatttgctggagatagtgataaggggatgatgcatgtgatgaacgggtgcaagaatctaaggaagcttagaaattagagacagtccatttggtgatgttgcgctcttggggaatgttgccaagtatgagacaatgcgatccctttggatgtcatcatgcaatgtcacattaaaggggtgccaagtccttgcgtcgaagatgccgatgctcaatgtggagatcatgaatgaactagatggaagcagtgaaatggaggaaaaccatggtgacccctctaagagtaggaataaagttaaataaaataaaagtttaaaaaaccgaaaaaacaaaaaaacaaaaaaactaaaaaagaaaaaactaaaa

SEQ ID NO: 23869 - DNA, 455 bp, Setaria italica
  Peptide Sequence Number=SeqID_89843
aattgattttaactgaatgcgtcaagtttttcttgtaacaattggtatgttattcagaatgtgctgactttgttttctacgttctatctgttgtctaggctcctgagggagttagatttgcaggaaaatgacgtggaggaccatgggcccaggtggctctcctgcttccctgattcctgcacttcgctcgtctccttgaattttgcgtgcatcaaaggggaggtgaattctggtgcactagagagacttgttgctaggtctccgaacctacgcagtttgaggttgaatcgttctgtatcagtagatacactctccaagatactagcgcgaaccccaaatttggaagacttggggacaggtaatttgacagatgagtctgaatcctacttgaggctgagtagtgcactggagaaatgcaaaatgctgaggagtttgtcaggattttgggatgcttc

SEQ ID NO: 23870 - DNA, 2807 bp, Setaria italica
  Peptide Sequence Number=SeqID_89844
gttttttcttttcccagaagggtttgaagaggaaggaaggagggtgctgggagtccgcgaggtgttcatgggttagatctggcggtgcggcggcgcggatctgagcgaggtttcggtggagggatcggggggctgagaggagggtggtcaccatctcctgctcatttcgagtagttcggccctcccatgtccaaatcgggtatgggtgacggatgcggcaactgtcggaaggagcgcggcctgcagatctgaaagtcacccggtttccttgctcggttgacctgagcgaacggcattgcttcccgctctttgactgtcattacttcctgttcggtgtctgctcaagaaatttagcacgggccatgagttgatgtgctaagaagacttctagtggttgctgatttcttgccctgcgttgaataacctggaagctggaaggggagcggatcacattcccgctccgttgttgttgacttcttgggcttgcttggataacctggaggctggaggagatcagatccagttcctgccctggtaacaaggtgctcctaggggagggcgccatgacctacttccctgaggaggtggtggagcacatcttcagcttcctgccgtcgcacagcgaccggaacacagtctcgctcgtgtgcaaggtgtggtatgaggtcgagaggctgagtcggcgcgctgtgttcgtggggaactgctacgcggtgcgccccgagcgtgtggtgctgcggttccccaatgtgagggcgctgacggtgaaggggaaaccgcactttgcggacttcaacctcgtgcctcctgattggggtggctacgcggggccatggatcgaagcggcagcgaggaggtgcatgggtcttgaggagctgcggatgaagcggatggttgtgttagatgagaaccttgagctgctagctcggtcattcccaagattcaaggcccttgtccttatcagctgcgaggggttcagcactgatggactagctgctattgcgagtcactgcaagctcctgagggagttagatttgcaggaaaatgacgtggaggaccatgggcccaggtggctctcctgcttccctgattcctgcacttcgctcgtctccttgaattttgcgtgcatcaaaggggaggtgaattctggtgcactagagagacttgttgctaggtctccgaacctacgcagtttgaggttgaatcgttctgtatcagtagatacactctccaagatactagcgcgaaccccaaatttggaagacttggggacaggtaatttgacagatgagtctgaatcctacttgaggctgagtagtgcactggagaaatgcaaaatgctgaggagtttgtcaggattttgggatgcttctcctatttgtgttccttttatctatcccctctgccatcacctaacaggcctaaacttgagctatactcccacactggattattctgatctgaccaaaatgatcagccgctgtgtgaaactccagcgtctttgggtactggattgtatctcggataagggtttgcaagtggtggcctccagctgcaaagatctacaagaactcagggttttcccatcagatttttatgttgctggttattctgctgtgacagaagaggggcttgttgcaatatcatcaggctgcccaaaactgagctctttgctgtatttctgtcaccagatgaccaatgacgcactaatgactgtagccaagaactgcccaaatttcataagattcagactctgtatccttgagccaaagaagccggatgccataacaaaccagccgttagatgaaggatttggtgctattgttcgtgagtgcagggggctaagacgactgtcaatatcaggtcttctcaccgataaggttttcatgtatattggaaagtatgcaaaacaacttgagatgctttctatagcatttgctggagatagtgataaggggatgatgcatgtgatgaacgggtgcaagaatctaaggaagcttgaaattagagacagtccatttggtgatgttgcgctcttggggaatgttgccaagtatgagacaatgcgatccctttggatgtcatcatgcaatgtcacattaaaggggtgccaagtccttgcgtcgaagatgccgatgctcaatgtggagatcatgaatgaactagatggaagcagtgaaatggaggaaaaccatggtgacccctctagagtggataagttatatgtttaccgcacaactgctggagcgagggatgatgcaccaaattttgttaaaatcctatagagctagctgcaagtagcctggtatcttctcaccctaaaagatggtcggtggaatccggcacggccgggggccgcggcaacagtgggtaagttcttgaaccaatccctcccccctttgcagggtcaggaaaagccacgctggtgtgctcccttatcttggagcaaacatggccgggatccatcatcatcctctgtaccactttcagtgcctggtcatatggccactgagccccccttcatcatccttgtgcattctcactcagagagggctgggccggaccggacctgaccaaccttttcttttcaccccccctgtaatctgtagtgtcccatttgcttttgacactggcacagttggttgtgttgccgctgctgctgctgctgctgtagcgttttgtttcgtagcctgaattatgttatggggacattccggggacgacgatttgcttcttgctcctgtgaatgcagtgcgtggaataattcgcggtttattcaaaaaaaaaaaaaaaaaaaaaaaactaac

SEQ ID NO: 23871 - DNA, 977 bp, Setaria italica
  Peptide Sequence Number=SeqID_89845
ccgatgtgtcaggagtttagcaggggtatctaaatcatctggcgagccgaacaacagcagtgaaacaatggtatgtacatccaacaaaatggggtaacaaaagaaacagcaacagcgaaagcagccgccagaaactcgctacaaaattgctggctgcgtaagcacagccgtactagacggacgaacatctgcaccgatatttacacagccacagcacaggacagaggccggcttctccctacagcttgtctactcgtcggagtccagccatcgcctcagcttggagagcgcctccggagacaagctcttgcagcaccttagcctgctatttgagtttgacgctgccggctctaggggcgccgagcccccactaagctcggaaacgaagcagaccacgatcaccgtgaggttgtcgaaggtcttgagcctcttcgcctccatggcaagctcccgggcgcaccgctcggggtcgtcgtgccgccgcagccccctgcggaccgtgctcaccgcgtgctggctggtcatcacgtcccatatcccatcgcacccgatgatgaggaactcgtcgtcctcggtgagggtggtccagcggatctctggctcggcgatgagaggtgacggcgagccgtgaggcagcttcatgtcccagtcacccagagcccgggtcacagagagtacgccattgaggtagccatcttcgatgtatccaccagactcgataaccctttgacgctccgcgtcgtatgttggcctgtgatcctttgacatctccactgcttcacctttcctacacaggactgcacggcaatccccagcatttgcaatcaaaagttgcctcccaaggactaatgctgtcagtgctgtggttccagaagaaaggttgatgagtgaatcatcagccagagcaaggtcagcccgcaagaaagccttgcggaactagaaatacctacaaacaagaattacaagacaaacaatta

SEQ ID NO: 23872 - DNA, 347 bp, Setaria italica
  Peptide Sequence Number=SeqID_89846
gcgtcggcttcctgctcaccactgctcgccgactgcgtcatgccgccgtcaccaacagaggccgcgaccgcgacagggtcatcagcgaggaagaagatgcccaggccgcccagcatcgcaaggacgacgcggcggcggcgcaggcgcagcaccacccggtgttcgtccggacgtcgtccttcgaggacgccatcttgctcatcttcgcgctctgcttccactccgtcttcgaagggatcgccataggcgtctcagcaactaggagcgacgcctggcgcacctgtggacgatcgggcttcacaagatcttcgcggcggtgccagtgggcatcgcgctgctgcgcatga

SEQ ID NO: 23873 - DNA, 515 bp, Setaria italica
  Peptide Sequence Number=SeqID_89847
gatgaagaagatgagatgaacatgtaccgtgtccaaggtacactgagagagtgggtcacaagagacgaagtccggcgcttcattgcaaagaaatttaaagagttcctccttacatatgtaaacccaaagaatgagcaaggagagtttgagtatgttcggcttattaacgagatggttttagctaacaagtgtagcttggagatagactacaagcagtttatttatatacatccaaacattgccatctggttggctgatgcacctcaatcagtgctggaagttatggaggaagtagccaaaaatgttatttttgatctccacaagaattacaggaacatccaccaaaagatctatgtccgaataaccaaccttcctgtctatgatcaaatacgcaatattaggcaaatccatctcaacacaatgattcgaattggtggtgttgttactcgacgatctggtgtcttccctcagttgcagcaggtgaagtatgactgtagcaaatgtggaactatcct

SEQ ID NO: 23874 - DNA, 186 bp, Setaria italica
  Peptide Sequence Number=SeqID_89848
tccggcgccgtgccagccgggcgacggcgcggggccttgccagccggcgtcggccgggcagatggcggcgctgtacgccggcgtgttcctgatgtgcgtgagcgcggcggggtcgcggttcaaccaggcgaccatgggcgcggaccagttcgacgacccggccgaccgcgacgtgctcttcaactg

SEQ ID NO: 23875 - DNA, 748 bp, Setaria italica
  Peptide Sequence Number=SeqID_89849
gacctgtaagtttaatggtaattctgtaattaaatcattttatttacctggttattctttgtagtgttaatgtatgtgtctgaagtctgtcatgttaacatgtaaatgtccttatcctacatggttatgctactaatgaaaaaatttctatccatcttctccccagtttcaatcacaagactgatggtgaacatgttcacttcacgtctgcatcagatgactcagactcagatggtgaagatcatgatgaacagagtgatgcttctgctgatgagcagtcaactatagaaaatccctcaaacagtccttcaggctcaagagttgacgatgaagatttggaaatgattgttgtaagagatgccaatgaaggggaggaggtgtacaatacatatggtacaatggggaatgctgctttgcttcatagatatggttttacagaactcgacaatcaatatgacattgtcaacattgacttagcaatggttaacaagtggtgcacatccatattctccagtcgacatgcaagagcaagggtattgctatggcgtaatctgggttattctggttgcactagccaggatgctgagtactttgagatttcatatgatggggaaccccagcttgaacttctgatcctcctttatatcatcagtttgaaacctgatgtttatgacaagttaatctgtgtggctcgtgatttagttggcgatgaagagcatgatggtattcgtaattacgttaaacgtta

SEQ ID NO: 23876 - DNA, 1377 bp, Setaria italica
  Peptide Sequence Number=SeqID_89850
ttttttttttttttgtcataagaaaaataaaatattatgagttgcatggcaacaataactcgtacaatgattgttaagttgtctcgtagttctacaatttaactcacgaggtggttgtttcgcgaagcaacgacctctttctctctcctcgctctctctcctccacatcttgagatgacctataacactgctgacgtgtagcgatgtacttaccataatcagttttgcacgggcacggacttgaagacctccgccggccaccgttctgctgtgatggtgtttctcgtcaggatcgacatcatgcctgcttcctcaagcaggcacggggtcgtcagcgccctttaaggggatcttctaagctacatgtaagtcagattaagtcctgattaattactgtcttaggtgttcatgtaattagactaccagatccgtcaatcagaaatgtgttatttcctacatttggcatcaagagccaggttagtctaatcatgaaccctaaacatcacccgatccggtttaggccaatttcaatgtgcctttagccctgcagattaggtgttgatgtgcgattaaatcaattcgtgcttgtcagtgtgcattcagatccatgccgtgagctttaagcacgaatttcatgtgcatctagccaattagatactagctgtggttaatcagtaccaagtgtgccaatcagtaccggattagggttaatttcatgtttaattaagtgattatggttagttaatctcgagtatacccaaatctcgcactgtcagtacccaaactcgtgcaattaagcccaaacctgtgcgatgagtactcaaatcagtaaaattgaatgtgcatcagcatttagaaggaggggagatcgaatcgataagatcagaaattccgaaatccccaaatcagcagaacgaactttcctccgttaatggccgcgcacggcatcagtgccgccgcgcgtggccgtcgccgcaccctctttgaccggccgcatcagaggacgcgcgcacgacatcaggaccgtcgtacgcatccacctaccgcagccggtccgccgtttcgccgtcatcccgaactccagcggacttcaggtatggccgccggcgctcttcagcttgacgtgtcgcgtgccgatccgttgacgccgtcgggcttcagacccgctcgccgtcgtcaccagaccgcctcgccataaggtccacagcggggcccctcgacggatccgcgcgcgactaggttgcacgccggctccggcgagaggacccgtagtggagcacggcaagggcggcggcacggcggccatcggcggcgctgtgtggagaagaaggggaggaggcgagagagaaaggctgctcggtgtcgggtacttttgcg

SEQ ID NO: 23877 - DNA, 291 bp, Setaria italica
  Peptide Sequence Number=SeqID_89851
ccgtcggcgtcctcatccgcgttcgtcagcatgcgctccacgccctcagggctgctgaatccatatgggctatggtcgccgcggaactcgcaatctgacgcgtcgtcatcagagatggagtttggtactgcgcgccagtacgacaccaccgacctcttcttccaggagggttggctctacgacgaccacctcttccctagcatgctggatgatgaggatgacgaaggcaaagaggaggacaagtttgtactcggtgctcacgaaggctcagagcgggtagaaataggcaag

SEQ ID NO: 23878 - DNA, 373 bp, Setaria italica
  Peptide Sequence Number=SeqID_89852
tataactattccctttactaaacaaaaacggtaggcaagtacttggacaactctgattgcgctaacactgatacttatgattttttttggtatttaagtgcttaattcatgagtgatgattgctacacttgataatgtttcccatttatcagcacattgattctggaattgcttactaatcactctgaatgcttgttctgttcagcttattgtttattctttgcttggacttagctgccaattcttttgtatggtaatgcaggtagcgaaaaatgcatttgttattttctactctggagagagatcaaaagccaaaattctgaagatatgtgatgcctttaatgcaaatcgttacccattcccagaagatgtt

SEQ ID NO: 23879 - DNA, 639 bp, Setaria italica
  misc_feature (290)..(290): n is a, c, g, or t
  Peptide Sequence Number=SeqID_89853
ttctgaattaaggctgagcactgtttaggagaaccttttttctctctcagtatttaaacatatatgtgttctgaatttctgaggtcttataggtatctggaaggatctcagagttgaaggcaacaattgacatgggcctagctcatcgtgacagtatactcaaaagtattgcatctgattttgagcagtggaaccatctggcaaagagggaaaaagcaatttatcacactttaaatatgttgagtgttgatgtaacgaagaaatgcctagtcgccgagggctggagtccngttttttgctagcgttcagattcaagatgctctccagcgtgctactgttgatagcaaatcccaagttggctcaatctttcaaattctcaacacaaaagaatcccctccaacatatttccagacaaacaagttcacaacagcgttccaggaaattgttgatgcgtatggggtagccaaatatcaagaagcaaatcctggagtattcaccattgtcactttccctttcttatttgctgtcatgtttggcgattggggccatggaatttgcttgttacttgggaacaactaatttactagaataaataccgggaagaaagaaaactaagacttacaacaagaaaacttagga

SEQ ID NO: 23880 - DNA, 814 bp, Setaria italica
  Peptide Sequence Number=SeqID_89854
cctggtggcacggaataagatccgctcaaaagccatcgccttttcctttggcacaagaccactcaatgagccaagcttcacttgttttgatggatctgttgacatctcctgttccaacagggggctctccagtgaagtttgactagattgatttgcctccatttccctttgttgtgctgcagcgcttctttgagctgaatagaaaaattcaccagccttttggagaacggtattgtactctaacagctcattataggtccgctgtaacttttcgttgtttgcattaacttcagttagctcagcttccagttctccaagctttatctccaagtcatcaaattccagatgagcttcatttagttgtgtaggagagggtgatatgttagcttttgacatctgctccttaaaaaacctcaacttgcgagccatttcactacaccttttgatctgggcagcatatgtccgttgaaatgggctcttctctgcattaaggtctttgaactggatgaggccgaggtcgccaaggtaggagacggtgaggtgcgcggactcggcgggtatgatgacctgcaccagctgcatcgcctccgaccgcatcagatccatcggcgggcagcacccgcccccgccaccgcgcgccatggccggcgtccgcgcgtgccccgccgggtcagcagccggcccgctgcgcctccgtcagatccctggagatccgacgaggggtttcggatcgggctcgcgcgggcggagcggatctcctccggcgggcgcggcggtggtctgatcggttcctcgcgtcgtgaggaggtggaag

SEQ ID NO: 23881 - DNA, 449 bp, Setaria italica
  Peptide Sequence Number=SeqID_89855
gggcctgctccgccggctgggccgcccgatggggagcgccccatcgccgccgtggcgcgccaggcgctcctcgggctcgcggcgctgcacgcgctccgcgtcgtgcaccgcgacctgaagccgtcgaacctgctcgtcggctctgacggcgaggtcaagatcgccgacttcggcgcgggcaaggtgctgcgccggcggctcgacccctgcgcgtcctacgtcggcaccgcggcgtacatgtccccggagcggttcgacccggaggcctactccggcgactacgacccctacgccgccgacgtgtggagcctgggggtggacatcctggagctgtacctgggccacttccctctcctgccggagggccagcgcccggactgggccgcgctcatgtgcgccatatgcttcggcgaggcgccggagcccgccggccgcggcgtcgggaggta

SEQ ID NO: 23882 - DNA, 162 bp, Setaria italica
  Peptide Sequence Number=SeqID_89856
tgtcctagaaatggtgttttaggtgtcaatgagttatgtatgagttgtttcataattgtcatatatgagttgttatctagttgtcatattagttgtaggtgacttgtctaaggcttttgaacctataaatagaggcaagcctcaagtttgtaagatggtttt

SEQ ID NO: 23883 - DNA, 254 bp, Setaria italica
  Peptide Sequence Number=SeqID_89857
actgcaacttctcctccttcgtccgccaactcaacacctacgtgaggtttccggaaggtggtgcctgaccggtgggagttcgcgaacgagaacttccggcgaggcgagcaaggcctcctgtccggcatccgtcgccgcaagtccaccacgccgcagtcctccaagtccggcggcagcggcgccgtgaacgtcgcgttccctccgccgctgccgcccgcgcctcccgcgtcggccaccacgtccggcggcggcaa

SEQ ID NO: 23884 - DNA, 622 bp, Setaria italica
  Peptide Sequence Number=SeqID_89858
aacgtgaaaaaattgaagaaatcactagaactgacacggagagtctgatgctgacgcttgcttttcgagcgtgtgccatttggcttctgctccggccacttatggtaggatatcggcacatcactgcttcaaatctaaacttcccaagagttggcagctagccaatcgcagcagagagctgccggggacttctcgcgtcaaaccaaacgaactgctaaaaagtttgctgagtttagcactaggaacttttgtgatggtgccttggaggtcaacttgcttgctaatatatagtaatatgagctcaacggaaatgggtaggaaactagataatataactatggaacagtaatttctttggaggcttatgaggccatagtattataattggaactagtgaaagcaaggggcctactacttgtgttgtaaaatatctagctggcccacttccccacctccggtcctctcgcgctcttaactacccacttattttgttacctattattattccccaatggtcacttagagttttgctttttctgtgaccacatattatcataattaaaagtaatcaaattgtttctgaccatctttttctaaacaccgtggtttatctaagacacag

SEQ ID NO: 23885 - DNA, 784 bp, Setaria italica
  Peptide Sequence Number=SeqID_89859
cgacgaggacgaggaggactacgacgaggacgaggaggcgggcggcggcgcgggcggcagccggatgttcgagatgttcctcgagaacggcggcacgctccccgggacgccggtgccctcggcgcatccgcatccggcggcgacgccgccgcctcggccgcggcaccagcacagcatgtcgatggacggctccacctccctgctggggtccgcctccgcggggacgcccgggagggcgggcgctgacgccaagaaggccatctccgacgccaagctcgccgagctcgccctcgttgaccccaagcgcgccaagaggatcttggcaaaccggcagtcagctgctaggtcaaaagaaagaaagatgcgctacattgcagaactagaaagaaaagtgcagaccctccagtcagaagcaactacactatcagctcagctggccatgttgcagagagataccagtggtttgacaagtgagaacagtgatttgaagatacgtgtgcagacaatggaacagcaagtccggctgcaagatgcactgaacgacaggctaagagatgagattcagcagctgaagattgcaacaggacaggtaaatgccaacattggtaaaatgggaagctttggtctgtccacatttggaggcaatccacaaagtttccagcgcagccatatacagtcgcttctggctgctcagcagctgcagcagctccagatccactcccagcaccagcaacagcagacgcatttgcagaagcagcagcagcagcagcatctcagcactgcc

SEQ ID NO: 23886 - DNA, 642 bp, Setaria italica
  Peptide Sequence Number=SeqID_89860
caacaatagagaggtcaaattactgcttcaggggtcctcctgtcctgaactcatcacttggagtgatctgccagaagccgatgggaggatcgaatgacatccatccatggacattgttgcactggtcctcgcaagagtactggtacttgtcgtcaacctcccctctgagatcaggattgattgggtccacaaggagcacggcctcagggtatgctaatggctggcctcggggaggcagtcggtcatcgggcattggcataattctctgcctgttgtcagccaatgccatgtaatgaaacttgtctttccggagcttgaaagccaccctcgtctctcccaagccaaagtcaggccatccttccttatgctcatagattccataggtgtagaatcctgaagaaccccggagaacgatgaacctcttatcgatgttcaaggggacagctttgccttcaagggaaggatcccaatttctggtgaaggagacctcagcctggttttcatcgtggttgatgatgcggaactcagtgcctttgatcacatcaaaagatgccggttttctgtcctggtgggttccaaacaaggtcccagtaccctctgttgtcttcctttgttaaggatctccatgagattatccacacc

SEQ ID NO: 23887 - DNA, 650 bp, Setaria italica
  Peptide Sequence Number=SeqID_89861
tttcgttaattagtttctttacctttactttattttggtttacgtttctttttcttagttaagttagttaaggttcttaattgtaccttgtctattgcaacagctacaatctccctgctgcaagctctggttggttttgagaagaccatcaagcatctcgataaccatctggtggaaattggcaccaagagtatcaccaagccgaaggagataaggaaatttaaaggtgaaggcatgccgctgtaccaaagcaacaagaaaggtgacctgtatgtcacattcgaggtgttgttcccgaaaaccctaaccgatgaccagaaggccaagctgaaggacattctcgtgtagaccattttttcacccttatgctacagatagtttgaggcgggtgtctcaaggaattttccatgtagcttgcatagaaagaagctgccgctgcatgttctgggtgtgattttgccttgctaatattagcagctctgttttcattttctttccctctttttgcgatgtccttaacagctcagtgtagttgtagaaagcaacaaaggtgtaccagaatgtttgtacttttggaattcagaatacattgattacagaagtacaaacattctggtacacctttttgcgatgtccttaacagctcagtg

SEQ ID NO: 23888 - DNA, 487 bp, Setaria italica
  Peptide Sequence Number=SeqID_89862
agtgcaattgtaggaacgaagtttaccatcgacaaattggtcctggaatgtatcaacagatgactgagctaggtattttctagttacattatgcatggtctatattttaatccattcatagttttctgtactgaggatgttccctatctttttaggtctgcgaccaatgtccaaatgtgaaatttgtacgagaaggtgaatttttaactgttgatattgagaagggaatgcaagatggacaggtatgaagcagctgttttatctgtcctctagtcgctaactatggatgtatttttccatattgacatattgttccatgtgccattgatccgatattatctatgccatattttctcttctagcatgcacaaacgtggatgtgtgacacacgttgtctacttcttatcatgtacttggttacagtgctgcactaaatgcgtaaaaccattactctaagaaagccattcggttttgatcacttagttgc

SEQ ID NO: 23889 - DNA, 854 bp, Setaria italica
  Peptide Sequence Number=SeqID_89863
tacaacagttaaaaattcaccttctcgtacaaatttcacatttggacattggtcgcagacctgctcagtcatctgttgatacattccaggaccaatttgtcgatggtaaacttcgttcctacaattgcactgcctctttcccgctgctggttttatgacatttttctctctccaaacctttagagaaccgcccatgtacaagtcctctagtgaagcatccagttcaacaaccacctcgtcaccctttaagatctgttcttcctcctcttccatcccaccaccaccaccaaaaaagctgctgaagatgtcctgaatattcatcccaccaccgccacctccccggccttggaactgcttcaatccctcctcaccataccggtcatagatcttcctcttctcctggtcagtcagcacctcgtacgcgttgttgatctcggcgaagcgcttggttgcctcctcattgtcggggttcttgtcggggtggtacttgagcgcgagcttgcggtacgacctcttgatctgatcctccgacgcgcccttgggcacttgcagcacgtcgtagtagctcttcccggcgatcgccgcaacgagatgcagtaggacgaggaaggcggcagcgatccgcgccgcccctcccttccccggtgccgccatcccgctcccgcctcctcgaggcactccccctactcctcgcacacactccaccgggccaccggcggccgcgagctcgctcccgcgcggggagaagaaaggaggcgtacttacgcgcgcgcgcgcgcgagcgtgcctgcctcgggttcctctgcctcgtcgactcgtctccctcgtcgtcgccggcgtcgcctcccccttcg

SEQ ID NO: 23890 - DNA, 965 bp, Setaria italica
  Peptide Sequence Number=SeqID_89864
cacctcgccaacgacgtgaaggtgtccacgccgatcgcgttcgacgcgctcaaggacccgaccttcccgccgtccgcagccaggttcaaggacgacatcgcccagtcggtgatgaagcccatgatcgacttcctgcagcggacgggctcctccctcacaatgaacatctatcccttctttgcgtatgccactcaaaaaccaggcacaatgtccctagactacgccttgggcaactccaaccccggcgtgctcgacgacaaggccaacgtcacgtactacaacctccttgacgcccagcgcgacgccgcgtactacgccgtggaagctttgggccagtcttccgttgcgagtaccatgaaagcttcgggccaggatgtcggtgtgaccatgacatatacggagagcgggtggccaaatcaaggtacgatcaagcacggcggcggccggaagcttctggacacagaaggcgcggcgtcgatagccaacgcccaagcgtacaacaataacctcatcaaccgcgtgctgtccggcaaaacgggcaccccgcatcgcccttacgccggcatggacgtgtacatcttcgccctcttcaacgagaacgggaagggacagcccggacgacatcgagcagaactttgggctgttctaccccaacatgcagaaggtgtacgcgttcagcttccaaggcagcggcgcgccaccaggaggacagacggcgagctggtgcgtggcgaatgcggccgtgggggactcgcggctgcaggcggcgctggactgggcgtgcagccacggcgcggactgcggcgccatccagcccggcgcgtcgtgcttcgagcccgacaccaagctcgcacatgcctcgtatgcgttcaacagctactaccagcgtaacaaaaaggccagcgggtcgtgtgacttcgccggcgccgcctccgtcgtctaccaggagccaagcatgtgcagtg

SEQ ID NO: 23891 - DNA, 817 bp, Setaria italica
  Peptide Sequence Number=SeqID_89865
gctccaaggtcctgagcagtcatggcgctcgctcgcttccttgttgtcctcctcggcgcggcattggcgtcgctgctcctctcctcctgtgcagatgcgtccgaggtgggcgtgagctatgggagggtggcgaacgacctgccggacccggcgaaggtgacgcagctgctcaaggacaacggcatcaccatggtcaggatatacgacgccaaacaggaggtgctgaggtcgctggccaacaccgggataaaggtgatggtgatggtgccaaacgagaacatcgcggaggcggccaggaacccctcgtacgcgctccagtgggtgcgggacaacgtgaaggcctactaccccgccacgcagatccacggcgtcgccgtgggcaacgaggtgttcgactcgaggccggacctgacgaggcagctcgtcccggccatgaccaacgtccaggcggcgttggcgcagctgggcctcgccgacgccgtgaaggtgtccacgccgatcgcgttcaccgcggtcgagaacacgttcccgccgtcccggggcaggttcaaggacgaaatcgcggagccggtgatgaagcccatgctccagttcctgaagagaaccggctcctacctcaccatgaacatgtacccgttctgggcgtactacaaccaaccacacgacatcaacctggactacgccctgggcaactccaatcccggcgtccccgacgacgacaccagcctcaagtactacaacctcctcgacgccgagcgcgacgccgcgcactctgcgatggacgatttggtccccggcgtgagcttatctctcacgg

SEQ ID NO: 23892 - DNA, 778 bp, Setaria italica
  Peptide Sequence Number=SeqID_89866
tggagcttccatctcttggtaaagtactttgcaaccaaaattttttgaaagtctagagcaggatcacagtattaccccgtcatcatccaaaactaatcaacaaacaaagaccgcttggctatcatcatacatgaaagaaacgaaaagcatcttcctcttcttgattttggtttcctctttccttttacacctgtctccatcccagccgtactcacctgattattccagagagagagagagagagaaaagaagagggtcttctcctagctgcttgcctgcttgttgctagcctgctactgagtgtgaggtggcgtcgggtaccctgagttggcccagtggatcagcgagctcgcccagttccagtcctccgccgccgccgcagacgactcgctctgttgcgtgtcgtgcggtgaggagtagtagtatccgggagcagaggaagtagaggacggcacggtggcgacagaaacagaggagggcgggaacgagtagtacgagcccaagaagccactcgtgttgccgccgccgccgccgccgccgtaggggttgctcggggcacctccgccaccaccgtagggattgctcatgccacccccgccgccggcgtagaacggaaggagggtgccttggttgcgggcggccccctgcagaagcatctggtaccgcaggtagtccacgccctgggcggcgccggggtggtagccggccggggaggtcgatgccgcccccgcgccggcgtattgggtcttcggtacgtccggtcgtccgtccggtcgtc

SEQ ID NO: 23893 - DNA, 1184 bp, Setaria italica
  Peptide Sequence Number=SeqID_89867
gatgacaaaagtccaacagctcttacattatattctacatatggcataatacatgcatgtcattatagcactagtagtaattaaacagccctaactgaacttctctcccctccaacaagaccacaacaagcccaagcaagcaagcagttcgccgtccgtcccatgtcaggctcccgtcgccaccgccggccggagagccgccggccaccgcgctagaaggcagagcgcaactacgccgatggcttccgcacgaagtaccggtacgcggcgaccttccgcttccgggagccggagttgtcgatggacagcaccatcttgccggcctccctcgccgtgaaggcgttgtgcacgggctcctcggcggtggccagcaccatcctcgtcttctccacgcacagcgtgtagctctcctccgccgccggcacgtactccgcgccgtactccaggtcccagccgccgaccaccaggtcccacgttattgtcgcaccggcctcgatgccgtcgatctccaggaacaccttctcgccgcccttgatggtgaactcggacgccggcttgggcgggccgttctcgaggtcgccggcgcggctcagcccgccgtactgcaccggcaccagctccggccggatgaacttgtatagcgtctctgcgacgttgccctcgcgcgcgatgacgaacttgctcttggtgcgctccgtgaggaagggcgagatcatggagaagagcacggagaagtaccacggcacgttgatgaacaccttgcgcgccaccatctccgggtagttgtcctggaagagcgagaggatctggttgctggcggccctgagctcgcgcttgggcatgtccttgaggtcggtgacctgtataatggcgttgacgccccccggcctgaggctgagcgccctgacgccgcgctccatgacctgtacgcgccagcggaggaagcgcgcgaggcggtcgccgtcgccgaagacgcgctcgtacatgccgcggtccttgaagacgccgtaggcgttgtagcagacggggtggccgtcgcggtcccagccgtgcatgtaggcgaccaccccctccaggtccttgaagcccaggtcctcgtccagcaccgcgtcggcgccgaactcggcgcgccacgccgcgcagcggaggagcatggcgtgcgcgtcgcggacgcggaagtcgcg

SEQ ID NO: 23894 - DNA, 250 bp, Setaria italica
  Peptide Sequence Number=SeqID_89868
gttttatgttcggttgctgtagctgtcagcggaaccatatgttcattggatgtaacaccttttcgatttgctgatgctattctgggtgcaacccgcacagcttcacccagagatatacttgacttggctagtgaaagactcatattcctgacatccttggacctatccaagatagctgatctatgcaacgtcaaatttttcagatgagcaggaagtttctttcttcttcctcctgataaacttgtctcct

SEQ ID NO: 23895 - DNA, 470 bp, Setaria italica
  Peptide Sequence Number=SeqID_89869
cgatccgaccgtcaccgtcgtctacggcgattactacggcaccatcctggagatcacccgtagccgtgatctcgcagggttcaggaaggacgttgccctgaccgcgtgctgcggcgacggcggcacccacaactccggcacgctgttctcttgcaacgccacgtcgattctgtgccctgacccgtccaagcacatatcctgggacgggcttcatctcactgaagctgcgtaccaattcgtggcgcgtggcatcctggatggactaattgggtcctccaaatgtagatgctaattgagcttcgcaaggaacctacaagttacacaaatttaaccaaatcatcgtacttcgatcaactcaattaaataattcaaatgtgtcataagcaattgaaaatcattcaggataacacacctcacaagcacaacatgttcaacatcattgtaacatatctgtacgtagtccatcacat

SEQ ID NO: 23896 - DNA, 272 bp, Setaria italica
  Peptide Sequence Number=SeqID_89870
gtcgagtgcgcgctggtaggcgacgcattcgtgcaggaggcgggtggcggcgccagcgtcggtgagggcgcggagcgcggcgagggaggccgggtcgccgaagtcgagggagggctgcgcgtcagcggatgaaggatccggagctacgatggcctccgggcggcgcggggagcgcggggtgggagagggcgagggcactgccatggccgccgcggcggtgcaaattcggcgagatctcggacggggatgcacgggatctggacgggccgggg

SEQ ID NO: 23897 - DNA, 1117 bp, Setaria italica
  Peptide Sequence Number=SeqID_89871
cccgtgcgcgagctgctcggcctcgacctgggccgccgcgtcgagcgcagggtcgctgacctctccgccgagatcgccgcatggtgcgacgccgaccgccgacgcacgctcctcttccacaccttcagcaacaccgggtggctcgcctatggtgccgtactggagaatctacaatccagagctgacataactgagagaataagaggatgcattgtagactctgcaccagttctagagataagaccagaggtctgggctgctgggttctctgctgcaatgttgaagaaaagtagttccatgacaggaccttcaactgaatctcttgatgggcctattgtaaatggcagcttgaacagagttagctctaatgtcatgcgaccatcatggggggaatgctttattctgtcaactctgcagaaattcttcgagattgtcctttacgtgcctgatataaacacgcgactgcgcaaggttctgtcagttctttcagacaagcagcctccatgcccccagttctatctgtacagctcagccgatcgagtgataccaggtgaatgtgttgagagcttcatggacttgcagagatcgctagggcggagcgtattcgcccacaattttgtcacctcgccccacgtggaccactaccggagcttccctcacgtctactctgccaagattgacgagttcctgaagatctgctccacagtcaaagtatcataaccggacctgcattcaaactaacaggcctgtcgaacaacttcatgattttggttgtattatcgagctgtagccaccatcatatcaccctgtgaggtacagataatccgtcaaatatcgaagacctggaggatgctcttaagtcttattgaaagaaataggtgcgagtaaacctttttcgtgctcctctttttgctacccttgttataagaacagaactctgttttcccctcttgattgtaggctcctggagaagaatagtgaattgtatcctgatttcttgaacgcgaactgtaccctagctgaaagccattgtgtaaatcggaaggtacttggaagtttcagggtacctgaatttgagacatgtaaacatgtactcgttttccattctaaaaaaaaa

SEQ ID NO: 23898 - DNA, 391 bp, Setaria italica
  Peptide Sequence Number=SeqID_89872
gggatacggtccccaggtggagtatccgtgtttcgtagcatacatacactagctacaggaaagaagaagcatgtaccagtgtacataataaagatttcaagaaattttgctctgacttaggaagcatatcttgttttttttaaacgagtatatcttcttattatctctaatagcagaaactaattagcaattctgattcctgaagaggcgcattatgatcaccacctccatcaaccaccgaaattagtacaggatactaactaatcactcattcactcagaacatcaaagggaaattaggatatgaagaatcaaaatctctcatcctctgtccaatatcggttcgatgttgttgtgcttcgtcctgcatatgacaacacgccggcagcatc

SEQ ID NO: 23899 - DNA, 245 bp, Setaria italica
  Peptide Sequence Number=SeqID_89873
aacaggcgttcagttggcttcttgaaatcataaggttcagatccagaccgtcgcaggttgttccaaaaagaagaggaaataaagaaagagaaacagcgatgatcatctgcgtacttgttctagggagagtttttttggctgtgggaaaatgaaagaatttcaagtacgtagtacttaaaaatcccagagaagcgatatgtatacaacaagaaagaagagtgaacaaatctgcgcttagatctggg

SEQ ID NO: 23900 - DNA, 1523 bp, Setaria italica
  Peptide Sequence Number=SeqID_89874
agcgccgccgcggggcgatgatgcagctgccgtagatcggagaagaggcgaattcagattcagagagatgctcgtcaacatcaacaagcgtggccgttgagcgcggtcatcggcgtgaagcggagggatctgtcggcccaccggcaagctccccagcgtgtgtgtgatggcctccccccagcggcggcgcccctgtatcccgcaagaaaggagggggtccgcctccgcctggcccgacctccccccggagctgctggagcgcatcgtcgccgtcctcggcccgcgcgaccgcgtcgccgtccgcctcgtctgcgtctcctggcgcgcgtgcgtgcgggagcggttcccgtccgacctccccttcgaggccccgcgcctcctcctccgccgcccaggagtcggcggcgggctggccttcttcagcctccaccgccgcaaggtcctacctttcgcgctccccgcgagcgtcggcgccggacgctgctgcggtcacaccggcggctggctcgccatggccttcgacgccgaccgctcgatggccctctgcaacctcgtcaccgggcaatccgttgccgtgcccccgcccccggtgttcccggtctaccaaaggtggtcctctccggcccgcccacctccccatgctggatcgccgccgcgctaggccgaacgggcacggtcgcgctgctccagcccgccgtctccggcgcctggatgaccatcggcgtcgaggagggcgcccggcacgggggcttcagggacatggccttctggagcgggcggctgtgcgcgctggggtacgacggcgcggtgctggcgttccgcggcgacctgcgcgcgcgcgcggcggcggtgtcggtgctgcgggaggcggattacccggtggacgatctgcacggcatctggcggcggcggcgggaccgcctgtacctggtggagagcgacggggagctgctggtggtgcggaagctgtacagggtgtgggggaacggggcggtggacgcgcaggtggaggtgcaggtgctgctgtcggcgggggagcgcaagtggggcctgatggatgagacgcccgggcgggcggtgttcgtggggtcggtggcgtcggcggtggtggccgtggagctctacccggcggcggggctgcgcgagagctgcgtctacttggcgcagcgggaggtggagatgctggcgccgcacgccatctgcgagtactcgatggaggaggaggagatgaggggcgtgcccatcgccggcggccactccgcggacgtcgagcccgtctggatcatcccattcgtctgacctcgatgcatccgtgcaatccgcgtgatcgatcagctgcctcaagcattggcaagcactctggaatccggattgatctctagtaatatttgctctggttcgccaggtgtagagaacttggcctgctgtgtgaatcggcattggaattgtgtagagaacttggcaatcgtacaagcttttggccgaaatgtctgctcttcgccaaaattttaaaaaaaaaaaaa

SEQ ID NO: 23901 - DNA, 435 bp, Setaria italica
  Peptide Sequence Number=SeqID_89875
cccatcaccttcctcactcttgccacatcactccagcagccaatgcttgcatcaaatttgctagctgcacatgagttgcagcacaacttggttcaagcttcagacggtgctctgcagcctgtatgccgatcgaaacgcttccgtgcaccctgcaggaagctagcagggagccccatataacaccatttggaggcatggacattgtctggatcagatcccacgcttcatcgagcagtcctgcacggccaaggagatcaaccatacatgagtaatgatctagctctggttctattccatgttcaatcattgccctgaagcagcgtcgaccttccgttacaaggcatgcatgccggcatgatgaaagcacgcctaggaaggatattgcatccggaattatgtgctcttccatttgtttcagcaagtttatgcaatgct

SEQ ID NO: 23902 - DNA, 860 bp, Setaria italica
  Peptide Sequence Number=SeqID_89876
tggaacgtatcatgatttcagatgtacagcctatcatgatttaaagagtttgatcatccgatccaaactagtaatgtgcacaagcaaacagttcagaatatggtttcctacaaattgcctacatgaactaagctacagattgggaagatcactgtttagcttcatgcttgaattagacataaacagtacaatgagtcagctataagatttgataagcgcagctactaaataagcctttccaactttgataaagatataccctgaccttagtgatatttacacagagaaggctaaatggcaaattttagagatatacaagctacagatttgcattctgacttggccaaccatgaagagaactgctagatatgtgtattatgtactcaactacagttgcctgtatggcttctaataccaattatcctgtgttctgactatgagctaaggacgccgatgcaaatgaacaggacaaaactgtaatgcaaggacaataaagaaattatttccacaatgcactaaagaagatatctcctttggaaaacaaatatgtacaaataataagttacgtagctatatacatttgattgctaggactactttagaaatgcattactaaaatataaaacataaaaacattgagcaaaaagttccagccgaagcaagcattttaaagcctactaaaaggcatttcccagggcacttaggagaaatacatatggtgcttgcacaagcacattactacatatctgcactcaaatcatcctaaccaatttgtcaatcggactccatctatcttcagttcaggttcatagttgcaggttaacacatggtttacagtttacaatctaaagcatacaaaa

SEQ ID NO: 23903 - DNA, 629 bp, Setaria italica
  Peptide Sequence Number=SeqID_89877
aaaaacaacgtgaacaaaaaagactactaggtagacaaaatagtaccagcataattcttcattatttccagggtgttgaatagctagggaaataatcctgaaaactggagcagaaagggaaacagtggcaagcgacaatgacaaatcaccaggtataggctcaaggctgtccatctgcacattgcttatggttagtggaagtaaagccatggggcccccataagccaaggcccataaagattctgcaggccgcacacgagatgaaacatgaaccaatccaagaacctctgcaggccttcgttgagtacctgatgagccagaaggtgaggcatctgggcaaaaccgcccagtgagaagactaggatggtaaagaagatgcaagcctcctgccaactcattgttaagtgcaaagctttcttctgccatactcttaacatggtcattagttgccttccatggcaagcctgcgccatttccaaaactgggcagtgtatctcctcctcggaacgctaggcgcctcattctgtctggcccaattggttccttgaagatgtagataggccccatttcagtaaacaatgggcattgccgccggcgcctctgcaggcctgcgatagttggaggtggta

SEQ ID NO: 23904 - DNA, 447 bp, Setaria italica
  misc_feature (133)..(133): n is a, c, g, or t
  Peptide Sequence Number=SeqID_89878
gaagtacaggtatatacaaaggctagtcagtcttcaggcgacaaaaccagcaactgaaatttcagaggcatggtcttgtgaactgaactttgtgcagaaagaacatagatttcgaaggctgcactgcaattcngtttttttctagaatactgctctgcaattctgtacaggaagtaaattccagagtacggatatcttggatacttacgttgcttcaccaacgaaatcatcgtccgtaacgtcgctgtccatgatcttgagatggagctgtggggtatcgtcagagacagtgaagatgaaggtctcgttccattcaggctcgcttcctgctcctgaatcagcgagggtaaggttgacaatcaaattggcatcgagttctcttcccgcgtcactgcataccatgtgatgccctctagcaatagcagatagacactgaagaaacgggga

SEQ ID NO: 23905 - DNA, 747 bp, Setaria italica
  Peptide Sequence Number=SeqID_89879
taaagaaaaaatttgaaaattttagtgttgtaaatccattcagggttacaactttgttttgaacaatgaaaattctgcaggcgatgccccgtgaggtgcacaaaccaacaattctgaatagttatcaccatgatgggagttacatgcaaatattcagttcatgacaaagcaaaatactgttccataacaatagtaattcttcagtaaattatgctcttgctcagtgcacacatcaggcagatcaatcccagctgctgtaagtaccctcctcgttgtcggggcggcgtgtttctgctggagtgaaggtgagtgcaatcttgatctctccgcagtatttctcctccttgacgactgggtgaactgtcggaggaaggctgccttcctgaaacagagcctccagggggatggttgcttcaccaacgaaatcatcgtccgtaacgtcgctgtccatgatcttgagatggagctgtggggtatcgtcagagacagtgaagatgaaggtctcgttccattcaggctcgcttcctgctccgtttgcagcgctgcttttctgctcctgggtgcggcatgtaaggatcacgtaggggtccatgttattgaggaaatcggtgtcctcgaggcccttggcggagacgagaagaacctccagcttcccgtgcaccatgtttgctggctcctactcctctcttcctcgatcacggagagattcaattcagaggctgaaactgaaagacgaggacactttcc

SEQ ID NO: 23906 - DNA, 417 bp, Setaria italica
  Peptide Sequence Number=SeqID_89880
gaaggaacatggcctctcctgctagcgtggtgtccgctgtgaccatgtcgccgccgaccgggtccgaggcgcccggctgcgacccgcagctggccgcggtgaccgcggagaggaagcgcaagcgcaaggagtccaaccggctctcggcgcagcggtcgcgggcgcgcaagcagcggcagctcgacgaactgacggaccaggtggccgcgctgcgcgcccggaacggcgccatggccgcggccgcctacgacatcgagcgccggtgcgccgccgtgcaggccgagaacacgctgctgcaggccatgaacctcgagctcggcgagcgcctccagtccctgaccgagctcatccagtggatggagggcgccatgtaccaccagccgcagccgcagccgcagctgctcgacgccaacatgt

SEQ ID NO: 23907 - DNA, 746 bp, Setaria italica
  Peptide Sequence Number=SeqID_89881
atgaagcatcattggctgctttaacttctgatagctgtttgtcagattttaccttagtatcttcctctaaatgcatggagtctttgtgatctctgtatccttgaagctttgcatcaccagcaggtacagagttctgagtaactgctggcaaagaaagagactttgaactactttccttgcccttatcactattgagggtgtccagtagaccttgcaattcgcccttgtacatgtcattcatttcagacattatttctggaggaaggttcttcaggacctccagatcaagttgggataatggtggtagctcgacattatgaactccggtagacctatcacttctaaggttcctttctgatgactgagatgtcgcaccaatagataatggtccagatcttctcaaatcctgctgtacgcttgtccctgcaacatcaacattccctggcatctcatcgcggcgtttcttgagttttgcagctggtgaagcaagccatgattcaagcatattcccttgtggtgctccccgagctaaatctgcatgctcaagctttgacattgccaatccaactccacgaacttccttcacgtcaaggtgaagagctgaaaacaattgttttgcaattctctggagagtgacaaaactgtcggttgcacctgcaatcgtcatggagcgactcgtggtttcacagtcaccacatcccatatactttattggctctccagcaccttcccttcttgttttcact

SEQ ID NO: 23908 - DNA, 235 bp, Setaria italica
  Peptide Sequence Number=SeqID_89882
ggcagacatcacttccctgatggtgaacccaagccaatgcaagctgtgacggcgtgcatccttttctttttgccatttcactgacacgctcgaatatctgcttgttcttgtcgagattgtctggctgaaatctaggccaattcttgcgaatgtcctgctctgatagcgagtccatgagttttgccccactggagaagaatcctctgcccagtggactgtaagcgacgattccgaa

SEQ ID NO: 23909 - DNA, 391 bp, Setaria italica
  Peptide Sequence Number=SeqID_89883
cacaccacacgccggggggaggaaaaagacccttcttggagccctctgcttggcctctctccccctccgtcgcaaagctgccgctgggtctcgcagcatggccgcgccgtcgtcgcgcggtagcagcctcgccgtgttcgtcgtgctgttaggcgcgctcgcactgctccagtcggcggcgggtgcggcgacgtgcgtaggcgtggcgccggcgaagcgccggccggaggtgatatccatcacggacttcggcggcgtgggcgacgggcggacgctcaacacgtgggcgttccgcaaggccgtgtaccgcatccagaaccagcgccgccgcggcggcacggagctgcgcgtgccggcggggacgtggctcaccggcagcttcaacctcacc

SEQ ID NO: 23910 - DNA, 276 bp, Setaria italica
  Peptide Sequence Number=SeqID_89884
atgaggctggacgactgggtgctgtgccggatctacaggaagtccggccaggcgtcgccgatggtgccgccgctcgccgactacgagcacctggaccacgacgaccccaattcctccggcggcttcgacgacctctgcggcttcgcctacgcgcccaccagcagcagcggtgcaactagcacgaccgccagcagcgcgatgataccacagccgccggcgctgctgccgaggcttccgaagatcccctcaatctccgagctactggacgagtacgcg

SEQ ID NO: 23911 - DNA, 208 bp, Setaria italica
  Peptide Sequence Number=SeqID_89885
agagccccggatctcaccttctccagcacctccacctccgccgacgccgccgactcctcctcctcctccgttgaggagcagctactgggattaccgcactccttccccctccacggccgccccttcgactgctacgcctcgccgcaggcctccccggtcgtcgccaacctcgtggagggcgtgccgcaccccttcttctactcgctcg

SEQ ID NO: 23912 - DNA, 934 bp, Setaria italica
  Peptide Sequence Number=SeqID_89886
gttgtcgaagagggtgagcgggatctttctgaagcatgcaagaaagctttgttcatggagttcttcttaccctgcgctacacattcgatgagctggattggaactctgaggtagtgcaatcgggcgtttctgaaatgaggtgcctggtagaaagggtgcttcaactcataatgcgtgtaacttcgctggctctctgggtggtttcttctgatgcatggtatatgccatacgatatggatgacatgattgatgatggttccttcctctcagatatatatgaggaggatcaacgtactactggttcagaaaaagaagagaagaatgcaaaaccagggagtaatggcaaaccagccgatcaggttgttatggttggttgttggcttgctatgaaagaggttagcctactttttggtaccatcatcaggaaaattccattgcctggctgttctcattcaaattcatctcaggatggcttgcttgacagtactgaggaaacaagcatgtcagaagaaattcttgacgtcgggcagctggagacaatgggtgaccattttttacaagttcttcttaaaatgaagcataatggtgcaatagataagactagggctgggcttactgccctttgcaatcgtctcctctgctcaaatgattcaaggctatgccaaatgacagaatcgtggatggtgctactaatggataggacaattgctaaagggcaaactgtagatgatttgctaagaaggagtgcaggaatacctgctgcatttattgccctgttcctcgcagagccggaaggaactccaaagaagctacttccaagggcactagaatggttgatagaatttgctaagacatctttagctaattttcagaaagacaaccaccagaagtctggaataacgagagatggcgttggagagcttattgttgtaat

SEQ ID NO: 23913 - DNA, 262 bp, Setaria italica
  Peptide Sequence Number=SeqID_89887
gtagaagagagggctttggtttcgtctcacgctttcctctttgttgacttggcctcctgacgaccgccgaagggagggattgactccggccggcagagtcggcagtcgccgactcgccttcccgccgtcccgtcgtcccaacccttgggcttttggtcctgaacaatgcaaggatcgagatctccttttcaaagaaagctggtggtcttttttggtacgttgcgactgtcgcagatggattttattccagttgaaaaaacgt

SEQ ID NO: 23914 - DNA, 266 bp, Setaria italica
  Peptide Sequence Number=SeqID_89888
tatccatatggtgttcaccctcaagctttatcaggaggaccagtacacggccatggccaggtaagcaatgttacatatgattacagtaggcaggaatttggttctgttttgaacatcgcccacagaggtcctgttatgaatgccttcgcacaaggagctgcgaatcagccaatcatgtacccatcctactagaaccgaagaatgtatgttgagagagtagccaggtggacatagcttcttgatgcctcagaatctcaggagcgtct

SEQ ID NO: 23915 - DNA, 719 bp, Setaria italica
  Peptide Sequence Number=SeqID_89889
tggagaatacagcaggcgatctatatgggctattttcaaaattagaaaggaaggaaaagattgaagatgcaaatagaagtatagttcaacagttccattctcagctaactcaagacatgagtctcttacatagaacagtctcaacctcagtctatcaacaggagagcctactaaaatcactcgaagaagagatgaaatcttttctctcctcaaagggcaaggttgctggaggacttcaagaacatgtaagaaagctcaaagagaccttcaattctaggatcacagaattgcatggttttgcaaatgaactcaagcaaaaatatcagttgagctttgaaaaccttaattcgcaagttatcacacacacatctggccttgaggattgcatgaagggcctgttggttgatgctgaccaattactcgccgaacttcaaaatgggctttctcagcaagaaatgaacttttgtacatttattgatcagcagcatgaggaaatctccagaaacttagagagaacaaagtctgtttctgcaactacaatgaacttcttcagaacaatagattctcatgctttggagctcaagaaggttttggaagaatcacagatggcacatcaaaagcaactcttccagcttcaggagaagtttgaggccattgttgctgatgaagagaagtacttgatggagaaggtagcagggttactagcagaatcaaatgct

SEQ ID NO: 23916 - DNA, 972 bp, Setaria italica
  Peptide Sequence Number=SeqID_89890
gttgtcgaaggggacaccctgggcgctggcgtaggcgcgggcggcgaggtagtaccggccgggcggctggtcgaaggtgacgaggacgtctgtggtctggccgggggcgatcatgagcaccgacgtggagtagggcttggtgtaggaggcgtcggcgccgacgacggtcatggtgtggccggcgagggagacgaagagctccgtgttgagtgcggcgttgatgaagcgcagcaggttcgtctcgccggacttcaccgggaacgtggtcgtgtccttggacgagcacctgtagaggtcgccgggctggccgttgacggtgagggcgtcggagatgttgggcgccgcgccggtgcgggtggccgtgcggaccacgtcgatggggttcatgtcccaccattcccctagcaggatggggatctccccggcgggaggcttgccgccgccggcgactgcgttgaaggggtatgcggtaacgccggcgcggggcctgatgatgagggcgccgtggacggtggcgcggagccatgagctgtgggcgtgccaccacagtgtgccttcctgcccggcgacggtgaagcggtaggtgtagctctgccccggccgtatggggcactgcgtcacgaactcggggccgtcggaccatcccgtcctcatctgccgcacgccgtgccagtgcaccgtcatgttgtacctcccacggttgatgacccggacgatgagggagtcgccctcgccgatctccaccgccggccccgggaactgcccgttcaccgtcatgatgctgtgctcccggcacagccgcgtcaccgacgcctcctggatcacaaactcatggtactgctccttggcgatggtcggctgtatcatcagggaggaccagaggagaagagcaagggcggtggtgaagagcagcgaggaggagtaggacggcgacgacatgctgcttgaccttgacatgccgccggatgctcg

SEQ ID NO: 23917 - DNA, 228 bp, Setaria italica
  Peptide Sequence Number=SeqID_89891
ggcggagaaacggccgaggctgggggaaacaaaaaaagaaagcggcggtggtaccgagggcagggcggacacctggcgtcggacggctccggagcgaagctggcggcgccgcgggtgggttcggggcggggcagaggggaggagccgtggcgatttgggcgtctgggggtcgagcgaggggagggagccgagccggaagggaagcttcgagaaggcgcctggctgctg

SEQ ID NO: 23918 - DNA, 412 bp, Setaria italica
  misc_feature (62)..(62): n is a, c, g, or t
  Peptide Sequence Number=SeqID_89892
gggaaacggctcgattcacgcgtacctctgtttaaatcaagcaaaaaaagaaagaacagtangttcatcaatctctggatagcacgaggagcaccagccgagaatccgagatcaacctcaacgcaggacgggcctggtcgggtcctcgtggtccccggcggggctgcaggagaagacgtcgacgggcgcgtaggtgccgtcgatgtcctccggtccggacctgcacctgtccaggaacagcacgacgacggtgatgtcgtcgtggaagtgccgccggtggcccttctcgatagtccggatcttctcgtacctgacctccttcttcctcgccgcctccagctgcgcggcgcgcaccagccgcatcgccacgcccttcctggggctccccgccacgatccccacggcggcctcg

SEQ ID NO: 23919 - DNA, 718 bp, Setaria italica
  Peptide Sequence Number=SeqID_89893
gggggaccagctacagcatctggaagatgggcgccctggacgagaccgaggtatcgttgttcctgtttggggatgcgcatgtccactactccggcgctgccgttggctccgtgttcgcgctgctgaatggaaatgttcgcatggacaatgggggcaaagggttctctgtgagtgttgcttcagtggggcagatgttcaagatgggagttgcagcggacttcagtctctgcaaagggaagaggaaagacggggtggcttgcaccatggcgataaataagagcaaaggagcatattgcaaatttcattcgtcgaagacatcacagaagtacactactggcagagtggagcttaagggcggaaactttcaatttgcttccaaacttcgatctgaagggatttacatggtcaaccggtcctcagaacaacccaacccaagaaagccattccaaccagttaaagtaatgtcaatcgatgggctaaaaagggctttaagcaatgcagatagagtaactactaagaaccagtctcagggtataagatttctttcccatgttacagctaatatggacaataggagatcaactgtccaaagcaatggttctacaaaccaacagcaacagaaatcaaagttcagcttgaacaaaagttcgtcatcatctggcgccaaaggaccacccatgcagggtttgggtaagccagaacaagatttcaagagacg

SEQ ID NO: 23920 - DNA, 396 bp, Setaria italica
  misc_feature (351)..(396): n is a, c, g, or t
  Peptide Sequence Number=SeqID_89894
gtggagcaagcggccgtacctgctcttcgtcctgctcgtggtcgcgctcgccgccatcgcgtcggcgtatgtcgcggtgctcgccgtgctcgctcccggttccgtgtcgccgttctggttgggactttggtccagcgtcggcggcatatcatctctccagagagctggaggcggatttagctgatacttttttattaatcacatcatctcactggcgattgttgctagtttttttttatttggttttttttaagagaggaggaggtttttttaggagcttcaccctttattaaactgaataagagttacaaacctcatcagatggggaataaaaccacacatgtcttcctnnnnnnnnnnnnnnnnnnnnnnnnnnnnnnnnnnnnnnnnnnnnnn

SEQ ID NO: 23921 - DNA, 635 bp, Setaria italica
  Peptide Sequence Number=SeqID_89895
gaaaatccagggatgatctccatcacaactatccaacccttcggaaaaccattgtcctctacaaaaaagcgaagaagaaaagcccccagcaagccagagccaaatacatagatgtatccgaccactgtggctattttcacagaagaaaagaaggaagctacaaaaaatgcgagtgcaatctgcagatttatgtagatgaagtagaagacaaattgaatgctgtagttatttaatttaaagaactttagaccaatcaaggagccaaaaatcacaaatagtatcatgtaggcagccgacagagcaaagaagtagccataagagataagccagtaaggaccatccttcaaaccatgcatcttcatcataattttcagcttctgttgcttctcatacacgagataggttaatatgaccggaaataatagttcaactatccatgtgaagaacagagcaccaagaagagaagagaggtcaaatttcagttccgttccaactttgggcatctctttaatatattcgagcaacatgtccactccgcttcctctaagaaatttgatgtacgcattggatgccatgttaaccaaccgtggaactcgtagcaatgcgataggtacaatagcagtgttgttgttata

SEQ ID NO: 23922 - DNA, 547 bp, Setaria italica
  Peptide Sequence Number=SeqID_89896
ttgcaaaaaaccaagttttgctccatcattcctaactaaacattttgtgctctgttcaagcaggtgatggaaaaaagcaacttcaagttgttatctgatgaagagtatgatattgcgcaatctggaaaatatctattgaatcttccaatcaaagttgacgaatctaagctagacaagaagttgttgacaaaatattttaaagagcatccacatgaaaatctaccagaatttgcggacaagtatattatttttcgccggggcgttggaattgatcgaacaactgactactttttcatggagaaagtagatgtaatgatatcccgagcttggaggtcattgctcaggtttactaggattgatagattgttttctaagaaacagcatttgcaaccaaagaaagacaccaagaagactgatgaaattaatgaagacgaggaagaaccaggaaattatttagttgagagaattcgattagaaaaattgaactaagtatgaaaatcttgatgagtaagatgacaattcaagaacctacatttgataggactga

SEQ ID NO: 23923 - DNA, 716 bp, Setaria italica
  Peptide Sequence Number=SeqID_89897
gcggttacctttgctacgcgcacagcggagacgattcgattcgttacgcttgcaacacatacacctggggaggaggagcggatggcggcggcggaggggaggatgccggagggggaggggaagaggaaggaggcggagaagatggacgcgcggaaggacggggtggcgcgggaggtcatccggatggagcgggaggccgtcatccccatcctcaagcccaagctcttcatgcgcctcgcctacctcatcgagcatgaggttgatcgtaatgagttcctgaagctgtgcaagaaggtcgagtacaccattcgggcctggtacctcctccagttcgaagatctcatgcaactgtactccctgtttgatcctgtttctggtgagaagaggctggagcagcagaatctgacgccggacgaaatcgaaacccttgagttcaatttcatgacatatcttttccaggtgatggaaaaaagcaacttcaagttgttatctgatgaagagtatgatattgcgcaatctggaaaatatctattgaatcttccaatcaaagttgacgaatctaagctagacaagaagttgttgacaaaatattttaaagagcatccacatgaaaatctaccagaatttgcggacaagtatattatttttcgccggggccgccgcttctcccgattcctctttactttctgctgcggttcgctagctgtagcttagtt

SEQ ID NO: 23924 - DNA, 1429 bp, Setaria italica
  misc_feature (70)..(70): n is a, c, g, or t
  Peptide Sequence Number=SeqID_89898
gatgattgtggtgtacaggtaacttgaatgttctgatcgctcaactttcaaattcatgacggactgtggngtttttattgtccagattgcgcaatatcatactcttcatcaaacttgacgaatctaagctagacaagaagttgttgacaaaatattttaaagagcatccacatgaaaatctaccagaatttgcggacaagtatattatttttcgccggggcgttggaattgatcgaacaactgactactttttcatggagaaagtagatgtaatgatatcccgagcttggaggtcattgctcaggtttactaggattgatagattgttttctaagaaacagcatttgcaaccaaagaaagacaccaagaagactgatgaaattaatgaagacgaggaagaaccagaattatttgttgagagaattcgattagaaaaaattgaactaagtatgaaaaatctgatgagtaagatgacaattcaagaacctacatttgataggatgattgtggtgtacaggagggctggcacgaagactaagcctgatcgaggaatatttgtaaagcacttcaagaatattccaatggctgacatggaaattgttcttccggagaagaaaaacccgacgcttacacctatggattgggtcaagtttctcatttctgctgttatcggtttggttaccctagttggttctcttgaaatgccaaaggctgatgtatgggttgtcatagcaatcttgtctggtgtgattgggtactgtgctaagatctacttcacatttcaacaaaatatgacaatttatcagaatttgattacaaaatcaatgtatgacaaacagcttgatagtgggaaaggaactcttctccacttatgtgatgacgtgatacagcaagaagttaaagaggtcataatttgttactacattttaatggagcagggaaaagcaacagtacaagatcttgatttacggtgtgaagagctaatcaaagacgagttcggtgcagagtgcaattttgatgttcatgatgctatccagaagttagagaagcttagcattgttcatcgggactcgatcggaaggatcctctgcgttcccctgaagcgcgcgaatgagatcattggcacgacgacggaagagctggtgatgcgagcgcagagtcctacttcttgagttccacacggcggtggactacacttctttatgtccgtgtaaagcacacacatctcatcctgcaatttgttcgcttgtacatgtctaccgcaccgggtcatagttaggcactgtttttttcctcttacgggaagagtgttacaagactagagtgcgtgttttaaattggtctgttaaagttgaagaatggaacatgttgtgtgtacataacacaatcatatgtaataagaaaaaacagtacagaatctaaaaaaaaa

SEQ ID NO: 23925 - DNA, 283 bp, Setaria italica
  Peptide Sequence Number=SeqID_89899
gcccttcggaagctcgatcatatgctgcttgaaatcctggaaagcttcagagatccagagttctggtatgttgagcaaggtattgctgcaccggattgcgatggctccgcctccttcagggcggcctttcaccgccgtgatgagaaatggtggctaccggtgcctcgtgtccctcctggaggccttcacgacaaaacaaggaagcagctgcagcacaaacgtgattgtgcaaatcaaatcttgaaggctgccatggccatcaacagcaattctttagctgaga

SEQ ID NO: 23926 - DNA, 573 bp, Setaria italica
  Peptide Sequence Number=SeqID_89900
gggcgcttcatcgatggccagccactgatccaccgcccacttgcgctccttgggcgatccactgcccaactgggtgaccttcacgtagtccacataccagccgggtttgtggccctgaccgtcggatttcaggaccatcttgcagggctcgctgggcaggcacctgcccttgccgctgaacctgtccaggtgtcccctctcgaagtaatcgtggccggcgggcatcttgccccaggattccaggttcgtgatggtcagggttcggcctctcgcggcgctcacttgtagtgatacgcgggagtcggtgccggcgtcctccctgcctcctgtcttgacgatgatctcgaacgtgcactgggcagcagcgaaggcggcatggctcgcaacaagagcaaggaggaggcagcaggtcagggcgatcgaggaggaagacgacttcatgctggttaaattcagaactgaacgtgcctatggtgatcgacgatgccgtcgtcgatcttgtgtgtcctcctcgtgcatgcctacctttaatatatgtatgttgtttcagaaacaaaaaaaaaaaaaaaaaaa

SEQ ID NO: 23927 - DNA, 689 bp, Setaria italica
  Peptide Sequence Number=SeqID_89901
catgtggagcctcaggaagaagtatctcagtctgatgtgaaagtaccgcatgcaagaaatccacttgcaggtctcctgaatgcaattgcggttattgcttcggggtgttttcgctggacttcttgggtacttctcaacaggaaaagaacactttgcagtcaaccattttcatctatggaggccaaattggttgaaaatgaggcaacaatgtctatgcttagggaaaactatgagaaaagaatattggatgaacaagcagaactgaagaaacaagctaggaagttccaggaggaggaagccttgctccaagatcagttggtttcatctagaagaaccgtaacatctttaaccgatgaagttcaaaaggagaaggagctagtagagcagcttaaccttgagatagatcgacttaagagaagtattgcagaagcagaggaagataaaacatgtgtctgaaggcaagttgaatgaaaagatggaaatgcttgatattttgcatgacaaagtaaatctgcttagccaagaggtaaatggcaaggatgaacacatcagggagctcagctcatcactttctgccaaggaaaagaactaccagaacctgaatgcgatctacaatcaagccaaagagaacctagaacaggcaaattctcaaataaagcaactagagaaagatgttcttgcagataaag

SEQ ID NO: 23928 - DNA, 273 bp, Setaria italica
  Peptide Sequence Number=SeqID_89902
gccacggcgggctcagcctcgcgctcgccctggagcggttcccgcgcaaggtcgccgccgccgtgttcgtggccgcggcgttgccctgcgtcggcaagcacatgggcgtcaccacagaggagttcatgagaagaactgcttctggaggcctgctcatggactgccaaacggtggccatcaacagcagcaacagcaacaatggagtggcaatcgtgatgggtccaaggttcatggaagaaaaatattaccagcaaagcccagccgaggacctga

SEQ ID NO: 23929 - DNA, 413 bp, Setaria italica
  Peptide Sequence Number=SeqID_89903
aaaggggtcagttactaaagggatgaatagatattatatttgcacataaattgtcaccctctcttcctccttatttatacaaaatatccttggtagctcgatttaagaaagatcaaaacactcagaattcttgttctggctattgtgttatctcatcttaacatctttgctgcagattcatcatccatcagtcaaatctcaagtgccaggcttccagaaagggtgaaattaatcatcgaagagatagagaaggaagaggcacatttactggaggatcttgcttcaatggatagaaaatttgcagaacactataatgtactggagcaaattcttgctgtgcttatacagtttgttaaagacaagaaattagagcatcagcaccaatatgatgatctgaagaagacctggcttat

SEQ ID NO: 23930 - DNA, 1865 bp, Setaria italica
  Peptide Sequence Number=SeqID_89904
tacttacaagaagaatagtaggaggacagaagaccggacacatgtccaacactacccaggcccaatatagaatcttctaggtatgtatgtctatatctgtcttagttgtgagggtttgcacctttgcagcgtgtgtagttgttggcttattgctgattgttaattgttgattgcttgaccacttactaatcagctctgtagctgatgttttttcaggactaaccttttcttcttggcaggcataacttctttatcttccctcgcaaagagcttagtgattgttcatctcatgagtttctttgtcagacaacttcaattgacttcctagcaaagtaccagtttgatttcaacacatgcttccgtgaagagcacaagaggaagaagcactacagaaattaaattttttcatcaagatcgaccattttcatcttccgccacttccgaaggggatggagatatgcctttaaagaggacggctgatattcttttcacagaaaggatgaaaatgaacttcaaggtatggcgtgatgtgataatcagccagcccgatagccatttgtcaggaaacattaaatgcaccgcaggacaattccagacagctttcttcaaaatgcggccagctgttatacttaatgggttctcatcacatcagttgcagctaattcaacaggttttgagaaaaaactttagggatcttgtttatgtctgtacatttggtgaggatgacacatctgaaaagagagtagtttattcagacaccgatgaggataaaatattgctgatgaaagatgtgcacgaagatctactgaaaagcagggaagcaagagtcaaatcagcaataggaatccgccatgtcattgaccttctttcatcggaaaggaagttgattgttggccatagttgtttcctagatattgcccaagtgtacagcaagtttgttggtcctcttccttcatctatcaaggaatttgccttaagcatccacaaaattttcccacacatcgcagataccaggcatcttatgaatgtcaatcaagcagttcagaaactgatgaagcacaaaagcaaatcactgtcttcagctttctcattgttgtgcccttcatctcattcatatgctgagaagccatccagtctatctcctgtgagaattgaagttggaggagatgaaacaacgtcttcttgcttcgtttcaggtgctaagcatgaagcagggtatgatgcatacatgactggatgtgtttttgcacagttgtgcgcttatcttgatgtcaaatttgagcagctctcacctcaggataacctagccacaaacaataagctgcagaaacacatcaatcttttgtccccaagctggaacagtggaacagttcttgatttaagcagtggccaggagagaccagatccaggttatatgagaaggtatcctgctgctgtgtatgataacattgttctcatctggggattcatgtctaaggtcagaccaaaggaaattaaggattgcatctgcaaagtgtttggttcaggatccatcaagaccgtcttctccatcgattccaccgctgcccttgtgcagtttaaaaaacaaagactgtaaatgaattcttggatttgaaggctcttttagagaagacggatagtgctatctcaattctacaccccttgtcaactatattagaaggaggccaaacacgagccgtgaaatatgatacctacagagacatctgcagctcttctgaattaaagtatctttttgctgatcaagctgaagcattttgtgcaacttcaaagaatcagctccaagaaaatgttgatcacagtcttatatctggtgtgcaccagacagtgctcacctctgtaaataa

SEQ ID NO: 23931 - DNA, 317 bp, Setaria italica
  Peptide Sequence Number=SeqID_89905
gggattgcttccggacctcggattgaaggagtaaaaccgagccagcccaagtttggttcggggaccaggtcaaccgaacaacaatttttattgaggtctgactccattccaagccattccaatccgtctgaattgggctgcattccaggccattccgaccaaaacaaacggaccctaagggccgttcggttcctagggaaccgttgcctggaacgattcctagccagctttgatcagctggaacgattcctggatggatttcaggctaatcgaacgggccctaaactagctataggaagccatattggagccccggg

SEQ ID NO: 23932 - DNA, 1311 bp, Setaria italica
  misc_feature (1293)..(1298): n is a, c, g, or t
  misc_feature (1300)..(1300): n is a, c, g, or t
  misc_feature (1302)..(1302): n is a, c, g, or t
  misc_feature (1304)..(1304): n is a, c, g, or t
  misc_feature (1306)..(1306): n is a, c, g, or t
  misc_feature (1308)..(1308): n is a, c, g, or t
  misc_feature (1310)..(1310): n is a, c, g, or t
  Peptide Sequence Number=SeqID_89906
agcaactcccaaggtcatcgtgccagttagctcattctcttttgtgggtgtacattccaggttctttaattcaagtacaggtgttcagaagcatggtttaatactccatttcttattaaaaaataagaatcctaaaactacaatctttctattagaattcgagactacatttcatacaacatacgtaaaccttgcatgacaaaagtggaccagcaacaccaatcacaaaattgcagtgaccgaaactaaacatcccctgtgaaatgccaggagatatcatgagataatgtttgccgaatgttcttgtccacaaaattatcatccccagtagtaaaacagccaaccatccaaacgttctcaacctggttatcagttatgctccactgccaaacaagccgccatctgcaagcaacggcttgcagagaaagaaagctacattcacttttttttaattgtattgactcagctgacttgcaccttattataatgatcagcagccacagatagtgacggtatggtaacaggaaatccaggtcccattgtgctactcagtgtgaacttcttcacatatcctacatattttgaagttttctttaaacccactggcttagcgagtaaaagtgcatgcacaaaagcacctacattttcacgcaaactctcctcagaaaagttcacctttccaaggccaacatgcactatagcagttttatctattttgaaatcaacacggcctgatttagctgctttgaccgcaccagaaacatcattcgtcacagaccctagcttaggattaggcatcaaaccacgtggacccaatatcctagcaaccttcgaaagacggggcatgaacatcggggttgctatgcacttgtcaaagcttagtttgccacctcctttgcggatctcctcaatcaactcatcaccacctacaacatctgctccagcagctctagcttcgtccgctgcaggaccttcagcaaatactgctaccctaacagtcttgccagtgccatgaggcaatgttaaggcaccacgaaccatctggtcaccacggcgtggatcaacacctaacatcacatgagcttcaaccgtttcaacaaaattcctcttcttctcgtttgtactagtcttgactaggcggatggcgtcaacgagatcaatggtgaccttctgcggtcgcttgacgacaggtatgatcgtcgggtacggcacctgttcctcctcgaccggcaccccgaatacgctcctcgtggcccgcgctgcgtccatctggatccgctccccctcccccgnnnnnncncncncncncnc

SEQ ID NO: 23933 - DNA, 426 bp, Setaria italica
  Peptide Sequence Number=SeqID_89907
attcaataaagcaagcaaggttaaagcaagcatggcactaaatggtttgtataaattatgtagcgacgttgaaaataagcattgcatgtcagatatcagcttctatgatctaaagctttgaatccataatgttcttggatcttgttaattgtcaatgttttcttagaaaaatttggtagagtatgaatgcactcttactaaagcaaattgatgaaaaattgttggacaatatcctctttctaccatcatcggatatagaattcttatgttgaattaaagcgctgcctttgtttcctcggaagctatcgtgtttatatgtagtatactttcatatgttatagctgaacctgaactcttcactttgttcctccagcttggctcatatctatcctgtatgtttacagtaccatggtcgtggtaatggct

SEQ ID NO: 23934 - DNA, 998 bp, Setaria italica
  misc_feature (945)..(998): n is a, c, g, or t
  Peptide Sequence Number=SeqID_89908
ccaaaacaggccacgccttgtcccccttcttcaaccttccgctgctgcgaagcagtgcgggaagattgcaggatttgcggccgaatggcggcagcggtgcggccatccaatgccagtctcctcgcatgcctcagggagggcacggccaagttcgagctcctcgaggaccccgcgcccgcgccagcgccggcttggccccggctccactgcttcgccagaattgccccttcgctgaggggcggttggtcggcggcgctgaacaaggttgagcattacggggttcagagggtcaccggagatggccgctgcatgtttcgggcgttggctaaaggaatggcaaagaataaggggattcctttgaccccgagggaggagttacaagatgcagatgatttacggatggcggtgaaagaaattatatgtgacagcgagactgagcggcagaagtatgaagaagctgttatagcaattaccgtggaacaatccttgagacgctactgccaaaggataaggcggccagatttctggggtggagagtcagaactcctggttttgtctagactgtgtcggcagccaatcattatttatattccagagcgcgagtaccatggtcgtggtaatggcttcatccccatagctgaatatggattggaattcgccaaaaattcaaagaattggaagaaaaaggcacctgtaagacttttatatagcgggaggaatcactatgatttgctggtttgacatggttgcagtgctatcgttctttggtgcgttgtcactccatggttgcattttttttctttttattcttatgccagttgtttagccaacaatagcattagttgaactatcaaaatatctttcctttttttggcgaaaaccagtatgaaaatatcaattatgaaatatagattgtcgagactcgaaaacaaaaaaaaaaaaaannnnnnnnnnnnnnnnnnnnnnnnnnnnnnnnnnnnnnnnnnnnnnnnnnnnnn

SEQ ID NO: 23935 - DNA, 271 bp, Setaria italica
  Peptide Sequence Number=SeqID_89909
ctgctaacggcaagcagtcacatctttcaacaatttccatcccgatactcttcaattcatcgacatcggcttcatcactctcattcaaaactacctagtattgggaaaaaaatgcagcaagtttgagagaggaaatggtgctagaatcgaaaagctcctaatggattttatgttgtatcataacttgtgcaggggttgtgtgtagggaaaagttgaagtgacttcaatagagtctagactctagagcaaccatggctattcccagtgggga

SEQ ID NO: 23936 - DNA, 291 bp, Setaria italica
  Peptide Sequence Number=SeqID_89910
ggaggcagaaggcccatactacgatggggaacaggatgtagttggctaggaagaagaaggggttggagagcacgacgggtagaacagagtggtagtattcgcacaggaactggatctcctcgtagaacacttggaacagagcaactgcgaccaccgtgtctttcagatcgtcctcgttgcgctccacctcaaccttttgggttgacagtgcaacctctgtgcttcgcagcagctccttgagcaggcctctgaagataaggctccggcagctgctggtttccacgtcggtga

SEQ ID NO: 23937 - DNA, 499 bp, Setaria italica
  Peptide Sequence Number=SeqID_89911
cattaccagtgaaccgagctcctaagctcttcgcgtcgctagctcgattcctcccaactccagccctctccattcgattcctcttgcccaaagatgtgccactccctcagctccaccctcagcccctcctcgtcgctcgccgtccaccctatcggccggaatcggagtttcccccaacttcttgaacttcacccgctgccgcccatgcctcgccgtggcgccccatgccccggccctcctcgtcgtcaactaatggctcaaatggaaccgcgaagttaatatcgccgacggaacctacgagctccaccccacgccgaaagaggaacataccgcagagctacatcacgtgggagctgagcccgagccagatcaagaccccgaagacctactaactttctctgaacctgaagataagccccagtgcatgaatacctatattcaaacttattcaatgtgttgatgcttatgattgtgcatatacgtttctaggagtggcttg

SEQ ID NO: 23938 - DNA, 702 bp, Setaria italica
  misc_feature (522)..(522): n is a, c, g, or t
  Peptide Sequence Number=SeqID_89912
cagtttatcaatcttcaaagttgtacaccctatcccaggtaatttatcttggcagatactcagttaaccttcacactcgtgctaatgtcgtcatcccatgttttacgtgggcattattccctggtttttaccaatggtgttggtgccaaccctattagaaaagctaaaaaacattcatgattttgcatggttggagatttcatgtatgtttgtttagtcaatgggcaatccttagttatgcacgttgctgctgtgcagacacttcttatggtggggctcaagatagtgcttcaaatcctgttttaacttcgtgtatattgcattctcctcataggtagaaaaattactttggttgacaacatttgatatgccattcttgtccagagatcttgattcttggttgtggaaaacacatccacccggtcagtcccgagctgcggaacttcattcggtcgactggaatgaaacttgaagccgtcgattcgaggaatgcggcttcgacaccagatagatgcccccctnttcactgttatcatcttcttgttttccaaaaaacaaggttaaaattttgaaaaggaaggaaacctctgctgctgctctgctaaataggtaatccgatgcttccattgtttgcagaggaatgcggcttcgacatataatatcctgaaacgaggagggcagaccggtggcagctgcagttct

SEQ ID NO: 23939 - DNA, 809 bp, Setaria italica
  Peptide Sequence Number=SeqID_89913
gaacgagcgccccaccgaggaacccaccggccggcgaagcgggagggaggcgatggcggcggcggcgcgggggcagaaagcgctgggcgcgctgccgcagctggtgaagtcgctgcgtagcgaacccgtctccgatggcgcacggctcaggcgccttccttctctcaggaggaccttctctctgtacgaccagatcaacctcatcgacagcgtccccgaagaccagctccgattccagtcgtatgatgacactggattcaagattaataatgtaaaatatgaaggcagcttattgattgtagagaacaagataatgacatgggcacccaaaacgttctctgagataactgctgaaagtttatcaatcttcaaagttgtacaccctatcccagagatcttgattcttggttgtggaaaacacatccacccggtcagtcccgagctgcggaacttcattcggtcgactggaatgaaacttgaagccgtcgattcgaggaatgcggcttcgacatataatatcctgaacgaggagggcagaccggtggcagctgcagttcttccattcggagtcacttgctgatgttttacctcgctccagttgagccggcgttctctctttcggatcaatgacggaatgagctgaaatgtcgtgtatctgtctgtaacatcgacaatgctgttttgttgtctaggaaagaccacctaggttttgtagcatattgttctcgttgtaatcttggactaacagaagattcacgcagtatacaccaaaaataagggtggtggttcctgtagtcctagtgaaaaaa

SEQ ID NO: 23940 - DNA, 478 bp, Setaria italica
  Peptide Sequence Number=SeqID_89914
tagccagaatgctcagcattgttaggtgcacttgaacattgtacctatgatcctggattggccggtgcgattgttaagagctttcatgttatcctacaacttgcaactgaacaaactctagcttctttcaagtcaatcaatgtgcttactagagtcctgaaggctgcatgccttcaagcgcaagaagtaaggaagctgtcccatccccaagatgatttagatcaaaatggttctcaatccagaaatgttctgacggcttcttcagatgagaggattaagaatgcttgtacatttgtggaattggctttcaaccttttcaaggattatgtcacaatatctgacattggtaggattgcagttttacataatgccaattgtattgagtgtttatttgacttgttccaagaagaatacctcaggaagcacatagtggagcaagtacttgctttatttaggttacctccatcatcagcgcaag

SEQ ID NO: 23941 - DNA, 278 bp, Setaria italica
  Peptide Sequence Number=SeqID_89915
gtttactcttcttatttgccatgtccctgtttacgttgagtgagtgacactcaacttttttttgtgtgggtagacactcaaaatggtgccttttgcgttttaaactttgaagcactactgaggagactgtggaatgaagtgctgcatcaaaaatgaactaccacttgcggttgaggatgcctttgcataataacaagcagcacatgctaaagtagtacagtatgctaatggaatatatttattacaataaggacaaatccctcgaggtgcaagaaagg

SEQ ID NO: 23942 - DNA, 297 bp, Setaria italica
  Peptide Sequence Number=SeqID_89916
gcccgcggagggtggcggccggcgcagcaggaggcacccggatgccgcggccgcctgcgagatgtcggcggccacggccgtgctgaagacgtagaagccgaagatgaggtgcaccgccgcgctgaccccgagctccatcaggctcaggatgaaccgcgccatcttccctcgtcggtcgcaccaacggcctcctcagcccgaccgagcggccgcggcggcctggcctacaaacgccgacaacaacggcggcgtgccgttggtcgtcgtcggtcgtcgcccgctggctcacccccgcct

SEQ ID NO: 23943 - DNA, 448 bp, Setaria italica
  Peptide Sequence Number=SeqID_89917
gttcatttcaaacttgggaacctcgctcaaagttgggcaaatgcgattcagaggcagcttggttagtaattctgtatcattcttcgtacaattcttaatttgtcaccgttcatttcaaatttgggaatcttgctcaaagttgggcaaatgccattcggaggcagtcaggcagcagcttggttagtaatttcagataattctcggtacaaatcgctctactctagtaatttctagcttagagttgggaccttgggagggggaccgtcttacaagttgataatttagattctaaagttgatccagtatattccactgaggtgagtggatctagtctgattttaaggttttaataggttgatttggaatcttcaacgggtttgagatcattggtcagtgattgctcgtttctagcttcagtaatttcaaagagaatgctcaccacagtgcc

SEQ ID NO: 23944 - DNA, 476 bp, Setaria italica
  Peptide Sequence Number=SeqID_89918
cctcgtcccgcaccccgcacgacacccacccatcgttgctcacgacgaggcgcaggcccccggccccgcccacagcgaccgccccgtcggtccggaccgccacggcgaccggagtggggggcgtgagggcgcccgacacggtcctcgtggcgccgtcctccatgtcgacgcggaggaggctgcccgtgctgggctggcccacgagcaggaacccgcggctaacgtgcgcggtgagcgacgccagcggctcggacccgagcgccgtcgcggaggagagcgggccgaggtcgccatcaacggacagcttgtagattcgggcgcccacggtgaggaaggcattacccgtgtgcgggtcaacggcgatgccgcccggcggggcggcgtccgggaccggggtggagaggatgaggcggtgcgggcgcggggagcggagatcaaaggcggagacggaccctggggacgccacgaggaggcgg

SEQ ID NO: 23945 - DNA, 240 bp, Setaria italica
  Peptide Sequence Number=SeqID_89919
gggcgagtagccagttcttcctgttattccatctaacccaagtcaatccatatgaaaagacatgacatgacttccttatcaacaaaagctgagatacaagagatcaataagtttttgaaagtccaactgatgagtgttgaattgaacatctgtactcatgaatatctaaaatctctgtagtatttgacagagccattcataaagaatagtttttcagcattcatgttgaatggtttctca

SEQ ID NO: 23946 - DNA, 590 bp, Setaria italica
  Peptide Sequence Number=SeqID_89920
cggcggcctctggcctctgcactgccatccagtctgtgaaggtgtcgaggagatagagagatgaggcatctagagagagaaaggcagctgcaggctgcaccagacacatttgtgtttctctgtgcaacgctcagtgggtcttcttcaacccccgacgcagagctgcagaggaaccattgattggtcagcgaggaaggaagccatggctgcagcagatggagaggattaaaaaaagaggcgatgaggatgcagttcaaagtggatggttggatcatgattggtagggttaaatggtggtggtcaaagagcggtcagggctgctcctgccaagatgcagcaggtcctgccctgcaaagttcctgttcatattcatgagggcaaaaattgtttgtttccgagtggcttgttggtattttgttgatgctactgaagatgggcgtcagagggagggggggcatgctttgctgtgatgggaggcacatgcaagcgtgccctagtgtgtggtggtgctccggagggaaatatttgtccatctccggggctaacagtgtccaagcatgaggcttttgggggccccttgctacttgttt

SEQ ID NO: 23947 - DNA, 575 bp, Setaria italica
  Peptide Sequence Number=SeqID_89921
tgccaagatcaggcgccgcgcgggggagctcggacagctcaccccccaccgaccaggtgctcgccagcaggcagctcctcgaggcgtcgctcatgggatattctctgtttcttggattaattattgaccggctacatcactatattagagagttgagaacgatgaacaaaaacatggaggctgtaacaaagcagagccggacattagaagaagcaaaacttggaggcaccgaggagattcaaggataccagaaagagattgctagtttgaaggaacaagtggaattgctcaagaaccagtcccaaaagaaaacagaggaactaaaaactgctgaagctaattctgttgctttacagaaacaatctgaaggattacttatggagtatgaccgtctcattgcagagaacggggatttgaggaaccaactgcagtcaattgacctccgcatgtcccattctgacggaaagaagaattcgtaaaggaaattctgcaattttggagagcttgatgtactgtaaatttcgacctataggttagcttgcacatggttgtgtcgtgtgttccagtgttagtat

SEQ ID NO: 23948 - DNA, 730 bp, Setaria italica
  Peptide Sequence Number=SeqID_89922
gcagacggagcactacaagaatccctttgcgtaacaaacattggcaaaaaattagtatgaaaggtatgcaacggcaaggctactggatgctcagcgaaaggtcagctgggaacccgcccatcagtattcgagtccttgactcggtactgaagcttgtatttttttggatttattccagagtttaaccggcgcttttttaatggtaggtgacgtgcccgtcaatatcgaggtgttagtggtgacttcgtcaattttaaggatttgccgatccagtttttcagagatactcataagggtaggattgcatgtgtttgtgtgacgagtgtgcttatatatatgtgagcgtctgcatatgtactgtgtgattcggggaaaaaaagggtactggatgctctcaagtttctggtgttcatctttccggggcagcattagcgaactggacaggagtatcgaccgcattgtctttgtcattaacttaagtgtgcgtggggctcgggaagctggaatcgtatacttgctcttggccttaggtatagggtgggcccaaattgagacgcatgcctatgggtgtgggccttagaattctatatggtccacctgcttgcccatttgattcagcttaattttctccaaagaaatgcaggcttatcctgacctacaaagtcataatgcatctgcaaatctgtatgttgaattgatcatgtttcacccaatgatgatgcacctacgt

SEQ ID NO: 23949 - DNA, 523 bp, Setaria italica
  misc_feature (17)..(17): n is a, c, g, or t
  Peptide Sequence Number=SeqID_89923
atcgcgcatagctacanatttccgtgatttctggaccagacatatttctgccattgccagttatcagcaattcagcatacggttgcagacaacgacgggcagcttcagttgttgccgccaccgtccttgtgcgctgaccttccgccgcggaagtggccgcgcttgctccaggctccgccgctgtagagtcccttgtatccagccccatctccatcgccgctgccaggttggccgtgatgcggctcaccaccgtctcctgcaccggcaccagagctgccgtatccaccagcgccgccaccgccaaaaccaccagcgtcgccaccatatcctccaccgcccgttgccaccttctccatgctgcccaccaccatcacctccaccgaagccaccagcatcgccacccccgctgccaccaccgaagccaccaccgtagctgccagaacggcccccgccgccgccaccacctccaaagccgccatggtggcctttaataacccaaccaaatagaccgaaaaccaaaaca

SEQ ID NO: 23950 - DNA, 225 bp, Setaria italica
  Peptide Sequence Number=SeqID_89924
gccatccagccgcctctcctcgccctcctgcctgcgcgcatctctctagagcttaaactctcctagagagatctcaggcagccccaataaccaaccgctcgacccaactcgtcgtcgtcgtcgtcgcagatggccggcctcaggatgaagctcgtcgccgccgccgccgtggccgccgcgctcgtggcgtccgccgccgcccaggcccccgcctgagacacgcaa

SEQ ID NO: 23951 - DNA, 1314 bp, Setaria italica
  Peptide Sequence Number=SeqID_89925
ccgagtccactcgccgtcctctcctcccctcgcagtcgcagggggctttcaactcggctccccaaaccccatcgcctcgccgccgaccagagcaccacgtcggcggcctctccctctctctccgccggatcctccctcgcggctcctcggtccacttccgccgccgcagcgccgatcctctccctcggccgaacggagcgggggggatcggattggcttgctgccttctcatgttggtgggctatgagacatggacttttcattttaaacaacatctagaggaccacctggactaagcttttaagtcagtatagaatgggtggctgctgttgctgttcgtcgagaagatctgaagtagttagagcaccagttgtctatcgtcaacacaatcttgaggagcatgagccattgtcctcagcttttgatggatcatcgccggcctctgcaattgttgcagtagacacaaatctggatacatccacacctgacacttatcgagcaccacctgcacctttgccttatgatgtcgtgttggcagttccggataaccctggtttggagaagtcagacattaagagcaaaactgatgaccaacaggagtccatgaataaccaggagtccttaaaggtggatgagtcatgtaagaagggtgtccttgaagataagcctgacgaagaggatgtttgtcctatctgccttgaagaatatgatgaagaaaatccccgttccgtaactaaatgtgaccatcatttccatctttgctgcatccttgaatggatggaacgaagtgatacttgcccagtttgtgatcagataaccttggtggatgagatgttcgaataagcctggtaaccctggtggatcatctcttgaagctcttggttactgaggaaggtgttgtcagcaaatactctgctcttggtattgatccgttccgcgttgctctactggtaatgaattgaggaaaacgaaattgaaaggttgaatggcatgaaatgtatttgcgccaccatggttctattgccttctttgccatgctttcactgttcataacagcaggtggattagggaactgcttggttgaaatatatatatgtcggttagcaggttgattcagttcaaagtataaaacccttcccttttcttttttctgaattcagacgtctgtcggttcatccatgattcggtcagctgtgtatatcatacattaggtaggtgacaggtaaaaaatggtctagatggggttttcttgtacaatccagctattcaggcttcctgtatataggccttcttactaattccttttgtcttgtc

SEQ ID NO: 23952 - DNA, 360 bp, Setaria italica
  Peptide Sequence Number=SeqID_89926
aagagacatcatcaggccaatccttgaagtctgacttggatatgtatcttgaggaagcagtttatcgtcaaaaagagggaaatcaggataattttgacatcctgggatggtggaagacctttgcagccaagtatcctgtactttcacaaatggctcgtgatattttagctattcctgtatctatcatccctttggacagtgaagcccgtacactaaatgagtatctcagtactatggacccttcaacggttcagggattagtgtgtgcacaagattggttacaggaagacccagaagttgctggtttcagtatgtccactctccaatgtattcacctattttggcttggcaccacaatca

SEQ ID NO: 23953 - DNA, 683 bp, Setaria italica
  Peptide Sequence Number=SeqID_89927
cacatgattgttcagcatggctaccggttttctatggtagatgatgtgggcttccaaaagtttgtcaagaaccttcagcctcagtttaggatggtgtcgtatgacatggtgagggctgatagcatggaaatatatgaaggtgagaagcttaagctacaggattctctcttgaagatcccctgccgggttagcatctcagttgatatgtggcagtcaaatacacagatggaatacatgtgcttgacctgccactacattgatcatgccaatgatgagtggaaaattaggaaaaaaattcttaactttgtgcatatggaggcaccttttgcagttgatcagattgctaatctcattgtagagaagttgcatagttggggtattgacagaaaactagctgctgttgtactagacaactgcagtggtggtgaccttgttgccagagagcttctcagagttttgcagcccaggagacttctattaaatggagatttgttccaagtacgctcttgtgcgcatattctaaatctcactgtccaagaaagctgggaacatgcatcggatataaccgatagagttcgcaagatgattaactatgtcaagtttgaaaggttccaaaagtttcaagatatctcaaagctactgcatatggatcaaaagctgttagttgttgatttcttccttgt

SEQ ID NO: 23954 - DNA, 1704 bp, Setaria italica
  Peptide Sequence Number=SeqID_89928
aataataggaaggacaaccttttagacaagttagaatacaagaattgactaaatctcattgtagagaagttgcatagttggggtattgacagaaactagctgctgttgtactagacaactgcagtggtggtgaccttgttgccagagagcttctcagagttttgcagcccaggagacttctattaaatggagatttgttccaagtacgctcttgtgcgcatattctaaatctcactgtccaagaaagctgggaacatgcatcggatataaccgatagagttcgcaagatgattaactatgtcaagtttgaaaggttccaaaagtttcaagatatctcaaagctactgcatatggatcaaaagctgttagttgttgattctcctgatagctggtcgtccctttacataatgtttgagtcagcatgttactatcatgatgtgcttgtgcgcctggcagaacaggaagggcactatgatgtttttctggctgcttctgactgggctgatgtgaaagccctcactgaaatactagatgtagtctaccatgctatggagaagtttccggtggaaaatccaactgcaaacctctattttaatgagatgtgcgagatccatgtgcttttgagaacctggcgcaatagtccatctcctgttgttgccaaagtcgctggtcagatgctttctaaatttgagggctactgggatctcacaaggcctgtaatggcatttgcatctattcttgatcctcgttacaagatgaagtccctcgaatacttctttcggctcatttatgctgatgagcaatttacagcgaagacaatgctagatgtcatccagaatacttttaacaatttgtataatgattacaaacaccagtcatcagattcatggaagaatccatctgttctctgttactctagaaacagtagctctggcatgggctctatgtacagcaatggggatgattcgaagaccttctctcgtatcacattatctgatgctcgacgaggacttgatcagtatatacaagagacatcatcaggccaatccttgaagtctgacttggatatgtatcttgaggaagcagtttatcgtcaaaaagagggaaatcaggataattttgacatcctgggatggtggaagacctttgcagccaagtatcctgtactttcacaaatggctcgtgatattttagctattcctgtatctatcatccctttggacagtgaagcccgtacactaaatgagtatctcagtactatggacccttcaacggttcagggattagtgtgtgcacaagattggttacaggaagacccagaagttgctggtttaagtggtcaaacaaatgatggagcaccgcacggtgacgaactgattgtggtgccaagccaaaataggtgaatacattggagagtggacatactgaaaggaggcttttgagaagaccgaaggcggcatggctactacttaatctatcgtccaagaaccagcagtactctactgtaaatgcatcgttctagatctagatgttgatctgtacaatgaactcctagagtcgccctccatgaaggaggctaacgtgatccagccatctactgccattgaaacagcctaccatgtattcatgaatgacttgatatgtattgtgctgctcaaatagcccaaactatttgccgtaaggtttcacaaggccattgcaagt

SEQ ID NO: 23955 - DNA, 347 bp, Setaria italica
  Peptide Sequence Number=SeqID_89929
tcgcgctcgtcttcttcatcggatgcgtggtgatcgcagtcaggagggccaggtcgaagggatcggtcggcgacggcgggaagttcgcggaggcgtccctgttcgactccatgacggagctcgacggcgactccaaggacacgatcctgttcatgtcggaggatgccggcggcggcgacacggcgaggcgcgtcacgttcctggacatcctcaaggcgaccaacaacttcagccaggcgagcatcatcgggaccggcggctacgggctcgtgtacctcgccgagctcgtcgacggcacgaggctcgccgtgaagaggctcaacggcgacctgtgcctggtggagcgc

SEQ ID NO: 23956 - DNA, 809 bp, Setaria italica
  Peptide Sequence Number=SeqID_89930
ttttttttttttttttttgttttagtcagacaaaaggcatgccagcttaattatcaaaaaaaagggcatgtcagctttacacatccagttctagaagctttacattgccagaatgttgaattgcaattccttgtataagaatgcttcatttacgcacatacatactttaacctacggagacctaaatttggaataaacaacagcaacaagattacagacgatagtttccccacaaagttatctatgcatgttccaggaatatatacatggcatcaacttctcctgacattcttctttcgatgacatcgattgtgcccatcagtttcatcagcagatgcctcagcaagccttgctatcgcatcaactagagaatgttcttgctctttcagtgctttctttgccttctctacttccaggtgatcaggattgctaacgttaaaaactttctcgacccgttctatgaggctctcagtgtgaagtatatcaatgtctccggaacctctctttctagcatttttttgtggaggtgaaaaatcttttttggatacattcttttggaaacttcttcctcttccatgacctcgcatcaacccaccacagttagttgacttcctagcaccactacttggagcaccttggctttgtagatacatcacagggtctatcccagagtcattatctagccatcttatatcttcaggtcccatcttctcaagatcaacccattcccaggtctcatttgatgtgttgatatcataaaccagtgctataaagtcccgtttctggattataatcagatataactactt

SEQ ID NO: 23957 - DNA, 395 bp, Setaria italica
  Peptide Sequence Number=SeqID_89931
atttaaatgctagcagtagagtactaattacaacggaaagcgatgttgttagctcagagatgttctgatcattaactctaagcataatttttaagatggaacctcttagcgacgatgagtcaacaaaaatatttttttagtagatttcctggcaatcgatctacaaataatcagcactcgtatgaagtttcatctgaaattataagaaaatgcggtggttttccactagcaactattactacagcaagccttttaggaagacatcagaattgggcagagcaatgtaactggataaggagatcactgagctcaaatttaaggacagatccaactattgaacgaatgaaacaagtacttagcctttgttacaacaatcttccttgtcatttaaaagt

SEQ ID NO: 23958 - DNA, 723 bp, Setaria italica
  Peptide Sequence Number=SeqID_89932
cgcttccccccgaaatcaaccctcccagctaattccatcctccgttccttctcctctcgccggccccagatccccacccgcctccgactggaacggggtagcggcggcggcggcgtttctaggggctgagctttgcgagaaaagatggatgccaaaaagaagaggaacaagaagaagaagggaaaccaagggaagaacaccgctgatgtgacatccaatgctggagaagctgctccccagaaccacaatcatgagtcagccccaagagatcattataaaggttctgatgcagatgatgccatgtccagtgttggagagggagttcctcagtaccagaatcacgagccaactcttccgttggatcataatgacagcacaaatgcccatgatactacatcctctattggagaagggatctcatgctaccagaacaatgaacctacgctgacacagaatcataaggccagcaatgcagtccctgcagatcagaggagcattgggatgtcagagtctagtgtggagcttgatatgcatagactttacgaagccaaactcgataaactacatgagacaataaagcagttggaggatgaaaagagtttatggcttcaaaaattgagcaccatggagggtgagcttgaaaagttgcatagcaaagtgggttttcatgcacaaaatgaggtacttttgaaggaaaaattgagtaatctacagattggttac

SEQ ID NO: 23959 - DNA, 267 bp, Setaria italica
  Peptide Sequence Number=SeqID_89933
tccctccgtggttgttttttaaaagattcctgacttgtttattaaacataaggattattcttgaatcatgaactgaatatgcaaactttgttatagtcatgcttggctatctaaagctggaacttttaggattgaacaaagccttcttgatgtgcaggtgtcttcaccgtttctggaattatagattcatttgtataccatggccagagagcaatcaagaagaagatggaaattggcaaattcaactgagtcacaaagtgtcacctt

SEQ ID NO: 23960 - DNA, 1074 bp, Setaria italica
  Peptide Sequence Number=SeqID_89934
aatttttctttcttcttttttctacctctctcagatgagagatgccgtgaggcgtgtcgccgagcagttccccaccgcgattgtgagcggtcggtgcagggacaaggtgttcaacttcgtgaagctgaccgagctgtactacgccgggagccatggcatggacatcgagggccccgccaagcagtccaacaagcatgtccaggcaaatgccgaagaagccgttcactaccaagcggggagtgagttcctcccgatcattgaagaggtgtaccgcacgctgacggccaagatggagtccatcgccggcgccaaggtggagcacaacaagtactgcctctccgtccacttccgctgcgtccaggaggaggaatggaaagccgtggaggaggaagtcaggtcggtgctcaaggagtacccggacctcaagctcactcatggaagaaaggtcctggagattcgcccttccatcaagtgggacaagggcaaggcccttgagtttctgctcaagtctctcggctatgctgggcgtagcgacgtcttcccgatttacattggagatgatcgcaccgacgaggatgccttcaaggtgctgcgcggcatggggcagggcatcggaatcctggtgtccaagttccccaaggagacggcggcatcctactcgctgcgtgaccctgctgaggtcaaggagttccttcgcaagatggtgaagggcaagggggacggcgggccagtgaagatgatgaatgacatagtgcatgtcgatcactagctctatcagacatgcatggatgccgccgggtgggtgatggcgagcaacaagagatggagcctatcttttgttgttttctttttgccgctctaatgatagtagtctacctagaactttgcacgcgtggccgatatatctggccatgcgaaggagaaacaacctagctgctagggccttgtgtctcttgggaggtccctattactatatccttcccagcaaggtcttgtaattagcctttggtcgtacctgtgacagcggaggatggcatcaggggggagaatagaagaagcctaaactactccttt

SEQ ID NO: 23961 - DNA, 411 bp, Setaria italica
  Peptide Sequence Number=SeqID_89935
ttttttttttttttagtcttcatcaagcagcatccccacaatttttttttaagttggggcaagaggattttcatgttatattaatagaaaggaaaaaagaatcaaagcaaccgtaaaagagacaacaactgaaaaagctttggacagacgacatagagaacacaacacatacaaacgggatcaatagcatgaggggaggaggacaactaacacaacactataacactatagccaaagaaaaagaaaggcttctctatagcgcaaaagaaaaaaccgactcgtgatggaaggaccacacacgactacaactaatcatttgtagctctgttttgaccgttgaaagcaaatctgcatccccacgatttccttcttctcctgatctctagatagcagtcgtgtgtacatgtgagt

SEQ ID NO: 23962 - DNA, 283 bp, Setaria italica
  Peptide Sequence Number=SeqID_89936
ctgcacaagagagggcaaggcagatgatggatgaagatttccaacatgctgtcttcttgagagagcctaagcctgagcctgatatagatgttgcacagagccttcatgatgctcaagttggcattgtttcccatccgttcaacaccagctcctcaggtgctgcagatcctctagcatcgcgtccatccgttcaaaatcaaacagagatttcaggtaataaaggcaggccagttcagcattgtagaacaaggacatcatccacttcctttgttgaacgcacggg

SEQ ID NO: 23963 - DNA, 1577 bp, Setaria italica
  Peptide Sequence Number=SeqID_89937
ttcagtgtgtgaacagaatttacgatggcagaaacagaacattgtggacccagcaattgtatggtgcccagatggcactctatgagagcattcttgctagccctcaccgcactcttaatggggacaagctgattatttctatgtgccagtgcttgactcatgtctaataactagatctgatgatgctccacatctgctaatgccgagggacctgcgcctcaggagttaccatgctctggagtactatagaatggcgtatgatcacatagctcagcagtatccttactggaaccgcacttcgggaagagaccacatatggttcttttcatgggatgaaggtgcctgctatgctccaagagaaatctggaacagcatgatgcttgtccactggggaaacactaacacgaaacataagaattcaacaagtgcttattgggcagacaactgggatcatattcctttagatagaagaggcaaccatccatgttttgatccaagaaaggatctagtgcttccggcatggaaggaacctgacccaggggcgatatggttaaaactatgggcaaggccaaggattaaccgtacaacacttttctatttcaacggtaatctaggtccagcatatgaaggaggccgcccagaagacacgtatagcatggggattcggcagaagctagcagctgaatttggttccacaccaaacaagcagggaaatcttggaaggcagtatgccactgatgtgacagtgacctatttacgaactgagaaatattatgaggaactagcaagctctgttttctgtggtgtcctgccaggggatggctggagtgggcgtatggaagacagcatgcttcaaggatgtattcctgtcataattcaggatggaatttttctgccgtatgaaaatgtgcttaactacaacagttttgcggtccgtctacaagaagatgacatcccaaacctcataagtacacttcgaggaataaatgaaacgcaagtagagtttatgcttgggaatgtgcgccagatgtggcagaggtttttctatagagactctatattgctggaggcacagagacagaaaaggctgttctctgaagaggcaccctggtctgttgaggtatcaaaactacctgatgatgatgatgtctttgcgacatttatgcaggtattgcattataaactgtacaatgacccttggcggcaaggtctcctgcaaacaaaggaaactgggttgcctaccatctgctcgagagcttcctgaaagttttagtgaggcagcattgcaactgacaaaaaaaaaaaggatagacatactcattaggaaggggtctgtagatttggttcttacattctgtatatctttcctttgtcttctaaatatggtttttttactgatggcccgagttaaatcatttcctgaaaaggggaagttcttcgcaatgccaagccacgttggctctcactgagaaaaaaaaaggattttgttgctcggtgttacatttgtttgctgagcaaatttaaggtaattgagcagacgatcagacgatcaacgtcagttctttatgaaaaaaaaa

SEQ ID NO: 23964 - DNA, 673 bp, Setaria italica
  Peptide Sequence Number=SeqID_89938
atcgtgaccgtctctgccaaagataaggccactggaaaggagcagaatatcaccatccgatcctctggtgggctgtctgaggctgacatccagaagatggtccaagaagctgagctgcatgcccagaaggatcaggagaggaaagccctcattgacatcaggaacaacgcggacacgactatctacagcatcgaaaagagcttgggagagtacagggacaagatccctgtggaggtcgcatctgagatcgaggcggccatcgctgacctccgcaaggagatggcctcggatgacattgagcagataaaggccaagcttgaagccgcaaacaaggctgtctccaagattgggcagcacatgtccggtggcggctcaggtggttcgcaggcggaaggatctcatggcggcaatgaccagcccccagaggccgagtacgaggaggttaagaagtgagacagcgggagatgaaacagtaacttcccatttagaagtagctagtcttttgtgagcacaagatggtaggatgaggcgtaacctgtgcaggttgcaacattctctagtaggttataacttctgttgcatgacgccttgtttcgccctttgacgcctcgcgcaggcgagcagcgatgaaatttttgcacttgtcttcttgttgaccaaaaaaaaaaaaaaa

SEQ ID NO: 23965 - DNA, 591 bp, Setaria italica
  Peptide Sequence Number=SeqID_89939
gtcgtccccggacaccatcatcgggctcctcgactccggcatctggccggagtcgcccagcttcaacgacgccggattcgggcccgtgcccggccgctggaagggcgtctgcatggccggggacgacttcaactcctccaactgcaacaggaagctgatcggagcgaggtactacaacgagagcgacgtgaggggcccttcccagagcggcggcggctcgccgcgggacgacgtcggccacggcacgcacacgtcgtccacggcggcggggaacgcggtcgccggcgcctcgtactacggcctcgccgccgggaccgccaagggcggctcggcgtcgtcgagggtcgccatgtaccgcgtctgctcggaggaggggtgctcggggtcggccatcctcgccgggttcgacgacgccgtcgccgacggcgtcgacgtgctctccgtctccctcggcgcgtccccttacttccgcccggacttcacgtcggaccccatcgccatcggctcgttccacgccgtggcgaaaggggtcaccgtcgtgtgctccgccggcaactccgggccggccgccgccaccgtcgtgaacgcggc

SEQ ID NO: 23966 - DNA, 1375 bp, Setaria italica
  Peptide Sequence Number=SeqID_89940
gggacagagtaatagtttatgttcccattaccaatggcgaatgcaaaaaatggattactttaactcaacatataaaggatttacaggagagaacaaaccacttgatgtttgctatgaaatataaacatatgctcacaccaccaccctactattcccactaaggcagcaaaacctgcttaaattatcataccttgaattaaagaagaaaagaaaacagtggcttctatatccatacgtgctccctgcggtactctcgtacaatgactggtacactagtaggtgggagcattccataatctgttatgagcattgaaacataatcagaaggggtgatgtcatacttaagattcagaatatgaagattttcgttctcagcccagtttttgagatgactcaaactttcacccctgggaactcttgaaatagcatctgggtcaccaagttcattgaagcatatagaatcaagttgaaccctctcatgaaacttgtatgcctcacaacacattagaacaggaactccaaaagcatgtgcaaccatagctacagaagctgtcccgactctggagtagacagtaccatttgataatactgaagaggcgcccaaaaacactcttgtagcctcatgcatgatgtatgatacagcatttatgtgtgtgtatgtgcagctaatacccttggcaactaatctgcgcaataatccttgtccctcaaggtttggacaagaatctaccaccacaacacgaaatttctttccaagttcatgagcatggtcaaaaatcatttcgacgacagagggtgacccatatgtcaatagcacatcatcatctctgatttttgtgacagcatgactaacaatgaccttgcctgcaactattatcttctcacttataaagcgatcgatgtcagattgaagactagctttagcttctgactctgacaatgcaagtggtagcttggtaatcctgttcttcaaaaatctaatagcattacccatgctgattgaaagaggcctgcactcaatgagaaatgacacgtagctactgattttagcagtaagatctctactgagaattttttctgcaggcgtggagtaatcatttattgcctctctgaatgcaagaagcattgctatgcaacgagcgttgccaccagatatgtcaccagacaaatattgaagaccaaccttatacacagaaggatgcattagatcaggttgaaaaaatttggactcaaggtcaggaagctgagtgccatgtgcatattgaggcagatgtctgaacagttcaactctgttttgagcttctgattggttcacaactgaacgcttttttgcttttaccacccggtgtacatcatcaaattgcatacggggttg

SEQ ID NO: 23967 - DNA, 233 bp, Setaria italica
  Peptide Sequence Number=SeqID_89941
tatgctacagtttcttgccatatctgataaggaacagtgcacttctcaattaagagattagatggaatcacactgatgctaactgctggtttgggtaattggtggtgcagatagttcttcaacatatattctgcctgaatattctacaatgctaattagtaatacagctacttaggtgttgctttttgaggaaccagtgcgaaaaactctttgtatgaaatcatacttcactg

SEQ ID NO: 23968 - DNA, 239 bp, Setaria italica
  Peptide Sequence Number=SeqID_89942
cagcactaggaacttccatcggtgactttcttggttcccagtccatcactgatcagctaaaacaactttcataccagcatggtggcatcaaccttgcatgttcagaaattgaggacatggacatctacattgagatatgtatgcttgaacaccatgcatgcggacaacaccacatgcctggcggtggcaggttcgttagtacttaactgtttcacttactggaaaaacagaaaagcaaa

SEQ ID NO: 23969 - DNA, 652 bp, Setaria italica
  Peptide Sequence Number=SeqID_89943
gccagatgatgctgattatataccacttgagctagatgattgtaactctgacagtgatgcaaatctctcaactttgatggggattgtaaacttccattcaaccatggagagtaacatcagatgtggaaatcaagctcccaaaccatttaatggaaaacacaatgaggatgatcggtgccatccacctgtgctaaaccaaaggttcatttctgaaagtgaaactggtcaaaacagtgtaatcgcgcacattatgaaagagagcaaatcaaagttgcaggccaaggagtgcaagcgaaaggcaatcgtccagcttgatgaactctcagatgtgttatccccaatgagagcttgcagtatggcaaaaagatatcatttagctttggtggcaatggggtttctgttacttctgataaagcatcacacaagcctacactttctgaactacaacagaacagagaagcagttctaaaagaaaggaaggaacagattggcttttcgccccgagacattcagagcaaggagagagatgcttcgacaaagatgagtatgctgattgcagaacaacttaggaatcagcatgcccagagccacgccagaaatagtgatttgccccgagacattcagaggaaggagagagtatgcttcgacaaag

SEQ ID NO: 23970 - DNA, 412 bp, Setaria italica
  Peptide Sequence Number=SeqID_89944
tcgaacgccgggagtggcctcgacgtcctcctggctgagcccgccgacgccgttgacctgcccaggccgcggctgcccaccggcacgtcgacgcggagcgcgccgaggtgctcaggtaggagcggtggctccggcggcgcggccctgtagtaacagcacgtgaaccagatcaaggcgaccacgaccacggccgtggcgacggagccccagacgtagccggcgagcacgaacaccaagacgggcactgcgacggccgccgaccacagcaggagcagcttcgcgcagcggtcggagcgcgccgtgctcggcccgggacggaacaggtcgatctcccacgcgccattactccggcgagctctgtccatggagaccgtgcgcgcggcttgccagttggtcagttggtggcttacgg

SEQ ID NO: 23971 - DNA, 421 bp, Setaria italica
  misc_feature (76)..(76): n is a, c, g, or t
  Peptide Sequence Number=SeqID_89945
cacggggttggaggttctaattttattgcatggatgtgggatccagagtagtaacgtactacgttagagctgaacngaactgatgcgatcctgtttataacttctatttgatgcgatcagtttgttgctgtttttacttatctaccagattagattcttgcatcagatctctactttgtttatcaaaatcaatttgttctcttcgctcttctggctagtggttactggtttgattgtgaagtcttagtttaaggggtcgtgatcacgatgttgccatcacgaatctgagaactaaaacttgcactcatgtggaatttcccaatgacatcactggttcgtcatggtaatttgttggacactcatgtggttaaatttcccaatgtgacatcagtagttcgttatggtaatttgttgtctgctg

SEQ ID NO: 23972 - DNA, 249 bp, Setaria italica
  Peptide Sequence Number=SeqID_89946
agagcctgagcctcccctcctcccgtgagcagagcacgcaacgaatcgccgtggtaattactcggccgcggcggccattagagggcgctaatcacgcccagaatttaagagcccccgccttggcctcgctgcgcacgcacctacctacctgcgttgttgtgttcttcgcttcttctcttcccccccacccagctgctgcgtggcggcactgcgctgcaccgcaccgcacagcggcggctgcggcggcag

SEQ ID NO: 23973 - DNA, 330 bp, Setaria italica
  Peptide Sequence Number=SeqID_89947
ggtcgcggatctccgccgcccagcggccccagggccggcgccggatcccgcggtacgccgtcttgcgccccggcgccggcagcctcgccgccttgaccagctcctcgtcgccggagaggacggaggcggaggtggtgtcgtcggtggaggatgtcgccgggcggcgggcgccggcggggacgaagtcggcgattatggctccgccgcacattgtttctccacggatagcagcaactcctacagctagctagctcgtcagtcaggagattaggcagggaggccgcaaccgcacaatgcgaagtgttgttgtgtactagtgtggtttgtccg

SEQ ID NO: 23974 - DNA, 1148 bp, Setaria italica
  Peptide Sequence Number=SeqID_89948
tttttttttgaaataaccagatttatatagtagaagatatgtttattagctcatctgaggtgtttgattacaaaacaatagcatagcatcatatcatacataagctgtcaggctggcatgcagcttgtgtctctgtgaaggttctgacatcttcctaggaagatcttcatgactataccagagttccaagatattcgcagtatctggactccaacatgaccatgtctatgcctgtaaactaattacatagccatttctgcttgtagagctgccagttcatcatcttcggctttactactctgtgcagatggacgagtggactgctgtgcagtaggcacacgcactggagcggtggtaggagcagtcgtggtaggtgcaagcagttctgcctccaactcctccccctccagatccgcaagttcagcttccagttcatcctcatcaaaatcagccgctgctcccataggtgctgacaatagatcctgaatttgtctcatgttctccatattgtcattgatttcgtccatggttttgtcaacatcatcaatatttgttgatttgtgcatagctttcattgctgatgctccagttctcaacgcatccacagtctctgttgtagcttttgcggcttctagcataatcatctgatcatgtatccttagctggaaatttccaagctgctcaatttgttgctcatacaacctcttcctctttaagcattgtattgcggctctcttattcttggctttggtgaaattcttggccttctcaacctcaagatttgcctttttcactagcaaattttccttcttttccaacatttcgagtgtctcgtttagcttgtcgagcgaggccagcgcggtggcctggctctgctgcttggacttcccaaacaccttgccgaacacgcccgacatggtcgctgctcgcctagcctcctatcaaaccaccgcgaccccgatcggaacgaatctgccgcggggtcgaggagccctcctctccctctccttcctcgtcgcaactcgcgatctctacttcgtcggccggtgggggatcgtggtctccgccgtgcggtgcggggaaaagggtagcgggacgcggtgttggtactttaccggcggagaaggaagatggagtcaggccgtcag

SEQ ID NO: 23975 - DNA, 333 bp, Setaria italica
  Peptide Sequence Number=SeqID_89949
ccgcggaggctctccagcgtggagttccagccgcagtggctcaggaacccgcccgtggccgggtgctccagcaccgcctcctggtcgcaccaccccaccgtgagcccgcgcccggccaccgcctccgcgaacccctccggcagcgcccacccgccgccgtcgcgcaccatgtccggccggaccacccacaggaacgggctccccgcggcggcgagcccccacgcgaactcgtccatctgctcgcccgtcaccaccgtgatgctcccgaagttgacgtacaccacggagcccgccgcctcggcgtggccgtccagccacgccacgcaccggtcg

SEQ ID NO: 23976 - DNA, 511 bp, Setaria italica
  Peptide Sequence Number=SeqID_89950
tttttttttttagtaacgtaaaatcattggccatcgctttttttttccttcctagcaaaggcattacatttcatgacacaaaactggagcacaatgctgaatgctccgatgaaggcaaagatgaagttctcatttgctcttcttagcctatggtacaacataagactgacggtttatttgtacatatctcaggtaagctttatcctaccaacaactacaaaactgccacactgctggccacatgtatccactctgatgcacttagttctgacagcaacctatggctaaaatctcactgaagtttaacctctctgtaaaatggaaaacctcagctctcatcatccgtgtccatgctggagagcaagcccttcaatgtctcgtatgtcataaaggcaattcctaactacttaggtaacgtacctttgttaggtttactttctttaggggtttcgtttatttttacctttttcttttttattttttaaaagtttttccttttagttttaggata

SEQ ID NO: 23977 - DNA, 1081 bp, Setaria italica
  Peptide Sequence Number=SeqID_89951
atcgggccaaagaacccatgccatgaggcatatgtccaatccactataaacagagattggtgatagcaacacatacgagttgtcaagtacttcaatattttccaacactttatggtcaagatgaaaccttgcaagccgttggcaagagatataagctgatttaagtgcctgaatctggaccttcaagttccatgtcattttcttgacactcttctgttgcataatgtcagctatttttttccatcttctctgaaaattaccccacatttcgctcgaatctttggcacctgtagtgactagatcttttgggaaattgcagtaatatatgggagaattttcccaacagacagccaacccaaaaacttcgaaaaggtttgaagatggtttcattgctttcttgataaaatggacatcgaagcaaaattcactaacagcagaccattgatcaagaaaacagtcaaatccccctaggaagttatatgcatttacaggacctttgtcagccaaatttgtactactcgatccagcaataaaatctgttgacaaaggtgatgctgcttcctgtgtagtaatttttgcattgttagctaggttctctttcatttgaatgtaagaaccagggtgttcctctcttagactgtatgtagaaatccttggagcagcataatcagaggagttatttttatttttatcatctccagcattgatccctaaagctaccttattgctcctagcttgatctccacaaggagaaaccactgtatctcgcattggggagtcctcaatagctgggagtgaaggtgcagtgaactgaggaacttctacaccaagtgacttgaaagctgagaatgctgctactctagcagcttctgcctcctcaaggacaatcttgcgagctccgttttttatcttcttggctataccaaattgcattcgtcgtaaaccagaatcatcttgcccagaccaattagaagattcaaatagagcttttgcaatttcaggaatagatgcttcagcaatggcaacaggggtacgcagaccagacttatacaaagcccttgcacgtgagcccttgacaaat

SEQ ID NO: 23978 - DNA, 1249 bp, Setaria italica
  Peptide Sequence Number=SeqID_89952
ttcccggacccgccgctgccgatcacgttctcctcgcggatgttgctgagcacgtcggactcggagaagttgagatgggtgaaggccatcatcttccagtccgtcacctcgtggctctccttccggcgccggaagagcagccaggcgatgccgatgctgccaacgaggacaatgccggcgagcattccgaagagggtgatcaggcccttggacagctcgtcgtgggcgcctctgccaccgccccggcacgtcgggaggttcgtgccggagccagccctcgcgcagagcccggggttgccgaggaagctgcggtcgtacgccgcgatctggagcagaaccggcacctcgccggtgagttggttcgatgacagattgagcgaattgatcaggttgcttatgtctgatgggatgctgccggtgagcaaattatcagacaaatcaagcgtcgtcagtgatgggagcgtcccaatgctccccggcggtatcacgccggatatccggttgccgctcaggtcgagtgtattgagcttctgcagcaatttgatcgacgccggaatggagccggtgatccggttgccgggtactgacaaatcagttaggttgccgagcttgctcatgtcagacggcaattcgccgcccagccggttgttctcggcgtggaacaccttcagcccttttgccaacgccgggaaggagccggagaacatgttgttccccatctcaatccgtgagatgttgaaggatatctctgacggcagagtgccggtgaagctgttgttctggatcatcaccatggtcagcttcgggaacgaccatatcttcaccgggaagtcgccggacaggcggttgttgtagagcatgaggttgtttatcgtcacgcagtcgccgagcttcgccgggaactcgccggagaagctgttgttgaaggcgacgatgtcatagagtttcccgttggcgcagagcgtctcccggagcgggccggagaggttgttgtttcccacctcgaggttgccgagcggcgagtgcatgccgagctctggcgggagctcaccggagagatggttgttgaataacctgacgtctcgcagcggtagcaggccaatgctcgccgggatggtgccggtgagctggtttttgtaaagaaacagcaaggtgaggttcttgagcttccgaagtcttccggaatctctccggtgaacttattcgaggacaagtcaagctcaatcaagttcaccgccgtgacgctgcg

SEQ ID NO: 23979 - DNA, 296 bp, Setaria italica
  Peptide Sequence Number=SeqID_89953
tcgtcgccagcgccgccggccgagaacgcgcgccggtggccgcgggagcccctcgcggccggcgaggactgcacggtgaacacgggcgacatcgacgacgtgttggagctcgacgatgaccaggaggaggaggaccaggaggagcagggcgccgtccggccgggcctccggaggaaggcgatcctggggaggatggcgccgatgaggcccgggcggcgcttcctggaccggccgccggcgccgccccggtccgcggagtagtaggacggcggcggggtgagcggcgggagcgcgga

SEQ ID NO: 23980 - DNA, 582 bp, Setaria italica
  misc_feature (531)..(582): n is a, c, g, or t
  Peptide Sequence Number=SeqID_89954
ttcaagaatgcttcatggtagcccatttcttcaccatacttaaaatcatatctgaagctctaattgatattgaaatatctaccactggtatgaggtgcaagaaatattgcgctgagctagccagtttattcacttttttgtctgggggcggtccattcaagttacaacagtgcaaattgttactgtttcagaagtaacatgtagaatgttaagttccttttagtaatggcataaatgatggtttcaggatttttatgtaaatcctagattgtaatagtgccaaactagtaccaaaacactttcaaacagtcagatagaaaccaccttgtcaaaaaaaaaagtcagccaagtcaaaaaggatgtgacccaatgtagagactatataagaacattacagaaattactgatctagtttctcagcttattgactaacacttagcaacatactctcatcgctgatagctaattatgcgtgctaccattaaacaatgaaatcaacaaagttaatcgtgccaaataaatttagaacannnnnnnnnnnnnnnnnnnnnnnnnnnnnnnnnnnnnnnnnnnnnnnnnnnn

SEQ ID NO: 23981 - DNA, 296 bp, Setaria italica
  Peptide Sequence Number=SeqID_89955
tagtacggactaattaggttttacaaataacatcacctatatcttgaggattgccgataaagtattcatcttgtgactggagaagtgcaaatgatctgaagagatgaggcatcttcgacctctctgcaccataagctccattttctggcaaaagaaggcccatacctaacaattcgtcatagcatttttcagcttcctcttcaacagttgtatatgaactgtgtgttgtgctctgctgggtcacaataaacccctctgcaatccactgctggggtgatacgctgccgataaatcac

SEQ ID NO: 23982 - DNA, 425 bp, Setaria italica
  Peptide Sequence Number=SeqID_89956
acggaagaatacgaccaatagggacgacaataaccagcctcattacagctgggctggaaggggcagtcctccaaaaaggacaggtgtatgggtacaggatgtctctttgggcagagcacctgggcacggtggaggagtgcttccgccggccggagtccgaggagtgcgtgcgacgggtgaaccagatggcggatgacaactgggcgggttatgtctcaccgcagatggtggatatgaaaggccacctcatgaggtacccggtgagggtcgagcaggacgggagggtggggccgttgccggggcaggagatcttcccggatgtcggcggcaaggtactggggacccactcatcgctccccaatgcactgacaacgtgaggtggatggagcttgaaggtggcacacgatcgaagagctgaagctgct

SEQ ID NO: 23983 - DNA, 652 bp, Setaria italica
  Peptide Sequence Number=SeqID_89957
aaatacaaccaaattaaacaactagaccaactgcaaacaacgctgcaaacgtcgtgaaccggctaattaacacgccgtcgcagcctctttatttgcctgacatcacacggaagcacaatagctacaagctgcagtatctcgaatcggctaatgaacgtacacacatcttcaggggacagttcgatcgatcatcacctgatctgcaccgcacgctctacagccgcgagcggccgatccggtcgccgtcggtgatgacgtgggcgcgggtgatctccctcagcgacgtgcagccgctgagcgccatggtgagctccagctcgtccctcagcatctgcagcaccttccgcacgccggcctcgccgtccaccgccagcgagaacagcaccggccgcccgatgaatactcctgaggctcccaacgccagggccttgaacacgtccgtgccacggcggacaccgccgtcgaggaacaccggcagccggcccttcgcttccctgacgacctcttccagacagctgatcgtcgcagaaacgtaatctagctgacgggcaccatgattggacacgatgatcccagcagcgccatgttcaattgcaagtctagtatcttctgcagtcacgactcctttcactaagatcggcaacgaaggtta

SEQ ID NO: 23984 - DNA, 305 bp, Setaria italica
  Peptide Sequence Number=SeqID_89958
gcggcgcgcgcgtcgacgaggaagtggcccggcgcgtccagcatcagctcggccgccgtcgccgggagcgaaacctgcctcacgccgccgtcggggaggatcaccctcgcgcacctcccgcccggcgccttggccagcgtgcacgacaggtagttgcccatggtggccgagagaaccgctagctgatcaccggagcaccagagaatccgaaccaatcaggatgaagaaaccagctgcgggttgaagcactcgcaatcctactgtgagacgagattggtgagccgatgaggttgtagtagtttggt

SEQ ID NO: 23985 - DNA, 239 bp, Setaria italica
  Peptide Sequence Number=SeqID_89959
gcagcggggccacccacgaggccacgatgcggcgcggcgtcacgccggacggccggagataggcaccctcacgctcaaatctgggggatcccacgtcgtcctcacgccggagagctcctagtcggctagtccctggccgcgctgcaggcgcggatggcgtccacggaggacggcgtgaaggaggcgaggcagaggctgttcccgtgggagatgctcaaggcgttcctgctgctcggcat

SEQ ID NO: 23986 - DNA, 490 bp, Setaria italica
  Peptide Sequence Number=SeqID_89960
tagttgtgcacttgccactgcatgtgcaattgtacctccttgatgttaggagctggagaggtttgctgtgtaaaatgaataagggagccacacgcgtgacgcgtccgatgagctttagtgcagttaaactctctgcatgttaaacccatgttacaacattaagagatgccaaatgcataacaaagttgagagagcttgacattgctacctatttgtcttgttccaattcgatatttgtcttgatcatcttcaactcgactataatgttgcaacatgttataacacgataatggtctcacttaagtttcccggttcattgccttcatctagcaatttgtatgcagttgtggggaagtctgggagtgttattgtgctgatgatgtgttgtgataccatggccgtgttgctgatgatgcaatacaaatataaattggaataagagagatacatagttgtccgaagctttctctgacttatgctattgatttgg

SEQ ID NO: 23987 - DNA, 277 bp, Setaria italica
  Peptide Sequence Number=SeqID_89961
aacacaactcatctcatcctcatcagccatcacacaagctcatcatcgctcgatcttcacacaagaagatctctagcaattaatggcggcgttcatggcaaccaccaccaacaaggtggtgctcctcctgctggcggcgctcctccctctcgccaccctcgcctcccgctccgacccggccgtgcaccacggccacgccggccacggccccaagcatcaccactcgccgtcgtcgtcgccgccagcagctccgtctcctacaccggcggcgccccgg

SEQ ID NO: 23988 - DNA, 436 bp, Setaria italica
  Peptide Sequence Number=SeqID_89962
ggtagataaactgctaagataagattttgtgataagatacagtttttggctggttgttatcatgacccaactagtgaagtgtaaagaataatgaggagccagctgtagttccatatttttcatgtacagttcgaagttctatttaaatctcaccttgtgtaggttcaaatcatcctccttgcaaaataagggtaaggctgcctaaaaatatgcttccctaaccctaccttttgtgggagctctctgcactgggtatgccctatacagttttgagttctgtgattttcaaacaactattgtctatatctattgcagtgttgagagttctgaatacttgtcagatctacttaaagctcgcaatattcctcacaatgtccttaatgcgaagaacttaacttactaactaacttagtaagttaacggtaaagtaaactaa

SEQ ID NO: 23989 - DNA, 3002 bp, Setaria italica
  misc_feature (2972)..(3002): n is a, c, g, or t
  Peptide Sequence Number=SeqID_89963
atgcgacattacatacactaacaattcggaacttggatttgactatctacgtgacaacctatctcgaaacaaggaacaacttgttatgagatggccaagaccattccatttttctattgtggatgaagtggactcagtgcttatagatgagggaagaaatccattgttaataagtggagaggataatagagatgcagctaggtatccagttgctgctaaagtcgcagaacttcttatggagggtgttcattatactgttgaactaaaaggaaataatgttgatctgaccgaggatggagtcgcacatgctgagattattctcgggacagatgatttatgggatgagaatgatccatgggcaaggtttgtgatgaatgctttgaaggccaaagtgttctaccgtagggatgtccagtatattgttagggatggaaaagctatcataattaacgagctaactggccgagttgaaccaaaaagaagatggtctgatggtattcaccaagcagtagaagcaaaagagggcctaaaaatccaggactcagtaattgtggctcaaatcacatatcagtcactttttaagctttatcctaagctttctgggatgacaggaactgccaagacagaggaaaaggaattttaaagatgtttaagattcccgttattgaagtgcccacgaatctgccaaatatacgggtggacttgcctatccaagcttttgcgactgcacgaggcaaatggctatatgtacgggctgaagtagagtctatgttccaattaggccgccctgttttagttggaactacaagtgttgagagttctgaatacttgtcagatctacttaaagctcgcaatattcctcacaatgtccttaatgcgagaccaaagtatgctgcaagagaagctgaaataattgcacaagctggacgaaaacatgctattacaatttcaactaatatggctggcagaggaacagacattattttaggtggtaaccccaaaatgcttgcaaaagaaatagtagaagatagcatacttccatttctgacccatgacccccctgatattgacatggagggagaatcgacatcccacaagggtctctcaaaaatagaaatcgggccatcatctctaggtctgcttgccaaagctgcaatcatggcaaaatatgttcacaaaagtgagagagatgaatggtcttttggcaaggcaaaatccactattgctgaatctatagaaatgggtcaaacgattgggatggagaagctacaagagcagttggctgaagagtctgagatgtaccctctttgtgatgcaataggacttgcttatctcagtgtcttaagggattgtgaaattcattgttctgctgaaggtactgaggtgaagagattaggtgggctccatgtagtaggaacttctttgcatgagtcacgccgaattgataaccaattgcgtggcagagcgggcagacagggtgatcctgggtcgacacggtttatggtgagcttacaagatgaaatattccagaaatttaatttggacactgaatgggctgtgaggcttatatcaagtataacaaacggtgaagatatagctattgaaagcaatgttgttgtaaaacagcttctaggtcttcagatcaacgcagagaaatattattttggaataaggaaaagtcttgttgagttcgatgaagttctggaggtccaaagaaagcatgtatacaaccttaggcaggtgatattatctggtgactctgaaagctgcagtgaacaaattttccagtacatgcaagcagtagctgatgaaattgttttgctaaatgttgatccccaaaagcctcccaagacttggaatctggcaaggcttttggatgaatttgtcagtctacaggggaagcttctgattgaatcattcaaggacatccaagaggaaaacttacaatcagcacttgaacaaatgcatggtagtggctctgtgaaggctgatagatttgctcttccaaacatgccggtgccacctgattcattcagaggaatccgaaagaaaagatcttctataatgcggtggtttgccatttgtgttgatgatacgtcaaagaaagggagatatacaaacactgtcaatctgctccgcaaatattttggggatttcctaatagctacgtacctgaacgctgtgcaagagtcccgttacgatgacgcatatataagtggaatcgagcgtgaagttcttttgaagactcttgatgctttatggaaggaccatttggtaaacatgaacaagcttagttctgcggtcaatgttcggagcttcgggcatagaaatcccctagaagaatacaagattgacggctgccgcttcttcatctcaatgcttagtgccacacggcgactgactgtggaagccctactgcactactggtcgtctcccatggaatccgacgagatcttcaacacagaggatcaatagctgagaacaccagtctaatgcagagtaaagtttcaagggagcagtagagcaagagatctagtagtgcacatttgtacactcccgagccccgattcgcctcctctcctttgttgaagaatcagcatcgcagtgggctcctccaactcctgagttgggctctcacatatgggtgccctaacacaggagattccggatagtttaggcattaacatgtttgtgctctggctaaacatgtttagccagagtacaaggatacataggaactcagagggtgggtagtgtgaacccttaagatcactagttagtacgccggcactgacatcgccatcatgtaccaaacccttgcatcttaacgcacacaagagaatgaaccgcacaccactgcattccaccgatcccgcaatcggcatgacgatattaagattgcaacaccgcaaagcttggagcttgtttgcacgctacaactttgcaactgggttcatctcatccaccatggnnnnnnnnnnnnnnnnnnnnnnnnnnnnnnn

SEQ ID NO: 23990 - DNA, 422 bp, Setaria italica
  Peptide Sequence Number=SeqID_89964
ttaaatacttacattagcagctgcagtcgctgattgcattacatgtaacatcattacgagtaaaatgcatctcaatgagttcatctccttcagtgctgccaagatagtgcccatctccagttatgccagcacttgaaactaattttccttttggaaaaaaatctagtgggaatgattttaccagtgtatagaaaaattagaaaagctacaaaaactccgaactggcaaaagaccactattgttgttccccgaaagctggaaatcacgtcggctgatgataggtttcatatttcgtgggcccacatttcagggacgacccatgttgttaataatctagcactccgaggtgtccttctcgtcatcctgctcaccgccgcctcggacgactccggcgacctgcaccgtctctacgctcttggaat

SEQ ID NO: 23991 - DNA, 1353 bp, Setaria italica
  Peptide Sequence Number=SeqID_89965
aaatcatttgcatttacatagctacatagcattttttttctgctcccatgcaaggagactcggttcagctatccaaaccactagcttctacagtactactcatgcatccttcatccttgcaggagttgaatttacagaactagccttaaaacttggcctgctaaccaagtttaggttcagtcacctaacacctttttgtgattaatttaactcatactcatcatatatatcttcccaaatgcaaagcaaaaaccataaaagcagcaaaataaaaaaaggttaactacacttagcactaggttaattttgattaatcggctgatgataggtttcatatttcgtgggcccacatttcagggacgacccatgttgttaataatctagcactccgaggtgtccttctcgtcatcctgctcaccgccgcctcggacgactccggcgacctgcaccgtctctacgctcttggaataccacctcgcccagaagaggtagttgaagaagttgaggatgctgaggccggcgaggagccagtagaagaggtccagcctgtccttgttgaggtcgttgttggcgagccagccgccatcgccggcggcggaggtgctcgtgaccctgttgacgagcgacacgagcacggagctgaggtagaagccgaaggagtaggagcagtaggtcatggaggtcaggaaggcctgcatgccggcgagcgactgcttgtagaagaattcgatgagcccgacggcggtgaacatctcggagagcccgaacaccaggaactgcggcgcgatccagaggatggagaggaggtggccgttgccgtcggcggcggcgtggaggcgccgggcttcgacgagcgcggcggcgaccatggagaaggtgacggcgaagagccccacgccgatgcgctggagcggggtgatccccgtggcgacgccggtgaggcggcgcacggcgggcacgaatgcggcctcgtaggccgggacgagggccacgagcatggcgtaggggatcgcctgcagcgacgccggtgggacatggaaggaggcggcgaggcgggtgtccatggcgctgccctgctgcacggagaaggtctgcagctgggcgaggatggtgttgaagacgatggtgcacgcgaagatggggaccacgcacaggagcaccttcacctgctccacctccgccggcgtgcacaggcgccacgggctctccttccccgccgacgacgccccgccggggccgtcctgggccttcacgcatgccttgtccaagaacctgggtatttgcaaacgaagattaatcattaatgtgagacagtgagagaatttaacaaaccttgcaggaaactaatttgat

SEQ ID NO: 23992 - DNA, 458 bp, Setaria italica
  Peptide Sequence Number=SeqID_89966
gaacggccgcatcaaacgcacaccataggacactttgagacggcgccctacatgcgcagccggcgggcagcgtgcttgtgcacggccacgagggagacgtcgtcgacgaccgggccgcacagcgtgccgtcgaacttcatgtggtagttggagctgtggaacacgatgcgcgtcaggttctcggccgccgcgaagtccaggtcgacgcgcctgtgcccgccggtgccgcgggactcgtacgacaccttggtcgtcgccttccccgcgtacgcgtccacgcccagggacccgccgcacccgttggccccgtcgccgacggagaaggagagcctgtaccaccgcccgggcacggtgcgcacctcctgcaccagcgcgcactccatgccggccaccagctccacggcgcgcgcgccgcgaggcaccgcgtggtgcgccgcgtccacgtacttgaccacctt

SEQ ID NO: 23993 - DNA, 255 bp, Setaria italica
  Peptide Sequence Number=SeqID_89967
ccgggtactcgcagcgtggatgagaccgtcagcattcccaagctctgtcacggttgcagtttggtgaccggggtgtcaaacatgggggcgattcaggagcacggctgtgatcccaagtaattcctgttactaaccagcagatagagcacgccggcgatcaggaccgcccgataccgaccgagccgcgagtcggcggctgccgcgccggcgagcggcagcaccatctcggttccggtccacgcgttcacggcggcg

SEQ ID NO: 23994 - DNA, 1275 bp, Setaria italica
  Peptide Sequence Number=SeqID_89968
cggaaggcgtcgggcacctggtcgtagaagaactcctggagccctatctccgccagcacaaccgcgacaccgatcagcacgtactgaggcagcatccaccacagcctcatcggcaacaccgcgtccggctcgtccaccaaacccgcctccctggcgactcggagccgcctggcttcgaccagcgccgcgacgaccatggcggcgccggcggtggccatcccggcgccgatgcgccggagcgtcgtgaggcccgcgtggtgccccgtgatgcgcctcacgaggggcacgaacaggcggtcgtagaccgggagcgtggcgatcatggtgacgctgaggaagaactgcagcgccgcgggcggcacgacgaggcccgtgcccatgccgaggcgccggtccagcgtgctgccctgcttggtgaacagggtggagacctgggcaacgatggctgcgaagatcaggctcgtcacccatatcggcagcagcttgacgacgagtccttttcctttaccgtcctcaggttcccctgttagaagccgttcggtgtcgccggcgtccttgcgacggaacaccctcgccgcccacgtcctcacggtctcggcaagccggatgccatcgacgggtcgctccgcacggtacgtgggcgtgccaagcaagaagacggcgaggtacagcaccatcgtggcccagcacgcggcgaacccggcggtccagctgacgttgtcctcgacgtagctcagcccggttgtcgcgatgccgtagccacaggagatggagaagtggaaccagttgaagtaggagctccgggacgcgcgggagctggggtcctcgccgtcgcttggcgcgaactggtcggcaccgagggcctccgcgcacggcctgtggaagcctcgcgccgccgccaactggtagagcgcgacgtagaagaaggccagctgcgcgaaggacggcgagctcgccgcgtgaggttccgggactcgcagcgtggatgagaccgtcagcattcccaagctcagcagatagagcacgccggcgatcaggaccgcccgataccgaccgagccgcgagtcggcggctgccgcgccggcgagcggcagcaccatctcggttccggtccacgcgttcacggcggcggcggcggccgccgtggacatgccgaggtggcgggtcaggtacatgatcaggttgctctgcacgccgcagaacccgacaagctccaagaacgagatcgcgaggaggaagcacgcggcgcgccagccgccgcggccgtcggcgagt

SEQ ID NO: 23995 - DNA, 640 bp, Setaria italica
  Peptide Sequence Number=SeqID_89969
gcgccggagcaagatcgtgaactggttcgcccagctcgtgcacccgctgcagctctccgccggcggcagtggcaggggctcggcgccgtcctgcgcgtgctctgtggtggcggcgttgatggacgccttcacccttggggacagcaccttgttgtaagacgagatcaacgactgcttcacgttgccgccttctgctgtgaaattgcaatctgcttgagcaaaaccatttgcgaggtcgagcatgaagtcggccgggttgacgtggaaccccggcgcgaagccgacggaggcgaagtagtccatggcgtcgcggccggcgccgaagtagaggcagctgccctcggcgaggagcaggacggagtcgaacatccggtacacccgcgacgacggctggtgcaccgacatcaccaccgttcgccccttcctggccagcgccgagagcgtggcgacgaggcgggcggcggcggtggagtcgagccccgacgtgggctcgtccaggatgagcaggctcgggttgacgagcagctcgtgcccgatgctgacgcgcttccgctcgccccccgacacgccgcgcacgaacgcgttcccgacgacggtgtcggcgcacgctgcgagcccgagctcggcgatcacggcctcg

SEQ ID NO: 23996 - DNA, 138 bp, Setaria italica
  Peptide Sequence Number=SeqID_89970
ggaggagcgaatctgtaaagtaataagctctccctgcctggctgaagccgaagcgaggtttcagatagcttctgaaggtgtcgcagacgtcaaggattgagaccaattgaccatctacctctacttactacagtggca

SEQ ID NO: 23997 - DNA, 340 bp, Setaria italica
  Peptide Sequence Number=SeqID_89971
cgtcctgtgcgtgtggaagaagggcaagggcaagaaggccaaggtgctcatgcctctgctcgccgccgccgtgccggcgctgctctactccgccacgggggccgcgttcgccgccggcgccgacatgtcctactgctccgcgtacggcaagcgcgtcagcgtctgcacggggagcgccgccggcagcagcagcaacttctgcagccaggtgcacatcgccgtctacctctcgctggcggcggcgatcgtcgtctccgccgccgaggtggtgagggccttgggagggtcggggtccgatggcggatcggactcggactccagctccagctccgagtccggt

SEQ ID NO: 23998 - DNA, 509 bp, Setaria italica
  Peptide Sequence Number=SeqID_89972
atgttcgtccacctgataggcttcccaagagtgagaccacgctcagacagcctactaggatttcttgctgaaactcggttatgtggagatctttctgtatgtagatgatgcagccactcatgacaccaacatcgtagccgaggaggatgccgttgagcgacgcgaagagcgcgcagctgaaggcgtaccgctggccccggcggcggcgctggctctgcgcctcggcacggtgcagccactccgcctcgtccagttcctccccctcttccccgccgacgagctccatcctccggtactcctgcttcgtcgccgccgtcgccggcctcatcttcactgactccattcgccggctgcgtgcgagagacacacagagaggcagaggagtcaagaagctgccgcctgcaactactgtgttcgtgagacctgcatgtgtgtgatctccctcttcctcagatctgataccagggctccaaatgcacgcctggctctagcgtttgcttgccccgctt

SEQ ID NO: 23999 - DNA, 313 bp, Setaria italica
  misc_feature (260)..(260): n is a, c, g, or t
  Peptide Sequence Number=SeqID_89973
ccgacggcaacaacttctacttccacggcaagaaggaccaggacttctgcatcctctccgacgccggcctccacatcaacgcgcacttcatcggcaagcgcaaccccgccatgagccgcgacttcacctggatccaggccctcggcatccgcttcgcccaccaccgcctctacgtcggcgccgccaggaccgcccagtgggacgccgccgccgaccacctcaccatcgccttcgacgacgaggacgtcgagctgccggcntccgtcggcgccagggtgggccaccccccacgcgccggcgctctccgtcacca

SEQ ID NO: 24000 - DNA, 248 bp, Setaria italica
  Peptide Sequence Number=SeqID_89974
tcggactacccaacccagtgcacaacagcacacgacgatctaattaagaagatggccggccgccggactactagcttggttgtggtggctgcccttgtggccgtgtgcgccgccgccgcctccgtcgcggcgcagcagactgatccgccgccgccgccgctgccgtccaactaccacatcatgaccccgggcaagtacaagagggaccagcagctggcctgcaaagacgacaagaccaacaagcccag

SEQ ID NO: 24001 - DNA, 325 bp, Setaria italica
  Peptide Sequence Number=SeqID_89975
atcatcattgatctaacagcacacatggcgtcgacgacggtgatgcggctggtgctggtcatggtgtgcttggcggcgtttgccgtcgtgcagtcggcttcacaggcgccgcgcttggcggtggccaccccgtcgaagaataagaacacgcagcacaagtgcaccaacaccaggactaacaagaccacctgcacggccagctgcaacaaccgatgccctcacaagtgcctcatccattgcccaagctgcaagacattctgcctgtgcgacttctaccccggcgtctcctgcggcgaccctcgcttcaccggcgccgacggcaaca

SEQ ID NO: 24002 - DNA, 1350 bp, Setaria italica
  Peptide Sequence Number=SeqID_89976
ccatcgatcatcattgatctaacagcacacatggcgtcgacgacggtgatgcggctggtgctggtcatggtgtgcttggcggcgtttgccgtcgtgcagtcggcttcacaggcgccgcgcttggcggtggccaccccgtcgaagaataagcacacactgcacccagccatatcagttctcaaagctccagtagcagtagccaccaatggcccctgcatgggtggttgccgccctggtcggcctgtgcgccgccgccgcctccgtcgcggcgcagcagactgatccgccgccgcggcggccgctgccgtccaactaccacatcatgaccccgggcaggtacaagagggaccagcagctggcctgcaacgacgacaagaccaacaagcccagctgcagcgccaagtgcaacaagcgatgccccaaccagtgcatcgtcctctgcccaggatgcaagaccttctgcatgtgcgacttctaccccggcgtctcctgcggcgaccctcgcttcaccggcgccgacggcaacaacttctacttccacggcaagaaggaccaggatttctgcatcctctccgacgccaacctccacatcaacgcccacttcatcggcaagcgcaaccccgccatgagccgcgacttcacctggatccaggccctcggcatccgcttcgccgaccaccgcctctacatgggcgccgccaagaccgccaagtggagcaacgacgtcgaccgcctggagcttgccctggacgacgaggcggtgagcatccccgccgaggccggcgcgcggtgggtgtcggccgccgtgccggggctgtcggtgacgaggaccaccgcggccaacggcgtgcgggtgcagctggcgggggtgctggacatcatcgccagcgtggtgcccatcacggaggaggactcgcgcgtccacaactacggcgtaaccgacgacgacagcctcgcgcatctcgacctgggcttcaagttctacgacctcaccgacaacgtccatggcgtgctcgggcagacgtaccgctccgactacgtgaaccagctgagcgtgagcgccaacatgcccatcatgggcggggcgcccaagtacgtgtcctcagacatcttcgccaccgactgtgcggtcgccaggttcgccggcatctccatggtcaccgccaaggcctactaagtaccacccatcgaattccgccgtcggccaagtccaactacggcgatcgagtagcataacaccagagatactatactgatcagatcagttggccaagattttattacgacatgcatgaataaatttgtgagcaacatgacagtaatggatgttgagttagaaaaaaaaaaaaa

SEQ ID NO: 24003 - DNA, 732 bp, Setaria italica
  Peptide Sequence Number=SeqID_89977
caaacacagccagcagcagcagccgcagcagcagcaatcaagagagccatccatcgatcaataatggcgcggtggtcggcgccgaccgccgccgcggtggccaccgtgctgggcgcgagccttctgtacatggcgcttgtggcgtcggctcagccgccgctgccgggcaacgtgcaggtcatcagcatgaacggcaagcgcaacagcaagttcacctgcaccgacaccaggaagaactcaaaacgccccgggtgcacggccacctgccccaaccgctgccccaagaagtgcctcgtcctctgccccacctgcaagaccttctgcctgtgcgacttctaccccggcgtctcctgcggcgaccctcgcttcaccggcgccgacggcaacaacttctacttccacggcaagaaggaccaggacttctgcatcctctccgacgccggcctccacatcaacgcccacttcatcggcaagcgcaacccctccatgagccgcgacttcacatggatccaggccctcggcatccgcttcgccgaccaccgcctctacatgggcgccgccaagaccgccaagtggagcaacgacgtcgaccgcctcgagctggccttcgacggcgcacccatcgacatccctaccgagataggcgccgtgtggcagtccaccgccgtgcctgggctcaccgtcgccaggaccgccaccaccaacggcgtcagggtgcatctcaagggtgcg

SEQ ID NO: 24004 - DNA, 284 bp, Setaria italica
  Peptide Sequence Number=SeqID_89978
aaataggtgggccgtcattctgtgggaacaggagttaagtccaaccccccaaaagaccaacactccacaatccacaccacatcagggaacaagctaaaatctcaaaggaaaaaaaaacagaatggaagcgaaaaaaaggatatctcggcttgcgccgacgcggcggcgagcagctcggggttgacctcgacgcggtccttcttccgctcgcacctcatctgcggcgacgccccccattattgtacggtcggttcgcgccgcccttgctcgaaggcttcgtatcc

SEQ ID NO: 24005 - DNA, 528 bp, Setaria italica
  misc_feature (1)..(82): n is a, c, g, or t
  Peptide Sequence Number=SeqID_89979
nnnnnnnnnnnnnnnnnnnnnnnnnnnnnnnnnnnnnnnnnnnnnnnnnnnnnnnnnnnnnnnnnnnnnnnnnnnnnnnnnngtttcttccatgtccttgcatcgaacaatttgtgcacacaagttctttccagtcgacgtcttgcctttgataaaaagctttggcgtcacagaagcaaggtgtgaatgactggagctggagcatttgaacaaaatggattgctacaaggttcctttttcagaattacatagcaaagacgcccttatctttgcctgccccagaaacatcgcgtcttagcaacagcacttcaggtagagaatctacagtatacagactacaagctcaggccagccatgaaaaggatttgaaaccacgcagctttggcagaaggattaggaaccccagcaccacaaagcaaagccagactgttggcagcttccacagcagcacagctctgaaaggagatgggtatgtacagttccattgtctatcccttcctccatcttaatgtctggctttcacgaagc

SEQ ID NO: 24006 - DNA, 593 bp, Setaria italica
  Peptide Sequence Number=SeqID_89980
aaggtcgatgactggagctatagcaagagaagggcagcacgctgttgtccaccctgtgactgaaaggcaatcacttggatttttccaaccttttgagcatcttcgctaaaacaagaaaatatcagccccacaaagcctgtatccagcaactgaaacattgcttgggtacgaacatctacatgagacggcagcacagtgatgtgagggtgcgagtggtaccatccgatcacccttgtagttttcttaatggtggccgtcattctctcggcttgcgccgacgcggcggcgagcagctcggggttgacctcgacgcggtccttcttccgctcgcacctcatctgcggcgacgccccccatatgacggcggtcgcgccgcccttgctcgaaggctcgatgtcgccgaggaggaggcccatgacctcctcggtctcggtggtgagggcatgggagaggcacgtgagccacacctcctcgccgatcttcaccgaggtcagcgacatctccgccgccgccgaccgcggtcgccgccgatcgactggggtttgggggcggcggtggactggtgggtgcggccgtgcggggctcttctgagc

SEQ ID NO: 24007 - DNA, 1511 bp, Setaria italica
  Peptide Sequence Number=SeqID_89981
ttttttgaatgactggagctggagcatttgaacaaaatggattgctacaaggttcctttttcagaattacatagcaaagacgcccttatctttgcctgccccagaaacatcgcgtcttagcaacagcactgaatattgcctgttgtggctttacagactacaagctcaggccagccatgaaaaggatttgaaaccacgcagctttggcagaaggattaggaaccccagcaccacaaagcaaagccagactgttggcagcttccacagcagcacagctctgaaaggagatgggtatgtacagttccattgtctatcccttcctccatcttaatgtctggcgtttcacgaagcattcagtaaagccacaacaggcaatattcatcaccacaacagggcgagaagattggcatcagcaagccctcctccggctgccaccgctagggcttctagggctcctcgggctcccttggttggagaaaggatgcctgttctgggccattggtgaactgctgccgacagacccatgattcataaagcgacggggagaaacatttctcatgcctagggtctctgcctcaagttgtttagcctcctcttgtaacatagatagccgaagttcattttccttcacgcgatcctgaagtacagttatagctggactcaaacaatattccattagtttacagagagaagagttgtatgtagatgtatggtgaatagatgtaaggggatgaattttcccatcacaaatattttgttgcatagcttgattatatgctgtttgctcctcttcgaaaaggactcgttgcatatcacagtaagaggtcattgtggtgtccagcttgagcaggtgccttgtcgggagcacaataagtggcacctccttccttacatactctgcaccgcttatgtccatatttgaccggtgcaaagcttcctggatgcttggggtcatatccgaatcatatggatccatagacacttcttgtgtgttatcaggattgtacggaatgacagcattttctctgggctgatgctttgctgaatgatttgtgtcaggatgggagtagaaatccatatctggagatcttccccaggccttgctattctttgaagctctggaatcccctgtgtcctgttcgatgccttcgaatgcagaatgtggggtaaatgcattctctgatgaactccaggatgaatcaaggtcgatgactggagctatagcaagaggaagggcagcacgctgttgtccaccctgtgactgaaaggcaatcacttggatttttccaaccttttgagcatcttcgctaaaacaagaaaatatcagccccacaaagcctgtatccagcaactgaaacattgcttgggtacgaacatctacatgagacggcagcacagtgatgtgagggtgcgagtggtaccatccgatcacccttgtagttttcttaatggtggccgtcattctctcggggtctttgtcgttccgttaacgtttacggttcggttcgtta

SEQ ID NO: 24008 - DNA, 310 bp, Setaria italica
  Peptide Sequence Number=SeqID_89982
aaacaccaagcaactacagcaactctgtctctgcccccctgctcctagcacatgggggtagtcgtctgtcttgatctgccgctgccgagctccaagatcttcggtcggagaaattaaagcatactagatatgatctgataggataagtggctgccaatgcaagattggccgttgggcatgccagaagatacaccccgttcccacctacacgctctagctcctatagcgccggacatcacaacgacccgaacctaacgacatacggatagggccatatggttcccagaactcgcacagacgaaaacgaaaa

SEQ ID NO: 24009 - DNA, 650 bp, Setaria italica
  misc_feature (1)..(10): n is a, c, g, or t
  Peptide Sequence Number=SeqID_89983
nnnnnnnnnnccactcgtccacaatgtaccgaatgctcacaacgttcagtcataaaaaaagcttggagtaaattttaactccacagatagtattgtccacaaactcgtcaaagggcactaccgcactagtagagtagtagtagtacaacctgatcccgtaccaacttcatcaaactcccattctagtcagtttgagaccaccatatccttaccaattgcctctccaatgattcagcacccttgccatgttcatccatggtgcgcaccgattgcctcctccactgcaacatgagctgccaccaaaatcgcacaaccactgaaaaagctgctacatcccaatgtcaggctcagcaccacctatcggtcgtgatggcactcaagcatctacaatagatggcaccgccttcttcagagtcttcctcataaaatccgagacccgcgaggatgccgcaaggcccctctcaatgcagttgaagtaatcatcctcagacatcactccatgggtgatggaagttatcaatcctcgctcaaactcctcgtctttctgttttgattcctttgaatcaaccaacttgcgtgaattgggaaacaccaggtgaacataggacttcagttgctgctcttctgccgtgttcatgtctaaaataccg

SEQ ID NO: 24010 - DNA, 282 bp, Setaria italica
  Peptide Sequence Number=SeqID_89984
cgggcagcggcggcggcacgccggggtcgccgtgcggggcgtgcaagttcctccggcgcaagtgcgcggctgagtgcgtgttcgcgccccacttctgcgccgaggacggggcggcgcagttcgcggccatccacaaggtgttcggcgccagcaacgccgccaagctgctgcagcaggtggcccccgccgaccggagcgaggcggcggccaccgtcacctacgaggcgcaggccaggctgcgcgaccccatctacggctgcgtcgcccacatcttcgcgctgc

SEQ ID NO: 24011 - DNA, 1188 bp, Setaria italica
  Peptide Sequence Number=SeqID_89985
tttttttgcagtattcagtacgcacaattcacaaccgattcacaaccagctctcgtgaatttccagttcctattgcgttaaaatttacatgaggggagtgttggcccccagagtaaccattcctgcctacacaagatatcagaggagctcaggagcaatacatcatatttctctgaagattgtacatatcgttattctgcaaattgactatgacctatgcccagagagctaatattgacatagaagcagatccaagcaccaatgcaatgtaacatgccttcttcagtttattggatgctgacatcatcttgttatggaaaaaatcaagagaaatgagatccacaagcgccatataaataaggactccggcagaaagtgaaccaagaatcccttccattattaaggcatttggattgctatcatcataaccagtcatatggaagattaacattccaagaagaattcccaatggtgtagtcaccgagaacattatgcacatataaccgactgttgccatcccaaaaccagcctgcgcgatgcatccaccgaggcccatcccctcgaacacctggtggaaggagagcgcaaccacgagcggccggattgcgcagacatcctgggacatccccatggtgaccccgatgatgacggagtggaacactatcccgatctccagcaccttggacaccatcttctgcttcctcctggcctcctcctcctcccccgccccctcccccaccacctccaacacctcatgcccaccgccatggcacccgccgccgacgaccgcgacctcgtcgctgcgcaccaaggcggcgcccttcttggccccgaagagcgccacgtcatccctgtccgtgtcggcgccgttcctaaaaacgtgcggcgcggggtccccttggtcgtcatccaggaaggcgcgcttcttggggctcatttcgccggtgagttcaaagacgggagccttcttggggattggtgcgtaggtcgtctcctggtggccgtggccgtgtccatcgccgccgccgcctccgtggccgtgggcctcaaggtgggacgaggcggagaggtcgacgaggagcgcgagcagggcgccgacgagggtgaatagccccgcgaaggggaagtcccgccagggcctgcgcgtggcgacggcgcagtcggcgagcgccgcctgcgcgtcgggga

SEQ ID NO: 24012 - DNA, 217 bp, Setaria italica
  Peptide Sequence Number=SeqID_89986
cagttgaaatgtggctcataacatcagcaactcctactttctctacagctgcaacggagtcaccacctccaattattgttgtgacacccttgccactaagctcagctaacttctttgcaattgcctcggttccaactgcaaacttcttgaattcgaaaactcccatgggtccattccaaatgactgtctgagtagtttccagggcagaactgaatgc

SEQ ID NO: 24013 - DNA, 291 bp, Setaria italica
  misc_feature (279)..(279): n is a, c, g, or t
  Peptide Sequence Number=SeqID_89987
ctgatctcccatatctaactccatagacatgaccattggcattgaggagtggtaacttaattgtaagtgaagatggaagagaagatgcttaggcagcaggaagagcttgctgcactaaaacagcgactacaggaggttgagcgtgaaaagacagatgcttgtcagccagtgcagcaggatctcattggaagtagattgttggcaaggctttcagagatgcctgcagggtttgatcaatcaatgtcaatggtcatgtctatggagttagatagtgggganatcagccacaag

SEQ ID NO: 24014 - DNA, 320 bp, Setaria italica
  Peptide Sequence Number=SeqID_89988
ggccacctcgacaccagtgatgggcacccaggcgaacagaacgcggacgcggacgccctcgagccccgtgaccgccccgggggacacggtgccggagagcttgatgtcgtagccgacgcggtagccccccacctcgaccacgcagccgtcgtcgaggaagagctcgaaggtgccgtcgttgtggaggaggtaccgccgggcggtctccgggagcagcgcgcgcgggaggccgaaccggtccatcagctccggcacggtcggcggctcgtacggcgccgcggccggggcggggcggcgaggccgagcaggaggaggagggc

SEQ ID NO: 24015 - DNA, 498 bp, Setaria italica
  misc_feature (1)..(43): n is a, c, g, or t
  misc_feature (49)..(49): n is a, c, g, or t
  Peptide Sequence Number=SeqID_89989
nnnnnnnnnnnnnnnnnnnnnnnnnnnnnnnnnnnnnnnnnnntagtcnctttagtttttttgtttttttgtgaatgacatcaccgacagtaacactgcctgaggtacacaagtttattccaaatgaattgcgctcatgttacaacatctgaactctgaagatattttggatcaacaagacaacatgtcaatctcatcctaatatcctttttaaagggaaaaaaagcaaaaactacattcctatatctgaaactaggtacagtgtcacaccgtcaactgcagggtgcaagatgcaatagaatccagaagccatgtgtgaggaatagctctgcagccaactgccgctgccgattcttgagcctcagcttctctcttcttgatgatctcattaagggagtctagattgcttccttgtggcggctctacactgtagagaattaaggatgtactagaagctcggtcttctaccaaatccgacccccctgctgcagtaatcaa

SEQ ID NO: 24016 - DNA, 237 bp, Setaria italica
  Peptide Sequence Number=SeqID_89990
agtgctagaccctccgtgctgcgccgcagcccgtcgccttggcttaagggcggtcgttgattcctgcgtcgccattgccacaatccttgccctcagagctgtcagcctctccactatgctcttgtccaggtgatcaccgagtgtttgtgagaagtctatgtttcttggtacccggagacccggaaggaagaccaccacctcgccgacactagacagtcttctctggcgtacaccagg

SEQ ID NO: 24017 - DNA, 379 bp, Setaria italica
  Peptide Sequence Number=SeqID_89991
gctgccttcaagaagagatcaacagtggcctgcctgctctcttcagagactctcggtccgtgaccgtcagcataggaccgaggaaggaggaggttgtttgcctgcaggaagcacaccatggccatcaaatgcagcacggacagcacttcgtaccaaggatctgccatggacgtctcctcagcaacatcttcttggttagcccatacaaattgtactttgtttctcagctcactccctcctttcaccagtcctagcagggccggcaagtactcttccaaagcctggaggagattagcagtgctagaccctcctgaaaatcaaagacgtgctgcgccttggcttaagggcggtcgttgattcctgcgtcgccattgccaaa

SEQ ID NO: 24018 - DNA, 475 bp, Setaria italica
  Peptide Sequence Number=SeqID_89992
attagaagccacgagtctaataggtgcaatcacaacttgaattacttagaaggatggatggcaacaaaaccatgggagaccaggcttgtggagcaaaatgatactgactcacagtttgcgaagaactgtgaggatctgaatttggctgtctccaatgctagctcagtcaaaatcagaaggaacaatgtcacaaccagggtagcagccaagcctccttcagtgttgtcagcttcttcctctgacttggtatgcgaggagagctctccatcgacatcctcggtgactccagtgtctgctaccaccaccatcttagcatcagaggcaagatcagacagtggccatatcggaggaccaaactacatgagcttgaccaagtctgccaaagcaaggctacatggctgcagcagccacagagggtcgttccagcggcaacgatctggggacatgtcaagggtggccctctcttcaatagaca

SEQ ID NO: 24019 - DNA, 453 bp, Setaria italica
  Peptide Sequence Number=SeqID_89993
tcagaaacagagacggcgggaagctgtccacctggttgtactgccgccccctgcaccgacgtgttccgccgcatgaagaacgggaagtcctgcaccctcgcgtcttcgtcgtcgccgccgccgtgggtgccggcggcgatgaaccccggcatccgcgtcaggctgcccggtatctctccctggagggaattgttcgatatgtcgaggtagaaaaggcggtccaattgcccaatccacggtgggatcgggccggcgagccggttccacgacaggtctagcactctgagcttccgaagtccggcgatccacgacgggatcgcgccgtggagctcgcagttggcgatgacgagcacctggatgctggggaaaccggcgatgccggcgtcgtccgacggcatctcctcgccgccgtggaagttcttagtgagcaccaggctcgtcaggttggggagg

SEQ ID NO: 24020 - DNA, 3017 bp, Setaria italica
  Peptide Sequence Number=SeqID_89994
gggccgtgtatggtacaagcgccgggcaggtttacatatggaacaaaaaattgaacatcaccggaaagaaagaaaaatgtcgccaaatctatgcaacacaacattacaaatttcataaacctgtgtggtcgacctgtcctgtatgaatggacatgagaaacctaattatgatacacatgctcgtttctcgtttatggcagcagacatcctcggtcctcaccgatatctggtgaaattttggctccaagatcatgccatcaaagcgcctatgtccacatccaaaacaaatgagaaacatactttgccaactgtggcttcacactctgcatgcgtcgacgagtctcagacaccaatatacagaacaatacaccaactgaagctctcgtaccctaagaccttcaagatgaaatgccagaagtagcatgtatctccaacgagtgctccggaatgtaggcaaggcctttctcccttgcagttatttgaagtgtatctagtgtaatgatcccgtccgataatggaagaagttcaagtttgacggtggtgctcgaacgtggaggaacacaccctaggggcactgcactttgcaaccacagatgagtgcagcctgaagcattacttattctatttcctccattgtcactttcttttggagaagtagccaggacagaattcaatcttcgaaagccaatttcctgctttcccaacccagatctttttgctgactcattaacaccatcaaaagaaccatttggcgtagttggagctgagttcaaggacacaactgaagaagaaccagatgcttcgggagcaaggacagttaacgtaaggttttcggatgtcatattggtagcttcaagggttaatacctgcacagggagtttaggaactcgagcaccaaggctaggatttcgcatagacagttcggatgatacagaaatcataatatcactagctgcagagggtcgccaggttgtggcttgcttgaaaaaaagtttcgattctgtgtaattgcagcggtaagataccagtacagcatactggtcacctagagcaacatagggctcaccaacctttggtgtagtatttaaagtagaaccggtcatcattgggagtgacaaagccggaggtgcatcattgttggtcctccgttcgcttgaggacttagttgctggcttgagaataaaagagtgctcctcacccctcctgagtgctagatttggtaagttgtgaccatgtccaccctcaatactagcaattggtaatgacaaaggagcacctcctttggatgcctcctcaaatacgatagtaattgcatcaatgaatacaactatatctttcgcatgagtaggagcaatgttctttactgtgacacacagaagattttccatggtacattttgcagcaaaagaatgaacctcaattggttgaatgatttcaacttttctctgccatcttttccccggtagatacacgccttctagaccacaacgtacagaatacctttcaggttccaaaggaactcctctaaacgaaagctgtccatcatttataatatcaggagtttttgcaggattttcaggcataaattcttgattttcagatattggtggtggtcttgtgttgttagctgtctgaacagaagaagctgaaggcatggagtagcttctgaagttaaatatttgagacccaggagcagagtaagattgcttgtgtgatgcacttggattgagagtagggggcgctaaagaacgaggcggtaatgtgcgatctaaaggcagcaaccaactaagcagctcccgacatggatcatcattactgtcagaaagtccatccacaagattctcaggcatgcaactgcttgatatgcttttctcaaactgaagaacttcaagcacaggatcttccagtttgttaacaccaacattaacttgcaaaacaaccactatgtctccattctgcagagaataacacttcacagtatctcgagcgactcccccagatgtgctaccatcgaaaattcctttatcagaaatggtgttgtaaacattactccttgaagccttactaattccttggctatctgaccttccatctgccatcttagttgcggttgctctttttttggaccacagaggttcatctgactcagcgatccgcacaaaaaaattggattctctgaatcttctcagcataagttctatttgctgtttttgatcttccatctgaaggcgagattgagtctccaaaatatcatgttctgaaggagaggcttcaccattgagttcaacactctgcatatcactatcaacatcctgacagccattttccccagttgttccattatcacgaccatttgcattgacaggactagatttatccgtggagtgttgcaaagaatttccattcttagacatcaccgcagcaattctgaagggggatataacctgtgtatcttgcttagaagctgacaggcatgccagtacatgaacctgctcgcctggaaaaaggaaggagcggtccaaaggccgcagctgcaccatttctgaaacatcattccaattatcagggagcctcttgtatggaattgtgatccatccttcgtcctccgcgacatcagtgtgagtccccagctgcaccggactcttcgaagctagaggcgcagaatccgcaccaacatccccaggcccattgttaacagctccatcttcgctgcgggcgggggagggctggtacgagtcctccgcgatgatgagaccctccagcgttgtggctggctttggcaacgcatcctctggaatctgtggcagctcagcaggcggcgcaggctgcgcagcagtccggtagaggaaattcatcagtggatgctactcaaattccttccggcactggaggggaactagaggggacctcgccgggcggatctcccgctcccgctaggcggggacacgcgtggcggcggaggatcagatccggtagggagtgaagggggacgaggagtcagtggggtcggcggcgat

SEQ ID NO: 24021 - DNA, 382 bp, Setaria italica
  Peptide Sequence Number=SeqID_89995
tttgttctagctcaaccagagtgcccagccataggctcaggggagggagctcttccacccagggtccgtctcgcacctacgctgtgcagagccgcccgtcgtgaggccgcagcaccctgccgacaacgtctcgagagctccgtgctccgctgccgcccgcgaattgcagctgccgccgccgctcggcagtgcacgtgcgtgggacggtgggaggctaggagagaggggggacttgcggcccatctgtgccgctcgcgacccgccagtgccgcgcccaacccgtagcaccggcaccgctccggtgctcccgactagcagcgccgccgccgccgcccctgaaacgctcggtcgagaaagggtaaagaagaaaccgtaaccggat

SEQ ID NO: 24022 - DNA, 549 bp, Setaria italica
  Peptide Sequence Number=SeqID_89996
gcaaaagaaggtgtgcctgaagaatgtctcagccttggtggtgctaccgttgttgcacagatactcaattaccgggttataagccgatgcttcaagcacaggactctttgggctcagcagtgtgcccttctccataagctcatctagcacctcaacagcactgtcacacttcccgcctgcacaaaggccttccatcaacactccatattgtcttggatccacgagaacatgcttgaactgcccgctcttccggtgcacctccaacgccccatccaaatccccagctgtgcacagcgtcctcacaagcctcagaaacaccgacttgtccttaggcgtgagcctccgctccgccatgtcatccactgccttccgggcctccgccaccctcccctgatcatcgcaaaggcctggcatcaatgcagcgaatgtcttctcgctcaacctcaaacccttctcgcccatctctgtgaacaacgctactgcctcctccatctttgtggcttcaacataccccttgatcatgacattgtaggagactgagttccgttc

SEQ ID NO: 24023 - DNA, 1041 bp, Setaria italica
  Peptide Sequence Number=SeqID_89997
ggggcgggtcttagtaaaggctccatcactggtaactacagcctcctcacttcacagatctggccacctggcaaatctaatcattgcaccataaatttcccatctacacagccactttgtacagggtggagaaagccaagaacaagtgaaagaaagaaagaagaagaagcaaagactgaccatggatggatcgagtgagctagtggacagcttgctagagatcgagagatcagagcacttatgcaggaaaaaatacacaattttttttgctcttttcaacgggccatctagcacacaagcaaactcacaacaatctacaaaacctagcccatggatgatgatgatggtgacaagcacaattcaagaggttgatcaacagcatcaggaaggagagggaggacacaaaagcttcatgtggagtgcgtggctttgtgccccatgcctgtctctcgtctttccccatcggtcacctcaccatcatagctcctgctgattggacgcggccatgtcggcggtgaccatatcggcatcggggacgccgcccttgtcctccttggccgggccgttgccgccgccgccgacgcagagcgccttccgcaggccgagcatctccctccaccggctggatcccttgccggcggcggaggccctctcgttgtcgtcgccgccgcggagctcgtcgcggagcgtggtgggcgggcggccggcgaaggcgccgttgtccttgaggggcaggattctgcccttggagaagagctggtccgcggccatcatggggtggctgcccaccgagaactcgaagttgaggtcctcctcctggcaccgcaggctcatcgcccggttctgcaccggtggcggcggctccacggcgaagtcgctggagaaggagatgcgcgggcccagcgccgccgccggcggctgcggcccgccgccgaaccccgccgcgccgtccgggttgtacatgttgatgcacgccattattatcccgcggtcgtggctctggcctgacctcctcgcgcgcttctgctccctctcctgcgc

SEQ ID NO: 24024 - DNA, 1381 bp, Setaria italica
  Peptide Sequence Number=SeqID_89998
tcggcttgagagcaagaggagaaccagcagagctagctagagctcgatcatggctgccagcaagaagcttgccaccgccgccgtcctcgtcagcttgctggcgctcctcgtcgggccctcggcgggcctgctggacctctgccccgtcttcgtaggctggggggccctccagagcttattgaactccctcatatgtgggctcccgggcggcaattacactcctcccaccgtcccgagtaatccgctcggtttcggctactacaacaactccaacaacaatgcctcctactgccccgacgcggaagccgccgtgacggccgccgtggagaaggccatcaagcagcagggccgcggcgttggcgccggcatcatccgcctcttcttccacgacgccttcgtccggggctgcgatgcctccgtcctcctcaacaacacggtcgccgcggggaacaacacggagagggaaggccctcccaacaaggacagcctgcgcgggttcgacgtgatcgacgcggccaaggaggcgaccaaggccgcctgcggcggccgcaacgtggtgtcgtgcgccgacatcctcgcccttgctgcccgcgacgcgtcccacatcctcagcaacggcaggatcaagttcgccatgccgacggggcgcttcgacgggcgcgagtccttcgccagggagaccatccagctgcccggaccggactccaccctggaggacctcgtgaggatgttcaaagtccaggggctcaacgaaaccgacgtggtcaccctctccggcgcgcacagcatcggccgcgcccgctgcctgttcctcacgaaggaccgcctgtcggccatgaactccacgtacgccggtcagctgaatgagacctgcaagatcaacgacacggtgaaccaggaccccttcagccccgaccgcgaccccaacaacctggacaaccagtactacaagaacatcgacaagttcgtgctgttcaaatcggacgccgtgctcctgtcgtcggagacgaccaagaagcaggtggaggcgaacgccgccaatgcgaccaagtttgaggccgacttcgcggcggcgatggtgaagatgggcaacatcggggtcaagaccacccacgtccccggcgtcaccgagatcagggaggtgtgctggagggtcaacaacgcttagtccggcacgtccgcggcatgtgatggaggatatgcgtgcagattatttcctcatcgagtaccaataagacaataattgttgttcctgttgttttctgctacaattgtgtgtatgtacttttgttgttgcatatatgtatttattataaatattttattttaaaaaatgcattacacgacttgtgtagcggttatcatcataccaaaaaaaaaa

SEQ ID NO: 24025 - DNA, 184 bp, Setaria italica
  Peptide Sequence Number=SeqID_89999
cccgcttgtcactagcttgggccttggagcttttgccgcacccgtggcttggagccactcgatcgatcgaccccgtcgtcgtcggccctgcagctagcttgcaccgtcgaccgtagaagctaagcgcgggcccgggaatggcgtcgaccaccaccaccaccaccaccgtggaggacctccccgc

SEQ ID NO: 24026 - DNA, 460 bp, Setaria italica
  Peptide Sequence Number=SeqID_90000
ccagttcatgtctcaactttccaatgtctgatcagcaaagtcactccagcagctatggactcctcaacactcagccggatgtgcaatgcctagtttgcacaagaccttttactctggatactgagattgctgatagctttgaagctttagccatatgcagggagtgcaagatgactgtgcttagtgacaacaacagggatgagcctaccagaactaatcgacaaacaagatggcgaaggcaaagatccagggtttcaaggcatgaacccatagaggacgctttctcacagcagttctcccagttgatcaacttagctagacaaggtcatgaagcagatgttgattctccaacagtcgcacgtcagcatgcatcatatagttctacgccaaaccgaccccaaagatggcacggttctgatgatgagagtgatggtttcagttatgctgattctgtgtttgg

SEQ ID NO: 24027 - DNA, 662 bp, Setaria italica
  Peptide Sequence Number=SeqID_90001
gaagaaacttcttatgaacctgaggttgaaggaatttctaatacagctggtggtacaatggaagagactaatgcacatgaacatgctgtttattctgcacaggagccaaatggagcacatgggcgccatagatggctgtttattgcagcagctccagtttcccttgtatcatgccaattatagaatgcagaattatatactattgtgtggaggttgtatgttttcacgaggtaaaacaggaagggtaaatttgcaagcagagtgccagaaatcaaggagctacaagtttactgatgaatacttgccacattttcaaggtggtatctgccctgcacccaggatctgaaagcaatctaaacaatgagaaaaggtcagtaggtcaggaaaaggacaagccatcactcatatgttcattaccaagtattttaagctagagcaccataccagtagtgattgccttggatatggacccagactgtactggacaaaacctggtaatggcagagttgaaggtggttcttgcatgcctgctgaccaaattctcattctcaatgtcacccgggtatcaacacacaccgtcatttcggttggccattgagcctgagttcggcatgaccctcacagtaacaaggctgccatgatctctgttttcctgatgacaa

SEQ ID NO: 24028 - DNA, 1443 bp, Setaria italica
  Peptide Sequence Number=SeqID_90002
taaaaaagaaaaaactttaaaactaaacaaaacggaacaaagttaactacccaagttagaatacatagtcttcgtactaagacaaaggggtcatgaagcagatgttgattctccaacagtcgcacgtcagcatgcatcatatagttctacgccaaaccgaccccaaagatggcacggttcagatgatgagagtgatggtttcagttatgctgattctgtgtttggtgaaattgaatcaaatatcagttttggtgatgatggtggggaatcagatgcttctcttgagcaccaaaccacaatgggaagggagattgtcattcaacttgacagtgagagctacatgaacacagatacagatattgatcccatgaatgctggactggaccagtgggattcagatgatccagaagatgatgaagatgagcagtcagaagaatctgatttggatgaagcaggcaacgccatgcaggagcgctggcagccatggcatgatatcgccccaagtgaattgaatgagcaggaatctgaagatactgtgtggacctggagaatagctggaaaccaaggaataaatgggactaatttgaatgcagacacagaagggcgagaaatcaggagacattttactgggaatcctggtgattatgttgatgcaagacagtttgaaatgcttctagaacagtttgctgaggataacaataccacaagaggacctccacctgcagcgacatcttctgttgaaaatcttgcatctgtggtcatctccaccagcaatgagataaatggtgatttaatgtgtccagtctgcaaagatgagatgcctatcaaaactgtagcaaaacagctaccgtgcatgcatctatatcattcatcatgtattttgccatggcttagttctaggaatacatgcccagtttgtcgatatgagcttcctacagatgacatggaatatgagaggtccaagcgtgcaacagccaatgagggaggcatccatggggtggagcgtaaccatctgcaggaaactgttgaagaaacttcttatgaacttgagattgaaggaatttctaatacagctggtgatacaattgaagagactaatgcacatgaacatgctgtttattctgcacaggagccaaatggagcaaatgggcgccatagatggctgtttattgcagcagctccagttgtaagtcttgtcagtttagctctagttctatgcttcaccaaccctgctggcaatgttagaaggcaactttaccatagatcccagagtacaactacaacacgtgtagatacaagaagaagttggtggtctatgttctaattatccagtacatacctgttgatccaaattgctgtttgatgacgtgtgattgttgccagtgttgtgttacttttttgccgtaaaattcaagtttaatttgaagttacaaaaaaaaaaaa

SEQ ID NO: 24029 - DNA, 319 bp, Setaria italica
  Peptide Sequence Number=SeqID_90003
ttctcgcccttgacccaggcggctcccacggagccgctgccgccgaggttctggatgttgacgagtaagaagtagtttgagccggcgatgctgaagcgcacgccgccgctgcgcttgcactggacccgctggtactggacagggatgatgccggcctgggcgatgccgatgttctcaaacgccggctgcgacatgtcgaagtgggggcggcccgggccgcaccagccgccgttggggagcgcgtagttgggcgggcacaggttggtggccgagaccgtaatcgacgtgccgggcttgcagtactggccgccctggcgtc

SEQ ID NO: 24030 - DNA, 247 bp, Setaria italica
  Peptide Sequence Number=SeqID_90004
attgttgaatatcctaagagaatctaactgaaggctacttccttttgtagttaccaaatttgggtctgcagaaaaagatatagcattcccttcgctcagaaatcgctcaatagcatgagcaactaaccatacagagtcataagcacgcatagagtaagcgattccattcctggtaagattattccacttgggcaacagtgcatgctgaatttcagaaacagtgacatgctgccgaagcacaagaaca

SEQ ID NO: 24031 - DNA, 498 bp, Setaria italica
  Peptide Sequence Number=SeqID_90005
agaggattacgagatttacacggaagagctaatatggaggtgggtagccaaaggattcatcactaaagtgaaggatcaatcagcagatcaagtcactgagaattacttcaatgagcttgtaaacagaagcttgatccaaccaatatacatccagtatgacggccgggcatgtgcttgtcgagtgcatgatatggtgcttgagctcatcgtgtcactgtcaaaagatgggaatttttccagcatagtggaagaccaaagctacaaagtaggtggtcacacgattcgtaggctctctgtacaatctgaacatttgggagatgaagtaatacaggagattatggataagtggtcgcaggttcgttccattagcttttatggattgcaggagcaaggaatccctcatctgcaagagctgtattccttgagagtacttggtttttttattatagcagccatcttggtaaccaacacgttaaacatataggaagctgagactgc

SEQ ID NO: 24032 - DNA, 1661 bp, Setaria italica
  Peptide Sequence Number=SeqID_90006
cttatgagattagcagactgataagggcatttgaagcacaagtgaagaagcactgatgatcagtaatttctcattttcagattgtagtatcctctgagatgatggggggaagaaaatcgggcttatggtaaatcctggtgaatattcatgggaggtcagcaagttctggcctgactaagtgtggtaaaaaaacagtgtgattcatcttagatcattaatgatgaggatgaagttcccaaaacgatatgtcatagtattgttgacgttcatctgcacaaatgtttgctacattgagcgtgttggtttctcaattgcttacactgtcgcagctgatgccatcagtgtgaatcaagcaaacaagggcatgatactctcaatgttctattatggttatgttttatcacagattcctggtgggtgggcagcacagagaataggaggtagacgtgttctgctactgtcattcatattgtggtctttgatatgtggtttaatgccactggatcccaacagagtaaccattctggtcctttctcgactatttgttggtgtagcacaaggtttcatatttcctgccattcacactgttctggcgcaatgggtgccaccacaggaacgctctcgctcagtatctcttactacctcagggatgtatcttggtgcagcctgtggcatgctttttttcccaagtctggtgaagaatatgggaccccagtcagttttctttgttgaagcggtattgggagtagtatggtctgtaatatggttgaaattttccagtgatccacctcgtactgatcttccaaaggtatcaatgccaaaagtggcatctcgagacatgatcaaggcacaagcaggaggggttgtcgcacctcgcactgtaaagatcccatggcgaaggataatcttcagtcttcctgtttgggcaattgttgtcaacaacttcaccttccactatgccctgtatgttcttatgaactggctccctacctattttgagctaggccttaggcttaggctccaggatatgggttcctcaaagatgcttccctatttcaacatgttcattttctccaatatcggtggtgtggttgctgatcacttgattacaaggaggattttatctgttaccaagacaaggaagcttctgaacaccattgggttcgttgtctcagcatttgcactcatggcccttccttttttcagtacaccctcaggcactgtaacatgttcagcgatatctcttggttttctggctctaggaagagcagggtttgctgtaaaccatatggatgttgctccaaagtttgcagggatagtaatgggggtctcaaatacggcgggtacactggctggaattgttggtgtcggcctcactgggaatattctggagggggcaaaggcttctaacaaggatctaacaaacacggaaacctggaaaacagttcttttttgttccagcatacctttgtatttttagttctgtgatttttttggccttctcgaccggcgaaaaggtcttcgaataaagggtgattagttttgcttttttttttcttatttacggtgaggcaggatagcaaaacgggaatctcacatgtatctgtagcatttgttactaaatttcagagttctagtacttgtctattcccttaaaaaaa

SEQ ID NO: 24033 - DNA, 2129 bp, Setaria italica
  Peptide Sequence Number=SeqID_90007
cctggtgcagaaaattctgatgaaacatgtgaaagttttgcttttgcattagtcaatggtgctcttggtgtgtttgaagtccatgggcggcgaatacgagattttaggccaaagtggccctcatcatcatttgcatcttcagatggtttggttactgctatggcgtatcggcttccccatgttgtaatgggggaccgatcaggcaacattagatggtgggatgttacaacaggcctttcttcgtcttttagcactcacagggaaggcatcaggagaataaagttttctcctgttgttcatggtgatcggagtagaggacgcattgctgtgctcttctatgataatacattctcaatatttgacctgaccccttggcgaatgcccttcttcaaccacaatctcctggtacccttgtcttggagcttgattggttgtcaacccgaacaaagaaggatgagccacttgtattatgcattgccggagctgatagtagcttccgactgattgaggttaacattgactccaaaggcggttcagtttcaaagccagtggctatgaaagagaggtttcggccgatgccattttgtttgccagtattatttccaacagctcatgctttggctctgcgtatgattcttcaacttggtgtgaagccttcttggtttgaatgcaataataatgataaattaggtagcagcagctttaaggtagcaccagcatttggagatcttcgtagttacatgattgagacaacacttcctcctattggcgatgccgttgtggcagaattgctccttaaagtgttggaaccatacagaaaagagggttgcattcttgatgatggacgagccagattatattcagctgtagtgaacaagggagcgtatgcaaggtttgcatttgctgctgcgatttttggtgatttcgaagaagcacttttctggctacagctgcctcaagctcttcgccatttcctggataaatcagcaagtagatcaagagataatatctcacaatcaagtttacatcgtgattctgaacaaggctccgcattgaatcggatagtttcaagagagagatctgcttctggaaagttcgcaaaaaatgctgcgaattatgggcaattaagctcaatggcatttaagcaagagcaattgtggttcaatgcaaatgaaaggataccatggcatgacaagctcgatggtgaagaggctttgcaaaaacgtgttcatgagcttgtctctcttgggaacttagaagctgcggtctcactgttactttcgacgccccctgaaggatcaaatttttacccaaatgcattaagagcagttgtgctgtcatctgcggtttcacagtccttgcatgaacttgcagtgaaggttgttgcagccaatatggttagaacggacaaatcactatctggcacgcatcttctctgtgctgtgggaagatatcaggaagcatgttcacagcttcaagatgctgggtgctggattgatgctgctactttagccgcaagccatttgcatggatctgactatgcaagggtactgcagaggtgggcagattatgttcttcgtggtgagcataatatgtggagagctctaatactatacgttgctgctggagccctgccggaggctttggatacactccgcaagaaccagcggccagacaccgcagccatgttcttgctagcctgccatgagatctactcacaaatcacggcggaagcagagcctgctgacgacacatcagggtcagaactgacaccggagcagaatgagaagctccggttcccttccaagaatgtggctgacgaggatctgattgcagttagcgaggttttcgggcagtaccagcagaaactggttcatctttgcatggacaccgaaccgagtgctgattgatcctcgcacaccatgttacatgtccacctgctcttgtaattgtaattgtccgtgtctagctttggcttcaaatttgtgaagcttctcaacaggttgtaagttgcttccaagtttatgcgaagtttttttttttgttgttctgttggttaccgaaaacaacgagattaggtactgctgatgttggcagaatctggtggcaggagacgaggaataggcatg

SEQ ID NO: 24034 - DNA, 189 bp, Setaria italica
  Peptide Sequence Number=SeqID_90008
cgctcgcgcaccagtccagttaccagtacactactctacgccacagcacagcagcacagcagcgtccgcctaatctctccaagccctctcgtcgctctcctccccgtcccctcccctcgccacaccgcccgccgctgcccgcatcatccgcccgtcgccgggccatcgccgcctggcccgcggcttctg

SEQ ID NO: 24035 - DNA, 365 bp, Setaria italica
  Peptide Sequence Number=SeqID_90009
tttggatactgctgtgcaggccgtgccaagtagcctccaaatggatggacccacaacaagagctatgccccaagcagtgcttacaactgatagtcctagagcgtggtgttcaggacggcaaatctcaattgagtaagcctttattggcgcaagcatgccattgagagcaccgagaaccaatcttgtggtaattgccatccaatactttgtacttactccaaataaagtgttaaatataaccactgagaggacagaaaatacaattatcggttttctcccgatacgatcagccactacaccattgcctcggctttaccaatatcatctttgtttcccttcttatactacatgatcgaagatctgca

SEQ ID NO: 24036 - DNA, 438 bp, Setaria italica
  Peptide Sequence Number=SeqID_90010
cgtgtagtaaacgaccaacaaaccgagggcaaagccttacttgatcatgggtgagcaaatgcctatcggaatgggtgaggaggcgcccccgacgccgccggtgacgtcgctgtacgtcgacggctgccccggctgcgccatagagcggaagaaggagagcaacaagggcattccctacaaggagttgttctttgtcgccatcaccaccattgcctcggctttaccaatatcatctttgtttcccttcttatactacatgatcgaagatctgcatgtggcaaaaacagaacaagatattggattgtatgctggttttcttggtgcatcatactttgttggtagatttttgtcctcgctcttctggggtgtagtggctgatcgtatcgggagaaaaccgataattgtattttctgtcctctcagtggttatatttaacac

SEQ ID NO: 24037 - DNA, 598 bp, Setaria italica
  Peptide Sequence Number=SeqID_90011
agcaagataaacccggaggccaaggaggtgcgcgccgtccttggccaccgggttcacctggcctatgtcgtcgccaaggttgtgctcgccggcctccaagccactcgcgaggtggagcgcgttgtcctggtccgcgagcccggtcaggatcttccccttgccgaccaccgggtagaacacgccgcgctggtcgacgccgaggtggagggcgtcgagcctgttgctcagggcgccttcgtcgcctgacccaacggggagcccggcctccctgtcttcgacgctgaccatgtcctcctcgaagtacacggcctcgacatccccgacctctcctgcctcaaacacgtcctccaggagccactcgaggtcgtcgtccatgagcttcgtctcctccaagccagcgccgccaaagccgagcaggttcgcgaccctggcgatacgctggccttcgatggttatgctgtcgagaacctcgataatggaggccggatgggcgtggatgacgacttcgttagcggtctgacgaacgccgtcgaaccgaattttcttcatggagatcccctccacgatgtccaacctcatcaggtcgaggtgaagctct

SEQ ID NO: 24038 - DNA, 498 bp, Setaria italica
  Peptide Sequence Number=SeqID_90012
atcgtgcgaatggcctacgcgctgcagccgccggcgtcgcgcgcgcgcgtggacgtccgcttcgtgttctgcaacgtcaccgatccggtggacgcggcgctgctggcgcttgagatccggcggcacggcgacgtcgtggtgctgaactgcgccgagaacatgaacgacggcaagacgtacgcgtacctctcctccgtgccgcgcctcttcgcgtcgcgcccctacgactacgtgatgaagaccgacgacgacacgtacctgcgggtggcggagctcgccgacgagctccggggcaagccccgcgacgacgtgtacctgggctatggctacgccatgggcggccagcccatgccgttcatgcacggcatggggtacgtcgtgtcgtgggacgtcgcgagctgggtcgccggcgccgacgagatcctggcgcgcaacgacaccctggggcccgaggacctcatggtcggcaagtggctcaacctcgccgggagggggagg

SEQ ID NO: 24039 - DNA, 601 bp, Setaria italica
  Peptide Sequence Number=SeqID_90013
taagggaaataagaaaaagaaactaaaggaaaacggaacaaataagaaaagtaacgtagttactaggatgacgggcaactacaagtcccacccggacgacggcttcgaccccaacgcgatcccccgtggtggagaacatcagctaccaggacgtggtggcgacggggggtgtacaagtcggcggcgaggctcgagggcatcgacggcgcgccgttccggggaatctgcctcgccaacgtcacggcggagttttgacaagtcgaggaagtatccctggacgtgcaccgacgtggagggcgtgtcgtcggcggacgtgagccccgggcgccgtgcgaggcgctgcaggggaagcacgacggcgcctgcccgttcccgacggacacgctgcccatcgaccaggtcaccgtgcagcagtgcgcctacgacgtcccaaccccaaagggggaactaaaactgacacagactcacatccaaactggtaattaagcacgccatggccatcctccttccttattgtttgcagtagtctctgcttctgctaccttgtgaagcacagcagctagtttagtttccccttgggttggggacgtcgtaggcgcac

SEQ ID NO: 24040 - DNA, 1831 bp, Setaria italica
  Peptide Sequence Number=SeqID_90014
cccctcctcgctcctgtcctgtgaaggaagtcacgggtcacaagaggccaggccactgcggttaccagcgccgagcgaggccggcggcagcaatggcgtcgccaataatgctctcaccgttcctccatcagcttgtcctcctcctcgtcgccgcgtcgggaacagtggtggccgcgcgccaccaccactcctccccggcggagtcgaggaccgggcagagcatgtacctggcgccgagctgccgtgcgcacacggcgtcgctggccgacttcggcggcgtgggcgacgggacgacgtcgaacacggcggcgttccggtcggcggtggaccacctgtcgcagtactctggcgagggcggcggcggcgcgatgctgtacgttccggcggggaagtggctgacggggcccttcaacctgacgagccacttcacgctcttcctgcacagcgacgccgtcatcctgggatcccagaacatcagcgagtggccggtgattgcccccctgccttcgtacgggagagggagggacaagattggggggcggtacgcgagcctcatcggcggatccaacctcaccgacgtcgtcatcaccgggaacaacgggacgatcgatgggcagggcgcgatgtggtggtccaagttccaccagaacaagctcaagtacacccgtggttacctggtggagctgatgtggtccgacaccatcttcatctcgaacgtgacgctggtgaactcgccggcgtggaacatccacccggtgtacagcagcaacatcgtggtgcagggcgtgacgatccttgccccgacgcgttcccccaacacggacggcatcaacccggactcgtgctcccacgtccgcatcgaggactgctacgtcgtctccggcgacgactgcgtggccatcaagagtgggtgggacgagtacggcatcgcctacggcatgcccagcgagcacatcgtggtgcgccggctcacctgcgtgtccccgacgagcgccgttatcgcgctcggcagcgagatgtccggggggatacgggacgtgcgcgccgaggacatcacggcgatcaactccgagtccggcgtgcgcatcaagaccgccgtcggccgagggaactacgtgagggacgtgttcgtgcgggggatgaagctggacggcatgaagtacgtgttctggatgacgggcaactacaagtcccacccggacgacggcttcgaccccaacgcgatccccgtggtggagaacatcagctaccaggacgtggtggcgacgggggtgtacaagtcggcggcgaggctcgagggcatcgacggcgcgccgttccggggaatctgcctcgccaacgtcacggcggagtttgacaagtcgaggaagtatccctggacgtgcaccgacgtggagggcgtgtcgtcggcggacgtgagcccggcgccgtgcgaggcgctgcaggggaagcacgacggcgcctgcccgttcccgacggacacgctgcccatcgaccaggtcaccgtgcagcagtgcgcctacgacgtccccaaccccaaagggggaaactaaaactagctgctgtgcttcacaaggtagcagaagcagagactactgcaaacaataaggaaggaggatggccatggcgtgcttaattaccagtttggatgtgagtctgtgtcagttttcttacttggatcgcaccaactatgcaagctgttggatgcagttatcagcagagcttgcatgtctgatgaattcagaatgttgtgaaacctgacgaatccaatctgcctatgcataacacataaacatgacatagctttgcacccagaggatacaaaaaaaaa

SEQ ID NO: 24041 - DNA, 643 bp, Setaria italica
  Peptide Sequence Number=SeqID_90015
ttcttgtgcaagacggacgatgtgcgcggaaaggtggttggagatgaagcgggacgcctcggcgcccccgtggccgtcgtagacgccgacgaaggtggcggcggcgcccgtctcgacctggctgtggtcctccagcacgtcgttcgcctgcacgacggcgaaggagaactcgcccgccgcgtgccgcgcgaggtcccgcgaccacagcaggtcgtcggcaccggcgccggcgtcgccgtcttcctcatccttcctcgtaagcccgtacctccggacccggtcccagcacgcggacgcaatcctctccagccacggccacatccttcatctccctcctggactcgcccctgaaattcctcctcacctcgctccccgcccaacaactcgacagttgcgcttaaaggaggcgattgccttgcctactgcacaccaaccatcgcccaattccacctcagtcaacaagcgcaatctgcacgggagaaacggcggcgaagtcacaggagcagaaccccaagaggcgcggcctcgcagggagcactgccggattccgggggcataccaaaccaaacccgccggagatctgtgtctgtgataagacgccttcgggaccggtggtggtcggatttcggatcgcgacccgcga

SEQ ID NO: 24042 - DNA, 361 bp, Setaria italica
  Peptide Sequence Number=SeqID_90016
gattcgtggcgctgctggcggtggtgatcgcgtcgtccgtgggcatcgcggcgtactggggtcggtcgccggagcggtggaaggggtacgtcgtgctggtgccggcgtgggtcgcggggacgtggggcatccagctgctggtgcccgcggcgagggcgcccaaggtgtggggggtgccgctcgtgccgtggatgccctcgctgtccatcgccaccaacctcttcctcatgggctcgctcggcaaggacgccttcatccgcttcggcttctgcaccgccatcatgctcgtctactacgtgctcgtcggcctgcacgccacctacgacgtcgcgcacggcgcgtgcgccggggaggacgacga

SEQ ID NO: 24043 - DNA, 404 bp, Setaria italica
  Peptide Sequence Number=SeqID_90017
aacttacccatgtcactgacggagacaggcctttggacctgctcaacctattatgccattggctatgccccttcacctattaggtttttccagcagttactggtactattcgcgatgcatcaaatggcattgagtctttatcgcttgatagcatccataggaaggacacaggtaatgacaaacatgctaggggttcaagctcttatagcaatgctcatacttggaggctttgtcatatcaaaagatgatctccaaccatggatgcgctggggttattgggcctcgccattcacctattctcttaatgctgtcgctctgaatgaatttattgatagggagatggggctacggtgttcatttcgaagatgttaataccactgggagaggctgtcttgaagttccga

SEQ ID NO: 24044 - DNA, 912 bp, Setaria italica
  Peptide Sequence Number=SeqID_90018
caggcagcttttacagcgcaccaatccatgggcaactagttgaagcactacactgcactgcatcttctcagctaaaggaaaaggttgttggccagatcacatcaccaaataataatcttacatcaatatttggccctactaagtaccaacacacacaggttaacatcgcattagctctgcacctcaaacacactagtggaacacttgatacattagaacacatgataccacgaggaaagaagctgaagaatcatgcctcatcaagctgcaccaaaaaaacgtagctcctgacttcaagactatgctacgttaaaatccgtggatttctgcagtcccggtcacaaggagtacttgatcgcgagcgcacttagtatgtataaacttctattggttagacttccagatctcattggatcaactaagccatgggtgtttcaagcactgcgcagcagaaggcctgttctccggtgtgaaatctaggatcggccgaagaaaatcggcaaaaccttgggcgtcaggttcagtgaaattgtacctttcaacaagtacacagtccaggggccagaacttcagtctcctgatcctctttaaatcaccatgccgatcaaagtaatccttggaacgagttcctgagctagcaatcttccgaggcatctttccaagagtttccatcatcagtgccaagtggtcctcatcttcactgcatccctggcaattcttgggagcaaacaacaaatcaccggtggcaagctcaaaggctatgcaagcaaacgaccacatgtcagcagaatatgagtacccagaaccgatgataacctcaggagctctatactgccttgtctgtatttcaccagcaagctgctgatcagcccagcaggcgttcccaaaatcgacaatcttgcacttcaagct

SEQ ID NO: 24045 - DNA, 553 bp, Setaria italica
  Peptide Sequence Number=SeqID_90019
tctttgcatgccattaacggtaacccaaatccatatgagcaagctatctctataatcgggcgaacactgtcaccttttgatgatgataacttaataccatgttttggatttggtgatgcttctacgcatgatcactctgtcttcagcttctaccaggacaaccatccctgtcgtggctttgaggaggttcttgtaaggtatcgacaaattgttccacatttgaatctttcaggtaacaaggcttgttccccccttttgtacagtagatattgcgcacaaatagaaggctggatatttcagtaacttccagaacctggagtcctggatatattatgacttaaaataggcaatgctttgctatgctttattttatagcttatattttcagaagagaaaaagtttcaaggtcctgcaaaattgctgtatatagcctagttgtgcaggtcgttaaactccttgctacttgttatgatccactcttggcagtactggtctatgcttacgtgttacttatttggtgtgcaggaccaacttcttttgcacctttgattta

SEQ ID NO: 24046 - DNA, 1874 bp, Setaria italica
  misc_feature (1816)..(1874): n is a, c, g, or t
  Peptide Sequence Number=SeqID_90020
ctgctctgctcggttacttccagcaccgtcgtgcacgcttccgctggccttgcccgctcctcgcagcatcctcgaagctctccacaccagggagggcgactcgtccagtctcctctgacttgctctgctctccctgcgcccgtggtcggtctgtcctcaccgctagcccgctgctgctcagcagccagtcccggcggcaccagtccccgccgcgtcaatcgcctgatcatttcttataatgtggggtgagaaaactcatcacaagcactggcatcaaggtcatggtccatctggaagttccaagggcgagaaacatggcaaacagcagcccaaatttataccagacaattatagctcggttgatgaggtcattactgcactgagagaagctggtctcgaatcatcaaatctaattcttggtattgacttcaccaaaagcaatgagtggtcaggtaggcattcctttggaagaaaatctttgcatgccattaacggtaacccaaatccatatgagcaagctatctctataatcgggcgaacactgtcaccttttgatgatgataacttaataccatgttttggatttggtgatgcttctacgcatgatcactctgtcttcagcttctaccaggacaaccatccctgtcgtggctttgaggaggttcttgtaaggtatcgacaaattgttccacatttgaatctttcaggaccaacttcttttgcacctctgatttatgcagcgatttctgttgttgaaaatagtaattggcaataccatgtcctcgtaatcatagccgatggacaggtgactgctgctaatacaaatgatggaagattaagtccacaggaacaggcaactatacaagcaattgttgatgctagctactatcctctttcaatagtaatggttggagtgggtgatggaccatgggatgccatgcagcattttgatgactgtatccctgaaagagcttttgacaatttccagtttgtgaacttcactggtattatgtcaacaagtaaggatatgtcaaagaaggaggctgcatttgctcttgcagctcttatggaaataccttctcagtataaagcaactcaaggcctccgaccttcagaaaagcatgcacaaaggattggctctcctaggattcttcctcctccaaacaaagttcttgaacatgataatgcagcagcttcacatcctcctccaaccgcaagctcccggtcaactggcattggcaaaagtgctgccgacgagcaggtatgccccatatgtttaaccaatccaaaggacatggcttttcagtgtggtcacctgacatgcaaggaatgtggcccaactctaccaacctgcccattgtgccgtaagccaattaccatgcgcgtgaggatctattcttaagatgatgcgatgttctggagagaagggattgaccgctccatccatgggatgccaatcagtaaggagcaagatctcggaagcgcaggactttgcgctacggtctcgagatgtgaatgtcatgaaaaccatgtacagaaacttctccgtgcctattcagtaatgttggctgatgaataatttcatcctattgcatgtaaaagtttatcgttatcaggcatcagtagcagggaaattgtgttcttgtgttgaatgctataccagcaatcgtgtcacatatctatgttcatatcatcataccagaggacagatacttttgatggatgaattgtgctctgttatgttcgggaacggttaactcttgtagtcttgtgcaagtttggaaaacgattgctttaagttctcatatattctagnnnnnnnnnnnnnnnnnnnnnnnnnnnnnnnnnnnnnnnnnnnnnnnnnnnnnnnnnnn

SEQ ID NO: 24047 - DNA, 581 bp, Setaria italica
  Peptide Sequence Number=SeqID_90021
actgagtgataacatagtcattaggactaatgttttatcaagcatctatgttgtaggtcttataggttccaagaatgtaaaccaaaccagcagatccaaatcaagatattcaaagaatccaagccacaatatctataattattctatggtatctacgtcacggtattcaaatcatgatattcaagtgacggtatccaaaccatagtgaaaattcagagatgtagcattcaactcagaaaaacatgtagcaccgatggtccgacagggcatcagagcaagcatcaaagcttttggtacaacgcgcagaaggacaccggatgagctgataggcatcagacaaatgcaacagatcatccgatgactacaataggcggctgcatatgaacaagatcaccggatgcttcgatggtgcttattttgcgagtgtcagatgaatgggtgaagataaggcgtgtgagaagcaccgaatgatccgccgcccgtgttgaagtgaccatcggactaagcatatttactttgaaatcatccagagagttcagggccaaatttcttcagcaccggatgatctgatggtgccatcg

SEQ ID NO: 24048 - DNA, 261 bp, Setaria italica
  Peptide Sequence Number=SeqID_90022
gccgccgctgttcatcaacgcgggcgccgtggccgccgctgatttcgatcacgatggacgactcgacgttttcatcggcggacgggttgccaatggccagtacccgtacgctccgccaagcgcgttgctccacaatggcggaggaaggtttgaggaagtgaccgattcggtcgcgccgttgttgaaggaagtcgggatggtgacctcggcattgtggagcgatgtggataatgacggctgggtgacctgctcctcacgcgg

SEQ ID NO: 24049 - DNA, 257 bp, Setaria italica
  Peptide Sequence Number=SeqID_90023
gctacctggccctctccggcaatgaactcaccggcgagataccgccggagcttggcaacctgtcgacgttaagggagctgtacctcggctacttcaacagcttcaccggcgggataccgcccgagctcggcaggctgcgggcgctcgtccggctcgacatggccaactgcggcatctccggggagatcccgccagaggtggccaacctcacgtcgctcgacactctgtttcttcagatcaacgccctgactgggagg

SEQ ID NO: 24050 - DNA, 396 bp, Setaria italica
  Peptide Sequence Number=SeqID_90024
aagcgagggcaagcacatccttacttgctgacatgctcaggacaaacttcaatatgaggagacgcagcagtgacgcgtaaatgaacctcccaccactcaagacaaaagtaagcaaaggcacgcttgctgggatctccaggaggatatctttcatggttgtactcatcataaaccacctttgggttagggttcttcacagcagccacagttgctgggaggtcagccaggccagcatcttggttccttgggacaagtgtttcagttgagaaacccctggcggcggcgaagaagggggactcgacggagaaccgcggctggctccgggcgcgggcggagtcgtcgtccccgccgggggcgccagcgccggcgagtgggcccctggccgcggccgcggcg

SEQ ID NO: 24051 - DNA, 364 bp, Setaria italica
  Peptide Sequence Number=SeqID_90025
taaggtaagaacccgaacaaataagaactaaaacaacttaaaccttagaacaataacatatccaccaggatccatgcccccaccttggctcgtgtctggcttgaggaagttggcagcttcccatgatacagaagtaacaatctccaaccagcccatgtcatcatcttcatgcaacgaaatattctccacctccaacagctgagaaatcagagccctgaaatgtccatcaatgacattcttcattactttcttatgttcttcaccagaccgatctctacttcgaaattctccactgaccaaaactacttgatgatcgaattcgacactgctcccatcagctatgcactcatcatcgtcatcgtca

SEQ ID NO: 24052 - DNA, 267 bp, Setaria italica
  Peptide Sequence Number=SeqID_90026
gtttgtctcttagaaaacacagacaagacagctatatagtataagaaaagaaaaatattatttgaaattcaatgaaaaggaaaatcaaagatcagaagagttacttcaatagaaagaaaataaattaatacaaaagaggctccagtgcacacacatgcaagcgttagcatgcaacacagccactagtaaggaaaaggagaaaaactaattttgatatctatgaaactgaacgtctcacatcaggaaattatagaataaaaaataaag

SEQ ID NO: 24053 - DNA, 263 bp, Setaria italica
  Peptide Sequence Number=SeqID_90027
cgccctcgtatcgcgctgggagcttgaggaattgctcctggtagctgtcgacggagcccgtgcgacgtagatgggtcagctcgccgaggggattgctgcgcaccagggggccaaaccgcttgttaacgccttcgacgaaagcgggccaagtggggacaccgcgattcttctccaggcggtagtaccattggccggcggcgtcctccaagtagaatgtcgccgtccagaccttctggtcctccggcgtgccctgcgagcgaaag

SEQ ID NO: 24054 - DNA, 243 bp, Setaria italica
  Peptide Sequence Number=SeqID_90028
aagcactttaacagccagtatctcaccagaagacatatctgctttgtaaacagggccgaaggctccttggcctaatactgttgtgaaattgctggtagctttctgtagttccttgtatgcatatttgggtattccagaagctgaaatcatgctctttctaccaggcccttcaatccacagagaactcccacggtcttcaagctcccttggagactcctgccctgtggtcgagtttgagagcat

SEQ ID NO: 24055 - DNA, 254 bp, Setaria italica
  Peptide Sequence Number=SeqID_90029
acaaccacagaatgttgatcttccagaattacaaccaaaaacaaaagaaaccctttcctgttccaattaaaaagatgttgcaagattctcggcgagataagaggcttgcacaaatgcggatagagaagcctcttgaagccccaaagaatggtttgcttgtgccagagcttgttcctgttgcttatgaagtccttgataactggaaagtgctcatcagaggcctgtctcaacttctgaatgttgtcacagtttat

SEQ ID NO: 24056 - DNA, 291 bp, Setaria italica
  Peptide Sequence Number=SeqID_90030
acacaaatacctacctttgccgtcctctcaatcctagtcacactgttcccaaaaaagcttcgattgtggagaaaatggtgctatcttttttcagctctgagggggactttgcaagccttgattcggaagtacagtaggggtgcctcttcctttattttttgagggtcctacaagttgggttagccgcgacttgatggatcctttgcttgtagtttttcacatgtgggttttgttgtcagttgtcacaggatcaagatgtagttgtgctctcttgtttactcgcatacaagc

SEQ ID NO: 24057 - DNA, 392 bp, Setaria italica
  Peptide Sequence Number=SeqID_90031
cgattgcaaaggtaatccggagccagttcttgtatcccacagcacatcctggacaaattagttccagctggtaaaaccaccaccaattcttcctttgcaagccggcagcagaaatccatatcatctttgatgtcttccaggcaagacagatccagtttcaccattacaaacattgaaccctcaggtttgctggggcaagtgatgcaactgattcccttcagcttctcccagcatatatccgcagtttgtcttagaacctcgacggttttatcaaaaaattcttgcttagtgttttcgatgagctgtggaattgctccctgacaagcattaatttatgtcatgaatatgggtccagaccatagttacttttcttatactcaagttctttgtta

SEQ ID NO: 24058 - DNA, 871 bp, Setaria italica
  Peptide Sequence Number=SeqID_90032
cgtcaccctcatataatttgtcatttattccataacagaaaacggtgcacctatgcacacttgggttacaactagagttgtaaccatatcaaatgatgactgagaagcagaaaccttatcttagcagggatctgcactaatccttattgcttgtcatatcacttcttgaatacttcaagcttatcaggttacatctctggcttgctgtgtcgcaagcagaacaatttgagcctgtcaaggccatcatgaagagaagatggtgcgattgcaaaggtaatccggagccagttcttgtatcccacagcacatcctggtaaaaccaccaccaattcttcctttgcaagccggcagcagaaatccatatcatctttgatgtcttccaggcaagacagatccagtttcaccattacaaacattgaaccctcaggtttgctggggcaagtgatgcaactgattcccttcagcttctcccagcatatatccgcagtttgtcttagaacctcgacggttttatcaaaaaattcttgcttagtgttttcgatgagctgtggaattgctccctggacaaaagttacaggatcagtggagatgtcaaggtaactcttgatgctgtccactaccttggttttgcgaaacacgccattagggtcattggttactatccagccaagtctccatccaggcaccacccatctcttcgatatggatcccagagtgagcaccggcgccaccgagccgaacacgcccataggcacaaatttcctctccccaaatgtcaagtgtgcatacacctcatccgcgatcacaaagatgccaagcttcctcgccatctccgcaaccttggccaaatgctcataggtgtagacgttga

SEQ ID NO: 24059 - DNA, 1293 bp, Setaria italica
  Peptide Sequence Number=SeqID_90033
atgaagagagcataaagtgtatccgaggtaaggcacaagttggtctggaactcagttatgtcaacattaatagctccgtcaaacctcaacgaggtggtcagagatgatataacttgagatataagcctgttcaggttggtgtatgttggacgctcaatgtcgagggacctcttgcatatgtcatagatagcttcattgtcaagaagcacaacgacatctgtgtgttcaatcagggaatgtgtggagagcacgctgttatatggctcgacaacagctgttgaaatctgcaacaagaaatggtttcagtacagagtacttgtactttacaataacaggtaaacctcctttgcaagcttttgttatcagactgagaagaaacaactacatctatagctaggtacataaatagtactgttgagaatacaaatgaagtctgtttactcaccctagactcaagtatacagatttagatcttgtcctataacctttatgtagacaataagaagaatgactgttctctgtgatagggcataaaattcttactgatattcactcacatctttgctctgtttagatatatatgggatcacatgatatccaggcttatacttaatatagtaactctcaagaagttctgttgagaaaattacttttggtccaatcaatgataggtgaatgtcggccacggaaggatatttttctgtagataagctatatcttactgtaagaacaaataaagaggtctgctcactgacaaaggtagctcaactgtagtggcaatgaaatttatactttattggagctcttccagaaactcgacaaaagcaacatagataagtagcttatataaagaatgaaagtatgactcgtatctaaacttcccttatgaaattactataagatatttgattaatcatattggttaaattgagattttgtcgtctaataaaactgataagaacatgggaatgttttttttggcactggtactatttcatatccatagtttcaccaaatcacaactcataactaccactgaattcattttgtttttaatgttacacactgaatactacagttttttcttgggtggtaattgattggcaatttattgtccacaagaaaacatgaaaatggtgactgcatagatgcaaatatgatgacaaaatgatgcatacaggaatggtatgagattattgtgataatacctgcggtgaagaataaatcgtgaaaccaagcttcgacttcctaccataatcaactgatagacgctctaaaagtaatgaaccaagt

SEQ ID NO: 24060 - DNA, 271 bp, Setaria italica
  Peptide Sequence Number=SeqID_90034
tcagcagagttcattcaacagatagtgatcagattgcaagaggagttcttcttaccaggagaagtcattttggagcaaggaagcgcggttgatcagctatactttgtttgccacggtgcactggaaggtgttggcattggtcaagacggccaagaagagactctgctaatgctgacgccagagagctccttcggtgagatctctatcctctgcaacataccacagccctacacggtccgtgtctgcgagctctgccggctcctgcgtctcg

SEQ ID NO: 24061 - DNA, 242 bp, Setaria italica
  Peptide Sequence Number=SeqID_90035
cagaggagcgcgcaacgcacacgcacacgcttcctgtgtccccgcctgagctgcagcggccgagagatacatgcaagccagcctcgcctcgtacgcggcggcggccatgccgaccctggacctccgccccgagatggcgcacgcgcaccagccggccatgtcgccctcgcaccacgcctgggacggcaatggcgccgccgtcgcccccacccccatgcccaagaggctggacgggaaggtgg

SEQ ID NO: 24062 - DNA, 406 bp, Setaria italica
  Peptide Sequence Number=SeqID_90036
aggatagccctctggctgctgaacccaaccgtccggaacagcaccggcgagaagacggagatgacgatcatgccggtgaactcgtagaacacgggaatggccaccccgatcgccaggtagtgccggtactccctgctgaacagcctccggaacgcgccctcgtcgttctgccgcgccacgcccacggcgcagacgatgtccttgaattcggcgtcgacgtccgcctccgctccgcggatgcgctgcagcgcggcccgagccctctcgggttggcctcgcatgacgaggctgacgggcgtgtccgagacgaagaaagctcccaggacgacgacggcgcccggcacggcggcgaggccgagggagacgcgccacccccagtcggggatgcggttggtgaagtagttgg

SEQ ID NO: 24063 - DNA, 237 bp, Setaria italica
  misc_feature (212)..(212): n is a, c, g, or t
  Peptide Sequence Number=SeqID_90037
agtgatgaattggctggtcaagttattgagcttgttgcttctgttctagatggaaatatagcaaatcagcaacagatgcatcttctttctggattctcaattttaggcttcttgttccaatctgtatcaccacagctcctaaatttcaagactctttcagcatcgaagtacatgtttactgttctgaagaactctgaagttctattgaaagntgctctttcgcagttttactggaat

SEQ ID NO: 24064 - DNA, 436 bp, Setaria italica
  Peptide Sequence Number=SeqID_90038
tcaaaaggaacatttattgttgctggaggctacaatagggaggatggaaataatgcaatctccactggaaggatcggagttagagggatttgaagagcaacgctccgaagactttgagcagcaagagcaagttcaggaaggaaacagaggaagtgagaggactgtgcagaaatttataaacgggtaacagttcagatccttcatgtggcctttggcaaagtggaaggactggcctaccaattattccttgtcctcaggagccacaataaaatgctcacttccatggtggatccaagctgccatttgcctcaactgcaagagggagataaaattcgtcgcaacaatctcagaagctagtccaaactagcggggaggttgcgtgcacaaactagaaaaggggctcattcagtgatggctcgtggtaaggtccagatga

SEQ ID NO: 24065 - DNA, 641 bp, Setaria italica
  misc_feature (602)..(602): n is a, c, g, or t
  Peptide Sequence Number=SeqID_90039
gcactgataagccactaaaacctcaagtgagagccaatggtgtagatgtggctactttcgcacctcctagacgattagagaccgatgaaatccctttgatcgtaaatgatttcagggtagctgctagaaatgcagttgaagctggtaagtaccttttcacagtttaaatgttaatattagcctacaaagcatatacaaatgtcagtttactttagtcagacttatttatcaattgaattagggtcagttgagactaacacataaatgttcatatggattatgtcttaagtttcgacaactatctagtagtttactgcaatcctaactgatacctgaataaaagggcaatctagtattaactctctatgtggtgtgtaggatttgatggtgttgaaatccatggagctcacggttacttgattgatcagtttttaaaggaccaggtcaatgatcgcacagacaaatatggtggcagcttagagaaccgttgccggtttgcgttagaagtagttcaagctgtagttgatgaaattggagctgacaaggttgggataaggctgtcaccttttgccagttattcagaagcaccagactcaaacccngaagctctaggcctgtatatggcaaatgcactgaataaa

SEQ ID NO: 24066 - DNA, 1370 bp, Setaria italica
  misc_feature (1332)..(1370): n is a, c, g, or t
  Peptide Sequence Number=SeqID_90040
gccaaggcaaagtgggattgtgggaagaagacgaacgacgcaggagggagggacgatgagcaacagcggcgccaacgctatccccctcctcaccccctacaagatggggaaattcgatctttcccacagggtggttctcgcaccactgacaaggcagcggtcctatggcaatgttcctcagcctcatgccatactgtattatcaacagagggcaactaaaggaggccttttaattgctgaggccaccggagtgtcagatactgctcaagggtacaaagatactcctggcatttggtcaaacgagcaagtggaagcatggaagccaatcgtacatggggttcatgagaaaggagggatatttttctgtcagttttggcacgtaggaagagtctctaactccacttttcaacctaatggacaggctccaatttcaagcactgataagccactaaaacctcaagtgagagccaatggtgtagatgtggctactttcgcacctcctagacgattagagaccgatgaaatccctttgatcgtaaatgatttcagggtagctgctagaaatgcagttgaagctggatttgatggtgttgaaatccatggagctcacggttacttgattgatcagtttttaaaggaccaggtcaatgatcgcacagacaaatatggtggcagcttagagaaccgttgccggtttgcgttagaagtagttcaagctgtagttgatgaaattggagctgacaaggttgggataaggctgtcaccttttgccagttattcagaagcaccagactcaaacccagaagctctaggcctgtatatggcaaatgcactgaataaatttggaatcctttattgccacgtggtggagccacggatggtaaaacttggtgaaaaatttgaaacaccctacagtcttcgtccaatgagagatgctttcaaaggaacatttattgttgctggaggctacaatagggaggatggaaataatgcaatctccactgggtatgctgatttggttgcatatggacgcatatttttgtctaatcctgatttgcctcgaaggttcgaaatagatgctccgcttaacaagtacaacagagagacattttacctccctgatccagttattggatatactgactacccatttcttccgacagatgtgtaaatgggcccttttcaccgaagttctttttagattgagtggctagttgttgtactggaaatattagaggaataagtcattcggaatgcctaattttcatgtgtatggacaaactaatatgaccattgcaatcaatgctttaaatcttatttgtaaaaaaaaannnnnnnnnnnnnnnnnnnnnnnnnnnnnnnnnnnnnnn

SEQ ID NO: 24067 - DNA, 232 bp, Setaria italica
  Peptide Sequence Number=SeqID_90041
gcaagcgacagagacaccaggtacgtacagtgaatgcatatcaggcatcagtaatgcatcctccaatggtacaaactagtacactctaagagacaactctttcaattatctgactcttagtatatagtttgtaatatgaataaccatacatgtcaaccccacgcatattgctaaagtacgtgtataagattatctcttgatcaagagatagctcttctctcctattaaaatt

SEQ ID NO: 24068 - DNA, 209 bp, Setaria italica
  Peptide Sequence Number=SeqID_90042
cgccagggccgagctggagaggagccgggagaggttcgacgtgatcgtgggcgacctcgcggaccccgtggagggcgggccctgctaccagctctacaccaagcccttctacgagcacgtcgtcaagcccaggctcagcgacggccgcggcgtcttcgtcacgcaggccgggccggccggcgtgctgacgcacagggaggtcttctcct

SEQ ID NO: 24069 - DNA, 529 bp, Setaria italica
  Peptide Sequence Number=SeqID_90043
tacgggtaaacggaccaaaccaaacctacgaccaaaaacgacccaatagggaattaggaagaataagaataatgtccaccaaaacaatacagaacaaagtctgtccaaaaattatttctccagtatcacaccaggccataactccaaacacctcagacgcaaacgcaacacaacagacacgacaacagcaacaacaacggcatgctggatttatttatatacatccatcatatttacagaattgagggtgcatctgcagaaccttagcgcctctcaggaagcttcagcagtcgagaaatgcattttagcaacagattcacgcaggaagctgcttccacatttggcttcctgattgcccatgctgtaatccattattatatcctcgtgatcatctactgaagacttaccaccagtggtgctaacacctttcgacccatgatcagaattctatacagagttcgtctgcaatggaggtttctgatcatgggtcgaaacctccattgcagacgaattctatacagagttcgta

SEQ ID NO: 24070 - DNA, 439 bp, Setaria italica
  Peptide Sequence Number=SeqID_90044
caagtcaatcagtttggaggtgaataaaggcctccagactgattgacttggagaaacacgtacatatcttggtctccagcaaaccattcccaaactctgtggcttcacaggtcttatcaaccgaagcgcagcgcttctctattggaagcggtagaccagtgtgggcagcgctggtaggagagtcatcgccagatgtcactactggcacgctctcgagacagcaggaacgaccgtccatcaaggcactggcggttgcgtacttgcagggtgatacaccaaaactgcaagcgtacaaccacgctgcactgacgctaactcccagcagcgcagatctgatccagaaagcgagcaaccgacccaaaccaatccgatctagcacaaggcagctccgaacccagcagacgagtccgtgagcttgaggaaaatggcaggcgcgagc

SEQ ID NO: 24071 - DNA, 895 bp, Setaria italica
  misc_feature (1)..(3): n is a, c, g, or t
  Peptide Sequence Number=SeqID_90045
nnnttttttacaacgggtaaaggacaaacaaactgcaaagccatggattggagatagatatgtccaccaaaacatacagaacaaagtctgtccaaaaattatttctccagtatcacaccaggccataactccaaacacctcagacgcaaacgcaacacaacagacacgacaacagcaacaacaacggcatgctggatttatttatatacatccatcatatttacagaattgagggtgcatctgcagaaccttagcgcctctcaggaagcttcagcagtcgagaaattgcattttagcaacagattcacgcaggaagctgcttccacattttggcttcctgattgcccatgctgtaatccattattatatcctcgtgatcatctactgaagacttaccaccagtggtgctaacacctttcgacccatgatcagaaacctccattgcagacgaactctgtatagaattctggtgatttttcttggacttccccttctgcttctgtttcttcttctgcttgttcttctccttgcgggatttagaccgtcgctgataactgctattcactgaatggcataccgacgtcacaggggggtcatacacgtcaggggcccatttgacgtggcgattttcagttggtgatgtcattccattcttttcgcggcctcctttcaaagcagagatgagcttcaaagtcggctattgacacaacaaagtgaaaagggtagtaaataagtcatcattaggtaacataaatggaatagtgagcgttattagtttctcagttgtcaaacaaggcgccagagatgagcgctattagtttgtcagttctcaaacaaggctccagagagcacatagtgattggccaacacatcaagggcaataactggttgcttc

SEQ ID NO: 24072 - DNA, 268 bp, Setaria italica
  Peptide Sequence Number=SeqID_90046
tctcttcttgaagtatgaggagatgatggcagatcctgtaaaggaagtgaagaggctcgctgagttcatcggtgctccgtttaccgacgccgaggagaggagtggtgtcgtcgatgaagtggttaggctgtgcagcttcgagcatttaacgagcctggaggtcaactctactggagttgccgatcggattggtgggttcccgatggagaattctacgtatttcaggcgtggcaaggtgggagactggccgaaccacctgagtgctgag

SEQ ID NO: 24073 - DNA, 232 bp, Setaria italica
  Peptide Sequence Number=SeqID_90047
aagatgtgaatgtatgcgacatatgcggtgatgttggtgtggaggacaagctcgctatttgcagtagatgcaatgatggtgctgaacatacttattgtatgaaagtaaagatagaagaagttccagtgggtgaatggttgtgtgaagagtgccaagctgaggtacaaattgaaattgaaaagaagaaactagaaatatctcaagcaaaggctggaacaatttcttcagagaa

SEQ ID NO: 24074 - DNA, 270 bp, Setaria italica
  Peptide Sequence Number=SeqID_90048
ccggccgggcgatggctgtggccgtcggtcgccggcgctatcggagctggtggctcgggaacgtaggtcgatgatggtggctcgacgggtggagtgggataggatggctcacagttatttgcacagccgtacacagcggcggcgaagaggagtaggttgagagcaacaaagagaccgtgcttggcagccatttggcgattgattgatttcccaccacagcgtgattggaagtttgtaacaaagctgggaatggttgtctggggctactgc

SEQ ID NO: 24075 - DNA, 363 bp, Setaria italica
  misc_feature (328)..(363): n is a, c, g, or t
  Peptide Sequence Number=SeqID_90049
gtagttttggcagtttaggttttggctgattgaggcatcctaagatcatcggttgaatggtcaatgttgagaccatgtgattcaaattttgctttgatggagttgtcaccacgtgcttcatatatgctgaaaactgaagtgcagatgttcttcggcggttgtagcatcttccgtcaaattttttttggattatctgcttcatctgcaggtgttctttagatctgtagaatcgaagggatctgccttttgtcgacatgtaacaggggatctttatgtgggaaaccctggtaccgtaaaggttgtttcaactaaaccaaaaaaaaaaaannnnnnnnnnnnnnnnnnnnnnnnnnnnnnnnnnnn

SEQ ID NO: 24076 - DNA, 735 bp, Setaria italica
  Peptide Sequence Number=SeqID_90050
aaccaggactagatgatcagattttgtcccgccctcttgaaataagttaaataacttaactgatccatatctatttccctgatagttgccatccttgtaatttagccaaagcttactcccattgtaattggcattttttccattccctatgttggtcttgatcccaagttcatggccaaccatatgagtgggaagtggacttccattaaattgagaagcagcagcaatgtagatcttccatgcatcagccaaacttacatggtcattctcttcatccaatgtgaacaatccaacttcttcaagagtgctgcttgcatacctttgttctgaactaaaattatctgtggtatcttgttctggaacatttcctgccaaagtttcttgagaacttcttctcgattcggtccaaacattagattttgtgtacattcctacaagtgcatttgtgacatatacctcagaaagcagacccatctttatgatggaagcatgcagttgtcttcccaaatcaatagcacacagatcagcacaaccccgtaagattcttgcaaaggtgacacgatttgcacgcaatccactgtgctgcatcttagagaaaagctgaagagcttcatcactgcatctgttctgaatataacccaacattaacatggcatatgaattgatgttccaactcttcatgctatgaaagaatctacaagcactagcaatgcatccgcacttgtactattaaaa

SEQ ID NO: 24077 - DNA, 209 bp, Setaria italica
  Peptide Sequence Number=SeqID_90051
gtggcttcattttgtttgcaaaaattttaatgccacactgaatggtcatatgtttccagatgtagttatagattgcaggtcaccgattgcatagtttttcatgatggctcctggaatctgaattgttcggtcttttgattgagctgtcgtgcctgaagtatcaatcatattgttaaatgcactctagagatatatggctacctgatatt

SEQ ID NO: 24078 - DNA, 970 bp, Setaria italica
  Peptide Sequence Number=SeqID_90052
atcacagctcctcttatgttttcgtttcccttcaatagtattgccattccttctacgacatgtatttggtggagctggaagatcagagagagagttccaagctacacgataatatcttgctccaagtattgcacgcattctaatgtatatcatcagcaattttctatcagattcatacgtccacaagaatcttttacttctcatgcagctttttcttaggatagtagatcgactgatcactggactgctttccttatcttcatctgcatggtttgtggaactactgctagttctggacaccggctgatcacttcggtttgtttggtcagtgggtgatgaagagattgtctctggtacttcctcatcaagagtagactggtccggtatttgttcgacagatccacttgcttgtacttttcgtttaaaaaacttctgcgtgatctcatcagcagatctctttcttttctcggaagttaatctagaactaactttttgctgcttttgtttagcagtaatgctgggctgttcacgaagccgagattgcctttcatatgaaaggcgaagcacctgctctacagagagattcaattcccttgctattctaacacaatctttaaaaggaattttccccttctcgctgacattcataatacgctgttgcaattccagtcgttgttcagtagtcatgactctaagtgaactccatgaacgaggatgagaaacctcaggaacagaacagccagggaaggcactcaacggctcagccaagccagctgtcaaataacagcactccaatgtttcccaataggcatcgacgtactcctgcttctgaggcacagactcatgccgaatttttcgatgattgttcagttgggacgatgaaagattcttggtataggttcttcaatgtaaggcctgagctgagtcgaatgtgtaggaatcgcatctgagtacaccaccatcttctacg

SEQ ID NO: 24079 - DNA, 1515 bp, Setaria italica
  misc_feature (1)..(28): n is a, c, g, or t
  Peptide Sequence Number=SeqID_90053
nnnnnnnnnnnnnnnnnnnnnnnnnnnncgttaaaaccaacttctgcagcttaatcaattccgccttgacgtttacaaattgatggtgttgagttggtgacaaaagctagctagctgaacgccaagtcgccaaccaacttgttggtccaatcaaacaatcaatacagactcgtattataatccaggacactttgtataccaccagaaaagaaaagaaattaaaacagctactacttttttgtataaaactctttgggaatgatggcagcagggtaccgtacaatcgctcatcctatcatacatagtttcttcctttttcttgctgcgtgatctcatggcattgcagaatttgcaagggtaaaacattgacgttattgcatctttgttctttacaggccattaatcgacctcgctcgatcttcgtctcccgtttctgtgcattgttgtcggacgacgacggatcagtataccagatgataaccagctgtatgtaaacgacgacgatacatgtccaagaagcaggaagcacagggtgactgcaactgcaagctagctagctttagctttagctactcggcggcggcgctcctccagatggcctcgagctcggcggcgaagagctcctcctgcccgacgatgatggtgatgtggtccttgcggtcgtagacggtgacgcgggcgcggggcacccgggcgccgacggccagcgtgcactcgacggggagcagctcgtcgtcgcggccgtggaagatggacaccttgcaggagagctccgacgagaggacgtcgaggtaggcgtccatccgggcggcgctgccgcagatgatgttgtggagggtgtgccacgccgcgttgtgggtgtggcacatgaacgcctcgatcaggaacgtccgcaccctgttcctggtgaggatcctgaagagtctgtcccagacgcggtggtgccggcagatggtgaggcagatggtgcggctcacgtgctcgtaccagcacgccatggacgccccgaacgcgatcggcggccacacccgccgcggcgccacccgccgcatcacgtactgcgtcgccgcgcccgcctccgactccggcaccgggaagtacggcggcgcgaggagggtgagcgacttgacggcgtcggggtacttgacggcgagtgcgagggcgagcacggatcccagcgagtgggcgacgacgtggaaggacccgaggcggtagcgctgcagcacggagcgctcgatcatctccacgtgctcccgcagcgtgtagagcgactccgccggcttggggctccgaccgaaccccagcaggtccaccgcgaacatccggtaccgaccccgcgccgccgcgctgaacgccgggaacaccgtctccgtccagaacaccgacgacgagatgaaaccgtggatgaacaccacgtcctccaccgccaccccctccgctgccggcgcccccggcggcggcgcctgcacgtggacgtagaggtgggacgccgagcgtggcgcggcgctccacgtc

SEQ ID NO: 24080 - DNA, 199 bp, Setaria italica
  Peptide Sequence Number=SeqID_90054
ttgcttgtgtccctggttagctgcacttgtttgcctgagattactgaatgatactatgattttttactgtgattgttttactatatttgataacttgagttttcaacatcagggagaggcaaaacaggtatccaagtggtgtgcgtggtgtttatctgagcaattgctaaatgataagatgattgtttattgtaaattt

SEQ ID NO: 24081 - DNA, 169 bp, Setaria italica
  Peptide Sequence Number=SeqID_90055
cttgctgcgccggcggttggtcagcaccggcacgtccctggtcaggtcgctcatcagctgcctctggatgcggtacaggcggtgcagctcgttgacctgatgatcgatcagattgcaaaaacaaacaggtgatgagtaccagttcatacacttccatttgcaggatgaa

SEQ ID NO: 24082 - DNA, 1444 bp, Setaria italica
  Peptide Sequence Number=SeqID_90056
gatcatatactaatacgagctgttgttcactgataacagagcaaggattacagatagttaaactaacgcatccccacaatttgactactgcgcaagcacagaaagtcccatctcaaatacaacaaactagttacctgagctagcaactacctaacatgttaacagccactacaatctgtggccacacggaaatgataatcttacatactggagtacgctaatgcagcttgatgccctcatcctaagctttgtcccacaattgaactgtacaactgtcgtatccatccgaagtcaccaccagtggttggtatagcaatttctagctcgacccattgaggcgatccaaggtctccgccacatgcctcatcgatggcctccgctcagggttggcctgaacacaagcgagggcgactttcagcactgcaatcatttcatcctcccgttccgagtctcgggcaaggaaaggatcgagcacatcggcagacggtttcttgtcctcgatgcaaaactggacccactggacgagatccatctgcatggtctccaagagaaccgcaggcgatctgccagtgatcatttcaagcaggacgacgccatacgagtagacgtcccatttctgcgatggtttcagtgtcttcagtgcttcaggcgcttggtagcatgaccctttgctcatgagaggactcactgaggcatctgactgctggctttgggccttttctagaccgactcgatctgattgcgtgataggcgatgctccagcaatgtttgcaagtcgcccgaggccgaaatctgagatgtatgcctccatgtttgttccaaggaggacgttgtttggcctcaagtccccatggacatactttttggggctgaattcatgcaggaaagacatccccttggcgactcctttcatgattttcagtcgggcttcccatggcaatggtgtgaatgtcattgtcccaggtttaccatgaattgctgcagagaggctgccattaggaatgtaatcatatatcagcagcttctcatcaaaagaccagtagtaggctctcaaggtaacaatgttgggatgccggaccttgccaattgcctcgacctcggtctgaaattccttaaacctctgcaactccccccctccccaagccgccttactgccatggtgagaccgtcctcaagaaccaccttgtacacaatcccaatcccactcttccccagcacaaacgccgaagccttgagcagctcatccagatcaaacctcacttgctggtccaaggccacgagatcatactgctccgcgtgctcggacggagtcccggactcatccctactgaaacatccacaatccttgccgcacctggaccctttagaaccggcagcggcactgtgtccctttctgcccttcgatgaaaccgccctccagtagcagtagaagaagatgagtcgt

SEQ ID NO: 24083 - DNA, 394 bp, Setaria italica
  Peptide Sequence Number=SeqID_90057
gagcgtagtgcgcgtcgccggcgcgccggaacacggcggaggcggcggccatggcggctgccgtctcggcggcgacctcggacccggggttctcggcgtccaccttgtatgcgcggcgcgacgtggtcatgtcctcgggccgctgccagcagtagtggtcggagtcgccgtcgccgacctgggcccacagctcgttgggcgccgtgtgcgccttgacgaagtagtcggtgccccacttgatggcctgcagcgcgtgcgcgagctcgccggcggcggcgacgccggcgccgtactcgaggacgccccaggagaggagggtgacggtgaacgccatggggaggccgaacttgacgtggtcgccggcgtcgtagtagccgccgacgaggtccacccc

SEQ ID NO: 24084 - DNA, 462 bp, Setaria italica
  Peptide Sequence Number=SeqID_90058
gggattgcgccggtgaggccattgtaggagagatcgaggaagatcatgctcccattgctgccgaacgtgtacaccgtcgtgccggtgtagatcctcgtggatgggcagaggtgcacgtttgggaaggcagccagccgctccggccggatgccgaagaactcaaagagcacgccggcaccggggcagatgttgcctgcctcgttccggaggaacgcgaactgcttccctgacacgattccccctggaacaagccctgcctgggcggccagttccggcggtatcgtgccggtgaagccgttgctgttgaggtcaagccagatgaggttgttgcagctgccgagctctgccggcacacggccggagagctggttcttgttgagctgcaggatggcgagcttctggagcttgccgaagccccggggcatggtgccggtgagacggttgccggagagtgacacccag

SEQ ID NO: 24085 - DNA, 498 bp, Setaria italica
  Peptide Sequence Number=SeqID_90059
attcgaggcgtcctagggacactcgacggactactgaatttaaactgttttaagtgcatttcgtataattgatgttccgacagcaattaggtgcacttaagctagtttaagtcgaacggttccaccacagatattctctccatatataggatgaggccatattcccttgaatcgggcggacgaggtcatccgacttgggtcaacatgcatgccgtatgggtagaagacgagctcaagtgtgtcgtaggaggaattgtgttgcaaggggaacagaagctcgatcaatgcaagcagacgacacatgggtaggtgagctctggcagcacacaggcgtgcacgagtaaccttgcagcatggcggcacagagaaggaagaggagcattggctacaagagagaagaggcatggtggtgtaggggaagtgacatgtgggtggagagggaggggaagaggcacaacaacagcggtagaggcggaagaggcacacaacggtggagat

SEQ ID NO: 24086 - DNA, 295 bp, Setaria italica
  Peptide Sequence Number=SeqID_90060
cagatgtccatccatcccctggcttgcagggaggaagatcctacttatgtcatcatcacccgcaccgtcactaggcaggctcagctctatcacaacaggcttcaaggtgccgtcgtccttcaagaagagcagagtgcgcgacgcatagatgcacacccccagcgtgttgatgcgcctcaggtatggcatcagatagtcatggtggtccagaatatatagcctattctgttctattgctttttccacagttcgtccttcaagctgaccctcgatacgagcaggtgtaatcgagctt

SEQ ID NO: 24087 - DNA, 438 bp, Setaria italica
  Peptide Sequence Number=SeqID_90061
ctttctggcgccgccttattaacccttcactatcaccattttcatcagtatcaccatcaagaagagaagaacctattgtcaagctttggtttcctattctgaagagagaacggttcggaatttggtggctccagccatggctcaacatccaaaaaagcagatttgccttttccatagactgccatctcagtgccttcgcctgtttgatctctctttggaggtggtgcaaggccatagtatccctgcagaagactcatggctggtgaaactttgggctttggtgttttcaatattgaatccaagatatcatcatgaatgcggcgtggagtacattccctgtcatcactctcgtctgaaccattctgctgataagacgacggagggtgcctccccggtagtggaatccgtagtgtcttgtgtgcaaacatctggaggtca

SEQ ID NO: 24088 - DNA, 402 bp, Setaria italica
  Peptide Sequence Number=SeqID_90062
atttttagttctatcaaccagtcagccaattttggtctgctcgtaaattgtgggatggtgtttcactggagctcaagacaatttgaggacagcttgtcagaaaacatcttattttattagtcataatcacatgtgttcctttcttacttttggctgactagttactgattatatcatttagttatgtgcaatgtttgctgcaaaatataattagaactttacaccctgcagcatacgtttcagtaccatctttcaaaagtcaaaattttatgcactttgttgcttgtaatgtttttagttgctgtgaagtgtgaacacacatcatggaaactgatattctagtattggatagatgcatgttatgtcattgacatatcaccttaatgatggaccgtaaatagt

SEQ ID NO: 24089 - DNA, 294 bp, Setaria italica
  misc_feature (280)..(280): n is a, c, g, or t
  Peptide Sequence Number=SeqID_90063
gaagcagacaagatctttcctgctggcagcgggtgttcaatagtcactgttctgaatggcgtcttgctccgtcgtgaccgcaccggcgctctccgcctcggctccgtccagccggcggcgtgcgactgcggccgtatctctccctggtgttcgccgcagccggctcccgtcacggggcgtgcggtgtagcgccgggcagggcggcgtcaaggtcccggcgaagctggcggagctgtgggaggccgcgaagggcgcgccgcctctcgccgtgctcgccggngtggctgcggcggt

SEQ ID NO: 24090 - DNA, 378 bp, Setaria italica
  Peptide Sequence Number=SeqID_90064
ttttaacataaattcaattctctgttttacatgtatgttgtgaaccgaaacaatttctttatcctacagtgagagtcaggacatctatcctctgaaatggcacacttatccccagcatatatacaccaaaatgatgaaacaaccaaattttgacaaacatttgaatgaagtgaactaaacatcgttcagaatcttcagctgacgcgacgcgatcagtgctccctgttctccacaggggaggtcgaggcactgtgagagcctgacagccctagcgacggctgcaagaacgaccgatgcccgttcgaacccttctgctccgccgccgctgccgtcgtcggcgatgaccgcgccagcatcgctgccgacgagcacgccgcg

SEQ ID NO: 24091 - DNA, 855 bp, Setaria italica
  Peptide Sequence Number=SeqID_90065
actggctgtccatgtcgttgggcgtcaccacgtcctgcaccaccgtcgggtcgtcgccgctgccgctcgtcgcgttggccgggcatcggcttcctgaggaacccggccagccccgggttgatatcggaggggacgtcgaggcggtcggagacgaaggacgagcagtgggactgcccgacggtgtgcgcgccggagaggacgacgaggtcctccactgacatccccttgacgacgaagctggagataaggtcgctgaggttggacgtcggcgggaccaggaacttgagcggttcggaggcgttggagaaggtgccgtcgaggcggcccgccggcatgtcgaagctgaccctgccgtggctgaggaagcaggacgcgtcgcgggccgcgaaggcgatgatgtcggcgcaggagacgacgccggggcaggccgcctcgagcgcgtgcttgatcgcgtcgatcagctcgaagccgcgcaggctcgggttgttgggcgggctcagcttctccggcgtcgggctgaacggggtcgggtccagaaggatggaagcatcacagccctcgacgaagcagtcgtggaagagcatccggatgacggcggcgccattgccggggttctggccgatggccttctccatgacggccttcacgatggcctcagcctgggggcacttgtaacggtagtaccctagctccagagggtagtacgggctggcccggcacgccacggctaggagcagcaaggtgagtgcggccaaaacgggcatcttcgatgaagtagcagcagtggccatgtttgctagagatgtgcttggcatttctcgcactcaatgtttgagtagagaatctcagaatgtg

SEQ ID NO: 24092 - DNA, 649 bp, Setaria italica
  Peptide Sequence Number=SeqID_90066
ctgggccatcatgctcctcgccacgaacccgtcgtggcaggacaaggctcgcgccgaggtcgccgccgtctgcggcggcgcgccgcccacggccgaccacctccccaagctcaccgtgctgcagatggtgatcaaggagacgctgcggctgtacccgccggcgacgctgctgccgcggatggcgttcgaggacatcacgctgggcggcggcgagctacgcgtgccgaggggcgcgtcggtgtggatcccggtgctggccatccaccacgacgaggccgtgtggggcgccgacgcgcacgagttcaggccggacaggttcgcgccgggccgggcgcggccgtgggcggggaggttcctgccgttcgcgtcggggccccggaactgcgtcggccaggcgtacgccatggtcgaggccaaggttgtgctcgccatgatgctcgcgagcttccgattcggcatctccgacgagtaccgccacgcgcccgtcaccgtgctcacgctccggccgcgccacggcgtgcccgtgcgcctgctgccgctgaagtaggcctctcgcggtttgggctgcgtaaattcgttcgcgtgacgttttgctcctcgactcctggtgtcgttcttggttctttgcaattttgggactatttttatt

SEQ ID NO: 24093 - DNA, 980 bp, Setaria italica
  Peptide Sequence Number=SeqID_90067
catgagctccgcgttccagtctgacttcctaagcgaccccatcgcgctgggcgcgctccacgcgcaccagcgcggcgtgctggtggtctgctccggcggcaacgacgggcccaacccctacaccgtcgtcaactccgcaccgtggctcctcaccgtcgccgcctcctccatcgaccgctcattccagtccaccatcgcgctcggcaacggcgcggtcgtgaagggagtggcgataaacttctccaaccagagcctcagcggcgggcagtaccccctggtgttcggggcccaggcggccgcccgctacgcgccggtcgccgaggcgagcaactgctaccctgggtcgctggacgcgcagaaggtggccgggaagatcgtggtgtgcgtgagcacggacccgatggtgtcgcggcgggtgaagaagctggtggccgaggggtcgggcgccagggggctcgtgctcatcaacgacgccgagaaggacgtgccgttcgtcgccggcggattcgccctgtcccaggtcggcaccgacgccggtgcgcagatcctcgagtacatcaactccacaaaggatccgacggcggtgatcctcccgaccgaggacgtcaaggacttcaagccggcgccggtggtggcgtccttctcggcgcgtgggcccggcatgacagagtcgatcctcaagcctgacctgatggcgcccggcgtgagcatcctggccgccacgatcccgtccgcggacaccgacgacgtcccgcccggcaggaagccctcggcctacgccatcaagtccggcacctccatggcctgcccgcacgtcgccggcgccgccgccttcgtcaagtcggcgcacccgggctggacgccgtccatgatccgatcggctctcatgaccacagcgacgacgatgaacaacctcgggaagccgctggcgagcagcacgggcgcggcggcgacggggcacgacatgggcgccggggaga

SEQ ID NO: 24094 - DNA, 661 bp, Setaria italica
  Peptide Sequence Number=SeqID_90068
acggcgccggcgcctggtccgccgctccggtggccaggtcgaggaggttggagtaggagcgggacaccatggctggccgcctgcttcttgcaaaggatccgagaggtggcctggatcaaatgtttgggccttttgctagaagaagcacaatccgtgcagcagaatccaagattggtgtcggatcgacgcaagaactaggagaggagcggatgccttagcacgctgttccttgcaggatagcaacaagctcgcagtgtttgttggagaagtggcgcacactggattcaacaagcagccacctgtatcactatgctcacccctaggagtgatgggagtgagttggagagagataggagggaatttgtgtgctttcaatacaagggagaaccttttcttctgctgcaaactgacgctgttgttctcgcctgagtggtggaaaaaggtcggctcagagactggctgggtatttgcagtaaaaatccaacctctttctaagcgagcaaaataggggttttcagcaagcaagcaagcagctctactagtagagtaaaagaagctgataaatatcagacggaaaagtgcaggaaaaagatcagagaaaaaagaaacccggaaaaatctccaacccggctttgctcctcaacccctatgcgatcaagag

SEQ ID NO: 24095 - DNA, 479 bp, Setaria italica
  Peptide Sequence Number=SeqID_90069
acctgtcgtccaaccgcatcgccggcgccataccgccggagatggccgtcgaacctgccgaccaatgtcacaatcgacctgtcctacaacaacctcaccggcgccatcccggcggtgccgccgttcttggcgcagaggcccacagcgttcgaggggaacgccgagctctgcgggaagccgctagacagcctctgcgccttcacgtcatcctccgccgtggaacccccgaacggcaccgcgaagtcgccaccggccatcgcggcgatacccagggacccgaccgaggcgctccctggcgatgacaccggcagtgccaccgccggaggaccggcgtcgggcgagcagcgcggcaggatgcggcttgctaccatcgtcgccatcgccgctggcgacgtgggcggcatcgccgtcctcttcgtggtggtcctgtacgtgtaccaggtgatgtaggttaggcagcgtcaggaggcggcgaagca

SEQ ID NO: 24096 - DNA, 945 bp, Setaria italica
  Peptide Sequence Number=SeqID_90070
gagaggtggatcgatgccaggagaaggtcgccgatgttgatgatgagggcgccggggacgggagggacgtcgacccagccgctgccggcgccggcgtggtcgaggagcacctggaggccaccgacgccgtcctgcaggaggacggtgaggaacgtcgggtccgtgtgccgggtgttgccgagggtgaggtgcggctccgggcacgccgggtagtagttgatcgccaccttgaggctctccccgcaccccatcttgctcaggtggtcgccgcccaggcccagggactccgacagcagctcgaacacccacaccgccagcttcctcaccgcgtcggcgtactcgaacatcacgcccctgagtggctccggcagctcctccggcagcggcagctccggcgccatgtcgcagaagacggtgtcgcgccagcaggccgccagcgactggaagaggtcgaggttggagtagaacctcaccttgcgggcggcggtgtccctcgtgtagtagggccgcttcgcctcggcgggctgctcgttgaaccgcctcgcggccgcgatcatggcggccatggcctcgccgggcacgccgtggttgaccacctggaagaacccggccgtctcggccgccgaccgcaccaggcgcaccacctcctcccgcggagcggccaggaggtcgatgaccgggacggccgcgccgccgtcggtagtgacgggcgtggctgcgtgatggtctcggggttggggcagggagtccggcgggtggtggaagatggccaggatggacgtggcgccggcgtcgaggaggcccttgacgcccgccttggtgtcgtcgaacgcctgcagctctcgccggcggttgtaaccgtcggcgacggcgacggcgacggcttcggtgagggacatggtgccggcgcttccgactgaccgagtaaggggcaggtgatcgaga

SEQ ID NO: 24097 - DNA, 592 bp, Setaria italica
  Peptide Sequence Number=SeqID_90071
gttatttgatgaactgaaagaaaagacagatgattttgggtcaaagactttggttggtgaggggtcatatggaagagtatattatgctgttctggaaaatggaaagcatgcagctgtgaagaagcttgatgcttcagcggaccccgagcccgacaatgaatttctagcacaggtctccgttgtttcaagattaaaacatgaaaattttgtggacatgcttggttattgtattgaaggagatcaacgtctgttggcttatgaattcgctacaatgggctccctacatgatattttgcatggaagaaaaggtgttgcaggtgcgcagcctggtcctgctctcgactggatgcaaagagtcagaattgctgttgatgctgcaaaaggtcttgagtaccttcatgagaaggtccaaccgtccatagtccatcgagacatacggtctagcaatgttcttttatttgaggactacaaggctaaaattgcagacttcaatctttcaagccaatctccagatatggctgctcgcctacattctacccgtgtccttggaacttttggatatcatgctccagagtatgctatgactggccag

SEQ ID NO: 24098 - DNA, 265 bp, Setaria italica
  Peptide Sequence Number=SeqID_90072
accgcgcgcggcacgggctccgtgtgggctcgccggccgttggagccggaagaagtttcgtccccatctgccggtagagaagcccccaccgctcgcggacgagcaatcttcccacaatctccctgacccgcggcgccgtgcgtcgcgccgtcaccgcttctgcggccaacgcttctgcctcgtcggcaacaaccaacaatccgccgccgagcaaagcaagtaaagcaaccgagccgagtcgatggtggcggcggcgctatccgcg

SEQ ID NO: 24099 - DNA, 717 bp, Setaria italica
  Peptide Sequence Number=SeqID_90073
agctgttccagctatgcaactcgagatgagatgtaaatgaaaaccttcttcgagtggcgtccacttcattaaggcctgcttggcctcgtcataggttgccatttgtgatgcggtgaggcagcctgctcgtgccattgctgggccaactcctttccagagtgctttcagcccttcctgtgctaaaattttcctcatctctcctattgcactggtattgcttgtactcatctgcaacctcacctttaaaacctccatgggatttgttaaagcagttgcaagggccccagcaatgactccagatgcaaatttaaaagcaaagtttgttgatgcaaatgcataactgcagacatgtttgcagggctcatacagtcctaatcgaaggccaccatagacaacagatctcgtcaatgctggtgcaagtcccaggtagagtgatcgaggcccttccctttccaccagttgtgtaaatattgtccccattccgactaagtttcctctttgcccagcgagctgcatttgaagcctaactttgataacatctgcagtacgaaaatggtggtagtagacctataaaaggagtaacttactttccggacaaacaagatatatgttcttgttaccaataggcagcatagcaatgaacagttgattgttacacaagttaattagatctgtgtcctcaagtattggtccaggtaccagttgtcaaatatctct

SEQ ID NO: 24100 - DNA, 340 bp, Setaria italica
  Peptide Sequence Number=SeqID_90074
cgtgaaccctgtcagcgccctggaccccggcctggtttacgataccaccctggccgactacaccaacttcctctgctcgctgaagctcacccagaacccgctccaggacctccagggcaaccttccggtcggcctcccgaacctccccgtcaacgtctcggtccccgtcgacctcctcctcccactgttcgacgccgccggcgagccgtgcgtgtgcagcaagagccagggcccgtacggccgccccgaggacctgaactacccgtccatcgccgtgccctgcctgtccggctccggcagcaccacggtgaggcgccgggtgaagaacgtcggcgacgcg

SEQ ID NO: 24101 - DNA, 342 bp, Setaria italica
  Peptide Sequence Number=SeqID_90075
ataatattattggttatttaccgcgagcaaaattagctcgattttgtatatagacacggtggcctgcttgtatttgcgtcccctttgctgtggacataaactgagcttccgaaaactgtacagacattttgtaggataatttaggcgttaaacagcccccatggtgtgtaaaactcccccatgatggccttgctagatgatcccttctactgtacattgtatttatctttacttttcttttcttttcaaaaaaagaaaagcacgagaaacgtgttagttctgtacattctggaattgaaagaacgaaaagatttcgtcgacttaaaaaaaaaaaaaaaaaaa

SEQ ID NO: 24102 - DNA, 244 bp, Setaria italica
  Peptide Sequence Number=SeqID_90076
ttgagccccgcgatgaactcctccgggaagtgcacgacgaggttcttgatcctgtccccggggagcacgccgtaggagtggctcgggctgtgctcgccccggaactcgatgttccggtggtcgaacttgggcgccggcgggtcgcgggggacggcgatggccgtgtggtcggtgaagggcgacgggagggtcgccgaggcggtgcgcacggcggtggcccacgcggtgtagaagaagctcatgg

SEQ ID NO: 24103 - DNA, 342 bp, Setaria italica
  Peptide Sequence Number=SeqID_90077
atccacgctcctgcagctgaggacagagctggaagtcttcttggccgggaacaacaccgcccagcaggcttgcgacttcaagctgaagggcagctacttcgacagggattgcgccttctacctcggcgactccaacaccatgattgctcaaataagccgtaagtacactgcctccaatgtcctgctgggaaaggacacgttcaatgttaccgtgttccctgacgtcgaccatgtgttcgtcgcggttcttgttgtggttctggatgaagttcacagcagggaccgaaactactgatgatgaacaacaacttccatcgagttcgacgcgggtcataattttta

SEQ ID NO: 24104 - DNA, 1567 bp, Setaria italica
  Peptide Sequence Number=SeqID_90078
acgacctacgagaaagtttccattaggctcctcgtctagggtttggtctcggggacttctccctgcggcaggcgatcgcaatggagggcggcggcgcggaaccagcacccgtggcggcggcggcggccgaggtgaaaaacccgaggtgcttcatggacatcaccatcggcggcgagatggaggggaggatcgtaatagagctctacgcatccgtggtgccccggacggcggagaacttccgcgcgctctgcaccggggagaagggcgtcggcgccgccagcggcaagccgcttcactttaagggctcatgcttccatcgtgttattaaagggtttatggttcaaggtggagatataactgctggtgatggtacaggaggagagtcaatttatgggtccaaatttgaggacgagaattttattttaaagcatgagaggaaaggaatgctttcaatggctaattctggtcccgacacaaatggttctcagtttttcatcactaccacacggacacctcatttagatgggaaacatgttgtttttggtagagtgataaagggaatgggggtagttcgctctatggagcatgtccctgttggagaagctgactgccccactcttgatgtgaaaattgttgattgtggggaactccctgaaggttctgatgatggagttgtgaactttttcaaagatggagacaaatatccggattggcccaatgatcttgaagagaagcctgcagaggtttcatggtggatggatgcagtggagtcagctaaagcttatgggaatgagaatttcaagaaacaggactataaggcggctctcagaaagtacaggaaagctctgcgctacttggatgtttgctgggagaaagaagagatagatgaagagaagagcacagcactgcggaagaccaagtcaataatactcactaatagctctgcatgcaaattaaagttgggagatttgaagggtgctttgttggatgcggattttgcactgcgtgaaagggagggaaatgctaaggcttttttccgacaaggacaggcacacattgcacttaatgacattgatgcagcagtggagagcttcaagcacgcactggagttggagccaaatgatggtggaatcaaaagagaactggcagctgcaaagaagaagattgctgacagaagaaatcaggagcggaaggcatttgctaggatgttccaaccttctggaaaatctgataagagcagcgaagagaacaattaatctacagcttctttcccccggcagaaactttggttagctaaatctgggacacataccggaacaggagtaactagggaatctgtgctgcaaaattcagattccctatcttagatagaaggaaacatagtggggggatggaaagcttttgttttcttttactacagaagtagcaattcgtgcgtgtcccagtattgttcttcaggaaatctaggacattgaacattgaacttaacagtgcaatttttcagacgttgcagcaggtcatgccgatagaccgttccattttgtgtggactggggaccgttgtcgcc

SEQ ID NO: 24105 - DNA, 249 bp, Setaria italica
  Peptide Sequence Number=SeqID_90079
aaaccgttcctcccaacccacttctccgatctggacgcgatggaggtggtgagaagagctgcttatgccggttcgtggtacaccagcgacgctaggaagctggaagaggaacttgatggttggctgagggaagctggcatcactaagaatccagatgttagggcaataattgcacctcatgctggttatatgcacgccgggagctatgcagcttatgcttttggcaatatcaacccgtctagtcttttc

SEQ ID NO: 24106 - DNA, 1402 bp, Setaria italica
  Peptide Sequence Number=SeqID_90080
taggaggagaagatgcaatgtacagattgaagttgtcaagatttatgttggcacaacatttcccagggatgatggattggcatctgaaacctcagcactcttgtcgctctcttcaacctggaaaccttgtttgaaacgatcgtaattagtaggctcagctgtcttaaatgggcgttcccctagtacccggactagatcatcttggtggagaacctccttctcaagcagcagctctgcaatctgtgcaacctgctccttgtgcgtcttgatcaggtcaagagttttttcataggcctttgccacccattccctcacctcagtgtcaatgatggatgcagtctcgccaccatatggcttgctcattccaaaaccatcctccctttgagggaaagaaagaagcccaaccttttcactgaaaccgtatactgcaacctgggcataagtcatcttggtgactttctccaggtcattttgagccccagtagagattttcccaatcaaaacctcctctgcagctctaccacctagcgtcatgcatgtcatgtcaaaaagctgctcttttgtcatcaaaagattctcactagggacatattgagcaaatcctaaagcagctgttccacgaggaacaattgtaactttaagaagcggttctgcatgctccaaaaaccatccagcgacagcatgaccagattcatggtacgcaacagtttggcgctccagcttgctaataaccttgtttttcttctccaagcctccaataaccctgtcaatagcagcttcaaaatgctgaatcgttatctgtgcatcctcgctccttgcggcaattaaagcagcctcattacaaacattagcaatatcagccccagcaaacccaggtgtcaaagctgctaatctttgagaataaaatgatggctccttgtccagcttaagttttttaaggtaaatgcgaaatatttgatcacgaccatttatgtctggtttatcgatggctatctgacgatcaaatctccctggtctgagcaaagccttatctaggatgtcaggtctgtttgtaccagcaagaacaacaactccagatgttgttccaaatccatccatctctacaagcaactggttcaatgtgctttcacgctcatcatttcccccagagaatcccccacgaccccttgcacgaccaattgcatcgatttcatcaatgaatacaatactaggtgcacattgtcgagcttcttgaaataagttccgaaccctggatggtccaacaccaacaaacatctccatgaagtctgaaccagaaacagacaagaagggcacatcagactctcctgcagtagctttagcaaggagtgttttccctgtaccagggggacccacaagaagagcaccctttggtattttagct

SEQ ID NO: 24107 - DNA, 718 bp, Setaria italica
  Peptide Sequence Number=SeqID_90081
aaattttgggtttgcccggcaatgtgtcatgatgaagccaagtcgcattgtagtgtagtctgatttagtaactgacccgtaaaactgcttaacaaaagaatgcagccagctcaatatcgccaaatctcttccaatacccttgaaatgttccctgataaattcacattgatgcacataggtcacgttcctttgcccattttcatagcatccttctgaaattcatcctccaatgtttccattgacgaatccttgcgcttcctaaaaagcatagtcaaaaacacagaaaaatcacatgcgcaatagccagaatgaaaatgaagatatgcaactgatgtagtgcttcaacggacagcaaaggaacttctcccttcttttggcaatgctgggcccttggcactccctcggcaagcaggcgccgacgggtgaggcctaaaattccggcagcaaggccatgcgcctccgaggggctcagctcggcctgttcccttgcgctatggcatgggagcatgtagatggtccacactggaggaatgcagatcctctggatcatcccttgggacacagtcagcagcagggagatgaaccccagaagcatgagctcttctttgaccttgaggagagcctcgaagagcgccttctgattcttccccttaaacgtcttgccgaggtgatgcaggcacctctcggcggcgagggagatgacgacgatgagggagct

SEQ ID NO: 24108 - DNA, 167 bp, Setaria italica
  Peptide Sequence Number=SeqID_90082
gggcggcaagaccgagaagctcatcgacaagctgtcgatccaggactcggtccggttcgtccacggcatcagcgacgccgagctcgtcgagctcatgggctccgccgaagtcgcctgcgtgccgtctctctacgagggcttctcgctgccaacggcggagctgatgg

SEQ ID NO: 24109 - DNA, 254 bp, Setaria italica
  Peptide Sequence Number=SeqID_90083
cactctacttgctccacagtgtaggcaccaatgtccgaccacgatcctagctagtagggcgggggccgtgcatgagcccatgcaagcccatcgtgcccgagctgcagccccgcaccggaggcgccgccgccccctggcatcaggtttggcggtacgccgccgaacattggcatcgccgacggatcggccatccctcccatcagcggcggccctccgccggggccggggggcagctgcgccgcctgcccggcgga

SEQ ID NO: 24110 - DNA, 201 bp, Setaria italica
  Peptide Sequence Number=SeqID_90084
ccggcggccgcgcggaccaccccggctcctgccgcggcgccgcggggccggaagacggctgcgccacccgccggggtggcggggaacgagacggcgtgtgaggacggtgccatcgccattgaatctgtgttggttgtttctcttgccctgaccgggtgcagtgcagttgcttgattgcttttgcttggagggaaacgagga

SEQ ID NO: 24111 - DNA, 276 bp, Setaria italica
  Peptide Sequence Number=SeqID_90085
gaacgggcgaactcggaaagtaatcgagctgcccacgcttgggttcaggtggtgctcgtggtgtggcgatttgggcaagaaatgaagaacagaacagggagggacagctgaggcgttgttggagttgattagctgggctggaactggacccgaattggggcggaggaaacagagctggtaaaaggcatgggcaaacggaattcggcggccggccggcagcggcgagacgtttctgcttggattcgtcgatgaaaacgagaacggaaaaaaagtttt

SEQ ID NO: 24112 - DNA, 1357 bp, Setaria italica
  Peptide Sequence Number=SeqID_90086
tcaattgatgaaagtgattgcaaataacaaaaagattatttggctgctatgttgctcgtgaggctttaatcgatgaggaatactgggtattgctctttctagaacatattagacattggttctgattagcagacatagcttccacatgtatttgcattgggctgattgctaactattgattactaatgatagtgactgcaagctatttaatgcttgcataacgacaccttttattcagtgacatggaattacattttactctaccactatgccttacaagttacatccctccttactaatgattggtagatcgctgcatggttaagagcagaagatcactatgaagatcagtcaggcaaccgctatgtcgaaagctttaaaagaaagtttgcatcacaggaatttcatgcattaaagaagcgatgcagcaaacagcatggagaaaagtatatatgttttgttgcggtgaagaatgatgacctcaggcggactgtcctgaatagcgttgttggtaccttagatgtatgtgtaaggcatcctctacacggagagaaatttcctgaggagcctggaagtggaaggtcatctcttcactgtagaatctatcagccagatcagccaaaatttgggtatttaacaaatgtatgcgttgctaaatatgcaaggcgtcaagggatcgccagcaacatgttgttgttggccatagatgctgcaagactcaatggtgctgaaaatatttacattcatgtgcataaagataatttaccagcgtggaggctctataatcagataggattcaagatggttgaccaggatggtgctcgtcattcatcagatctgtgcttactctccttcagttcataggtctagctgactaggataggaatagaaggacatgctctcaccagttccatcttgctgcgcagagaaatgccactggtcctcgtgatttggaaaagcaggagggtgtgtgccaacgaatacctttaccatcttgtacatgatgaaagttgttttcataagtttctgagtttcgagattgtcactagatcggtgacagttctgatgccccagaatgttgtggtatctgaatacttcaaaggcttctgtcattgtatagtttccggagccttttttttttccctttttttttttcttttttgtaggttgaagcctgcaaatgttgtaggttgttcctgtgacactgcaatgaaaatacagtcttggcctcttgggcacggggcacctgataccgtaactgtgctcttgttgctgatgatacaattgtcaggtaattgatcaccaaatggacatcaatgaaagcactgaccgaaaaaataaaaaaaaaaaaaaaaaa

SEQ ID NO: 24113 - DNA, 312 bp, Setaria italica
  Peptide Sequence Number=SeqID_90087
gacaagcaggctaaaccccgagacaacgcaaaacgaagcaagggagtgtcacaagggaagaagctaaacgggacgcaacggcacgtcggctgtaatcccgatctgaggcaacggatcggacatgcatatcatgagctgtgggggcagcaaggggggcggctcccgctaccacggggcagttgggcatgccagatcggtgaaatccagcgaagggcgacgcccgggcgagaagggccaggcggcgagcggcggcgcgagagaatctagcccggatttggattcgacgagggcggacgggcggccggaggcggg

SEQ ID NO: 24114 - DNA, 286 bp, Setaria italica
  Peptide Sequence Number=SeqID_90088
ctgaactgctgtcatcatcaagaactgttcgttttgatggccctgacggccctggccctggcgctggtaatgcctccttttccctctgaaatattttcccaagaatttttaaggccgttgctcgggccttcagatcctctttcttgacattgttttcgtaaagcaccatttcacaaacatgcagcagagtcatttcaatgtccacaacattcagcttccacagtgagctcatcatcagatccttgttcatcctcatctgcaagtcaacatcctgctccgtggcaat

SEQ ID NO: 24115 - DNA, 617 bp, Setaria italica
  Peptide Sequence Number=SeqID_90089
aagcatcccatccgtttctccattcgcttccgttccagaagcatcgtcaagcatccggcatcaaccatgggctcccgctacgaggttgaggtgacggtgggttccgccagcaacctcaagaacgtcaactggcgcaacggcgacctcaagccctacgccgtgctctgggtcgacgacggccccaagtgctccacccgcgtcgacctcgacaacggcgagaatcccgtctgggacgacaagctcgtcgtcccgctccctcctccctccgccgcccggctcgacgacgccgtcctctgcatcgacgtcgtccacgccaacgccgccgagggtgtcaagccgctcgtcggatccgcgcgcctcccgctccgcgacgtcctcgacgacgccggcatcggggccaaggtctcccgcaccctcacgctcaagcgcccctccggcaggccccagggccgcctcgacgtccgcgtcgccgtccgcgaggccgcgcgctactacgaccccaacccctacccggcgccggggtacggaaaccccgccggagcaggctcgcgtgacccgtactacgcgggagggggacaggcgccgtacggccagccggcgtacgccgcgccgccggg

SEQ ID NO: 24116 - DNA, 966 bp, Setaria italica
  Peptide Sequence Number=SeqID_90090
ccccgttcctccatccagtcgctaatctagcaaagcaaaaggcacaagcttcccctccgtctgcccttcctgccaccgccggccggagaggcgatggggtcccgctacgaggtggaggtgaccgtcggttcggcccgggacctcaagaacgtcaactggcgcaacggcgacctcaagccgtacgccgtcgtctgggtcgactccggcgccaagtgctccacccgcgtcgacctcgacaacggcgagagcccctcctgggacgagaagctcctcgtcccgctcccgccctcctcccgcctcgacgacgccgtcctctacctcgacgtcgtccacgccaacgccgccgagggggtcaagccgctcgtcggctcagcgcgcctcccgctccgcgacgtcctcgacgacgcggggatcggggggaaggcctcccgcaacctccgcctcaagcggccatcggggaggccacacggccgcctcgacgttcgcgtcgccatcaaggagccggccaggtactacgaccccaacccgtacccggcgccggcggggtacgcgcagcacggcacccgtgacccctacggctccggcagtggcggctactacggctccggcggcggctatggcggcggcgcatacggatcgggtggctacggcgccgcgcagccttacgccgcggcgcccccggcagggtacccttcggcctacggctccgcgccgcttccgccgcagccggcgtacggtgctcctcccgctgccaccgcggcgtacggcgccgcggcacccgctgcgtacagcggcgccgcgcccacgtacggcgctgctgctcccgtcgccggcgccgacggcaagaagagctaacaagataggggatgggggacggggttggccgtcggcgcggcggcgggcgtgctcgggggcctggcgctggccggcggggcgagcttgctggagaacaagttggaggagcgc

SEQ ID NO: 24117 - DNA, 324 bp, Setaria italica
  Peptide Sequence Number=SeqID_90091
gggtcttcatgtagttcaccaggttggtgctcataccgtagtacgccagcctctcacaacactcgttggcgaggatgtaggggcaagcgcgccagttgccagtgcccttcttcacggccgggttccccttgatgtcaacagtcccatcttgcgtgtacatgtctgcaacctctcccatggcgtccctcagatggcgtgcagctcagagagtcagaggcctcctgtcctggaatgaagagtcagtcgggcgagggcggcggcggcggcgctggtggagcaggaggaggcttggaacctggaagcgacgcgaggacgaggatatcg

SEQ ID NO: 24118 - DNA, 543 bp, Setaria italica
  Peptide Sequence Number=SeqID_90092
gtctttgcagcatgctgaaccaggaatgaattttgtttcttcactgcatcgatatttagttccgtagactgcagcataacacgcagttttcttgatacttcactcgagctgtacagaacatctctagccgaagacagcacatgccccattgcttttgctctatctaaagcactcgaatcgagttcgctatcaataagtgcatccccgatagctgtttggctttgttttgtgcacttcatgagcaaagcatacatgtctggttccttctcagtgagtgcaatagtggcatataacttggccattattatctgatccttcatgagccttagggttgaatctgtattaataaggcggaactcctgcctccatatgttgtaactgcccctaactttattatcaaagttccttgagctgtttatcgctgcatttcgcatctcaagttcaaccttcttatccatctgaagcaactcctggaccctctgcacctttcttctacgccgaaatacctgccgctttaatttgatcggatcaacgcttttagtg

SEQ ID NO: 24119 - DNA, 522 bp, Setaria italica
  Peptide Sequence Number=SeqID_90093
accagagccaagatggcagcgtctctttcggcccggttgtgcagacgtccaagaacacggtggatctgcgcgggaagcgggtgagcgaggtatcctacgagcttgagatggcgatcgacgcgtgcaggccttaccaggtgctcttcgtggtccatggcatgggcaccggagctgtgaaggaatgcgccatggatgtcctccggaaccaccctcgagtggtcaagttcgaagacgagagccctctcaactacggctgcaccgtcgcctacattcagtaagcagacattgcaagcagtgtacagcagcttggggatggtaatgtagacagcctgtatgacagtgtttccttgaaactgaagccaacgggctggtctggattctgaacaagtgccagtgtgctagactgccagccaggacaaaacatggcccaggaaaacatggcctgcagtgataccattgtggcaggcattcaagtgtgcctggctgtagcgatgatcacaggttcattgcttgtacaatttt

SEQ ID NO: 24120 - DNA, 257 bp, Setaria italica
  Peptide Sequence Number=SeqID_90094
ttgctactgttcgtggagggcacctcagctggatccaccagctgctatggctaccaatgtgccttcttcacttgtcaattggttgctaagctttgggaatgacgactcacttttgattcatctctcaacagatcaagtttacgaggggatgaaatccttctacaaagaagaggacgagacattgcccgtgaacatgtatggaagatcaaaagttgctgcagagaaattcattgttgaaaaatgctcaaactatgcaa

SEQ ID NO: 24121 - DNA, 229 bp, Setaria italica
  Peptide Sequence Number=SeqID_90095
cttcactagagactgaactgtccttgtttcttgttacatcttcaattgtggtgctaacaagagcaattatttcggttgaaatatggttgtttcaattgcttctttcctcaatggttcatcatcttttggtgagttgctactctgatcatcttgtgttgatgtgttatcctgaattgagcccctgtttttctcatctaagccttccatcttatctgatgaaatattttga

SEQ ID NO: 24122 - DNA, 780 bp, Setaria italica
  Peptide Sequence Number=SeqID_90096
tccctttgctcaagctgttcaacaagcagttgagtctccaatagatctgtcttccttttggtccatgtcatcaagcaagctgtccctttccagaatgagacgaccaagttcttctctgagcacctcgagttctgtgtccttcgcctttgattgttcaatttgttgttgggatgctattagcagcttttgcagttcttcttggtcaagcaaattagcatagtttgtcatgtctagtttgacgccaagtagctcccttataatatcatgcgtcatggtatccacagcagccagtctcgaggttagcaagcatatctctttctgtttaccactaaccaacccttctagttcttcaattcgttggcgtgccactgaaatttcttgatccttctcagagttcatttgttgaataatgctagatatgcaccggaaaggtgaaccagatcctcttgctcgccccgaaggcttttcagttttggcatggacaatatcagaactggattcatgtggaacaaacttctgtcttgaaaccatgtgctccatctcatgatacttctcctgatacaacaaagattgtgcttctgagtgcaggaccaattcagcaatatgctctttgtattgcctaatctcatcatctttatgttttacttccagtgtgagatgttcaatcctctttctaacatcttgatgtgcaagaatctcagcttgtaatttttctagatgacatttcccttgacacaattccccagcagcatcacattttgatgctttttctacagaaag

SEQ ID NO: 24123 - DNA, 518 bp, Setaria italica
  Peptide Sequence Number=SeqID_90097
agcagagatcgaatccaaaatctttacaaagccctcgccgtacgtactactcttagcctgcccatctgtgaaacacaacacaaaaaacttgtcaacaatgttctttaacaggtcagctgtaatctaatgaccaggacattgcatgccagctgtagatatcctctgccctgattaagcaagattgagctagattttctcaacaacacccaacggtctaatacttcaatcttgcttaatgagagtaagtaaaatacaactaacataaaagaatctggtgcaaaaggtatgaaaaatgctccttttccatcatggatcatacagctgacctattgtagaattttccatagtagattacctggtaaaacaacacaatttaactgactaccagcttcaggtaacctagcagatgatggggcaccaactacaaaattaggttctaaaaccttttgagtcggactatatgtatacatggtattgttgacctgtaaaagtagaaaattgtgggtgatcaccagtaa

SEQ ID NO: 24124 - DNA, 517 bp, Setaria italica
  Peptide Sequence Number=SeqID_90098
ggtatgccatattatgatgcaacggatgataatatggcataccatcatccaccatgccaataccagataggttggtagccggggagctaagaattccattcacctgtctaaacccatcatcacagaggatgattctttgatgttctatgatgcaccctttgattccaccatctgtgatgatgggtttagacaggtgcatcatagaacatcaaagaatcatcctctggcataactgaatttgttatagaagaatgcgaggggtcaatgatacttgagccaaaatgggaatcttcttgtattgactgcaacaactgctccagctcatcaggctggaaggtctggtcatcagggagtggaggaatatcattgttagctccatttacagcttccaaagaattgggtgttttccatgcccaaccatctgaaggccagacagtggacccattaggcaatgagtcctgataatatgatatcaaacgccaatgctggccttccaaagaattgggtgttttccatg

SEQ ID NO: 24125 - DNA, 527 bp, Setaria italica
  Peptide Sequence Number=SeqID_90099
ccatccacatcttcagaatgattgctattatttgaggtatcagaaattggcaaaccaattgtaccattcccattttgatcacccaaaccctgaaaaggcaagaacggtaatcagaacgaatatacaatgtgtaaatttgatactaaagtcaaaatgaactgagtataaaccaaaagatcacctatatacatcataacttacgtaaaaaaaagaaagcccctgcatgaatggatagtaagctatcttagattaaagaaatacttttattacccaaaaaaaacaagagggtcaaagaactattctgttcaataatccgtgctctgtaacatcgtgtggatttcacaccgtacagttaaagatagaaatgacaacacagaatcccaaccttttaatgcccagacatgaatactatgacatcatgactcttgtagtcatgatctcatataacttgctacctaatcctgggggaaaaaagcagcaagatttatgccaaaaaaagacgaaacaagtcagcgtccttgctagac

SEQ ID NO: 24126 - DNA, 408 bp, Setaria italica
  Peptide Sequence Number=SeqID_90100
ggagtggccgaggagctcgcggctgtcacagatgcggttagtccttcttgcaggatggatgcacccgtggatgagttgtgccacggggagggcggcaatgagcaagttgctggagctgttttggaattgctggagaagaaagatctgtgctctagtaatttggtgtctgttgatgccggagacaagcaaccgctgaaggagagctctattattaatcaggatatcacagattcagccaagaaaaggaggctccagatgtcatccctgcttcagaagccaaccaaattcagatctcccccttcaggaaagaaagggcagtcttcatcagtgaaaagaaggtcgcctctgcattctgccaaggagaacacctcccctcctggtacgacaataacatgcaagtagccactt

SEQ ID NO: 24127 - DNA, 407 bp, Setaria italica
  Peptide Sequence Number=SeqID_90101
ccatgttgggtacgaaaggtcactgcgttattgaattaagacttctccatcactaataaacaagctcactaccttcattagttgtcatttgtcgcatccgatccttttgtgtcaccattgctcatctcggcttcagtggacaatgacaatttgcccttccctttgtcttcttctcctttggcttccttcgccgccttctccttggcttcctttgcctccgcctccgccttctccttggcctccgcttcctctttcgcctttgcggcggccgcctcctccttggccttgttcagagcttccactagagccgccaggcatgcgtcggtgtccctcttcttcttcttggacatgggcatcaggttctcggccacgtccgccggcgacattctgcgtctcctccagcagcc

SEQ ID NO: 24128 - DNA, 331 bp, Setaria italica
  Peptide Sequence Number=SeqID_90102
gcagcgcagggcaccaggagctagaagaagctcacgagctagagaggaagaggagaggagaagctagcaatggagtacgggtacccctacaacggctgcggcagcaacaaggagaagaggccgccgctcaagcgggggcagctcaagctgcagatcgccaggaccctttttggcagccttgttgcgccgggcgccaagaacagggagcgcagctttgggagataagcaaagcaggagcactggagcagtgcttgcagttgcagcggcagcggcagctatctgaggatatgcatcctgtggcgcttgacatagcgattgtgcaaagtgaaga

SEQ ID NO: 24129 - DNA, 505 bp, Setaria italica
  Peptide Sequence Number=SeqID_90103
caatttgacactttgctatgttgtaatagcagtgtgcttcttcaccataaaggccctcccaacgccaaagaagttacatgcttgagctgctcaaggagatgctgccccggtttggaacgaaatctaggcatctcagctcaaggaatcaaagttagtggactggcgttccatcaagctataattgaacatgccggtgaccaacatagttgacgctacattcgactgttcattttgtggaagtattgctgaaaaatgcgtctcaatctattgtttctccctcacattactgacaaattaagtgtggccgactgctccaaggaagctaatttaggaagtgatgtaattatggttttggcatgcatatgtttgttagtgcctggtagataccttgtgtgattctcgaccaactgccactactataatgattgagttgtccaatctcaagcggcgtagttgctcaagtgtaccctcaacagtcaacactctgcctatcataatcagtttg

SEQ ID NO: 24130 - DNA, 453 bp, Setaria italica
  Peptide Sequence Number=SeqID_90104
gaatgagcagcttgaatcccaccacaacaattgctgctataaacttaagcggtgaacaagttcatgaaccaaaggtgctgataagtggcagcgacttctatgcttttccacgaattgatcgaaacaaaaggcggatggcatggattgagtggagtcatccaaacatgccatgggataaatcagaactttgggttggctacttttctgaaagcggtgacttggaaacacggatttgtgttgctggtgctaatcaaatgttagtggaatcacctactgagcctaaatggtccctgaaaggagaactgttttttataactgacagagggagtggattttggaacatttataaatgggttgaacaaaccaatgaggttgttccaatatatacactagatgctgagttcacaagacctttgtgggtttttggcatcagctcttacgaatttcttggaa

SEQ ID NO: 24131 - DNA, 222 bp, Setaria italica
  Peptide Sequence Number=SeqID_90105
gatggaatgctgttatgctggattaaatagagaattggaggttcaagtgttggagcttgctttgttagctaatttattgggattgtcaaagattggagcttgttcaaaggtagttctgggtaagttgctttgggtaattaatcgcctagaaggtctgtgtgctgatgggtcctgtgagctgtctgactttctaagtctaagtaagtaaaatttaaagtaaaa

SEQ ID NO: 24132 - DNA, 300 bp, Setaria italica
  Peptide Sequence Number=SeqID_90106
gaagagggagtcccgctgttcggtcgggggcgggcacggaggaggcccgcgccggccgctgctgctgctgcttgtcgccgtcgtcggagtcggagtcgaaaggattggtggccttcttcttggatgcgaagaaggatcgcttcccgctcatggtgactgaaatcttggtgccgcggcagttatcaaccgagaagggcagttacttttcggggaaactcctgttcctggacgaagctaggcaaggtccgaggatccgcgggtggggatcgggcaggagcacaccaggaagataaggagttc

SEQ ID NO: 24133 - DNA, 159 bp, Setaria italica
  Peptide Sequence Number=SeqID_90107
gagggtgaaaaagaaacgaaaagcaatcactcctccatatgcagatagagcctaggtgccttgctcccgctaaaatccagcatcgcgcctcctccttgattttgccaagtagttggtcaaggcttttgaacttgcgttgaaaaactctagcattgtggt

SEQ ID NO: 24134 - DNA, 1315 bp, Setaria italica
  Peptide Sequence Number=SeqID_90108
aatgaataattttccgatacaattagatcattctgtagggttggttttcgtcagcacacaaatatttttgatctgcaatttcttctggatggaatttttgggcctggcaaggaagtatacccagcccatagtggtcgaggaaagacataaatgatcataggcaagatggaaaccgatgaacgtcagttcacttcgcgaggtactgccaggaatatgcagttatatcatttgtgtcggtatgcagagtgtgggaattcagagacaaaaaggacaaaaatgagatcaaacaccttgatcttgttcttattgatcgaaagggtgattctatgtatgcgggcttgctgagataccacttgacgcaataccattgctagagccacatctagaagagggaatctagaagagggaaaaatcgcataaaccaggagatagagctgtcaaaaacccttatatgatcagattgaacaggagatcaaagattgccaaagccagagatgaaccgttagactctccaaaataaacactcatttattcactttcctaacctacatgaatacacaggcaaaacagattggattctggtaattgtctaaattatgaaatttcatataaaaaagtagttatgcatgctaatcacttgaatggcacataatcatttgtactcatattcttaaatgtcttatgtttatctgtccagatgtgattgggaaagtcgtcactgtttcaaatgcagcaagggtctctacaagcacaggaatttttgaggccaaaaagaattgtgcatctacaagatctaaggcatactaaaccaattggacgagcctctacatatagtaataccctatattcattaatgtaggcatgcagaaaataataatttgagctccaccccacttttagcgaagcacatgttacacagctaactatgtttataatatatagtgaagaaatataccaatgtagttatgtagacaaccatgtacattcagtatgaagtacatggtatcctactaacctgaaaaacttcctcatgaggttagcagcagctatagaaaacaactagactaatactaaaccatggataagcttcaatccaccacttacctattttcctgtaacaaatctaattgtattagcacaagaaaattgaaaggataccatgtgcctggtcatacttgtcacaaattttagtatgaagtctatgtcctgtgttttgttggaagagaagaagtttggtcaaagtttttccaattgtgggttatgtgatatattagatttaataacatccatgtgacttaattgctttaattaatta

SEQ ID NO: 24135 - DNA, 1186 bp, Setaria italica
  Peptide Sequence Number=SeqID_90109
cctctccagtaaggaatggcttgtgctgctgttgctgcatacaacactgtgatgagcagactatgtgacacggacagatgctcagctgttctggagctcttggtagacatgatcaagaaaggtatcataccaaacacacgtacgtataacattttgattcaaagtctttgcatggacgggaagctttctgtagccaagaatctggtctataatcaaaggtttcatgcaaatgttgtgacctacaatacactcatccattggttttactacagtggaatagttagtgaggcagagtacttgtttgcatacatgacaaaagtagcgaatattgctccagatgaagtcacttataccataatggttgatggattatgcagacaaggaaaatttgatcaggctactgatttttttaaagaatctctcaagaatagattgtcaaaggatcttcttactgcccttataaacaggcttgctcgcagtaatagaattgggaacatccttgttgcattcgaagaaattgaaagacaaggttttgtccgtgattacatgatattttccgatacaattagatcattctgtagggttggttttcgtcagcacacaaatatttttgatctgcaatttcttctggatggaatttttgggcctggcaaggaagtatacccagcccatagtggtcgaggaaagacataaatgatcataggcaagatggaaaccgatgaacgtcagttcacttcgcgaggtactgccaggaatatgcagttatatcatttgtgtcggtatgcagagtgtgggaattcagagacaaaaaggacaaaaatgagatcaaacaccttgatcttgttcttattgatcgaaaggtggtctgctcttttctgggagctgctctgcaggggccggccatgctcatcatacagtatgagcccactgaaccgtggcatctcgcaccgtgtccccatgagtatcctccgctgccacaatggcgtcctcctcggcgtcattggagtcctgcacccctctgctgatgctgccgctcccctaccatcagccgtcatgcccctggacaccggtggtcttacctcgtcagctgccattggctccactgcgacgcttctggtgcttccgcatgggatccgtggggggcttaggcgcacgaagcctcatagtcagcacgtctttgcaatcg

SEQ ID NO: 24136 - DNA, 226 bp, Setaria italica
  Peptide Sequence Number=SeqID_90110
aacgccaccatgacgtccttcaccaacacctccaccaccaaccactctggcctcagcatggactcctccgtccccggcggcagcaaggggagctcggaggggaagaagaagagatcggaggagcagcaggggtcggatgggaacacaaagaagtccaagaatgaggcctcctcgcccacgtcgtctctcaaggcatcgcaggtgccgaaagtgaagttaggagaca

SEQ ID NO: 24137 - DNA, 602 bp, Setaria italica
  Peptide Sequence Number=SeqID_90111
acctccatgccaagctgctcctcggcagtgctgaggaggccacgcttgaggtcaggacggaggtagttagtccaccgcagccggcagctcttgccgcagcgcagaagccctgccaatttaggcactgctcgccagcagcatcggccgtgtgtcaggatgaagctgatgagcttcttgtcctcctctgctgtccacggcccccgcttcacccccagcttgtcacagcagggctgcctcccatcgatcaatttactatcagctggtgtaattgcagcttttgttgtttccattccccacaggggtatatatgtgtgtcgcacttgttaccatcttaaggaactatatttcaacaacatttcatcatctgatacactaacagatcagagcatgaggaacaaagtaaccttcatgtgtcctctgcaagccacatatatctaacatatgtttatagaggtatggagtatgaaccaatatgatgatattgagaaccatgatgttaatgttgcatcaaaatgtgttgagaaagttgcaacattcaggcagtcagcatcctaggcttgtagtcgtagctctccaagactggttggcatcatcattacgac

SEQ ID NO: 24138 - DNA, 284 bp, Setaria italica
  Peptide Sequence Number=SeqID_90112
agagaggctgacagaaagaggagcgagcacgcggcggggacggcatgcgctccatgccggccgccgcgccgggtgctcgctctcttctgtcaatctcttcagggcctcttaatctcactcacgcctgtgtcttctcctgtaacaaccagatgacaacagatgcagaaggcacatgcacggaggagcaagcaattggcagggaggcgagtcgatcgatcggtcggccgttcttcttggatccggtgagcatcggcggcggccgtagttggagcaggaggaggaag

SEQ ID NO: 24139 - DNA, 1182 bp, Setaria italica
  Peptide Sequence Number=SeqID_90113
tttgggtggcctaaccaacatccaatacttgaatttatcaatgcaaataggttatgtattgggtcaatttcttgaggggctgccagaggtcattggtaatctaattggactccgttatttaggtctatcacataccacacgatccatcttctggaattcgagctcagatgaactattcagtttcattgaccgtatatgtaccctttctaatctgcagcatctggacttgtctaataatgatagtatagtaagtgttcctgagagtattggcaacctcaggaatctgcatacactggacctctcttgctgttcacatctagtgaggcttccagaatgtttggttagaatggataatgtgaagatcttgaatgtcaccgggtgccgcaaactggaaaaatctgcactgtcccgatcaaagatttttgacttgttgccacatttcgtggtccaagctgatgaaggtgaatctagcagcaacatcggtcttctacagtacgcaaatcctaatgagttgcacataacttgccttgataatgtaaagtctgcagaagaggtccagagtataaagctgatagaaaacaggggattaatgatttgaaacttcaatggaccagtgatgcttgcaggtctgttgaggatatggaagtgatggcaagtcttgtgccaccaagcaccttgagggaatttaatatgacaggctacaataatgtgagctttccgccctggcttatcaacataaagctttatctaccagaacttagcaagattgaactgtgggatatatgtaaatgcaacagcttgcctgcattaggtcaattacaaaaccttagagagctaattattggagaaatggacagcattacgatcatcgaagaggatttttgtggtggcgcaagagccttccctcagctgaagagattttgtctataccacatggaaaatctggaagcatggaagacgatgtactccaatggcaaggatgttgagaaagaattcatgttccctaaccttaaggagctgtcaataaatgattgcccaaagttgagaatggaaccatgccttcctagagcaaagaaatgggagatagagaacagcaataatgtattatcattatgcggagaaactcgtgctacctcctctgttgcacctatggatgtgagtgtaacagtcagatctgacaaa

SEQ ID NO: 24140 - DNA, 318 bp, Setaria italica
  Peptide Sequence Number=SeqID_90114
cttgaaattctccgcacacgccaatcgagacacggtaatggtggagagcccgagctgaagcccccagccgagcgaggaatccacttctagaagcttctggatctcccagaagggggaggggaggggagagcaaggctaagccctgggaccctgggagtagggtttctctcggcggatggcgtccgccaagtcgtcgaggtcgcggcccgccggccactccggcgtgttcccggtgaacgcggcggccggctcgggaggcggcgatggcggcgtgcagctggcggacaagctcaagatattcaagaccgacaacttcga

SEQ ID NO: 24141 - DNA, 359 bp, Setaria italica
  Peptide Sequence Number=SeqID_90115
tgatgaaccagcatacatgtctgaactggttacttgggctactaagcaggcaatgtcattttcgctgcttgtaaagaggcatgctttagcctcttgtgcagctggtgggggcttaagagctgctgcggaatgtgtgaagatagcactcggttattcagagttgctggaagctcgtggtctatcactttcagcagttctgatgaagcaattcagcccctctgttgaacaagcatatgtatctttagggggtttattttcataatagcataggtggggggatttatatatagatttagaggttactttacgctatttttcataatggaaaaatcattgccaggtacaaaaaaaaaaaaaaa

SEQ ID NO: 24142 - DNA, 375 bp, Setaria italica
  Peptide Sequence Number=SeqID_90116
aaggaaagaaagaacccgaaagaactaagaaagaccccccaagaccgaagcgaggaatccgcttctagaagcttctggatctcccagaagggggaggggaggggagcaaggctaagccctgggaccctgggagtagggtttctctcggcggatggcgtccgccaagtcgtcgaggtcgcggccctccggccactccggcgtgttcccggtgaacgcggcggccggctcgggaggcggcgatggcggcgtgcagctggcggacaagctcaagatattcaagaccgacaacttcgaccctgacgcctacgtgcagtccaagtgccgcagcatggacgagaaggaaataaggcacctgtgttcttatttgcaagatct

SEQ ID NO: 24143 - DNA, 2481 bp, Setaria italica
  Peptide Sequence Number=SeqID_90117
atattctaaatctatgacagcccggcgtcggtcggtcccggctcggaggcggcgatggcggcgtgcagctggcggacaagctcaagatattcaagaccgacaacttcgaccctgacgcctacgtgcagtccaagtgccgcagcatggacgagaaggaaataaggcacctgtgttcttatttgcaagatcttaagaaggcttctgctgaagagatgcgcagaagtgtttatgcaaattatgctgcgttcatcagaacatcaaaggagataccagaccttgaaggggagctgttatctgttagaaatttgctaagtacacagtcagctttaattcatggtctatccgaaggagttcagatagattcgttgagtacagggcatgaaggttctgctgaggaagacatatccactgttgaagatcaggagccatcagaaatatggaaatggtctacagatttccctgacatgcttgatgttttgctggccgaaagaagagtggatgaagcactggatgccctggatgaagcagaacaaattgctgctgatgcaaaacagaaggggactctaactactgctgatattctggctttaaagagggctatatctgaaaatcgtcagaaattggctgatcagaaaagctgaagctgcttgccagtcttctacttgtggcgttgagcttcgcactgcagcttctgccctcaagagacttggtgatggacctcgtgctcatagtttgttactcagtgcacacaaccaaaggcttcagttaaacatgcaaacaatacaaccatctagcacatcatatggtggggcatacactgcttctcttgcacagctagtttttcgtgttatagctcaggctcttagcgactctgccgaggtctttggtgatgaaccagcatacatgtctgaactggttacttgggctactaagcaggcaatgtcattttcgctgcttgtaaagaggcatgctttagcctcttgtgcagctggtgggggcttaagagctgctgcggaatgtgtgaagatagcactcggttattcagagttgctggaagctcgtggtctatcactttcagcagttctgatgaagcaattcagcccctctgttgaacaagcatatgtatccaatttgaggagaattgaagagagtactgctgctttagctgcagctgatgactgggtactcacctatcctccaactggtatacgtccatttgctagatcatctgctggtaatctggcactccagccaaagctctcaagcagtgctcaccgtttcaattcaatggttcaggatttctttgaggatgttggaccactggttagcttacagctaggtggttccgcgatggatgggcttctgaaaatattcgactcgtatgtaaacttgctcataagtgctctaccagggtctgtggatgatgaagttaatttggaaggtttagggaataagattgttagaatggcagagatggaggatcagcagttagcattgttagctaatgcatctttactagctgaagagttgctaccaagagcagctatgaagctgtactctatgaacccagccagaggtcctgacagacaaaatcgtgcggcagaacaacgagagtggaaaaggaaactgcaccgcacagtagacaaacttagagatagtttctgcagacaacatgctctagatcttatattcactgacgatggtgacacccatctgagcgcagaaatgtacataaatatggataatactgttgaagatccagaatgggctccgtctctgattttccaggaattatatgggaaattaaataagatggcaggcattgcggcagacatgtttatcggtagggaaaggttttctacattgcttatgatgcgacttacagagacagtcatgctttggctctcggaagaccagagcttctgggaagagatcgaagagggaccaagggctttgggtccacttggacttcagcagttctatctggacatgcaatttgtcatcctttttgggcaagggcgtttcttgtctcggcatgtgcatcaagtcatactgaacatcattgatagggcgatggcagcattttctgctactgggatggaccctgatagggtccttccaagcgacgactggttcatcgacgttgcccaggagagtatcagtaggatcagcgggaagccacgagttgccaatggggagagggaggtgaacagcccgacggcctccgtgtctgcacagtccgtgtcgtcggttaaatctcatggcagctcctagtgtgcagtgcaggttagagatgcaggtccttgtacaaatactgtagtgtattcgttcctttaatttgtagtataactcatctgcactccctaggctagggaccctagctttgcctggatatgtttgtgccggtatatatatgtatatgaatatgagtgggttgtctacctataggaatggaaaatccttgaaccattgttcaaaaaa

SEQ ID NO: 24144 - DNA, 436 bp, Setaria italica
  Peptide Sequence Number=SeqID_90118
aagaggtaagaactgaagatctagacagcagcagctgctagcaccatcacttcactagcacaataacccaaggtctccgagggccaagtggaagaggttggaagcaacctcacatgctgtggtgttctcgatagcaaaaagcttgacggctgcgcttccgagatcccactgatcggcggacgctttgatcgctccgacgaggtagccatggcaccgccgagctcgtggtggggcggcgaggagcagcgtggcacaccggtggtggtgaagatggacaacccctactccctggtggagatcgacgggcccggcatgccggcctccgacaaggcccgcggcaagaacgccaagcagttcacgtgggtcctcctcctccgggcgcaccgcgccgtgggctgcgtcgcctggctcgccgcggggttctggggtgtcctgg

SEQ ID NO: 24145 - DNA, 289 bp, Setaria italica
  Peptide Sequence Number=SeqID_90119
cttttgtgtatcttggagtagtgagtaactagtgatagaaatcttgaattgaaatttttggtcgaacggcaactgaaacgaaagttggctacagcctacaaggcaactttacagcagcaaattaatgctgttgctatggtaacgggaaaggaaacgtgacggccgggccgatcggtcagttacgtttacgtacctggaggacctggtcgccgggcgccgcgacggcggcggcgctggacacgcgcttggcggccgccgcgaggtccttggcggggcctccttggaacga

SEQ ID NO: 24146 - DNA, 692 bp, Setaria italica
  misc_feature (1)..(59): n is a, c, g, or t
  Peptide Sequence Number=SeqID_90120
nnnnnnnnnnnnnnnnnnnnnnnnnnnnnnnnnnnnnnnnnnnnnnnnnnnnnnnnnnnttttttttttttttttgtagagaaatatatgtaacccgctgtaataaacaaagtaacaatcagcagcatgcacacacggaccgatccgaccctagctgcacccagcaggtgctacgacgacgacgacgacgacgacacagtatagttcaccaccacgctcatgcatgcacggctgcccctgcctgcacacgaacgatataccattatgcatgcctcctttacttgtctctccccggccagaaccctcctctctgtcgtctctctcttttcttgctcttcttcgatcacctgaggtaacagcttggttgatggatcggagacgacgacgagcattattatcggagtagtcaggcgaggagctcggccttcttgaccttggagatgctctcaaggacgccggccggcgacacgtggcccatcaccgtcaccttcttgctctccaggtcgatgctgaacgacgtcacaccttccattttggagatgtgcttcctgactttccctgcgcagccctggcagtggatcgccaccttcatcaccaccacctggaggacctggtcgccgggcgccgcgacggcggcggcgctggacacgcgcttggcggccgccgcgaggtccttggcggggcctccttgg

SEQ ID NO: 24147 - DNA, 256 bp, Setaria italica
  Peptide Sequence Number=SeqID_90121
tgaagtggtactgcagccagaggttgatgatgtccacatttggaggttttctagtgatggaaaatactcaacaaaatcggcttatgacaaccaatttcatggagcagtggcctttaaatcacgggagaggatctggaagacttgggcacccggtaaatgccggttcttcatgtggttggtggttagggacaggtgttgggcagctgatcggctagcaaaaaggaatccgccacaccctgcaagctgcccacactgt

SEQ ID NO: 24148 - DNA, 555 bp, Setaria italica
  Peptide Sequence Number=SeqID_90122
atcaaggaatttgaaaaggctctgaatctcttgaagtctgcgaattcaacggataaaatggccgaggacatttggcaggtccttgcgaaggcgaaatacctagattgggaaaaacattccactgaacgagtttggaggatacaaagtttgaaggaagcttgtgaaagtgctctgcaggagcatcactttcttagcggtacacttgtagaagactcggatggatcaagcaatgagtattcagaacaaattaaaatgttatcagaggtcttcagcaaagcgacacttgccgatacaccagtagatgtgcccgactacctttgctgtcagataacgttcgagatattcagagatccagtgatcacacccagtggtgtaacgtatgagagggctgtacttcttgaacatctagacaaggttggcaatttcgacccggtaacacgagagcctcttaaggagcatcagctggttccaaacctggccatcaaggaagccgtgcaggcctacctgaaagagcacagctgggcctacaggctgaactgactgttagatgctgtt

SEQ ID NO: 24149 - DNA, 508 bp, Setaria italica
  Peptide Sequence Number=SeqID_90123
cttctctctctctctctctctctctctctatctgtgatcttaaagctgctgataccaatacaagaaggtagacgcccgactacctttgctgtcagataacgttcgagatattcagagatccagtgatcacacccagtggtgtaacgtatgagagggctgtacttcttgaacatctagacaaggttggcaatttcgacccggtaacacgagagcctcttaaggagcatcagctggttccaaacctggccatcaaggaagccgtgcaggcctacctgaaagagcacagctgggcctacaggctgaactgactgttagatgctgttgatacttggcagtgtacgcggagtgctttgctgactgctgctgatgaatggtcgtcttaacgttgccttttgtaactataatcatctgtccatgtgcgtcaggttgacgttaggttgctcgattcatttcattattgggctatgttgagttgtaactgaagacattggaccgattggatcaaatg

SEQ ID NO: 24150 - DNA, 265 bp, Setaria italica
  Peptide Sequence Number=SeqID_90124
caattgaaatacagagggcaatattgaggcaaggaagctcggcaattactaagacagggtttatacggagcgccaagaagttccggtgggtgaagcttgatgaccctgtggacactaacaagctttgccatccacaagcacttacaaagttctgtttctttctgatggatgcactgaaggaaaggggtgcgaggatgaagccactaatctgtgcttgcttggcaaaggaacctgagaaggtgctggttgtcggggtatgtgggaa

SEQ ID NO: 24151 - DNA, 486 bp, Setaria italica
  Peptide Sequence Number=SeqID_90125
ctctcatctcacattctctctctctgccttaccttcctgtcctcctcccgagaagtagacgaagcccaccggattcccacccggttccccatgcctcctcgcctgctaccccagtagcctcccctctctcggcagctcgattcgccgcacaggaccgcggcttggggtttggatccggcaatctcttgccgacgcgccgcagatccgaacaaatcccagccttcccggtgctctagggtttcttttgggtttcttcttcccttcgattcactcgcgctcgcactgtccgagtgtgctgacgctggttgcccggaggcctcacgttgctgcatcattagcattaggattagactccctgggtgcttgttctactgtctctggtcgctggtcacacttgcacgcgatttttggtgtgctggacgcccaggaccatcaggagctttggtgttgctgtggcatggcgttgctgtgagaaatcaggacctt

SEQ ID NO: 24152 - DNA, 521 bp, Setaria italica
  misc_feature (19)..(19): n is a, c, g, or t
  Peptide Sequence Number=SeqID_90126
caaattcgccagtgctccnctttttccgcgtgcgagagctgagagcacaaacaaacaaacaaacaaaggggaggcgaggcgagggctcccctctgctcgcagccttgcatgctggttccttctttgcaaggatgagctcgtgaccatggtgcacggcgaggagagctcgtggaggatggagcgggcggcgctgcctctcaaccaggcgctcgcgtacggagtccaagcccacgccgccgccgccgccgcaccgccttcctgcttcctggacttccagcctgcggccgcggcggctgcctacttcgggttcggtgagctggaggaggccctcatccatggcggcggcggcgcctctgccaacgccggcggcggcgtcgatccgggcgtgatcatcaagagcgacgccccggcgcagacaaagccggcagcggcaggatacctcgcgggcgctggcggtggcaggccccccacgctggagatcttcccttcgtggccaatgaggcaccaacagcagctgcaca

SEQ ID NO: 24153 - DNA, 767 bp, Setaria italica
  Peptide Sequence Number=SeqID_90127
tttttttttaccttactaacaaaaacatcaaataaatgaactataggagtgacatgtacagagtacacaacaatgctatatatgatggcctaagaaacacactcgagacaaacaacagtagtgtatacacacgatgcaatatatcatttgtctacattttcccgtacaaggctacactagatgtcactcacgtcgtacaccacatggatggcaacgggaaacacacagaggacgacacaattccaagcagtccccggccgtcagaacagccaccgtggccctgcagatatcagcggctgcggcggtagagggagtaggcgttgaggacggcgaggaggacgaggacgatggaggcgacgaggccgaggaagacggaggcgccgatgtggcggcagaacttgccgtaggtgtcgcagatcttggcccaccgggtgtgcgagttgcccttgagcccgatccacgccacgccgcccgccgagcccgtcgcggaagccatcaccgccgcgtagaacacatcgagcaggaggaggaggaagacggtcttggctgcggaagcggagcccgagatgagtctcatcgagccgagcgccgtcagcaggctgtacaggcacgtcacgcacagcgccaccagcaggtatatgagcgccggcgagtccttgaacttggcgtccatggcgaggacggtccgcagcagcgggacggggatgagcacggtctgcttggcggtggccagcacgacgagccccgccaagacgttactaaccgta

SEQ ID NO: 24154 - DNA, 321 bp, Setaria italica
  Peptide Sequence Number=SeqID_90128
gcggccgccgctagcgcacacacgcacgcaggcagcaggcggcaatgcaacgcgccgcggtcctacgcccgctcgtcgggtcccctctcctccccgcgagacccctcgccgcgcggcgccgctgccgcttccgtggaggcgttcgcgtgaggtccgcaaccggggagggcgggagcggccccggaggcggagtcggcgagggcgacggagccgcggcgtcgtggctgagctcggcggtgggggagaaggtggacgaactgctgcggcgcgaggagaaccgggccctgctcgagggcgtccaggacgccgagcgccgcgtgg

SEQ ID NO: 24155 - DNA, 342 bp, Setaria italica
  Peptide Sequence Number=SeqID_90129
tattcctattgtattgtaatccatgatgactccaatagctgcaaggcagttcaggaagctctccagccatggttgagatccagaagacactcatgataaaagagatgagtgtgcttgaaatgttttctgattctggtgattctttctctagaaggaagtgggatatagccaagcaaaagctagcaaaaagcacaacacaccatatagggaaacggatttgagggaggataaacactattccggtatctagaggaatgaatgaactgaaagaatacaggagtaagagagggcatagacagatgtttgcacaaatgtaaactttgttccactcagaaggaaggg

SEQ ID NO: 24156 - DNA, 289 bp, Setaria italica
  Peptide Sequence Number=SeqID_90130
cggtgaggtgcttgctgacgatcgccgtggtgctggctcccttcctcgccggcgccaccgcgggcgggccgctgtcgacgagcttctacagcaagaagtgcccgaacgtgcagggcatcgtgcgggcgggggtggcgtccgccgtggctgcggagaggcgcatgggcgcgtccatcctccgcatgttcttccacgactgcttcgtcaatggctgcgacggctcgatcctgctggacgacacgtcgaccttcaccggcgagaagaacgccgggcccaacgccaactcggt

SEQ ID NO: 24157 - DNA, 330 bp, Setaria italica
  Peptide Sequence Number=SeqID_90131
aaccacacggtgtaaactgaaaccaccccacacaacacaacgcattcgttcctgaacaggtccttgcagctccaagctccacggggcacgcgtgctccttccttcctaggctcccatcaggcaggcactagccggtgatctggacgggcttgacctccggcttcttgacctcctccttgggcacggtgacggtgagcacgccgttctccatggacgccttgatctgctccgtcttggcgttctccggcagcctgaaccggcgcaggaacttgccgctgctgcgctccaccctgtgccacttgtcgttacttctactttacctgcacctta

SEQ ID NO: 24158 - DNA, 810 bp, Setaria italica
  Peptide Sequence Number=SeqID_90132
tttttttttgtcagaattagcaactcaaatcgaaattcattgaaactgggtttagtacaaagtacaaacacgacgctgatccacaaaacgcaaggctttgcggtacacggccaccactctcaaaccagctgaagtcgtagtacccggacgctaacatttcggacgcaaaatgtgaagaacaacagactccacacggacgacacacggttttagagcaggagcgaccaggaacttcccggctctagccggagatctggatggacttgacgtcgggcttcttgacctcctccttgggcacggtgacggtgagcacgccgttctccatggacgccttgatctgctccgtcttggcgttctccggcaggcctgaacctgcgcaggacttgccgctgctgcgctccacgcggtgccacgtgtccgtcttctcctcctgctccttgttgcgctcgccgctgatctggagcacgttgccgtcctcaacctccaccttcacctcctcattcttcagccccgggacgtcggccttgaacacgtgcgcctccgggggtccttccagtcgatccgcgcgccggcgaaggcggccgtctccgagttggtgctcgcaaacgaggggaagaggctgctgctgccggagccgaaggcgaagccctggaaggggtcccagtcgagggagaaggggtcgaacacgttgctgcggcggatcagcgacatggttgatcggttggtgtggtttgcttggtgtttaagtgacgcgggagattgggattgtggttgtttcggcgattgggggcttcgtgtgtgtttctttct

SEQ ID NO: 24159 - DNA, 955 bp, Setaria italica
  misc_feature (1)..(5): n is a, c, g, or t
  Peptide Sequence Number=SeqID_90133
nnnnnttttttttttttttttaactttttaaacgaaattttttatacatgacacaacactgaagttcattagatgggaaatagatacatagaccatacacacactaatgaacacaaactggattcaacaatgccaagatgagacgcagggacgctcgtcgtttcagaccacatgctcttcacgcagactctgacaccacacgagaccacaacgccgaacccgatttttatttcgccagaacgaaccaggcggactccggtaggcagcatccttcactcccatcaggcaggcacgacgatgtctaaccggagatctggatggacttcacctcgggcttcttcacctcctccttgggcacggtgacagtgagcacgccgttctccatggacgccctgatctgctccgtcttggcgttctcggggagccggaacctgcgcaagaacttgccgctgctgcgctccacgcggtgccaggtgtccgtcttctcctcctgctccttgttgcgctcgccgctgatctggaggacgttgccgtcctcgacctccaccttcacctcctccttcttgagcccccgggacgtccgccttgaacacgtgcgcctcgggtgtctccttccagtcgatcctcgcgccggcgaaggccgcggtctccgagctggtgcgggggaacgaggggaagaggctgccgctgctgctgccggagccgaaggggaagccctcgaaggggtcccagagatcgagggagaaggggtcgaacacgttgctgcgtcggatcagcgacatggtcagtgggatttcttgctggtggtttggacgaatcgaggttcccaagtgaggatttgagtgatttggtgagcttctgatcgttgcttggtgtttttcttgtgtccttgtcgccgcagcgaggggagcttttatagaggaaaaggggtatcgatggaagtggaggaacaaag

SEQ ID NO: 24160 - DNA, 417 bp, Setaria italica
  misc_feature (189)..(189): n is a, c, g, or t
  Peptide Sequence Number=SeqID_90134
ctcgaggcggcctgcgtcgacgacgacgtcgtcgtcacggcagccgccgtcacgtctgctgagaagaaggccgcgggtgggggagacgccagcgagttgggcgagcgcgacaccacgtcgaaccagccgttgtcaccggacaggagctgctcgagaaggtccaggtccacggccgccccgccttcggangggtgcgtgcctgcagggagaagctcggctgggggtctcctcctccctcttccatgcaggtaacccgatcaggattggtaatcacacgcctgacgcctcccttcttgtcatcaaaaggggcactgtctctcgtctcttcctcctggctagcttggtgctagcctccacccaccaagtagctctgcgctgctcagctcaccgccggaaaaaggctctagtggatcctgc

SEQ ID NO: 24161 - DNA, 528 bp, Setaria italica
  Peptide Sequence Number=SeqID_90135
cacctattcgatcttcaaaatatccatcataacagaggaagaaatgatctccttttttgtggaatcccaagctgctgcaccgttttggtgccactttctacgggctgcagcatgaatggagaagaaaaggcgccttccgtgatgataacgtgataaaagaggagcccgtagacaagagattcgggcaaagttggaagaagtgaacgcgggcattactagtaaatggcatcagtgcaggggcacgcaccaaacggaagcagggaccagcagtacatgttcaataattggacgaagacgggtataaagatatattagaccacgctgctgaaagcacacctttctttttctcatccttttgcaattttctgccgcacgcacaagaaacccaagacttgtttttaaatctactttttttaagaaaaaggtcatggtccatcggttgtcaacgtcgaagcgattgcctgaaatcttctaaaatccagacccgttgcaaaaaggcgagctgactaacagcagcaaccagacaaa

SEQ ID NO: 24162 - DNA, 415 bp, Setaria italica
  Peptide Sequence Number=SeqID_90136
cggcggggatccgggagggcgggcggcgtgtctcagcggccatcaccgtggccgcgtgcttcctggcgtccctcttcttcggcccgctgctgatgagcgtgccaccgtgggccgtgggcccgtcactggtgctggtgggcgcgatgatgatgcgcgtggccaaggagatcgagtggggcgacatgaaggagggcgtcccggccttcgtgaccatggcgctgatgccgctgtccttctccatcgccaacggcatcatcggcgggctaggcgtgtacgtcgcgctacactggtacgactgggcgcgccacgggtacggcaaggtgaggaacgtgctggacgagcggcggaaccaagtggccgccgccgcgggcgaggttggccctgctgcggcggcgcaggatgccgtgtgagctcc

SEQ ID NO: 24163 - DNA, 359 bp, Setaria italica
  Peptide Sequence Number=SeqID_90137
ggggcgtcaagatctgcgacttcggcctgtcccgcgccgccgccgacgccggcggcgcgccgctcacgccgggcgtggccacgctgtggtaccgcgcgccggagctgatcctgggctcgcgggactacgacgcgggcgtcgacacgtgggcactcggctgcatcatggccgagctcctcgccggtgcgccgctcttcccgggtcggtcggagatggaccagctcaacagggtgttcgatacgctggggatgcaggacatggcgtcgtggccgggcttcgcgcggctgccgcgcgccgggtcggggctctgccaccgcgcccggccgcccagccggctacgggagatgttcccggcgctg

SEQ ID NO: 24164 - DNA, 1450 bp, Setaria italica
  misc_feature (1406)..(1450): n is a, c, g, or t
  Peptide Sequence Number=SeqID_90138
tcgccttttgccgttcgtctcgcctcatcttgcgcagcagcagcagaacggagatggccaaggacggggcccccgactggaacggcctgctgaagtggagcatcgcccacggcgacggaaccaacccgccgcgcgctctcagcgaggaagacagaaaatggttcatggaggccatgcaagccaacacgatagatgttgtcaagaggatgaaggagatcactcaggtgatgaaaactccagaagatgtcttggagtctcagggtgtgaccccagagaacattgaagatatgttggatgagctacaagagcatgtggaatccattgacatggcaaatgatctacattctattggtgggttagatcctctacttagttacttgaaaaattcacatgctggcatccgagcaagggcggcagaagttgtgagtacaattgtgcagaacaatcccaagagtcagcaacttgtcatggaatccaatggactcgagcccctgttgacaaacttcaaatcagatccaagtgcaagtgcacgcacgaaagctttaggagcaatatcctctttgattcgtcataaccagcctggaatttctgcattccgcctgggaaatggttatgctgggttgaaggatgctcttagttctgatgatgccagactccagaggaaagctctcaatctcacacaatatctgctgcacaacaacaaagctgacaggagcatagctacagagcttggtcttccaaagctgatgatgcacctcgcatccagcgatgattccttagtgcgtgaagctgcgttaagtggtctcctcgagttggcacaggacaagacatccggtaacactctacccgaccaagacaagctgaaagacatactcaagagccgaatcgaagggatcagtgcgatggacgctgacgacctccatgctgctcgcgaggagcggcagctagtggattcgctctggaaggagtgctacaatgagccgtcgtccctcagggagaaaggcctcgtggtgctccctggagaggacgcaccccaacagcccccaccggatgttgcgggaaagatgttcgaaccaccgcttcgtgcgtgggcagctgcaagacctgcgccgaaagatgattctgataccggcagcgagaagaaggatgcgccgcagttgctgcttggccctgggccgtcctccaactccaattcttagactttgccacgcttgtggaaggctgaaatagcagacctgatggaagtctctgacttttggcctgtgcaaactcctgtagtcgtattctgatgacatgctctgcattttgtttcagagtatgatttgtgggaggtcgttggtatacttgtatcctctgatgctttaaatcaatgctacttgtgaattctccttgcacaagggttaacnnnnnnnnnnnnnnnnnnnnnnnnnnnnnnnnnnnnnnnnnnnnn

SEQ ID NO: 24165 - DNA, 266 bp, Setaria italica
  Peptide Sequence Number=SeqID_90139
gtgcaggagaagagggggctcctgttctgcaaggaggaccgggcgatcctgtgccgggactgcgacgtgtcggtgcacacggcaagcgagctgaccatgcgccacacacggttcctgctcaccggcgtgcggctctccgccgagccggccgcgtgcccggcgccgccgtcggaggacgagaacagcagcggcagcttctgctgcggcagcgccggcgacgcggcccctccctcgtcggcgcccgctaccagccacggcagcgacag

SEQ ID NO: 24166 - DNA, 539 bp, Setaria italica
  misc_feature (2)..(3): n is a, c, g, or t
  misc_feature (10)..(10): n is a, c, g, or t
  Peptide Sequence Number=SeqID_90140
gnngaggagngctgagtagctgacaaagcagcatggacctccagtggaccacttgacaagtttagggtgtttgatttcgattttgagagtccgtggacctaagtggtacatcgtgacaagtttgaggaccgctgatgtgtttaactcttttttttatttgaccaaaggggaaaactcatcacaatttcattacttgttcatgcacattacaattgcccaatcaggattcacctgtttgctgattcactgtataaactcgttcatcaaactttgcaaaagcaaaagttgctttccttgctgtccacactgagtgatagcaatagcatcattcatttctgttatctcctccagcatcacgagatgccacccccacacattgccttcagttccttcagggtaggtcatttatcagtggggagttctcgtcccctatcttaatcacggagtgctatctgaatgttccattcatttcatatgcattgcatctgaattgtgaaataacatggtatcatagaattgcaactcagttcattaggctt

SEQ ID NO: 24167 - DNA, 803 bp, Setaria italica
  Peptide Sequence Number=SeqID_90141
tgagagagacaaaaccctcctcccttcctcgccgcctccccccgcctcgcagtcgcaggtctagctagggtttggtctccccgccccgccgcgcgcgctcctcacctccagaagctgccagacgctcgaaggaggagctcccgccgccgcatcagccatggcgtccacaaaggtccagcgtatcatgacccagcccatcaacctcatcttccggttcctccagagcaaagcgcgcatccagatctggctgttcgagcagaaggacctccggattgagggtcgcatcattggctttgatgagtacatgaacttggtccttgatgatgctgaggaaatcaatgttaagaagaacattaggaaatcattgggtaggatactcctgaaaggtgacaacataactttgatgatgaacactggcaagtgaagggggtagatgtttggcgcctagtatccttgagacatttgtactccatcgaggctgaaatgtagcatgtcattgtgcgtgagacattgtacccttctatccagactgaaaatgtagcttgtcattatggaagtgagatagttgtccttgttgactacctggggttaactctgtgagctactgctagatgtgataatgagctgctcacttgtggtctgaatatcaacatgacttgtgtgtgctttgttgacatcttttctcgttctcatcgtcaggtttaaccaaatttcatcgtctcaggtctcagctttatgtgcaagattggcttttgcaagtttatctttagaaaattatgctggaaatgaacaggtggtttcaa

SEQ ID NO: 24168 - DNA, 239 bp, Setaria italica
  Peptide Sequence Number=SeqID_90142
gagaaagaggaggaggaggaggtggtcaaggcggccgtggcctggacggcggacgacgagcacagcatccagagcatcggctcgctggagctggagagggacgccaggctggagaagctcatgtccaggcgcagcatccaccggaacctcatcgacctcgacgtccacatccccgccgtgctgaccaagaaccccttcgacctccaccatcatcatcatcatcattgcgacgacaccgg

SEQ ID NO: 24169 - DNA, 2157 bp, Setaria italica
  misc_feature (1)..(49): n is a, c, g, or t
  Peptide Sequence Number=SeqID_90143
nnnnnnnnnnnnnnnnnnnnnnnnnnnnnnnnnnnnnnnnnnnnnnnnnaaaacttaaaaggaaacttaacatcctggctatcctgcagtctgttctgcaatcagtgacgggtagtacaaaaacaggagcaaaccaacaaaatttctggacgatgtattgtacacgtccgaagatttacatgattgctcacggccaaattgcacagccctttctcagttcctataaaccccctaaaaaatgaagatgaataaatcactctatggctcctagtgtacaacataactctgaattctgtctatgctaacatacaacatgactcggctttgccacaacgaggcacgtatgcccccacaaatcacaatgggggagtgcttccgcagccggtgtttgccggcagatgcttgcacttcactggccttaccgcagcttcaacggaaaactttgttcccagttgttcttccattaaaaaggtacggtcaagcccacaagaggcaatcaattcccatttcgaagtttgtgacgggactttcaccgaaatcttcgcttgttttttggacctcagtctttgtttctacgtatggctcagatagatcagatgaccgtacggaggggatggcatgttccttgagaatgtctgacgatgcagcagtcgcttcttcccgattcaaaacaacgaggaagtcatcctcaaattcgaacgtcaggaacttgtctttacaagtgtccacaagatgagcaaggtggtggatgttctttacggcagttccatttagttttatgagttgttgattgcccatatgttcataaccgatgttgacctcgtgtgccaaaacctgtgatacaataacaatttgctccccctcaaaggttgctagagagtaacgtgcttttgccaacaatttcaacccaagtgtatcttcacactcctcctctataaatggttctgttaaaggtgtgaatacaaggccggcaactatcagataagaaggttggcccccttcgacatgaaacggcactaaatgttttcttggctgcaaaatagtttggactttcatggaatttccatcccgaattattccaagctgagcaatatcacctgcatacttttggcttgtgagatagcggaaagcaatccgctccgtggaccgaaaaggtactgttgcttcacatcctactgcgacaccatcaaagctaactattacatctccctttcgcaaaacactgcttgctggagcagtaggctcaacccgacgaacaagaacaccctcacttgaaggtacttttaagctttcacgcaacgccggattttccaatttttgaagtaagacacccaagcaaggaaatcctgtgtactttccatttttctgaaaatcatttaagaaatgggatacaactgtagttggaataacatatccaatattttcagcttcatctgacctgtacacctgaaatgccacaccaatacactccccttgttcattaaaggctggtccaccactgtttccaggatttatggctgcgtcaatttgaatgccaagaagatctgatgtcccatgtgcatatggagtgacctcaatgcgtgatacaacgccttttgttacagatattgtgtctccaccaagaggatatccaacaacagttaccgaatcctgaaggcatggtaaacgcccaaaagaaagtgcctctgttcctctccagaactcctcgttctccacagacagcaatgcaaggtcgcattcgatgcccctagctaaaaccttggcaatatactttttgtcatctcctcttctctttactttgacctgggtgtcatgctcaacgcaatgtgcattcgtcaagagtttgccatcaccaatcataaaagcactcccactgcttgaatgttgcctttgcttctgccaaggcagaccataatcgggtgcgatatgagtgcaatagaccttgacaacagcattaaggaatttgtcttcttcaagatcatcaaactcagcaacctgcgactccttgaagtcgacggcgagccccctatcccttcgcggagacgacgcctgcgaccccacagcgccgccggctcctcctccgatgccgcgccgcttcttcgacaccccctccacctcgtcgaagcgccggagcgcgcgccggcctcgtggctgctg

SEQ ID NO: 24170 - DNA, 245 bp, Setaria italica
  Peptide Sequence Number=SeqID_90144
actttgtgaaaacaatccaagttcatgatacattttgcatgactagtaccatgtcaaaatcaataaagctatagatagcagaaaattggatccggtccattcatgacaacgacttattttggtgttgtgcagtcctaaaccatagtgcatgcatgggcccatcaatatagtttcactgaaggctcaacactgatgcacattatctccggtgaaagtttcattttagctagagagtacacataaaa

SEQ ID NO: 24171 - DNA, 915 bp, Setaria italica
  Peptide Sequence Number=SeqID_90145
cgccgccggcctcatccggctccatttccacgactgcttcgtcaggggctgcgacgcgtcggtgctgctgacctccccgaacaacacggcggagcgcgacgcggcgcccaacaacccgagcctccggggcttccaggtgatcgacgccgccaaggccgccgtggagcagagctgcccgcgcaccgtctcctgcgccgacatcgtcgccttcgccgcgcgcgacagcatcaacctcaccggcaacctcccgtaccaggtcccctcgggtcgccgcgacggcaacgtctccaccaatacggacgccgtcaacaacctgccgcagccgacgttcaacgcgtcgcagctggtggccaacttcgccgccaagaacctcaccgccgaggagatggtcatcctctccggcgcccacaccgtcggccgctccttctgcacctccttcctcaagcgcatctacaaccaatccacatccgccccgattgtggactcggggctgagctcggggtacgcggcgctgctgcaggcgctatgcccgtcgaacgcgagctcgtcgacgccgaccacgacggcggtggacccgagcacgccggcggttctggacaacaactactacaagctgctgccgcttaacatggggctcttcttctccgacaaccagctgcgggtcaactccacgctcaacgcctccgtcaacagcttcgccgccaacgagacgctctggaaggagaagttcgtcgccgccatgatcaagatgggcagcatcgaggtgctcacggggagccagggccagatcaggctcaactgcagcatcgtcaacaacggctcgtcgtcggcgtcggtggcagcgccgaggatcgagacggcgatctactctggatccaccgcgtacctcgacgagatcgccacgagctgatcgat

SEQ ID NO: 24172 - DNA, 373 bp, Setaria italica
  Peptide Sequence Number=SeqID_90146
ggaagtagaggaggaagaggaggaaaaaaggaaaaggtaatgaccaacacaagaataacggtaacgccggcaaacccacgggtaacagcaactccggcgggcgtaataagaggacccgcgacaacgacagcagtggcggcctgcaaggccaacgcaagaaggcctgcaacgaccgcagccatggcggccctgctagaatgtccgaggaggctggcgatgctggcggtggcagcagccatgctaggcaacccagggaggccgttgacgctgacagcggcggtggctctgctagccaaaccgaggaggatggtgacggcagcgatagctgccaaccctgggaggttgacagtgaccacaccagtgaggaagacgg

SEQ ID NO: 24173 - DNA, 544 bp, Setaria italica
  Peptide Sequence Number=SeqID_90147
gttgatgaggagatgctgaggagttgtacatttccagagttcggagaagatcaggaagatgagcagggtgaggagttcagattggattgggataccagtgacttggacgatgttgttgatgatattgttggaatgagaaccagtttgcatggggctgcggcaatatctgcatttgctgatgaggatattacagatggtatatttggacttgaattgaagggagatagcatgttttggagtagtgatgacgaggaagaggatggttacttgtgaggattgaggaacacatgggtgttaacaggtaatcagtaaacacttagatggatacatttctttgttttctgtacatctgaaatgatcaattgatcatgtatcagttagcaaactattgtagaactagcaactagattgttattccctagaaattactggatcatgaatattggaccagcttgttcactcactatgtgctctctgtggcacagatatttggcaactaaattgaattagtccactcttggttttatttgagcatggaggcagg

SEQ ID NO: 24174 - DNA, 350 bp, Setaria italica
  Peptide Sequence Number=SeqID_90148
tgaaaaacttgttgtccgggttcgacgtgacaaaaccaacgtagagtgaaccttcaagaactgttaggatctccgtggcacgggggtgagtgtgtggagggttctgtccttgaggagcatagtcaatccttgccatggagatgccgagggtgttgagacctgggagcttcatcgcattgatcaacgtgacgttggacttgaccttgctcttcgtcgtgtccccaggcttgtcaaggttggctgctaggaagaagtcatcgaccttaacatccttcacatccttgcagggtaacccgttgacacgtacaggcgagtatttgtctgcgacgcagaagtcctggagaggaccg

SEQ ID NO: 24175 - DNA, 2890 bp, Setaria italica
  misc_feature (1)..(45): n is a, c, g, or t
  Peptide Sequence Number=SeqID_90149
nnnnnnnnnnnnnnnnnnnnnnnnnnnnnnnnnnnnnnnnnnnnnacggttcatcaaaaagatactttggcgaattttcaatatataggggatgtttgagagttttcaagtgcagtaaaaactccgaactttccatatcacaaccgtacaatgtacactgatttcacatgctggttactatactggcaagcatatctttggaagcaaaacaactgctcctaaacaacacatgtccatgctagttttgagtgtatagttagcaggttaattcagacttatcttttgtttgctacctcttgacgttctaatatagaagaatgccagtcactcactttaaggtagatatctttagcgaagccttccaaggtcttcccccatccctcatcagagatgtatagcttccagcaatatgtgcattttctgaggattactgcaaaagccattattgccggtgctgcaaactaatgaaaattgttagtacatcttgcagcttatgacaaagggtgtccaaggatgttcatgaagtgctatctgccgcttctggtagtatcaacaacacactcttcatactgttgacattctgctccaccagacactaaaatttctgatataatgcactgggtaaataatctgggttacttgggactcttattctgatgccttgtgcaccacctcctgatgtcagaataggcctctcaagcatgaaggttgggcctacgagcccaacattaactcaaacatgtcatctggagtgagaagggtggtaccaccaagtatagactccacatctggtctgctgctctctgagattgccttcataacttcccgcacctccagagtacttaactaccccccaaaacaatagaataagcacactttgatcaccaaagcttggtttggactgtccaagcccaaatctccctaatccacttttgaacaaacgaccaacagctgatgaatgatattcaaggccaggtacatcataccttgacaacagggctaatagcaatttataaagcaagcctttcctcgagtagccatcagtttcaaatctacttaatgccgctagaccttctccaagggcatggtttcttaacctcatactggacaatttgtgaaagaatttgaaaagttggtcaaccctatctcgcacttccaacttcagttgcatatccccataagcttcctccttttggtcatcggcattgtcattgtcatcccagttaccccattcatcatcgaaatcatcagtactggatggctcagtagagtccttattattcctctcaacatctttggatcttgctttagcttcaagttcattatccaggccatcaaggaatcgtagcttcactgatgatggtcgctcaaggatagaatccaccaccacatctttaagagaccgctcatcttcccaagaaaagggaccaccagctatagatgtaggaaaattctcaccagccaagatatacccaataattgttagaagtaatacatcctgaaaactaagtaatccctgagaagattccattgtagtagcttgtttgtgagagtccactgaagtactagtgtttatgaaatcacgaagctcactggcaagactttgagtcgtctctgcagatgttacacttaatattctttcagcactagtaaaagcatcccagtgagaactttgaggctccaggagagtcatttcagcagccagagctaactggataactcctctgtttcttaacaatgacaactggtcttgagagagtatttgtaccatagaacgaatctctgaaacagaagtggctccttgtcgacctttagatgcagaggatagtttctcatgctgcagagcttcaataagccatttcttaatcagcattaatccatctttgctcccctgtctagtaatgcttctaagtagtgtactccagcataattcgataggagtgaaccatttagagtgccaaggtcactgtcaagtctgtcatcttgtgctttgtcagaataatcaggcagccaggtaacttcggagtcaacatcagcagagttccatccagacataaatgacatgataccttcagacagcatacttgtccgactcttaggttcttccttcttaaagactgtctcaaaagggacctttatatccagtgggactcgtttaacagcagtgtgagaatgcttgcttggattctgtggatttttcgccacagaatatgatgatgaaatcttttctttgcgtggcaatgaggacagcatcctatcaagaaatgagtcaccatggaagcaaggagttaggagatcaaccgtacgatctacgatcaatagaccagcagatctcttattacgaccaacatcatataaacttgacatatccatcatcaacttcccaatgacctttgaagtatcacccagcgaaaatatatcgagctttagatccatcttatttgccaaatgatacaggaactgagcagtcaatgtcactcctggaggaacctcatcactgtcgaaaggtttaccagtagatatagagggtagaccaggaccaagggaatcttcatgctgattcgacaaggatgagtcagcaattatgccctcagaaggcaaaacaaaagtccttggggaaataggagagaaaatcattgggaagtgagacacggttacagacaacctctttccgcttgccactaactgacctaagtcactatcaaacaaattcctttttgtcgggctggattcagcattcgatccatagtggaccccagaaccccattcagaatatttatcagcatctgtggtgaaatcattccctgtattactaatattatctttatatttatttgatttctcactacttttttaaaaagcttcctcatggtcctgaacgagtaacgtc

SEQ ID NO: 24176 - DNA, 536 bp, Setaria italica
  Peptide Sequence Number=SeqID_90150
aagaaagaaaaccacgaagaactgcagcagcagcagcagcaggagacactatcggaatctgaggcacccatccacatgcatgcatcctcaagacatggggaggtttgctagtggaaaaccactactgcagaagctgaaggctggagtagactcaagcagggaagcctcttctgaaggcatccgacaacagtggagtatcacattgatgtcatatataattgttgccagttcagtgcagggtgcaactttggcattgttgcaggccaatatcccctccatcgtagtggagggtccactctatttatcagcccaattaatgaacttctgaaggcacaacatttctgctcagcttcagcaatggaggaatgaatgatagctagacaaacaatggcagcaccaaaaatattgcgtattgtaccttcactcgcaatttggcaggtgagagtttttgtgttcggttgggaatgtttggaatgcttatttatgggttcacccgttcactcgtttattacctctttcaaatgtacagttatgct

SEQ ID NO: 24177 - DNA, 1118 bp, Setaria italica
  Peptide Sequence Number=SeqID_90151
ccactccgaaagctaaagcggaggccgaccattataaccaccacccgaattatattcatcgagggaagaaaaaagaaaagggagcaccgagccgagctagaagaagagaagaaaagacgcagcatctactccactgagcgagagcaacccctgcaacaacgcacacagacacagagcgcacagggtgttgcgagagaaaagtttgtccagctcgtgccttctgcaaggagggaggagtgatcgcgatcgggtatcatggcacggcggtcgcggccgtgcggcatgcagctggcggtggtgctcgcgctcctcgtcgccggcgcggcggtggtggccgacgacgacgagaagtgcgggaacccgtgcggcaacccctgcggcgtgccgtgcatctacgccagcccgccgccgccgccggcgcccgtgtactcgcccccgccggcgcccgtgtactcacccccgccggcgccggagtactacccgccgcctactccggagaagcccggctgcccgccgccgccggaggggggaggaggagggtacaacccgacgccgtacacgcccggcggcggctacaacccgtcgccgtacacgcccggcggcggcggctacaacccgacgccctccgggtggtacacgccgcccaaccagctgccgtcctacaacaccccgccggggacgctctacccgcaggaccccggcttccggcccaacggcgcgcccggccgcggcgccgccgcgtggcgcgcggtggcagccttcctggcggtggccggagccctggccttgtgatcacccaccgatcgaccgatggggagccatggtgatcaagtgcatggcgctttcaatttccgcaccgtgttaattaataataagattagagaaggatataaattcggtaaggatttttttccctcggtgattcttgttgttcttggtgtcgttgctgttgttaatcgttcttgtcgtgtaactgtgttgaatccatctgtttatgatcataggaaacatgcatgttcatcagaatatatgatacatatatatacatctctgatcaaactcgaatagaatgctccatgtaaacggttgacaataaaaaaaaaaaaaaaaaaaaaaaa

SEQ ID NO: 24178 - DNA, 343 bp, Setaria italica
  Peptide Sequence Number=SeqID_90152
acagcgccgccacggccgcggcgaccccgtggacgcagctcctcttcgaggagccggtcagctcgacgtggccggggagcttccggatgagaacgcagcctgagccgccgagctcggagcagcagccatcggagcagagtaagaagatagacttggacctcaggctgtgaaagatcctagtggatggatgtagagttttctagcgacctgtactttgattttcaattaatttgaccagtatataattaattatgaagtgtttaattcctacaaaaaaaaaaaaaaaaaaaaaaaaaaaacacaaaaaactcagagacacgacaacgagggagtaggacgaagg

SEQ ID NO: 24179 - DNA, 476 bp, Setaria italica
  Peptide Sequence Number=SeqID_90153
ttcagcctcaatggcacgccggagttagaagatctcttaagtaggtccgaaattgttgaatttttggggagttcttgcactgacatcttttcatcctccagaagtattactagaaccggtccgctgtggtcacattgtttggcataagagaacggacagacatcggagtgcgacctaatcgtgtgtatgttacttggtgaagtgtcaggtgcaagtgatgaaggatgctcaatgtgcaaagtttcacactgacatgtaaccacctttctaacccactctaccatttcaggaacagatgaagagcaatttcgaacaccttccttgtatctccaatgtgcagcaattccaaactctgcctgcaaatgcatgtccctagtacgaatttggatttccagggggagcatttctttagtgagcacaactgtgtgcagggactgatacctacagtttagcaaaatattcaattaccactgtgg

SEQ ID NO: 24180 - DNA, 726 bp, Setaria italica
  Peptide Sequence Number=SeqID_90154
agattggaccaaaagtatactgtatacatatcgatgcagagcaaattcacaggctacctttggtccaatctactgaaacaagagtataccatacacacgggttactctcaacttttctttgttgaccctttcgtttctatgttgtcagttcaggggaagctacacttcagatgatttacatggggtgtcacgtcatgtatttacaaggtacagtaatctgtaatctacgcatgttaggactaagaaacggggagacggtgatcaaacatttggtggaactccctcgtataactttcagatttgcatggagttgaaggaatcagttcaagaacatcgcccatttttagcgcttggttccagttgtagactgcttggcagttcagcctcaatggcacgccggagttagaagatctcttaagtaggtccgaaattgttgaatttttggggagttcttgcactgacatcttttcatcctccagaagtattactagaaccggtccgctgtggtcacattgtttggcataagagaacggacagacatcggagtgcgacctaatcgtgtgtatgttacttggtgaagtgtcaggtgcaagtgatgaaggatgctcaatgtgcaaagtttcacactgacatgtaaccacctttctaacccactctaccatttcccaatttacaaggaaacaagaatagaaagaagacaaatttacgaaacaaccttacctttaa

SEQ ID NO: 24181 - DNA, 374 bp, Setaria italica
  Peptide Sequence Number=SeqID_90155
acatttctgtggtattgtttatgtgatcgctctcaaggggatcaggttggagaagcaggattgagccattgaggggatccaccttttcttgggagtgtgctatgcatcatgcatgtgactcccacaccctagatctagctagctgttgcacacttgcacattggatagctctatcttgaggagaacattattttttggaaaataaacggcaaagtcaacaaggacacgcaccaccaaagtagtagtagtaactgtttgtcttttcttgtcaaacatacaagatcttactagaaaataggagtggtgcggcgcaattgatatatatttgggatttaggcccacaaaataaaatgaactagtaatgacaaaaatat

SEQ ID NO: 24182 - DNA, 239 bp, Setaria italica
  Peptide Sequence Number=SeqID_90156
gggggtcggtccgacgaccccgcctgccactggctctacgacacgctcctctctgctgaccccgacctccgcctcgccgcgctcgcgttcctgcccctactggcggcgctctacctccgtcgcctcccgcccgagctcccctcatcgctctcagggttcgaagcggtgctcctcgccgtctactcctctgaggctaagaatcgtcaggggaagcccgtcctcgtccaggtcccggacct

SEQ ID NO: 24183 - DNA, 619 bp, Setaria italica
  Peptide Sequence Number=SeqID_90157
ccagcttctgggttggacagaatggatataagcagtgccaccgccaaagtactttatttctcggagtatcagtcctgcaaaaacacgcttcaaactgtctgtaggtatctcaagatattcatcttccaacttctctttgagagttcccacatcatcatttgactcaaggagaagaattaactcagcaaacttttcactagcagcatgtatgttgacaaccgcttcagcatcgctagctttcaactttagtgactctttaataatatagctacaaacaggaaccttcttagatcttttgtccaagtagaacatatttcgtaggggaatgaataatgcactatacaggcaaagccttcgctgctcatcctgcaacttggtgtcagaaccattgctgaacacagagctgccaatagaagatgcaagattccaagctgcttcaatatgcgaaacacactgcccatcacatttgaagcagcttggaatcttgcatcttctattggcagctctgtgttcagcaatggttctgacaccaagttgccaatagaagatgcaagattccaagctgcttcaatatgcgaaaactggagggttggagttcaccgggaaagaaagacaaacg

SEQ ID NO: 24184 - DNA, 1855 bp, Setaria italica
  misc_feature (456)..(456): n is a, c, g, or t
  misc_feature (1809)..(1855): n is a, c, g, or t
  Peptide Sequence Number=SeqID_90158
ctcgaggtcgtccgccacttcggcctcggcacgcagctccgcgtcgccggtggctgggtccgggacaagctactagggaaagactccgctgacattgacattgcccttgataatatgacgggccagaatttctgcgagaaagtaaatgagtacttagagttgataggggaggagcagaaaggaattggtgttatccagtgcaaccctgatcaatccaagcacttggaaactgctaggatgcttatacttgacatatggattgattttgttaacttgagatctgaaaagtatgctgaaaacagtcgtattcctaccatggaggttggtactgccgaagaagatgcataccgcagggacttaacgattaatagcttgttctttaatatcaacaataactcagtggaagatttaactggaagaggtattgaggatctcaaagagggccttattgttacncctttacctgccaaagctaccttccttgatgacccacttagagttcttcgagcgataagatttgctgctagattcaactttacattagctgaagatttgaaggaagccgcatctgatggaaaaagtgaagtcagaacttggcacaaagattagcagagaacgtattggtcatgagattgatctcatgatgtcagacaaacaccctgttaaagcaatgtgtgacatccgtgatttggggctattttacgttgtcttttctttcccggtgaactccaaccctccagtttttgacaaatgtgatgggcagtgtgtttcgcatattgaagcagcttggaatcttgcatcttctattggcagctctgtgttcagcaatggttctgacaccaagttgcaggatgagcagcgaaggctttgcctgtatagtgcattattcattcccctacgaaatatgttctacttggacaaaagatctaagaaggttcctgtttgtagctatattattaaagagtcactaaagttgaaagctagcgatgctgaagcggttgtcaacatacatgctgctagtgaaaagtttgctgagttaattcttctccttgagtcaaatgatgatgtgggaactctcaaagagaagttggaagatgaatatcttgagatacctacagacagtttgaagcgtgtttttgcaggactgatactccgagaaataaaggacttttggcgggtggcactgcttatatccattctgtccaacccagaagctggaaatgctgctgacaacctcaacaagcaggatgagctgcatctgaggaaagagaaatacatcagagttgagcgtgccataactgacctagatctcgatggggtgtggaagttgaagccggtacttgacggcaaatccattatgggagttttgcaggtcaagtcaggcggtccactgataggaaaatggcaacaacgtgcattgaagtggcagcttgcgcatccgaacggaaccatggatgagtgcatcgagtggatgaagcagtcacagcaatcgaaacgccagaaagtagaaacgggcgcctgatagtcgatggcattttgagcataggccgtaggcagtattcagataggtaacaagctgcagctgcgtcactttagccgccgcctggatggatttggcgtcttcgtaggataacaaggtggattttatgactagttcgcacaatgagttgtcgattatttttgtgaagtccatcctgtggaccgggccgccccgggtgggccataatggttggtcatgccggaccatttggctattagaggcaagttgagacattattagtttctggaaatatgccgtacacaaaggtnnnnnnnnnnnnnnnnnnnnnnnnnnnnnnnnnnnnnnnnnnnnnnn

SEQ ID NO: 24185 - DNA, 465 bp, Setaria italica
  Peptide Sequence Number=SeqID_90159
ctgaattctaactagtttttataggtaatctatttttccattttatatgggagttagatgcctgatcatgttattttcaaagttaaactttgatctattagtggcagggctagcactctctatgatctgatgaaccgctagtctgtagtgctcgtgctctagtaggttcgttaaatgtccttaatcagtatcatccaatgtctgcttcacttcattgtatccaaatgagttgtcctactttcactagttctacaagtatgaactcaatttggttgtctatgccttcagcttagaatacctgttggatgatgctgtcaaaattgcagaacatgtgttggctgtagtgggtagtttatccaataggagccggatactgatttgttctgaatagatagaacttgttttcttttgtcactggtgtagctatctacaatgaaaacatgggtttatattttacacttcagc

SEQ ID NO: 24186 - DNA, 333 bp, Setaria italica
  Peptide Sequence Number=SeqID_90160
tcaacagcaaatgtttacagatatttcaacatcgttaggtgctcctctggtatatagatttaccttcaagtcaacttactcaatgcaggtgatactacagatcttgtgctgtccctaggagcccaagacagagggttaacagccactttttattttaagaaaaatggatcagtcacaagtactgctaagaattgtgcttctttagctgtattgaggctccaaacaagagcaatatgcatcactcccttttatgaacaggaaacactaacctttctacgtgttcaagaaaaagaaacattagcctttctgtaactgtcgttcagctgatttaat

SEQ ID NO: 24187 - DNA, 155 bp, Setaria italica
  Peptide Sequence Number=SeqID_90161
cttgcctgcttgttgcgttcaacgcttcgccggcgagtcggcgacgactaggcgagcggcggcgcccttcgccggcgacgggtacccaccaggctcagatggggttcgatgccatggcggccgcatgctgcgtccttccggtgctcgtctccttg

SEQ ID NO: 24188 - DNA, 525 bp, Setaria italica
  Peptide Sequence Number=SeqID_90162
tgcttctcctcagagccatatccgcgttctgccatgagggtctcagagactaaagaatccacatcacatcttatgttatccaccttcacctcaacatctatccagttgtcccttctgactgttctgtaagctagctgaatcacactttcgacttgctgataaactagtgagaagagaaggcgctcatcctgtgttgcttctgcaggttcttccatgcccatggctatgactggacagtagagctggaccttccagagcccgtttgctgagagcgcatgtgagaacagtggtgatggcgccccaaatgagtggtttgaggatctcagctcaatgatccagttagttactgcaaggttcattgtctgcatccactggtcctcaagatttggtccaagcagcttaacaaggttctttgcagcatctctgcactttgaaccagtaagctgggctctcaatgaatccaagcatccagggacggagatcacgaggagcctcatagatgcaaaaccgaggaaggccagggac

SEQ ID NO: 24189 - DNA, 306 bp, Setaria italica
  Peptide Sequence Number=SeqID_90163
tgcccccggggcccccgcgccggagaagacgcagtacatcgcgtagggagccagcttcatcttcatccgcggcggccacggccgctcctccacttcgtcgtcctcctcctccgttaccggcggcggcggcgccatcgcagggcgggtgtggaaggggggcgagatcgacgagcaggggattcgagggggatcgggggagccggatcgatcgagagatcgcgaagcgcgcgcggagctctggtggcgtagggatcgagagatcgggatgcggggaaccgaaagctcgaggggattggattgattaag

SEQ ID NO: 24190 - DNA, 353 bp, Setaria italica
  Peptide Sequence Number=SeqID_90164
ggagagctcggagacgaagcctctctgtcgctggcggcgccttgtcctgcagcgcagcgactagcccctggtctaccgcgccgcaagccacgcgcatgacgacggccctgtcctcggggtggccgaggccgcacacgccgcccagcgtcgccgcgaccaacagctcgcggacgagctgccgcgtctcgtcggactccagtccggggaccaggctctcgccatcgatcaccgggacgaggcggcggtaggccgcgctccaccgcaccgactcgtcctgtcgcccgtcggcgaggcagaggtggtacgcgagggcgcgggggcgggggtcgaacggcgcgtcgcgggccgcctcc

SEQ ID NO: 24191 - DNA, 561 bp, Setaria italica
  Peptide Sequence Number=SeqID_90165
atctgctctgcttcagccaccgccctccctcccttcctatggcgccggcattgccccgcgccgccctcctcctcgtcctctctctcctcctcgcctccgccgcgcggtcccaggaggaggcctccagccccgtctccgagccccccacatccgctgcctcccctctcccccgcgactccgtcgccgacgacaccgaatccgagctctctccaatctcccagccgcctaccgcctccgcgtccgcccctgcagccgcagacgccgccgcccgctcatcacctccggctccgaccgagacctccccaatcccggctccctccgactcgccggcgcaggcgccgtcctcccttccgcccacgcacccgcattccgctgctccagcgcccgcgcccgccgccgacaaggaagctgacggacgaaaaggacaaggagaaggacgacgaggaggacgaccgcaagtcctccgcccccgctccggcccagccgccgaggagattaaggccgcgagcgccgccgccgagcagggcagcggggatggcgaggaccacgaggatatggaac

SEQ ID NO: 24192 - DNA, 219 bp, Setaria italica
  Peptide Sequence Number=SeqID_90166
cttcctcaccttcaacttgaagctcaaggaaacatctgtccatcttgttcacagtgaggacaggcctgatcctcttaccaagggcttgtcggagaacagtttcagtttgcacagagacaccctcaatgcagtcaaccaccaccaaagcaccatcagtgatacggagagcagccgtgacttccgaggaaaaatcaacgtgcccaggtgaatcaataagat

SEQ ID NO: 24193 - DNA, 506 bp, Setaria italica
  Peptide Sequence Number=SeqID_90167
catgaatgataagattaactcatctggtgttctacgcttgcaggaagcgaccggcgccacctctgaacttcaaactcactgccaagatcttcgcgcacgccttctacgggatggcaggaacgatcaacttgtactgcattggcctgaagtatgcttcagcgacctcctcatcggccatcttcaacatcgtgccggtggtcgctttcatcttggccgtcatgttcaggatggagaccctgaagcttaggagcgtccatggcatagccaaggcctctgggatcctcctctgcgtcggcggcgtcatcgtgctggcgctgtacgagggccccgagctcaagtccatgaaccgccaccagctcctcaagcaccacacgagcgccgccgccgcgcacgcgcattccaaggaggagtgggcgctgggcatctttctcatgacaacgtccatcgtgatatggtctttctggactgtgaagcagggacccttgctgctggagtacccttccaag

SEQ ID NO: 24194 - DNA, 772 bp, Setaria italica
  Peptide Sequence Number=SeqID_90168
tttcctttccgttccgtcgtctacgtcgtctatttccttaaggtaggtagttgggtcgtcttgggtctattcttttcttctatgacaacgtccatcgtgatatggtctttctggactgtgaagcagggacccttgctgctcggagtacccttccaagctcctgaacacgacgctgcagtgcgtgttcgcgagcatccagtcgttcgtcatcgccctttgtcctcgagagggacttctcgcggtggaagctcgccggcgccgtcagcctcgcctcggtgctcttcacgggtatcgtcgtggcggcgatctcgtactacctgcagatctgggtgatcgagaagaagggccccgtgttcctgtccatgtcgatgccgctgagcctcgtcttcaccatggcaatcgcctcgttcctgctgggcgaggacgtcagcctggggagcattatcggcagcgtcctcctcgtcgccggcctctacaacgtcctgtggggcaagagcagggaggagaagcaagcggcgggagggagggacagcggcggcggcggcggcgtcgacggggacgtggagaggaatgcggcggccgtgcaaccggcggacgggggggacggaggaggaaggaggagggggacgtcggacgcggcggcggccaaagtctgatgacacgcggagtccgtgcggatcatgcacgcacgcgacctgctgatccagtcgatctctcacggccggcgtggcggcctgcgaccggtgcttgtgcgatcactgcagaaagggtg

SEQ ID NO: 24195 - DNA, 437 bp, Setaria italica
  Peptide Sequence Number=SeqID_90169
gccatggtggcatcctgcagtcgccgagcaacaggaggcgctccacccttggacgcaggatgtactgctcgaccttcgccaccgcgtccgctggcgcgccggcggcgtccagcgactcgaggaacgccgcgctggagcgcacgacgttgagggcgtgatgcgacagcggcaggtcgccgcggtggcacccgtggtcgatgcacaccacgacggcgggccggagctgcttcacgacgcggagagtcgccggcgccggcgtggaggtcccggagccgagagggaggtggacggcgacggcctcgccgggcgcggcggacacgcccacgggccgggacgacgggtcaaaggggtcgaacccgacggcactgaactcgaaccggatgccgaggtcggcggcgaagcgtgtcaggctctcgtgcgtgaggcggagctccagg

SEQ ID NO: 24196 - DNA, 176 bp, Setaria italica
  Peptide Sequence Number=SeqID_90170
ctgacacgcccgaccgcctccgtcccgtcgcctcctcgccgccgcgacgagacgagacgaccctacaaatacgcccgcccacttcggccgcgtcagccgccgccacttcccggatcccgatgccccgcacccagattccatccccctgtcgcgctgctaccctgttcctaatccca

SEQ ID NO: 24197 - DNA, 1451 bp, Setaria italica
  Peptide Sequence Number=SeqID_90171
agtaattccctattctattgataaaaatgctttagagaatcaagatgtataattcaaagattatcttttactgtttgtgacagagatccttctcacatctcagagcagttatacaacaccgtttcagtaaactgcagaaaggattcgggtgtacaaagctctcttttgcaaataagcccacatcgatacaaatgtccccaaattatttgcgtccatgaggagcttcataattacttccagaattacctgctgctcgcccagacccatagactggaggctgtgtggccaacccatagggagaggaaccctgtgcaacagcaaaggcagacggtgcctgtgctagaccataggatgacggtagctgtgtgtgtccatacccagctggtgcctgtgcttgtccgtatgatggtagtgcctgagctgagccatagggacgaactgttgccacgccgtaggatgatgggacagatccaggtgcatatgatggtggcatctgtacagatccgtaggtggatgcagattgtacccatgcatattgaggcggcgttgcctgattggatccataggaaccagcactgctcccatgagccacagtagctgctgcctgtgcctttgaagcgtcatacccagcactcttcaaagagtcaaagccagaggcaacccttgatacatcatgggttccagattttgaagaactgaaactggcaacacgagaagcatcatatgtattgcctcttgatggatcaaatccagaatgaagaccagttccagctgggcttccacttaaagggtctaccagaccagtaggagttgtccttgcctgtgctcttccataaccatcataagcaatttgtccaacagaaagatggctagatgtaccatcatccttttgactagtaatgggattgtagaaaatgccacttttgtcaatattagctgcattcctcaactccgcacgaagtttttccagctctgtaaccatggagtcgtaattccttttcattgcctgcaatgattcggagtgatccaccctgagtttcctttcatactcatatgtagaccttaggtgctcatattcttgtctagcagcatcccgttcagcaacaagcgctggaagctgctgcgcctcgccgaggtttctctgcaggtccttgctcagcttctgaacgtccgccaccatgttctgcctcaccgccacaaggttctgcgcctccgcgtgcgcctgctgcagctccaccttcacggactcgcaggccttcagctcggcctccatcttcccaaccttgtcaaggagccccctcatatcctgctcctcggcggccttcgcggcctccccctgcgcctgcagcctctgcagctcctgctgcgccgccgccagctccttcctcagcgacccgtggctcaccgcgagccggtcgttctccaccgccgagcttctgcatcctcccccg

SEQ ID NO: 24198 - DNA, 405 bp, Setaria italica
  Peptide Sequence Number=SeqID_90172
cggaccatcccgcgtgcctgccagggcagggaggggagggcgggaggaactcagttgagtccaggcgaggcgcggggccgccgggcgccggccggccagccagtgggggcgcgctgctcctgctcgactgatctatgcctgggtgcgctctgctactcgctctcgcaaaaccacgtgccgcgtttggtcggccgggttcggcggtgggagcaggccgacagtgttgatttgcttgctccgttccagtcattgtcagtccagcagggtcattgatttgcttgctctgaataccaaatacccctgtaattattgggcttgggcatgctattatttttcctttgtaatttggaaatcgctaaatctcacctaagtggaggtccttagcacttgattttggtgcctgat

SEQ ID NO: 24199 - DNA, 369 bp, Setaria italica
  Peptide Sequence Number=SeqID_90173
gataccatgtggccctttttattaagggcagtttgactgactcccttaagaaactatctcttaagtttaaggtcaccaacacatagactaaatctcttaaaggaaaaaaaatcatctaaacaaaaaattaaaaaaactaatttttgtaactctaactgctatgttccagccattaaagagccactcttgcctgagtgaacagcaccccagtgcctctacagcataatatatgacaagcaagcaaggaaaattacaaaaattaccagcgaagcatttcctcttcactagcagttgatgcaattataaaagcctgcatagcaaacattaaagttagatggtagaagagacggtaactgagttgccaatagg

SEQ ID NO: 24200 - DNA, 335 bp, Setaria italica
  Peptide Sequence Number=SeqID_90174
ccttatggttccacactgagttgtctcccttccatctattagatcggccctattcacttctatacttttccgcatacctgaaggctgaagcagggcctggtagtgactgaagttcagtcatggatgaaggcaccggtgttgagaagaccggcggcatgggagaggtccgaaagcagctgtaccttgccgggccgctcatcgtcgcatggctcctgcagaactccgtccggattatatctcttatgttcgtcggtcaccttggcgagctcgccctttccagcgcctccatggccacctccttcgcaagcgttactggcttcagtcttgttgttggg

SEQ ID NO: 24201 - DNA, 1169 bp, Setaria italica
  misc_feature (1)..(55): n is a, c, g, or t
  Peptide Sequence Number=SeqID_90175
nnnnnnnnnnnnnnnnnnnnnnnnnnnnnnnnnnnnnnnnnnnnnnnnnnnnnnngtttctcgaatgagcaacaggattaccctcaaactatcaagtcactgtctcgaagtagcaacaagatgacaaagaagctgtatctgagcacttaatttgccaatagtcaaaatacagtgaaaatagcaactcattgccttcaactagaaacaacataacaaagcaattgctcatatgcggtaagtatgtctttatgggggcagttgaataaatggtggtaaattgcatgtaaaaaaactagcatacagatctccacaatggtcgattccatataaaacagcatagtagccattttgtttaaccacggaagcaagctaactcttgagaactcatcactgcaaggctaacaaaatgatgaaaatgtgcacatactactttctggcagatatcagaaaggtcgacctgatttcctcttcccaaagatcacctcccacaccactggtgagaacgggcctttcttgtctaggtgctccctgatggacttctcatcaatagcaaaattcctatcctggaagctcctcacaagcttctcaccctcatccacccccttcttcttgcacaccgcatcaaccaagcccacaaacgtctcagcattcggggcaagcccagcctcgaacatctccacacagaacccaatcgcatcatccagcctgccccccttgtacagaccttgtatcaggagccagtagctgaatgcattcgggatgactccattcccctgcatcttcctgaagatcctcacggcgtcgtcgagcttggccaccttgcagaaggcctcaacgacagcggtgtagatgacgacctccgggatggcgcccttttcccgcattaagccgaacagcttcatggcgtcctgcaccaacccgttcttgcacagcccgtcgagcatcgagacggcgttggggataagcccggtctccttcatcttccggaagatctcgtccacgtccaccggctgcgccggcgccggctcatcctcaggctgcttccgctcggccccggctcccgtagcggcggcgccagaggggccatcgcccagcttcagcttctccagcagcgtctcgccgacggccttctgcgcgctccgctcgggtcgctcctgctgcggctgcgg

SEQ ID NO: 24202 - DNA, 261 bp, Setaria italica
  Peptide Sequence Number=SeqID_90176
gttgtttgtcgggaagagcacaacccaaatccaaatcctccccatctcgagagcctcctcgatccctcgcccgcttcaagatgcagatcttcgttaagaccctcactggcaagacgatcacccttgaggtggagtcttccgacaccatcgacaacgtcaaggccaagatccaagacaaggagggcatccccccggaccagcagaggctcatctttgccggcaagcagctcgaggacggtcgcacgcttgctgattacaata

SEQ ID NO: 24203 - DNA, 189 bp, Setaria italica
  misc_feature (148)..(189): n is a, c, g, or t
  Peptide Sequence Number=SeqID_90177
acctcgctagcaagctgcagtgcagatgctaattgctttaatgtgggacaactggatccaaatccgattaacattgtgacttagcgctcttctctatcaatacaagctgggcagtaatgccggccgcttacacaaaaaaaaaaaaaannnnnnnnnnnnnnnnnnnnnnnnnnnnnnnnnnnnnnnnnn

SEQ ID NO: 24204 - DNA, 281 bp, Setaria italica
  Peptide Sequence Number=SeqID_90178
caaaccccctagagcgcagcagcagcgagccccccggcatcctcggtctccggtctcttgctgcttgcccagcgccgcccgagctcgcgattccttctcgcccgttgtctgtctcaatggccgcctcgaccaagaccgtcgccgccctcctcgccgcggtgctcctcgcgctggtcgcgtccgcggcagccagcaggaagctggaggaggacgccgccctcctgggcaacctcgcaccggcgcccgcgccggccgtgggcgccgccgcggggatcgccggc

SEQ ID NO: 24205 - DNA, 715 bp, Setaria italica
  misc_feature (687)..(715): n is a, c, g, or t
  Peptide Sequence Number=SeqID_90179
ttgtattattcaaagtttccagatattcgccgtatatttgggatgttgctggcaagccagttaaaggtttcctagttcttacaaagggaagggagcatgcaacagttagcttttttgatgcaatatatctgtatacgatatgacattggcactggcacaacacttctgtatttccccctagtatgaacaaaagtacatatggcaagttggaaagtattctcagactatctggaaaatgcccatttcttcacctacatcttctgttgcgcacttgcttgatatggttgattgctcatttcagatgatgaagaagaggcacaagatcgagcgggacctgagcattggcgaggaggtcgggtggtccaagaaccagcaggtggcgaaatccaaccctacccttgccgcgatgaacaagaagtttgggatgatccacgggctctcgtcgctggccaacatcatgtccttcggcagcctggccatgcactcctggtacctggccagcaagatcgagctctgaagacacccttcaccgcggtgaatcatatcaccaattggctctgcacctcatgctgtgagatcgcaagtagatcaagctgtactactattgacttcacaggagataaattgtagctgaaagagatcctatggaatgcatgctggtcccaaaccagctattcaagatcaagnnnnnnnnnnnnnnnnnnnnnnnnnnnnn

SEQ ID NO: 24206 - DNA, 1089 bp, Setaria italica
  Peptide Sequence Number=SeqID_90180
tacttaacgtgttccccaactttccttcaattccctcggctgcccgactccccaactacccccaaactctccctcgccgcctccctcctctctctccaccggcgaccggcgtcgaggcgatggggtgggcgacgcggttcctagcggcggtgtgcttcttcgccgcgggcgtactcttcgtccccgaggctatcctcggctccccctccggcgccggcgccgtaaccgccgccaagctggcccacctcctctccttcgccacctcctggggcgccgccctctgggcaaccttcatcggcggcatcatcatgttcaagaacctgccgaggcacatgttcgggaacctgcagagcaagatgttcccggcatacttcatgctcatctccgcctgcgccgccatctccatcgctgccttcgcgtatctccacccgtggaagacggcgtccactgtggagcgctaccagcttggattcctcctctctgcgctcggctgcaacctctccaacctgctcgttttcacccccatgactatcgagatgatgaagaagaggcacaagatcgagcgggacctgagcattggcgaggaggtcgggtggtccaagaaccagcaggtggcgaaatccaaccctacccttgccgcgatgaacaagaagtttgggatgatccacgggctctcgtcgctggccaacatcatgtccttcggcagcctggccatgcactcctggtacctggccagcaagatcgagctctgaagacacccttcaccgcggtgaatcatatcaccaattggctctgcacctcatgctgtgagatcgcaagtagatcaagctgtactactattgacttcacaggagataaattgtagctgaaagagatcctatggaatgcatgctggtcccaaaccagctattcaagatcagaataattgagccacgttgacggcctctgtttgatctaaagggggcgccgccctctggggcaaccttcatcggcggcatcatcatgttcaagaacctgccgaggcacatgttcgggaacctgcagagcaagatgttcccggcatacttcatgctcatctcccgcctgcgc

SEQ ID NO: 24207 - DNA, 723 bp, Setaria italica
  Peptide Sequence Number=SeqID_90181
ctcatctttcatccatgtacggtagctgtcttccttccagtcctgcagggcgcttgatatgcggttccactccttaatgcaaccctccagttccttggtgagtcccgtcccgttctcccagccactttcaatgtgtttgaggacgggattcaacttcgcggaatcgcagaacatgacgctcaggcacaccagtgccaccctggcatcgtagtctaggccgacatgtgggcggaagcgtgaaagaacgcgcacggcgttaaccgcggtggttttgcccagcccctgggtctcggaggccagtttacccacgatttcctcatgggaattcacacccaatatgctgtggtacccgtagccccagtctagaatttgtccagacaacaaccactttttcctggacctcaagtcattagggcggtaccaactatatccgttctggttcctgaagccatggacgcgcaagtcgtccattccgatggctaggattactgaagttccctcgcccgccacttgaagcttgatgtgaagccacctgccccgcgagccggtgagcagtgggtgttgtcgggtggagagattggggttttcggaaccatccaagatatccttatggtctgggtggttggtgagaatgcgacagagagccattatgaatccacgatacgaccttgcatcatctccgatggtgtacactacttcatgttgatgctcagacgtaatttc

SEQ ID NO: 24208 - DNA, 262 bp, Setaria italica
  Peptide Sequence Number=SeqID_90182
agacggattcttctgcgtgcatttggggcggagattgtgctaactgatgctaccaaaggactgaaaggagcttttgataaagctgaggaaatagtattgaggacaccaaatgcatatatgtttcagcagttcaacaatgaagcaaatagtgagatccactttcaaaccactggcccagaaatatgggaagacacattgggtactgttgacatacttgttgcaagcatagggacaggtggtaccattactggacaacaaggga

SEQ ID NO: 24209 - DNA, 1162 bp, Setaria italica
  misc_feature (1126)..(1162): n is a, c, g, or t
  Peptide Sequence Number=SeqID_90183
ccgctcccacctcgccacaagcgaatcagccacacccgcccgatccccgcctccgcctccattcccgggcccggagaccgcctcgccgcgccgccgccagccatgggaatggggccggctcgagagcgccgccgcggcggtcgcggccgtcccggtcgcggcggggtcgtacgcggtgctgcagtgcggcgatgactcggagtacgtgcgcaaggcgtacaacggctacttccaggtgttccgcgcgctgctggaggaggacggcgagacgtggcgcgtctaccgcgccctccgcggggagctccccaccgacgccgaggcggcgggcttcgacggcttcgtcatctcgggcagctgcgccgacgcccacggcgacgagccatggatcctcgcgctcgtcgacctcatccgccgcctccacgccgccggcaagcgcatcctcggcgtctgcttcggccaccagctgctgtgccgggcgctgggcgggcgtacggggcggtcgaccaagggttgggacatcggggtgagctgcatccacccgacggcggcggcggcgaggctgttcgcgccgctgaagctgccggtgcacatgccggtgatcgagttccaccaggacgaggtgtgggagctgccccccaacgcggaggtgctggcgcggtcggacaagacccgcgtcgagatgttccgctacggggaccgcgtcatgggcgtccagggccaccccgagtacagcaaggacatcctcatgagcatcgctgaccgcctcctccagcgcagcctcatcctggactgccaggtggacgtggcgaaggcgagcttcgacgtgaggcagccggacaaggagctgtggaagaaggtgtgcaggggcttcctcaaggggaggctccagtcgcagcaggagcagcagcaggtggtggtgctatagcttactgctactgctacactagtttattgggaggggagggagcaagttaaagcggaggaaattgggagcatttggatgcctagattaattcaaccttattttgtgcttcagagctcagagttgtacaggtactactgcttgtccgaagcatcaataagagagaaaaatggttagtttttttttatacaaaaaaaaaaaaannnnnnnnnnnnnnnnnnnnnnnnnnnnnnnnnnnnn

SEQ ID NO: 24210 - DNA, 257 bp, Setaria italica
  Peptide Sequence Number=SeqID_90184
ctgccagagaccttgagatttttgtcaagctttcccgtgagtgctcgcatgaacgtgctctttcctgaggatggaggcccaagaagaagcgtcatcctggatggcttaaggacaccattgacattcttaagtatggtgatgttcctcttgtttgaagaaccaaaccgtccaatgaggccctggagaaaattggtggcggcgttcgagagcgtggggagttcgcggccggcggcgacgacgtccgcctccaccgtcag

SEQ ID NO: 24211 - DNA, 155 bp, Setaria italica
  Peptide Sequence Number=SeqID_90185
cctttataggtcacttagcaaacttacacttaaatgatcccaataattaaatcaacaatatatatacgcaaataccatatagaacaggtgtttgaaagacatgaacattttggcagaatacagacgtagaaagctatactaatgcctacctaaaa

SEQ ID NO: 24212 - DNA, 575 bp, Setaria italica
  misc_feature (562)..(562): n is a, c, g, or t
  Peptide Sequence Number=SeqID_90186
ctttgtccaaactgctccactaagttctaggacacatggacagaaagaaaaagaggtgaatttgggtattccaggagcatgttcttcatattttactaatcggtctactatgcctagaaattccaccactggtgtgaggccagcttatggtcatgctaatggagtacagagacgtgggcttaaaaacccaggttgtacttcagtacctgatgttcagccatcaggttgctcatccgattctgtttatagtaggaggtttgagttcatgagaaagagggcttctgatccggaaagctcttccagatcaaggagctttagtggaccatctttttcaggtcattcccctcctacagatattcacgatgctggtcccagaatcagaacgaatgaacagtcactttctcaacaaataatacgaagcagcaacagaaaccaacaggaatcggcagtttcagttaggacaagacgaccttctcatgccactacactgagggctcctgatgaaagagcagatggcatgctttctttgcatgagtcatccacaaggatgggctgtcagctnaggagcattcttt

SEQ ID NO: 24213 - DNA, 709 bp, Setaria italica
  Peptide Sequence Number=SeqID_90187
tcctactataaacagaatcggatgagcaacctgatggctgaacatcaggtactgaagtacaacctgggtttttaagcccacgtctctgtactccattagcatgaccataagctggcctcacaccagtggtggaatttctaggcatagtagaccgattagtaaaatatgaagaacatgctcctggaatacccaaattcacctctttttctttctgtccatgtgtcctagaacttagtggagcagtttggacaaaggactcagatctatttcgataaacacctgaaggaccagtaaaatgagagccttctgaaccaggtgttaacaaacgaccttgttcagtagtagaaccttctgattcagtccgcagagtgtctgaactctcatcgtctacaacgattttcttactaccctccagctgcttggcctcagcctttcttctgccactttgagcaatgtcaacccctgccaacaaaggctgccttcgcttttcctcaaactttctaagtggaaatttggaggagcttgcaggcaccactttcgagcttgaagatttaaacgaatcacgcaaatatcttggtccttcttgattatcagtaattcccgctttcgtaggattgagtctagcgctgcttcccagtccatcgttgttgtgattagtcctctcttcaggactttgattttcgtaagagagcctggaacccctcctacg

SEQ ID NO: 24214 - DNA, 258 bp, Setaria italica
  Peptide Sequence Number=SeqID_90188
gcgttgttgcatgccctgcccgcccggcagcctagctgctaggaggagcctaggacaaaataaaggccaatgggttgccgcggcggcactaggctgccgctcgtgaggcggctctgcttcgtcgtcctcctgtgcgcctcgtgcctctgctccatcctcccacatgccaatgccaagaggacgccgccgcccgcggtgaagccaaaggcaccgccgtcgccgtcgccgtcgcaggtcgtcccggccccggtcccgcgg

SEQ ID NO: 24215 - DNA, 238 bp, Setaria italica
  Peptide Sequence Number=SeqID_90189
gaaccatccagcccagtaggaaggtcaacagcaacagcaagagctgcctgttgtgtggctccggagtggaccatgtggacggagaacccggtggtccgggacgccggcgccgccgtgctcaccggagtcgccgcggctgtcgtgctccgcttctgggaggaggtcgccaaccgcgcgctcctggaccagatcgttgcccctctttcttctttcttcgtcatgcttactactctactcc

SEQ ID NO: 24216 - DNA, 712 bp, Setaria italica
  Peptide Sequence Number=SeqID_90190
gatattgtgaacccaaggatgtaacaattgatgatactaagacaccctacatataaggataccattgtaaattcagtctctgctggtgagcgaatgttcaaagcatcacacagccaaagtgcatgaaaacaccatgatgaagccaactggctaagtatagcaagatcttttgcaaactacacgatttccttggctaggcactagacctatggaacaatgcaggccacaaggtgtgatcaaacatgcgacacaaaacactaatttcccaagtgaaagctacttttgaatttaactggtcacacgagaggggcatcagagcagcaagcgaatcatcatctaatgaaagctaaaactatgtacttctagtcacagttgacactatgtaggctgaacttatgctgcgtgcagtcttggtgggcctctagcagccactctctgattttacatgtaaatcgattgctccaagcttgctgtcgggccaattcgacttctgacaatagcataatttcatgagttgaataaagtctaatagagcgaccaaccggatcaatttcatacgccaacgaacacaatcctgccatccctaaatctactacacacacatcatcaagcttaaactcaactatattcacatcaaacgcccacggaagcaccaccagcagcaaccactgaaccacgatgaggaggacttggatccacatctcccctaatt

SEQ ID NO: 24217 - DNA, 337 bp, Setaria italica
  Peptide Sequence Number=SeqID_90191
tgatgaagctggacatgctttccctttgatgccacaaaggccattgttcccaaggaagttgctgctgtccaagtgctcgaacagtggggtgctgggaagcggcccaaaaagattattgtaagacaggttgcactccagcaggcttgaaagctcactgaatgaggaaggaactcgaccttcaagctcattgttgtccaagtacaggtactgcagcatgtgcaagttccctagctgcatcgggatctcaccagacaacatattgtgactgacatttagggcaatctgaagggcagtgagctcaccaagctcaaccgggacctgaccagacagacggttg

SEQ ID NO: 24218 - DNA, 378 bp, Setaria italica
  Peptide Sequence Number=SeqID_90192
gacggtgcccggcagcaagaagacgacggcgatcctgtcgctgacgacgtgcgtcctggtcgtgacgctgacgctggccggctgaacctgcgcgcgcaacagcccaagctgccgcgtcgcgaccgtgcactgcagcacgttctggcgtttcttcaattcagggatgaaggtgaagtggggatcgccatgagttgatgcggcataggatgcagaagctatgtacaagtaatctgcaggatcggaaagagcagatgcagtcatgcagatcagtgataccgagcaggctggcagcattgctgcccttttcaggtgtttgcgtacccatcacatcagatgtttgatactaattaggagtattaaacatagactatttacaaa

SEQ ID NO: 24219 - DNA, 733 bp, Setaria italica
  Peptide Sequence Number=SeqID_90193
atccaacacatcaacctagtcaaacttattggattctgctgtgaaggtgataagaggctgcttgtgtatgaacacatgtcaaatgggtctctcgatgctcatctatttcagggcaatgctgctgccctaaattggaacaccaggtatcaaatagtcctcggagttgctagaggaatgtcctacttgcatcagagttgccgagaatgcatcatacattgtgatattaagccacaaaacatactcctcgacggatcatttgttcctaaaattgcagactttgggatggcagcatttgtaggcagggactttagccgagttctgactacatttagaggaactgcagggtaccttgcccccgagtggcttgggggagttgctattacatcaaaagttgatgtttacagcttcggtatggtactgttaggaatcatatccggaaagaggaacacaccggaagtaaatagtaagagcagttatcaggttgcgtttttcccagtgcaggccatcagcaagcttcacgagggagatgtgcagagtttgatggatccacaattacagggcgacttcaatttggaagaggctgagagggtttgcaaagttggatgctggtgcatccaagataatgagcttcatcggccaacaatgggtgaagttgtccgtgttcttgaaggtctgcaggagattgatatgcccccagtgccaaggctgcttgcagctatcacacaaggccctg

SEQ ID NO: 24220 - DNA, 393 bp, Setaria italica
  Peptide Sequence Number=SeqID_90194
ctgagcttcaaattaacctcgagccctgacagcaaatttaccagccaccgtgcccgcacaactcctcccgagtgcccgcgacaatggcggcctccgttgagcggcacctgaccccccacccgtggccgagcaatgcgcctcccaagagcttcgacatgttcaagcccggcggcccgggcaagcgccgcaccggctccgactccgattccgacgacgacgacaacataccccccggactggaggtccctctaccacccgcgcctcgaggtggagccgcccgtccacgacccccgcgacgaggccacctccgacgcgtgggtgcgtcgccacccggcgctcgtccggctcaccggcaagcacccgttcaactcggagcccccagtcccgcggctc

SEQ ID NO: 24221 - DNA, 216 bp, Setaria italica
  Peptide Sequence Number=SeqID_90195
gccggccgatggagctgaacccggtgaagatcccgacgaaggccatgaccttgtgccgtccgcgcgatccggtggcgaggtgggccgggaggtccgcggcggagctgtccccggggcgccggtcccacgcgacggagacggagagcgggcgggaggagtccgggcagcgggtctgagacacgcaacaggggaaaggcaaggcacacaggggatagg

SEQ ID NO: 24222 - DNA, 184 bp, Setaria italica
  Peptide Sequence Number=SeqID_90196
gggagacgggagagggagaagagattttggggaagacggcaccggcgaggaatcggggggcgcgtttccgacggcgtgtcgacgagatccctctcggcgtttgggttcttttcccgaaaagcgcaggatttttggggaaagcgtcggaatcgctcacgcttgaccgccggggcaccctggctcg

SEQ ID NO: 24223 - DNA, 456 bp, Setaria italica
  Peptide Sequence Number=SeqID_90197
gcgtggtgtgcgacttcgcggacccgaggtcggacgtgtgcgagctggagggcgccatccgcatccgcgggagcacgtcggaggtgttcgtggtggcccccggcggcggcggtgcggcgaacgtgacgggtctcggcgccggcatgaacgccacgagctggaggatccagccctacacccgcaagggcgaggcccgcgtgatgcgcggcatcacggagctgacggtgcgcgtggtggccgccggcgaggccccggcgtgcacggtgcggcacgacgtgccggcggtggtgtactcgaacggcggctactgcggcaactactaccacgacttcaacgacaacatcatcccgctgttcatcacgtcgcggcacctgggcggcgaggtgcagctgctggtggcgcagaagcagcagtggtggttccacaagtaccgggagatcgtggacgggttgacca

SEQ ID NO: 24224 - DNA, 656 bp, Setaria italica
  Peptide Sequence Number=SeqID_90198
atagcagagaagcaaagaatgttatggaggtcaaacagcttttacactggttctccactgctggaatcaagatgtttgtgcaaacaccaagagtccacattgtagccatggagggatggttatggagtgtctttctggttctgatggcaaggaagccattgccaaagcagcaaacttactatactcagcttccagcaaaggctgcaatagctatacaacctatactcgtggatatgataaaatggatactgtttttacagaagctcacatggctagtgcattgagagcagtaggttgtggcgggccagaacctgatcttattcttgtgtatggtccagttagatgtcatttgggatttcctgcttggagattacggtacacagagataatgcatatggggccactgaaataaatgaaatacagttccatcgtgaaagtcttgtgtcagtttgcacagaaacatcaaaattatggtacatgacggtggatacttgtgtaaaagaggacccatttgttgtgtacaaggacatgcttccggactggaactgacctccatctacgggcatcgatcctgtcatggcggctatccactttgcgctgcctttttgtagcctgagacacgcaaaaggggataggcaaggcacacaggggatagg

SEQ ID NO: 24225 - DNA, 790 bp, Setaria italica
  Peptide Sequence Number=SeqID_90199
gcactccgtccaagcccacgcccaggcggaagtccaaatcggcgacctcgccggcgccgatgtctccggtgaccccatccactgttcgacgctcccgccgcctcctctatactcccacgaaggccgccccggaggtgcccgtgaaggctacgccgacccccgccgccaggggcaagcgcgccgcgccgtcgcccaaaacccctgcccagcgcgaaccgaagcggcagaggcggcagcggagaaagagggcgtactaccggaaggtggtgtacgatggtggtgagttcgaggtcggggacgacgtttacgtcaagcgtcgggaggagtcggagtcggacgcggaggaccccgatgaggaggagtgccgcgtgtgcttccgcgccggcggcggggtgatggtggaatgcgacgcttgcctcggcgggttccacctgcggtgcgtgcgcccgccactgcgccgggtgcccgaaggggattgggcgtgcccgtactgcgaggctgagcgcgctggcaaggcagtcgagcggcccaggcctcctgagggaaagcgcatcgtgagaaccgccaaggagaaactcctctccagtgatttgtgggccgcgcgcatcgagagtttatggagggagccagatggtaccttctgggcaaaggtaaggtggtacattatccctgaagagactgcagcaggaaggcagccgcataatttgcggagagagctgtaccgtaccaatgatcttggtgacattgagatggaaacattcttagacattgttctgtaatgtgcccaaag

SEQ ID NO: 24226 - DNA, 575 bp, Setaria italica
  Peptide Sequence Number=SeqID_90200
cggcggtgagcggcgggccgacgagcaggccgtcggcgccgaactgcggcccgccgcgggagtagtcgaacagcgccgcgccgctgccgcccaccttcggcagcaccaccggcgcctcggcggctgcctccggccagtagaagaggaaggcgtccagcgtgtcgtagtagtcgtccgtgctgcggtacccctccgggctgaacccaccgaacctgaagccgccgtcggtgtagccgacgacgacgcaggggcccttgaagtcgcaccgccggtggaagtccgtcgcgctgaagccgtccacggtggccttgtagcagcacttgagctcgcggcctctgaggtgtgtgttcgccacgagcgacatggggaacggcagctcgacgtcgtggtactggaacttcagctgcggcggcggcggcgactcagctcctccggcgcctttgccccagttgaagaagctgcgaggagtgacgaagctcggcctggtcgacgtcatggccctgccgctcgccatgaacgccatgcccatcgattcactcaggcgtggtggtgagatcgatgagacagacttcctc

SEQ ID NO: 24227 - DNA, 604 bp, Setaria italica
  Peptide Sequence Number=SeqID_90201
catatggatacatcacacgtgtttttcctacgtccctttttctttcataaagaaagcccagcattttgcccttctgatttgaacggtagcagtgtcgaaaatcagatgatctgataacctctcggaagaaactacaagctgttgccatgcgcagtagtacatcaggttgtagcctagcaaagatctccataaggacatccacatttaagttgactgaagggcctctcctggtaattggtgggacctctttgtgttgcacgagagcgttaacatctgcgactctgcaccgctttgctgctggaattccattctcagaggaagtcgggggcttcatactcggcacagaagaatagcccccatcatcagctccgtataacggctggtcggaggagtctttccgcaacggcgacgtcgccacccctgcatctgcaggcggcgtcttcatgttcctctcgcaggaagagtcttcctcgtgcgagcacgacgccgctactcctgcacctgcaggcggcgtcttcatgttcctctcgcaggagtagtctctcccgtgcgagtgcgaggtcgccgcccctgcacagagcgtcttcgtgttccccgctttaat

SEQ ID NO: 24228 - DNA, 533 bp, Setaria italica
  Peptide Sequence Number=SeqID_90202
tacccatgaagcccatgcaacaccgtaaagcaaagcctggatttttttggtcagaaatcaatagagagatatattgaatcagtgaactggctgaatattaatacggacagagtaaaaaaatcctagttaaataacttactacttacataagcaatggaggcaagtattgaaatgcataagacgcctttttcaccaattatgtggctaagaaaggggaggatcaaaatctgcagtttgaaaacattaccgcaaagccgcaattgaattactgagaactgatccttgtcaaagccgaatactgactttaggtagtacattaggacgtcgctaatggcaatcatgcccaatttgtagaagaaagcaacatatgagatccgcctaagtgtttgactataaacacagaaagataagaaagtaacaaacaatggtgttaattccaacgatgtcatcaatagtatgtccattaatttatacattcttcttgttttaatccctagaggaatttaaaaaatggattattatagattgagtta

SEQ ID NO: 24229 - DNA, 1469 bp, Setaria italica
  Peptide Sequence Number=SeqID_90203
ctatttaaaatagcgaaatatatgcatgtttttttttttggtaaaaccaaacccgaatacatatattgctccactactttcatcgatatacatgcaaaattacaactgctataaacacaattttacatactgccacgctaccactaatgtgcacttgacttggccatactggcctggagctaaattagtgagcaggaactcaggattacttgaccagtggctcctacaagtactcatttgacttccgatgtatgtacatagaagctgttatattaacgttatgttagagttgtcggtatttttgttcaatttcatgggctcatggtttgggacgatgagccagtagcggtgcttgcacggcttcttcatcagaaacaacaagtttcctgcgtttgtcgtccttgctttcaggattaagcgtccaagcaagacaaaaggagattgccaagaaaaaactggccacaataaaactgaaacctttacaatcgaagggagcttccggtgaaatgaagtaagaggttagcgggctcataaacagaggtgccaacaatatagctacagactgcacggttgcaataaaaccttgtgcttttccctgatcagttgagagtacttcccctgaaatgattgcatatattgctggtttggccagaacatagatgacacccagtgaagagctaaaatatggaacccatgaagcccatgcaacaccgtaaagcaaagcataagcaatggaggcaagtattgaaatgcataagacgcctttttcaccaattatgtggctaagaaaggggaggatcaaaatctgtgaaaagattgaaccaacgcctaccaccattagaatttctgagaactgatccttgtcaaagccgaatactgactttaggtagtacattaggacgtcgctaatggcaatcatgcccaatttgtagaagaaagcaacatatgagatccgcctaagtgtttgactgtttttgactatgctaatgttctccttaatagattcccaccgttgttgtggtaacttggcaagcaaagctgacatggacgaatgatgagatgatgtagaaggagctttttgaactgtctcaatcaaatatattttcatgtagaggatagaacaaatcaacaaggcaattgagacctcaaaaatcaacttctcaggcagaaaccttgaaaatacactgcccaaagtgtgtgaggcagagaaaattcctgtcatgaaaccaaatgcagcagccctccttgatggttcaactgcatctgccgtgtatgcaatagagaggcagaatatggttccctgacgattattcgcaaacaaccaaacaaatacatccccaatgacctacgatttgatcatatcaacattttcaaaaaacgaaaattcccgaatgatgcggatgaaccgtgtgtcatttcaattaaaaaaaagaaatatagtgcaaggagaggtcaagggacctctccaa

SEQ ID NO: 24230 - DNA, 1204 bp, Setaria italica
  Peptide Sequence Number=SeqID_90204
gggacgatacccgcggagatcggcaggttgaagaacctcaatttcctcgacttgggcagcaaccgccttgtcggcccgttgccggcggcgttgtccggctgcgacaacctagaattcatggacctgcactcgaatgctctgtcgggcgcgttgccggacgagctgccccgcagcctccagttcgtcgacatctccgacaacaagctcaccggactgctgggacccggcattgggttgttgccggagctgacaaaacttaacctggggaagaaccggatatccggcggcataccgccggagctcggttcttgcgagaagctccagctgctggacctcggcgacaacgcgctctccggtggcatcccgccggagctcgggaagctcccttcgctggagatttcgcttaacctcagctgcaaccgcctctccggggagatcccgtcgcagttcggcgacctcgataagctcggcagcctcgacatatcttacaaccagctctccggcagcctcgcgccgctcgcgaggcttgagaacctcgtcatgctcaacatctcctacaacgcgttctccggcgagctcccagacacgcccttcttccagaagctcccgctcagcgacatcgccggtaaccacctgctcgtcgtgggcgccggcgccgacgaggcctcccggcacgcggccatctcggcgctgaaggtggccatgacgatcctggccgtggtgagcgcgctcctcctcctggcggccacctacgtgctcgcccgctcgcgccgccgcgacggcgccatccacggcgccgacgagacgtgggaggtgaccctgtaccagaagctggacttctcggtggacgaggtggtgcgcgcgctgacgtcggcgaacgtgataggcacgggcagctccggcgtggtgtaccgcgtgggactccccaacggcgactccctcgccgtgaagaagatgtggtcctccgacgaggccggtgcgttccggaacgagatcacggcgctgggctccatccgccaccgcaacatcgtgcggctgctcgggtggggcgcgaaccgcagcaccaagctgctcttctacacgtacctgcccaacggcagcctgagcgggttcctccaccgcggcggcgtcaagggcgccgccgactggggcccgcgctacgagatcgcgctcggcgtggcgcacgccgtggcgtacctccacc

SEQ ID NO: 24231 - DNA, 476 bp, Setaria italica
  Peptide Sequence Number=SeqID_90205
caaccatgtcgcatgtaccattgagatggtgtccaccgaggagctctacgaagttgccgtggttgatgagattcagatgatggctgacccagtcaggggctttgcatggacacgcgctgtgcttgggctcaaggcagatgagatacacctctgtggtgaccctagtgtgctcaagattgtccgcaagatttgtgcagataccggagatgatttggaggtgcatcagtatgagcgattcaagcctcttgttgttgaggcaaagacacttcttggggacctcaagaatgtacgctctggtgactgcattgttgctttctcacgcagggagatattcgaggtgaggctggcaattgagaagtttacaaagcacaagtgctgtgttatttatggagctctgccaccagagacacgacggcaacaagcaaagcttttcaatgagcaggataacgagtatgatgttcttgtagcaagtgatg

SEQ ID NO: 24232 - DNA, 251 bp, Setaria italica
  Peptide Sequence Number=SeqID_90206
cgacgaacatggggtcgtcgacggagtcgaagcgcgcgtcgaacatcatccggtacatgatgttgtagagcatgagctggagcctgcggcgcacgacgaatccggcggtctgggccacggcccgatcggcggagatgtcggcgacgacggcgtccatctcggcctcccacatacccctgtactgctgcacgacgcgcgccgtgaagaagggcagcgtcatgacgcggcgcatgcggcgccagtggtcgccg

SEQ ID NO: 24233 - DNA, 227 bp, Setaria italica
  Peptide Sequence Number=SeqID_90207
ttttttttaacgtacttagtaatctggtggtttgtattgctttgcgctagtgcgtggtttacagattggattcggttgccctcgggagtcgcccttggccgtcttatataggctgacgacctagggttacaagtcagtttgaatctaatctactcggttgttacatggaaggtgatctgagtcggattacaatacgtattctgtaatatccgggctgatttgaatcg

SEQ ID NO: 24234 - DNA, 466 bp, Setaria italica
  Peptide Sequence Number=SeqID_90208
atataggaattttattggaagaaagaaatctcattcattttaggactaattcatttttttaatactattcattcgtttgagagacttctatggtccaatacccaggcccaaaagaggtgttgggatgctccgatccacccgttcttccccagaggcgcatccttatctacttgacagggaagaaaaaagcagcacatcacagttgtcaccgtcccttcggcgacggcaacctcaaccaagagtggcggcagactgcaagatgcgtgaagctgggtcacggcggcgcccagcgcagccttgaggagctctgcgacctcaagcactagcggcgacgaatccacgaccccgagcgacagcgacaacggcagcacgcaacatccgtgaggccgtgagggcggatgagtcctttcttcttgttcctctgtttgtctctcttattactcctaactgattttttggcaagaag

SEQ ID NO: 24235 - DNA, 214 bp, Setaria italica
  Peptide Sequence Number=SeqID_90209
gctgatcttggatgacattggtggagaatgcttatctgtaagatacatctcttcattcgttcatagaaaaatcagatcagggaactagtttagggtgcattgcgtggaaaattatttggaatggtgtgatatctctagtgtgtggtcaaaatgtaattgtactgcttgataaataatgaaaaatgggtacactgttgtttgttgccaaaaaaaa

SEQ ID NO: 24236 - DNA, 387 bp, Setaria italica
  Peptide Sequence Number=SeqID_90210
ggcgcggcgcgtccggtggtcgtgcggaagagcgagtcgtggggcaacgaggagctgccccggctgaagcgagtggccgagacggcggcgacgacggcgcgccgggagatgcgcaagtccgtctcggcggtcagcaaggcttcggttcctccgccgccaccgcagccggcggcgccgtcggcggtgcggcaactggggtggcgcacgcgggacgtgctcgtggcgatcacgcccgacgagctgctgcggcgcgcggagagcttcatccggcggcagcacgagcacctgcgcctgcagcggcaggagtccgagcagcgccagcttcagctccagcgccgcctccacgctccccgccctcatccgcgtctagacgacgacggtgccgcg

SEQ ID NO: 24237 - DNA, 560 bp, Setaria italica
  Peptide Sequence Number=SeqID_90211
atcggctgcgcgaacctgagcacggcgcgcctccgctccctcggccccgcggcgcgccacgccggcatctcctcgcagtcgtcggacggcgggggcttctggtcgccgtcgccgtagaagtcgtcggcggctaggagcgtgacggcgagcttcatcccctgcgcgactaggctggagaggaggtagaagccgaaggagaggatctcgaagaggaagaagttgcgcgcgatgtcgtcgccggcgacgcaggcgggcgggatggcggcggagggcgtgatggtgcccgtgatgccgatgaagacggccaccgtgaagaaggtgttggcggagacgatgccctccagcgccttcacgtgcacgtccgggttgcgccgccgcagcgtcggcatcgctgctgctctgcttcccctgctgctctgctctgcttcactagtatagtaagccgctactgctagtgatcgagtgatgcggctgacgagtttcttgtcaatgatggcaaaggttgttaggaacaataatcatcttctgaggtggttttaactactacgaataaattaaat

SEQ ID NO: 24238 - DNA, 394 bp, Setaria italica
  misc_feature (376)..(376): n is a, c, g, or t
  Peptide Sequence Number=SeqID_90212
tcttctcgatttcccaacctgatgtcagcgaactgcctgctccgttctgctttatcgccctccagttcttccagcagggacgtcgctgacgacacccgctcggtcaacgacatggtccatttgtttaccttgagctgcgggctgttgtcggcgccgagcgcggcggtgagcgctgcgatctcggcctccccggcggcgagcgactggtgcagcagcgcccgctcgccggtggcctcgtcgaccttgcggcggtacacgcgcatgcactcggcctccaggtcccgcaccatccgctcccgctcctcccggctcttcccgatctccccccacagttgcttgagctccgcgagcagcacgccgcagccgccggggtccncgcctctgccgccgcccg

SEQ ID NO: 24239 - DNA, 513 bp, Setaria italica
  Peptide Sequence Number=SeqID_90213
aaaaactaattgagtctgcaaagataagagtattcaggtggctgcttattctcccctgggaggccaaagaatacctaaaaatgaatccagtacgacaatctgatgttctggaagagattggaaggaccagagggaagtcagtggctcagatttcactgagatggatctacgagcaaggtgcaagcatggtggtgaagagcttgaaaagagaaaggcttaaggagaacatcgagattttcgattgggaattgagtgatggagaccggtcgaagattggtcagataccacagcgcaagttgatcacagtacagaatcttctctgccctgaaggcatctccagtgtggatatctcggatgttgatgtttttgaaatgtagctgtgatctccgaatatttgtggtggatgaagaatttagtgtatagcaggtttatacgtcagaagcaggttacctgactctgctctgcgcaatctgtgataagattaaattgcacaaatttcgctagcaaaaaaaa

SEQ ID NO: 24240 - DNA, 401 bp, Setaria italica
  Peptide Sequence Number=SeqID_90214
ctactgcgacccccggcctgagtggccgtgcgcgccgggcaagaagtacttcggccgcggcaagaaaaccatccatttcactcgtcaaatttaatgtagcgttcaccatgttctccgatcggggatcgagctttttcgagtgcaatcctgacgtgctctcgcttctccgttccaaactgatccgtcagcaactacaactacgggccggcggggcgagtcatcggcgtggacctcctcaacaacccggacctcgaggcgacggacgccgtggtgtcctttaagatggcgctgtggttctggatgacgccgcgggacaacaagccgtcgtgccacgccgtgatcacggggcagtggacgcccacggacgccgacagggcggccggccggggcgcgccgggcta

SEQ ID NO: 24241 - DNA, 273 bp, Setaria italica
  Peptide Sequence Number=SeqID_90215
gtggtcgtggtggtggttgacgacgaggaggagtccgaccctcctccgccgccgccgccaccgttgccgcacgccggcgcctcctcctgctcggcctcggcctccgtctccggcgcccccagctcgtgctcctcctcggagacgtggaagccgaagagctttagcctggggctagtcatgttcataactgcttactactccctgctgctgcaggagagggaaagatggtgagaggaggtaagtggaagtggctgtcaaagctggaggtgcatg

SEQ ID NO: 24242 - DNA, 336 bp, Setaria italica
  Peptide Sequence Number=SeqID_90216
ttggaatcaccgcagtagacactgccgttgtagttgttcctcccgggcccaccgcagcaaacggtgagcacgtcgtcccaaatttgcgaggcgactccaccatctccatgacggggccgaagaaatcggcgtagatgatcctcgcatgcgggtgcttggcccggagcttcttcagggacgcctgcaagagcgcgttgtggtgacgccccagctcgttctgcgccttcaggcagccggtccgggagtcgtattctgccggggtggcgtcggggaacatggtgaacaccggcggcgagcatcccgacgggatcgccccgggaaccaccaatgtcgacg

SEQ ID NO: 24243 - DNA, 503 bp, Setaria italica
  Peptide Sequence Number=SeqID_90217
tatgctgatctggaaacacaattcacttatgttgtaaagcaagctgcaaatggcattccatcagtacctctttctcaagttagagaccaagtaacaagtacatgtatcaatattctccaatcataccgaaagtattgtgcatctgtaagttcttctgggcaattgattcttccggaggctctgaaacttctgccattgtatactctagcattaacaaaaagtgtaggattgcgcaatgatgggagattggatgatcggtcctattgggcctctattgtctcttcaatttctgtgttactagctattccattggtgtttcctaggatgattgccctccatgttcttacgtcaagggatgatgatgattcccttataccgagcccccttacactcaatagcgagaatatacatgatgatggagtctatttgttagaaaatggtgaggatggcttttattttattgttcggtaaatttctagttctaacccttgttgtaccctttt

SEQ ID NO: 24244 - DNA, 461 bp, Setaria italica
  Peptide Sequence Number=SeqID_90218
cgtgctcagcagcagcctttgatgctcatcgttcctgatgttcaagatgtatatacacctcttcagacagatcttattctcccagtttccgagtgccgggagaatctggagcagttgttggaaagcatcccgaacatgtttgaaaataatagggttgctgattctgcttttggagcagctatgaaggctggcttcctggcgattaaatctaccggtggaaaacttcttgttttccaatcagtacttccatcgcttggggttggttctttatctgctagggaagctgaaggtagagcaaatgttacaactggtgataaggaagcccataaactgttgcagcctgttgataatactctcaagacaatggcgttagaatttgctgaatatcaggtctctgtggatgtattcctcaccacacaatcctatgttgatattgcttctatatctgttgtgccccagac

SEQ ID NO: 24245 - DNA, 948 bp, Setaria italica
  Peptide Sequence Number=SeqID_90219
atggtgaggatggctttatttatgtcggaaattcagtcaaccctgtgacccttgagcatatttggtgtctcgtctttggctggagtaccaaatcagttggtactggagccatttgataacgaactctccaggaaagtgaatgaggtggtgaatgaaataaggcgtcagagatgctcttacctgagattgagactatgcaaaaagggtgacccatctggagatttcttccgatcactattagtggaggacaaggcaccgggcggtgtttcctatgtcgagtttcttgtacatgttcacaggcaaatccaaaacaagatgacctgaggtgaaccccacctcattgttgtaacaatttggttggtaggaatccagaacaaaattgatttctgcatgaggataaaacagaaatgaatgaacctgggactctccaatcagtgcaacctaattcacacctggagagtcatcgcagaatcgacaggattctgcaaccacttacaacatcggttttggtgtaggcgatatatgtttctgtacagagacgagtgaactttcgtgtgctcaattttgaaagtatttattctagtgaacagcggctgtattttgtcaagaggaagcttatagaggttgggcaataatgtaagtttagccatgggagtcatatggttgtaaatgcactaagtaattatttgcaagtgacatgtgaatatcatggttaacattcttttatggtcacaggtaaacgtatgttgtttacaagcaggctctaaactgagattctgctattgttagaattcttacatggagtcgaaaattatgactttcttacaaggctctagaccttagcactggtactaactgaaagttcacccgttgacgttgagctgacatttgtctgaattcttgtcgatacaagttacagatatttaacttcgtgcatattttgcataa

SEQ ID NO: 24246 - DNA, 820 bp, Setaria italica
  Peptide Sequence Number=SeqID_90220
gttatcagctcagtactagtgctgctaaagctagctgagctgcacccgagtatccaagcaagatcagcggcagctaaaaagtagagagcactagcaaatacgcagcttggtgtcgtagtgcagtgtcggtgctttgttggtgctgtgttgtctcctcctccaattcgatcgatcatggcggccaactaccaccactatcagatggccgtggcggcggcggcggcggcgtggagggagccggacagcccgcagctgagcttcgtgagcggctgcagctccctcttctccatctccacgctgcaggacgacgacgacggcgccgtcgtcatcgccggccacgccctgccctccacgcccgtctcgctcgccgggttcgccggcgacgaggtcgacatggaggtgcagcaggtcagcggcggcagcggcgacgaccggaggaccatcaggatgatgaggaaccgggagtccgcgctccgatccagagccaggaagagggcatacgttgaaaatctggagaaagaggttcgccggctggtggatgagaacttgaagctcaagaagcagtgcaaagagctgaaacttgaagtggctgcactggtcctccctaccaagagttcgctccgaagaacctcatcgacgcaattctgaagggataaaaaacttgaacacattttatttggtagtacaaaactaagagaaggaatgattgggcttgtgtgtacatgtcagtgtgtgttgtgtgccttaggggaaggggagaaagatggataattggatatgcaatgatctgtacccttgacgatagacctctgcaaagatg

SEQ ID NO: 24247 - DNA, 217 bp, Setaria italica
  Peptide Sequence Number=SeqID_90221
gagagaagtgcacagcggtcaactagtcatgtaccccattttgggatagggcaagagattccaaaacggtcatttcatggcttaaaaagaatcagtcataaagacttcgatcatgcctctggcaaccatcatgtatttgtactttgtgtgaagtgaaataatataattaaggggtatagatcggccttgcacacgtgaatccactaaaaatttcata

SEQ ID NO: 24248 - DNA, 970 bp, Setaria italica
  Peptide Sequence Number=SeqID_90222
aggagcgttaaagactgcatggccaggttcgagatgagcttgccgccggcgccgccgccggggcacaggcatacctcgtcgtcgagcgcgctgcccaagtggacggcctcgctgcacagcgtttgggccgtcctagccgagctggacgactggccggatctccaccacgctatgcgagccacgctggcggcgcacgcgagagcagtcaccgcgctcgtgctgagcgccgggagcgagttcattgagaacatccgctggatcaccaggcacagagacctcctcgagttcgacgcacggaggcacctggccatggcaatgctgccggaactcgtcaggggtaccgacgcgcggccgccctacgaactgcttgtcgatcgggcgcggctgctgccggactcgttcgggtacattgttcatgcgacgccccaggagctaggcgctgccatgtctgtggcgttcaagcacgagcaagccaccggtcccggcgtgctaagggagtggttctgcttggtgtgtcaggcgctgttcaacccacgcgttgttctcttctcagcgtgtccacatgacaggagaaggtttttcatcaatccaagtgagttgcttctagcactgcacctggagtactttgaatttgcagggcggatgattgcattggccttgaggcacaaaatacatgtgggagtatactttgaccggacattgttcttgcaattagctgggagacctattacactggaggatattgcggacacagatccatccctgcatgcaagctgcaaaaagatcctagaaatggatccgggtccttgtggattcaaacacattggaactaacatttgttcgagaagatgaggtgttggggtctaggacagtcaccgagctcttccctggagggaaagatattgctgttactagtgagaatagatgatttcgtactatgttcgacaaatggaaaccctggacagagttc

SEQ ID NO: 24249 - DNA, 1918 bp, Setaria italica
  Peptide Sequence Number=SeqID_90223
ccgcctcctccctctgctcctcttcgggaaaccaatcctcctcctgtaaaagtatggggacatcggcggcggagcccaatgctgcccccgcgccgccggcgccggagccggctcggccgcggccaggccggctgccggacttccagcagtcggtgcggctcaagtacgtgaagctgggataccactacctcatctcccacgggatgtacctgctgctgtcgccgctcatggcgcttgtcgccgtgcagctctccaccgtctccccgcgcgacctcgccgacctgtgggagcagctccgcttcaacctcctctccgtggtggcctgctccaccctgctcgtcttcctctccaccgtctacttcctcacccgcccgcgccccgtgtacctgctcgacttcgcctgctacaagccggagccggagcgcaagtgcacgcgcgagaccttcatgcactgctccaagctcaccggctccttcaccgacgagaacctcgagttccagcgcaagatcctcgagcgctccggcctcggcgaggacacctacctgccccccgccgtgctccgggtgccccccaacccgtgcatggacgaggcgcgcaatgaggcgcgcgccgtcatgttcggcgccatcgaccagctgctcgagaagactggggtcaggcccaaggacattggcgttctcgtggtcaactgcagcttgttcaacccgacgccgtcgctgtcagccatggtggtgaaccattacaagctgagggggaacattgttagctacaacctcggcgggatgggctgcagcgccgggctgctgtccattgacctcgccaaggatctgctgcaggtgcatcccaactcgtacgcgttggtgatcagcatggagaacatcaccctgaattggtattttgggaacaaccggtccatgctcgtgtccaattgcctgttccggatgggtggtgctgccatcttgctctcgaacaagaggtccgacaggcggaggtccaagtacgagctggtgcacacagtgcgcacgcacaagggcgccgatgacaagtgctttggctgtgtgacgcaggaggaggatgagattggcaagatcggtgtgtcactgtccaaggacctcatggcggtcgccggtgatgctctcaagaccaacatcaccactttgggaccgctggtgctcccgttgtcagagcagcttctcttcatggccacattggttgccaagaaggtgctcaagatgaagatcaagccgtacatccccgacttcaagctggccttcgagcacttctgcatccacgccggcggccgtgccgtgcttgatgagctggagaagaacctggaacttactgactggcacatggagccatcgaggatgaccctgtacaggtttggcaatacgtcgagcagctcgctctggtatgagctggcgtacagtgaggccaaggggaggatcaggaaacgcgacaggatctggcagatcgcgttcgggtccgggttcaagtgcaacagcgccgtctggaaggcactccggaccgtgaacccgaccaaggagaagagcccctggatggatgagatcgacaacttcccggtggatgtcccaaagatctcaaaggttggcaacgcatgaagatactagttgttcccaggtggcaagtggagttgggtcattgtcaagggctgggcagaggtttacgcttctgaccccatcgtacgcaccgtcagttcttgttttcagttgtagcatggcatccgtgagggaacttggagtagatgatgatttgattaggtagaaagggtgtgatttcttcactagggctgcctgaatggcttaatgtctgatatgtccaatttattcagattggcggaatcaattggttttgtcgcattctttgctgcctgacgtactctaagaagaactagacc

SEQ ID NO: 24250 - DNA, 246 bp, Setaria italica
  Peptide Sequence Number=SeqID_90224
tccatagcatctcccttggcaggtgtccttgctcttcactatgaccgccctgcagttcttgccctagggactgctttctgggctttatcaacgggagctgttggtgtaagccagtattttgggcaggttgcattctggagagctgtaaatggttttggacttgcaattgtaataccagcacttcaatccttcattgctgatagttacaaagatggcacacgtggagcaggatttggtttgctagcg

SEQ ID NO: 24251 - DNA, 245 bp, Setaria italica
  Peptide Sequence Number=SeqID_90225
gtcgagttcctcagcgcgcgccgcgtccaggccagctggtacgccagggaggccgaggtggagaagctcgtcggcaggctgagcagcgccggaggcgcgccggtgttcctggaggaccacatcttcgggctcatggacggcgtcatcggcacggtggcgttcgggaacatctacggcacggagcagttcgcgcacaggaagcacttccacgacgtgctggacgaggccatgagcgccaaggccgg

SEQ ID NO: 24252 - DNA, 682 bp, Setaria italica
  Peptide Sequence Number=SeqID_90226
gcgcggcggcggcgcgggaggtgatgaaggagcacgacatcgactgctgcagccggcccgtgtcgccggggcccaagcgcatctcctacggcctcaacgacgtcatcttcgcgccctacggcgagcaatggcgcgagatgcgcaagctcttcatcgtcgagctcctcagcatgcgccgcgtccaggccgcgtcgtacgcgcgcgagcagcagctggacaggctcatcgccgacctgagccgcgcgggcgcggaggcggcgccggtggcgctgaacgagcacatcttcgggctcgccgacggcatcgtcggcacggtggcgttcgggaacatctacggcacggagcggttcgcgcacagggagcggttccaccacgtgatggacgaggccgtggacatgatggccagcttctccgccgaggacttcttccccaacgccgccggccgcctcgtcgaccgcgtcacggggctcgtcgcccgccgcgagcgcatcttcagggagctcgacgccttcttcgagacggtcatcgaccagcacacggaccccgcgcgcgtcgtccccgagaacggcggcgacctcgtcgacgtcctcgtcagcctgtggaaggagaaccggggcacgctccgcttcacccgagaccacgtcaaggccctcatcatgaacacgttcatcggcgggatcga

SEQ ID NO: 24253 - DNA, 1128 bp, Setaria italica
  Peptide Sequence Number=SeqID_90227
tacgtacgttactaacggggtcttcgttcgtcccgtccgtcgtagtcgtctattctttctagggtagcttcgacgccttcttcgagacggtcatcgaccagcacacggaccccgcgcgcgtcgtccccgagaacggcggcgacctcgtcgacgtcctcgtcagcctgtggaaggagaaccggggcacgctccgcttcacccgagaccacgtcaaggccctcatcatgaacacgttcatcggcgggatcgacacgagctcggtgacggtgctgtgggcaatgtcggagctgatccggaagccgcgggcgctgaagaaggcgcaggacgaggtgagggccgtcgtgggaaacaagccgcgcgtggagcctgacgacgtgcccaagctcccgtacctcaagatggttgtgaaggagacgctgcgcctgcacccgccggcgacgctgctggtgcctcgggagacggtgcgggacgtgaagatcggcggctacgacgtgccggcgaggacgcgggtgttcgtgaacgcgtgggccatcggcagggatccggcgagctgggcggacgccgaggagttccacccggacaggttcgaggggagcgacgtggactacaacggcgggcacttcgagctggtgccgttcggggcggggcggcggatctgcccgggcctcgccatgggcgagacgaacgtgagcttcacgctggcgaacctgctctactgcttcgactgggcgctgccggaggggatggcagcggaggacgtgagcatggaggaggccggcgggctgacgttccaccagaagatgccgctggtgctggtgcccacaaggtaccacaaccgcacggcgacggcgtagacgcgtagtgtagtagtagtcgtcatcgtatcgtcgacgattgaataaaagataagcgtgcgcgacgtaggtgcctcaccttgcatcgtcgttgcagtagcttggagacttgaaaacccaaaaaaacaagaaaaaaatggtgacatcagcaagtaattttatacttgacacactcttgtacggccgcgcgtagtgtccaaggtcacccatgaacataatatgtaaatgtgatcattttgtcaaataaaaatgagaattattagttaaaccaaaa

SEQ ID NO: 24254 - DNA, 729 bp, Setaria italica
  Peptide Sequence Number=SeqID_90228
ggcggaagccaactgttcctgcctgacccgcatcgagcgccctccgcaggaacccgaatccggacgcctcgctgccgtcgtcctcgcgccttctcattcgattggagactgctggggggggagaggaggttggttcaaagatttggccagccgcgatggttccatcagagagggggagcgtcgccaccgccgtcagcacggctgccgccgataagctgctccatgggcctatcgctggcaagaagtgcaagaaggcggccccgaggaaggttcacaaggctgagagggagaagcttaaacgcgaccacctaaatgatctcttcgttgagctgggtaatatgctagaagcagataggcagaacaatgggaaagcatgcatactaactgatactactcggatactaagagatctgcttcttcaagtagaatctcttcgaaaggaacatagcaacctgcagaatgaatctcattacgttgcaatagagagaaatgagctgcaggatgagaacggtgtgctccgcaaagaaatttcagagcttcaagacgagttgagaatgcggacttccagcaatccagcggattggggccatggcaacgctggattgaatccccctgttcctcaccctgcaagtgcagtattctcatcccagcaggcaatgcaaccacccaccatcgcaagcactgtacttccccttgcagccgccactggcaccatcagcagtgatcgag

SEQ ID NO: 24255 - DNA, 586 bp, Setaria italica
  Peptide Sequence Number=SeqID_90229
cttcctcgcggcctccctgttctgcgcgagccgccgcagcgtcttggggtccggctccgggggccccctccctggtccgagctcgagcccccgcgccgccacgcttgccgccgccggcgctaccttctctcttgatcgctcccttggagctcttgcctgcggcgagcggcccgcctccggccttcgacggtggcgcctgggagttcttggaagggccggcaacctgtgctgccgccgctgaagaagccatggagatggagccctttggggatggctcgatgtgcattggctgggaggggaagatgttgagagtctgcggttgttcttgaattgatggcttagcttgctgcccatcaaagtagaggagtagggcttgatccagatcagatggcatgtcatatccttctggatcccttcttatgctgccatggagggatgaagaagcttggaccatgccggaggtggatggatacgccattcagatgcttccttgaacaaagaactcagctctgaacttgcgtcttgaccacttcacatagaattgacccatcttgaaatggactgaatcatcgtaccaatccaaaat

SEQ ID NO: 24256 - DNA, 335 bp, Setaria italica
  Peptide Sequence Number=SeqID_90230
gtccacggcgacggcgcagcccacgcacagcagcagccacgcgcacgccatgggcagcgccgcctccgccgcccgccatttgcttctcctactcatcataacgccaagacccatacacaaacacgcacacctgtactgaattgtaagtgtatgaccaagaacacgataattctgtagaactgtaacgtactactgctaattgccccccaaatcttggtcttgcttatgtcgcaagactagtacaaacaggggaggaagacgaagagagagaaagagaggccatgagagatggtgcaaggtttttatatgcttgtagttgctggggaagaaggagg

SEQ ID NO: 24257 - DNA, 900 bp, Setaria italica
  Peptide Sequence Number=SeqID_90231
ggtcggcaggacaatggtgcaccaaatagcggtgttaaggactatgtcatggagtggattagatcggagataaaaaaggaacgccccaagggtgattggattgcagggacagctgtaaccaatccagttgccgagaggaagaagtcgaagcgaagggcacgagaatggtggcgtgaggattatgttgatgagctcgccaagaagcagaaacggcgggcacttgccaaatcaaagagccagcaggttgggttgcaatggtgggaaagggatattgatgatgacttggatgagaaggggcagtcaaagtggaatttggtaaagagctggagccggaggagcagcaatagcaccagtaatggcaatggcagcattaactggtgggtaaatggtgcaagaagcagccgtgactgggcaagcggagaattaattcccaagagtggtggtacagtgagcagcacgccgagcatgcgcggcacggtgtgctatgtggctccagagtatggtggcggaggccctttatcggagaaatgtgacatctacagctacggggtcctattacttgttcttatttccggtcgccggccattgcaggtaatggcgtcacccatgtcggagtttgagaaggcaagccttatatcatgggccaggcaccttgcacgtgccagccgcttgcttgatctagttgaccctgccctgtgtgatgttaaccgtgacgaggcactgctctgcattacggttgcactgctctgcatccagaggtctccagctcgtcgcccatcgagtgaggaagtgctccagatgctctcttgtgagggagaactcccaaacctcccactggagttctcaccatcaccacctggtggcttcccttttcaaagttcccggtaagtaaaattagta

SEQ ID NO: 24258 - DNA, 2801 bp, Setaria italica
  misc_feature (2775)..(2801): n is a, c, g, or t
  Peptide Sequence Number=SeqID_90232
taccgaacgtgtgctcacttcctctagcagtcgtcgtcctcgatgataagcagggggtggtggagcactccaacctaaataagtgagcttccaggtcgaggagagggaccgccggaggaaaaatttggaggcgccctacttccaagatacccactagctcccagcatcccaccgcgttcttttcccccttggctagtgctagaaagatgcgatttttttggctctgggaccacttgttcttctgattcttgcgctgcaggcgcccccttggcttcttgattttggcttctcgtctggtgtctattttcttgtgattgaggtgttatgtgactcatccttaggtgcctttgaagggtgtgcgagagttctcgattccaaaatctgcaagcgtcttctgcgtatcggcctgggagccgcgcggtaggagacctgtacggaagaatttggagacgatccctagtctatctgtcaagcagccaaagtggtgttcgtgtgagctaaagctaagggagatacagtagttggtgcgaagacattagagggggcttgttggattctgcaaggacatgctaaacttgtgtccttgtgatctagaggcctgatattttaccatcaactggagacgtattaagcaagtacaaggcttcacaatttgagattcgtcacaataccatcaaagggaacaagtaaagagccatttgatcttggacatggagaagcaatccagcacccgacatggcccgctagaaaaactgaagagcttccgggggatagagaagcagagaagcttcaagttcttgtccatggagaagcagcagagcttcaaaaggaacaaggacagccctgggaagcggggtgacaccgaactccacctcgcagcgagggctggcaacgttgcccatgtccagaagatccttgcggagtgcgacccagagctcgtggcggagttagctgcccgcccaaatcaggacggtgagactgcgctgtatgtgtctgctgaaaaggggcatattgaggttgtgtgtgagattttgaaggcttgtgatgtgcagtcagcagggatcaaggccagcaacagcttcgatgcattccatattgcagcaaagcagggccatctggatgtcttgaaggagctgctgcaagcctttcctgcattagctatgacaacaaattctgtaaatgccaccgctttggacactgctgcaactcaggggcacatcgatattgttaatcttttgctagaaacagatgcaagccttgctaggattgcaagaaataatggcaagacagttttgcattcagcagcaagaatgggccatgtggaggtggtcactgcactattaaataaggatccagggattggtttcagaacagataagaagggacagacagcactacacatggcttcaaaaggccaaaatgcggaaattctgctcgagttgttgaaacctgatgtctcagttatccatgtggaagacagcaaggggaatagaccattgcatgttgcaactcgaaagggaaacaccattatggttcagaccctaatatcagttgaagggattgaaatcaatgcggttaatagagctggagagactgcttttgctattgcagagaaacagggtaatgaagagctcattaacatcctgaaagaggttggtggtgtaactgcaaaagagcaagtaaatcctcctaatccagccaagcagcttaagcagacagtcagcgatatcaggcatgacgttcaatcacagatcaagcaaacacgccagaccaagatgcaattccaaaaaataaagaagagaattcaaaagctccacattggcgggcttaacaatgccatcaactccaatactgtagttgcagtgcttattgctaccgttgcctttgctgccatattccagctccctggtaattttctggagtcgatgcctccacaacctgatccgaacttgaccttggggcaagcattgatagccagtgatccagcctttataatcttcttggtctttgatgccttggctctcttcatctcccttgctgttgtcgttgtccagacctctctaattgtcgtcgaacagaaggcaaagaagaagatggtctttgtgataaacaagttgatgtggctcgcatgcctgtgcatctcagcagccttcatagcactgacctacgttgtcgtgggccgagatgacgagtggttggcttggtgtacgatggcgatcggcactgtcatcatggtggccactctcggttccatgtgctattgcattgttactcacaggatggaagagaagagcatgaggaagatcaggaggacctccacaagccagtcatggtccatatcgattgactcagaaacggagctgatgaacagcgaatataagaagatgtacgccctctaggataccaacaatgcttgtcgccgagtcctgtatatatgaacccatttgcctgacaccattccatggcattaagtgggattgactcgaactatgtttaggcctagaacatggcacctgtatgtaactgcagtctgcagcctccttccatgagcagaggggtgaattccaggtgataggagtagcaactttttgtaggcaaaatatgagtatttgccaagcaagctgtttctctcatattattgtggatggaaatgagaaccatgaattgtatctgtatagtagaatagtatggaataagttgcccttgtgtcaaaagttatgtggtcatggatgctcatatgatgcaatacgagaattgagtaaactgaggaaaccnnnnnnnnnnnnnnnnnnnnnnnnnnn

SEQ ID NO: 24259 - DNA, 639 bp, Setaria italica
  misc_feature (40)..(40): n is a, c, g, or t
  Peptide Sequence Number=SeqID_90233
taccacacagagtcgcagcttacagattcattatctagcncaaattattgtatgatctgtccagcatgcacatagtttgaagaacttgagtacagactacagctagtcatcagttgtcagacccatagtcaccagggaaaatggaaccaatgaaccatgccgcatcccctcgccccgctggcaatttcatccttgccttgtcagaactttcacgagtaacatactgcgttccttgattctgttccttgacctcatcggctgagaacttggtggccattgtcagaccccaccatgaaatctgtcataggttgtcagtataacagctccccatcttctatcttgcctgagcaacagccatgggcaacgggtttgggccgacataggtgagctcaactttctggggcagaaggtggtaccggatggacatctcctcgaacattttctttagctccatgacaagctcagacctcctgatgttcttctccctgatgttttggaagttcattgtgtgctgtacagatagagacatgttgatcttgttcacatccaggatgtccttcaggtttaccgtgtggacagggtgccaatgtgttggtttgctttccagataccctttgattttggacctcaaagctccaa

SEQ ID NO: 24260 - DNA, 624 bp, Setaria italica
  Peptide Sequence Number=SeqID_90234
ttgtaattgtttttggtaagtttctatttgttgttgtcttgttactagtattagtatacacatgttgatcttgttcacatccaggatgtccttcaggtttaccgtgtggacagggtgccaatgtgttggtttgctttccagataccctttgattttggacctcaaagctccaatgctctcaactgaagttgaaacatgaatagcaaaatcaatagtgtcgtacatgttagggcttcggtaaaagttgctgattggctttgtggacagtacagagtttggataatatactttctcgttgtcattcttcaagagaacagtagtcaatatattcatttcttcaacagtcatctgtgttccatcgataacacagcggtcaccaacatcaaatggatgcatgatgaatacaaatataagggcctcaaatacagttttgcaggcattcccaaatatgaataccacaaccagaagctgggacgagatgacaacaaggattttggttgttgcaatgcccatcaacagtagtgtgatgatgatgattataatgacaactataacactgatgaggttgtgaagttgcataaccgcagtctttgtgtcattcagagaatgtgctagtgatttgcg

SEQ ID NO: 24261 - DNA, 209 bp, Setaria italica
  Peptide Sequence Number=SeqID_90235
ggctgctatcgtcagggacagggtgtggacgcggactcgagggaactgcccatatctgttagtccacgccgtggccatgctcaaccacaggaggtgccatttctcgccaaacccaactctggacaaaccacactccatctccaatgaaaactcctccaccttgggcgccaagaaggacatggcgaagcggaacccgtaggatctcaaca

SEQ ID NO: 24262 - DNA, 1062 bp, Setaria italica
  Peptide Sequence Number=SeqID_90236
attacaacgaagaccaccaaatgacggcttatttatagcatactgtcggtccttgctggcaaccgcctgaagaagttcactggtactgatggtaacctatgtctgaaccttgggtgcctcatgacatagaaccctgctagtgcagcaagaacttgaaccggtgtaacatacaagactactgctgctatcaaacaaaacaggacaaagactcctgtggcccgagggtccctccagctaagcaatgcttgaaccctctccccttgtgttgctatatcaccaaccactgtttgaatccttccagcaacactcctcaatctgtcatacctcatccttacaatctcagggttgcggctggtagggaatgtgtcaaactcctcatcaagttcatcagggtgaacagcctctgcatgggagatcttggtattcatgtgtggaggatagcgaggtcggtagcggaagttccaaatccctataagaaacatgtacaagaacactgttggaagaatgagctctggaaagcacaccagcattatatagagaatgtgaactagcacagtggtaatgggattcttccatgcacagacaccagtgaaccacttgctaacagcaaacaagcctgagaaaactgtcatgagtctgaagaagtttgctttacttttcctcatgctccacaagtgagaatcaaagtctgtcatgtattcaacaacttcctttctcaaaggtggctccatccggctaagtcgggcagccacaatctggacagcttgatggcgcagcatatcaacctgaagtacaggtattgggcgcacatagtgcatctttggaagcaaaggacgagagtacaggtacaacatgtttaccagtgatgttgaggaaaatcgaatcgctaggtgcagttcacccatctttttcacccctgatgagtggagaaccaggagaggatatgaatgggtgtacacacgaccagtttcaagtgtggaaaggcgtatccggaccttgcctatcttcccatctttgccactggatgtcttctccccactcctctctccaagttggccattg

SEQ ID NO: 24263 - DNA, 2614 bp, Setaria italica
  Peptide Sequence Number=SeqID_90237
ccggaccttgcctatcttcccatctttgccactcatcaggggtgaaaaagatgggtgaatcgctaggtgcagttcacccatctttttcacccctgatgagtggagaaccaggagaggatatgaatgggtgtacacacgaccagtttcaagtgtggaaaggcgtatccggaccttgcctatcttcccatctttgccactggatgtcttctccccactcctctctccaagttggccattgtcaaaaacaccaacagtcaggacagttgcaggatcatagacttcccaggtgtactgttcattgaatctggggttcggattgttcatgatggtacgtgtccttacccactttgacccgtacttagcaacacaataggtgtctgatgaaccttttccatctcttgttttcataggaacaatcccttgagcaccaaggatgccaagttcaagcaagccaatggatggcttccagagttgcttggctgttggtcttaggtcactgctgtagtttgtacactcatcaagaacatggtaacctccatcaagacagagacggagatgaagccgagtagagaacttttccttcttcagttggtccacatcaacaagtacaggcttctcaagattgaaccactttccatggataatacggtcatcggcacgtctatcaatcattgtcaatggtataatgacacggccaagcatttcatctttattaggagctgcacgatcctcaagagtcagaataaggttatcctcaaatggttcagcagccacaaacataaggtcctcattccaaaaagggttgaaatttctagcctgcacaggtttcgtcctccccatttgatgccccacttgtactctgacaaatacatctggatagcgggtcttatcaaatatagcaacatcttgggcctcgactatattaactcgcaggtaccacaatctgggagcatgataaactttagacttcatgtgtgttacagcagatggatcttcaagtgttgcagcatctgaatgccaggcatcaggaaatgcttcatcagcttgggtgccgatccaaactgcaagcatgagctcgcccatggacttatccccactcttaccaacaagccggtaccattctggagccagtgggctgtcaggaggcacacgtattggaacatcattcaaatcaaatcgcactaagccaacaaagtcatctttaagcaaatctttgtctttgaccacaacctcaaggacagatgcctgcatacaatccctggaaaaagcaaagaccgcattccactctggattcttctgcttctcaaagtgcttagttatccccctatagttgccaactctcacctcaacaaaaggatccagacttccagtgacatccatgtcaggcaagtcccgagccctgaccacgcgaacaaacagatactgcattcgctccacaaggtcataagtgctagcatgcttttcaccacgtataacccggccaccaacaacctgcccaccaccaagaaatggactggtctctttgagtgcgtagtccatgggctgctgggaggccgctgaatacattctcacaatcctgggttgctgatgttcaggcttcatctggtctacagagtacttggaaggctgctcaccaaaactagctggaagatggccatggttatgatgatggtgtgcctccttagcaatggtgtgtaaggttttcgcctcagacctatgctcctgagatctgtgcaggttagtaccagttatatcagctgcaatttgctctgctggacttggagctggaggaggattactcgaaacaggatccattgcaggaagaggatttgaagctttgatggcagggtcattggtgatgtatactttcagaccaagttctcctttgacacgcgagaacatcccacgcttctctaatggataatgcatgaccaccgcgtcaggaaagggcacaaatgaggttccagcaatccttaccttcccaaggaaggacctggaactttcaatggttttgttgacattgtagacatatgcttcaagggcgagctcaggaagattagaaggatctgatatattgaagtagaagcgctcgttccacaccgggttcaggtccttctccttgacagcagtgcggaaccgctgcccatcaaaggtcacctcgacacaagcattcgcagaaccttgcccatccttaggcatgaggtcatgagcacttacaacctccacacccagcttatatgtagccattgcctctgctgatgttgtagttcactatactgcacaagaaaagaagaagtcaactcaaggcttgatggatctccactccgcacgtatattgaagggagggaggcgcagttgcttgggaaggatgactggatctagatcgaggagtgttgcagctgatactgtagtccactacactgcactgtggacgcggcgctcccagatccggccggccccacggtaatgccgagcgaatcctcggcttgaagcggcacggaggcgatggtcctccttcacgcggcgtccatggggttgaggttgcgggtggacgagaagggtgggggagcaggaggggttttggtgggggaaaggaaggagaggcgtctgcttg

SEQ ID NO: 24264 - DNA, 796 bp, Setaria italica
  misc_feature (1)..(16): n is a, c, g, or t
  Peptide Sequence Number=SeqID_90238
nnnnnnnnnnnnnnnntttttttaagaaaggatcgacacataaccaaaaacagataggtcaaaacaagattttggcaattattcccacaatttagcaactgatacgatttacaggctctcaagtcctgaacagagtcataaatagcaacagtgtcaagaagactacagtaacagagaaagcatctctaggtattacaacgaagaccaccaaatgacggcttatttatagcatactgtcggtccttgctggcaaccgcctgaagaagttcactggtactgatggtaacctatgtctgaaccttgggtgcctcatgacatagaaccctgctagtgcagcaagaacttgaaccggtgtaacatacaagactactgctgctatcaaacaaaacaggacaaagactcctgtggcccgagggtccctccagctaagcaatgcttgaaccctctccccttgtgttgctatatcaccaaccactgtttgaatccttccagcaacactgcactgtggacgcggcgctcccagatccggccggccccacggtaatgccgagcgaatcctcggcttgaagcggcacggaggcgatggtcctccttcacgcggcgtccatggggttgaggttgcgggtggacgagaagggtgggggagcaggaggggttttaagggaaaaaggaaggagaggcgtctgcttgcgaatgcaacttgcgtagggagtgagagggggagcgtcttgcgtggagtcgccgtgccttctccgtgctcttccacgttttaccgttaaccggtaagaaccgaacc

SEQ ID NO: 24265 - DNA, 2268 bp, Setaria italica
  Peptide Sequence Number=SeqID_90239
tggataatgatgatgagcaaggcaagaatgatgatttggaagatgaacccattacctgtgaggaaactgatctgaatactgaggaagtcatggacaaaacagatgcatatgatgaccgaacaggacctgaactcccggaaccagataatgattcccatgatattgacatggagacgcaagaacttgacgaggaagatgctgacaatgaagacattggttcagaagaagtggagcaagcagatcagaggtcagatgcttcagatgatatggagttaggggatatggcacagcatggtgatagtgcggtagatcatgatggggaccatgttgaagatgcaaacacagaaaatatagataagcaacaattggataagattgattctcttaagcatccttcacaaggccagcctgagaatatgcaagtagacaataacagagaatctgaagcaaacttggccaacagcagcgatatgaatggtgcagttgctccttcagttaatttttcaggaaatgaattgcccaatatggaaatatctatgccaaattctggtgatgattcaagattgtctaacaccaaaccagagatgcaaaatgatgctccacaatcgcacatcaagcaggcaaatcctttcaggagtattggcgatgcaatggaagagtggaaagaacgagctagagtctcagctgatacccaggataatccaccagaaaatggacatcatagtgatgatgagaatgctactcaatttcgttatgtccctgagggtgagcagagcacctctcaggcattgggtgccgcaacagctgatcagatcagtgatgacactcaaatcaaacaatctttcatcgaagatgaaagccgtgtcaagcaattagaacaaagtgaggagagaacacctgataaccctgaggtgcctcatattcaagcgtcgcaggcacttaccagcaagtctgaaaatgcaaatgtattagagggcccagagattcaaacagatacatccgttcaagatttagttgaagtcggaaaagataactctttccaaaatcttgtttccttcaagcgacccccagcagatgacaaaatagctctggatgacctagctgttgacacggaattgtctactcagatggatctggacatacctgatgcagaaacgaaaagggcttttgtggactggaaaaatctcgaactggcaactatgaaactgtcccaggaactagctgagcaattgcgtctagtcatggaaccaactcttgcaagtaagcttcaaggggattatagaactggaaagagaataaacatgaagaaggttattccatatattgcaagtcatttccgcagggacaagatatggctgcggcgaactaaaccgaataaaaggaattaccaagtggttattgccattgatgattcacgaagtatgtctgagggcaaatgtggaaaagttgctattgaggcattagtcacagtgtgccgtgctatgtcacagcttgaggttggacagtttgcagttgcaagttttggaaagaaggggaatgttagagttctacatgattttcatcagatcttcaatagtgaagctggagtcaaaatgatctctagtttgtcctttgagcaagataacaaaattgaggaccaaccagtttctgatctcctgacgcatctaaacacaatgctcgatactgccgtggcaagggcacgcacaccatcagggcaaaatccactgcagcaactgatactaatcatatccgatggcaagttccatgaaaaggaaaacttgaggcgccatgtcagagatgttctaaaccgaaagaggatggttgcatatgtcctcctggatagccctgaggattctattatgaatctacaggaagcatgctttaaagcaggggagaatctacaactgaaaaaatacatggattcctttccgttcccttactatgttatgctacagaacatcgaagcgcttcctcgcacattggctgacctgcttagacagtggtttgagctcatgcagagtgctaacgagtgatccatttgggacgtcagctggccaaatttgtagcgggggtgccctctgtggcttgggacgtcagctgaccaaattttgtagcgggagtgccttctacctttgactgtacagcaaattgagggtgttaagattcggcccagtaattctttgatttcaggccagattgtgtaaaaaatataccacagttccctgtaaatcgtctgagaaatgtcaatagaattttcttgcttagaca

SEQ ID NO: 24266 - DNA, 311 bp, Setaria italica
  Peptide Sequence Number=SeqID_90240
taacgaacgggacgaacctacctacggtacaacgaacggacggtcggggtctggacctgcacgtgtcacgacgcgtgcaaattaaacaacatgttagaagcacagttgatctcgctttactaggatcgatcgagctcatcatcaagatggcgatcgatcgatggaatcacaaagcatgcattcacaagcattcggatcataagatattcgaacgatcgaggcgatccgtgcatatgaagaatcacacagatgatggtgatcgactgatcgagcgagttacctcagcagtggccattggtgacgagcaggaa

SEQ ID NO: 24267 - DNA, 303 bp, Setaria italica
  Peptide Sequence Number=SeqID_90241
tcccactcctccacctcgaccgccgccacgatggccggcgccacctcttgcccggttgccgccgcggacatgagggagaagcccaaagaatccggtggataatagattaaaagaagctgcttggtgggaaggagggatcagaactttttgctcttcaaatctgaatccggcaaggaaacatggaggcgctactcgccggtggtgagggcgttggggaagagtggtgtatggagaggtggttcgtccatggaggtggaggtggagggcagcggagctgcgattggtggagcagcttgctctgtg

SEQ ID NO: 24268 - DNA, 367 bp, Setaria italica
  Peptide Sequence Number=SeqID_90242
gatgcggccgtcgcggcggcccagggcgacgggccacgaggggcccttcgccagggagacggcgtcgcgggccatgagggccaggatgtcggcgcaggagacggtgcccgggcacgcctgctcgagccggtccttgacgcgggccacgacgtcgaagccgcggaggctgccgttgggcttggcgtcccgctccgccgtgttgttgggcgtcgagtccagcagcaccgacgcgtcgcagccctggacgaagcagtcgtggtagtgcagcctgagcagcgcggcggcgaggtccggcgacgccgtgacggccgccgccgtctcgttgcgcacgatctcctccgccgccgggcacgtcttgttgtagtag

SEQ ID NO: 24269 - DNA, 313 bp, Setaria italica
  Peptide Sequence Number=SeqID_90243
gtcatataattgaaatgacagaggggcacattgcatgccattctttctatttgattcatctggcaaaggaaaaaacataatgtattccttaatatacattaaacacaacagccagtaaaccaagattcctgaaaaaagctaaaagaaacatcagtgtcttctgttgtcaaacatgtatctcacaagatcccatttttcactcgttttgaactctctttgttggtagacttggtgtcccatctttactcctgtaatttaccatactgttatgttgataaattctgagtgttaatgatgttgcagtagtggcata

SEQ ID NO: 24270 - DNA, 300 bp, Setaria italica
  Peptide Sequence Number=SeqID_90244
gagacagtggatgtcctaactggtcaaggttccccttgatctccctttctagatttgctatctgctggcgctttaccttaatctcgtcattgaccttcatttccaactcaacatgtccattcattgtgcttcttccagcttcctccatgagacgcttaagaacacttgtatggagtgcaacctcccctgacaagatcttcgattgctctctcaatagatcaacatgatctgttgtttttctgctgaccaaaggagtttcttctccatggaggccatcagaatgaaattcttcatgatcaa

SEQ ID NO: 24271 - DNA, 2050 bp, Setaria italica
  Peptide Sequence Number=SeqID_90245
acgggacgaactacagtctacagtcgagttgttgaaacttgaaagccctgaacaaaccagacacgcgtgactttctgagaacataggcaaaaacctgattgttatatatacttatatacaaccaatatatatacatggattcacactggggcaaacccccacacaaggaaagtgcaatgcccatttgatgatttgatttctgccacgatcctgtcgaggcccccagggtcatgggtcatgatgcattgaggttggcatccataccatcttggtcaactcccttacccttcttcaatttcgccactagaacccacatgttcgcgagctctccttccaggaacgcttccttctgcttggactcctcgattttcttctggagttctgcctctctttggtccttctccataagcatgacctccagagcttgttccctttcatagctggcatgaacatttcttctgctagctggctcgtgccgtttagtaaagctatcccttctaaaaaccctttgaccattgtttactcgtcgttgagttgaatttcttgccgatgccaactcgctagcaagcctttcattgtgtttcatgagtttggtgacctctccagacagtgctttcagttcgatacctgcagctgaggccaggccttttgcatatatgctttcctctagcaacttctgattgcgggcctctaactgagctttggcttcagtgaggtcacacaacctttgcttcagttcatcaatctctgactgctgtgctttttgacgcagttcatcagagacatctatagatgctggatttcttgtgaacttgtgatccagtttgaaggctgatgtctgtgttctgctgaaatatgatgctttctgacaataggtcattagcttcaagagcttgggaaagctgttcttgtaagtgagcaactgtttcttgtaatttctggcattcacttgccttttgctctagctggtcttgcattattctgttatctgctgtcttcacctcaagttcaaatactttctcattgagctgctccagtagctcagcgcgagacagtggatgtcctaactggtcaaggttccccttgatctccctttctagatttgctatctgctggcgctttaccttaatctcgtcattgaccttcatttccaacttcaatatacactttcgttttcaacaacaagaaaacctacaataacatattgaaagcgaagaaagggaaattacctcaacatgtccattcattgtgcttcttccagcttcctccatgagacgcttaagaacacttgtatggagtgcaacctcccctgacaagatcttcgattgctctctcaatagatcaacatgatctgttgtttttctgctgaccaaaggagtttcttctccatggaggccatcagaatgaaattcttcatgatcaacagtcagcaggtcagctgacacattctcaggaagcaaagggttagacctcccttgttctgtttgaaaactaagtccattccctaagggtgtcgaaggggcggtgaatgctttcctcaggctagattggtcaccatctgagcttgtcagagcagcagaaccaccatcatttttccgaagtttgaaccagttaagaagccctttgtgattcttcttctcccctttggaagaaacttcaagtgtttcatcaaatccttccataggaacaaataaatcattgctttcaccattcaatacaatatctcgccttctatgcggaagacatgccagctcctcttcaccaaaagaatgtcttctccttgggccatgatgttgggacaatctaggagtctgagatgctttagtggagaccaggattagctttgttagacgttgtatcctcgcaagtaaagcagctttagcttcttcctcttgttccagtctagactggagtttgacattaccatcttctagcttctgtttccaaagaatgaaattatcttctgtggcgtctttcaaaggagtgccagaaagtataccccttttcagttggtctagctcttccttcaatttggtcgtaattttctatt

SEQ ID NO: 24272 - DNA, 1450 bp, Setaria italica
  Peptide Sequence Number=SeqID_90246
ctgaggcagaccaaggagcaggccgccgccaggaggcggtgggagaccctggtacggttcattcattcgcctctcttatgtatatctgcctgctcattttgtttgtggttactgacgatgacaatgcaaatttcttctgaaattttctcggtccgaaactgcagtgctgttggattgtttgggtttttgccttctttgttctcgtgtaaatgcattaagtgtttgaaactttgaatcctgcaccatggaattatacaatctttggtgatatgccaattttgaaatgctgagctcctgtttacttgtatgactctgaaatgctctgcgggaagcagcagcagcaatggcagcgccacctctcggcctcgcccgtcggttcgccggcgtcttcacctccccggccgtggcgcattccggctcccgcccccgaagcctccgtcctggtcttggtctcctcccttcgaagagatggagcggggtggtgaggatgggggcggtggtcggaggcggtcaggagggggaggatgaggagctgaggcagaccaaggagcaggccgccgccaggaggcggtgggagaccctgattagggagcagaaaattaaaaccctcacacccagggaagccggttatacctacaaactgacagacaaggctcttctggatgtcaggccctcaaatgagcgtcaaaaggcctgggtgaaaggctctacctggattcctgtatttgacgtggacacatcggttgatctgggcggacttagcaagaaagtcagcaactttgtaatgggtggctggtggagtggcagctcaacattgtcatttaataagaactttgtacagcaggttgaggagaagttttctaaagacacagacataatactagtgtgccagaaaggacttagatcacttgccgcatgtgaacagctgtacaatgctggttttgaaaatttgttctgggttcaaggaggcctggaagccgctgaagaggaggactttgagagggaaggttcccagcctttcaagcttgctgctattggaggggtttctgaattctttgggtggacggaccagcaacgcagacaggccgcgaaggaaggactgggataccggctagtcttcactggccgcttggtcggagcactggttcttcttgacgctttgtttttaggcgctcaaagaatcggccctctacttcaagaaatgcaatcccactgatccctgcagaatgttcttgtggcatttcatcaaggtagctctgcaatggcgttggcgtgccgtcaaagacgagggtcttgtactcgcaggcctagcctgctgatcatacatggtgtattctggtctcatggttgcgtagtagattgattttgtgtagcataaacgtgattttttttgtgtgtatttttttttaaggaatcaacggggccaaggagcgcacctgaacttttatat

SEQ ID NO: 24273 - DNA, 1042 bp, Setaria italica
  Peptide Sequence Number=SeqID_90247
atccttatatagtcaaggtccactttattttgcaatcatcgtcagcaatggttcttggagccttgttcgcagctgtggcctcggtaccacgcagcctcctggtctacggcgtccctgcaggctttgtgctgctgtggcagggcggccggctgctgaacaagctatggtggcagccgcggcggctcgagcgagctctgcgcgcgcagggcctccggggcacgacgtaccgcttcctcaccggcgacgtcaaggagttcggccggctcaacgaggaggcctgggccagtccgctgccgctggggtgccacgacatcgtcccccgcgtcacgccgttcctctacaacaacgtccgggagaacggcaagacgtgcttctcttggttcgggccgattcccaacgtgaccatcactgatccggcgctggtcaaggacttgctctccaacaagttcggccacttcgagaagccccagttcccggccttgacgaagctgatctccgacggactcacgagccacgagggcgagaaatgggtcaagcacaggaggatcctcaaccctgccttccatctcgagaagctaaagctcatgctgccggcgttttccgcgtgttgcgaagagcttgtcgacaaatgggagcagtcccttgactctgatggttcgtgcgagctggacgtctggtcagagctccaggccctcaccggagatgtcatttcccgcacagcattcggcagcagctaccatgaaggaagaaggcttttccagctccagtccgagcaagctgagcgcttcgtagctgccattcagaagattgccattcctggttacatgaacttgccaaccaaaaacaacagaagaatgcgccaaatccagaaagaggtcaactcaattttacgagggttgattgggaaaagaattcaagccatgaaagaaggtgaacccaccaaagatgacttgctgggcatattgctggagtcaaacatgagagacacagacgagaatggccagtccagcctgggaatgacaatcgaagatgtcattgagga

SEQ ID NO: 24274 - DNA, 351 bp, Setaria italica
  Peptide Sequence Number=SeqID_90248
gccccgacccgaacggcagcagctcgaagtcctggcccttcacgtcgatcttccggccgacgaacctctccggcgagaactcctccggcgcgtcccacagcgccgggtccctgccgatggtccacatgttgatgagcacgagcgtgcccttggggatgtcgtacccggcgacggtcgcgtcctcgcgggtgacgcgcggggtgagcagcggcacgatggggtgcacgcgcatcgtctccttgatgatggcgtcgaggtaggggaggtgcgcgatgtccttctccgtcacccagcggccgcgcccgaccacgcggtcgagctcctcggcggccgcggcgaagacggaggctt

SEQ ID NO: 24275 - DNA, 450 bp, Setaria italica
  Peptide Sequence Number=SeqID_90249
cgagaagccgccagctcacagtgcctcccctcctcttggatcgggaggagcagagggacgcgacgcaatcgagatttgcttttgaattctgacggttggcggaggaggggggcgagagatcgccatggagaaggagcagaaggtggcagtggagggtgccgcggcggcggcgaggcggcggctggtgatcggggtcggcttctgggtgcaggggttccggctgttcccgtggctgggcgtcagcttcttcctcaaggacggcatgggcgtcgacgcctcctcgctccagatcctccaggcctccgccaacctgcccatggtcgccaagccgctcgtcggcctcctctccgacgccgtccccatacgcgggcaccggcgcctgccctacgtcgccatcggcgctctcttgcaggcagtttcatggttagcgattgccctttggccagctta

SEQ ID NO: 24276 - DNA, 641 bp, Setaria italica
  Peptide Sequence Number=SeqID_90250
gccggctgcgacaccctgtgcctctctccgtctcccggtgacttggccgctcgtctgcacccggctcctctcggagaggggcgaggagacccaggctcttcgacaccgcggcggcggctcctcacggaatcggggacggtgagaggttgcatactctttgtatgaccctgagactggtttaggcagcttgtacaggtggatgatgaattgcggtcaaggctaacactgcccaaaacaggggaacacctttttgaagataggcactggtaacagattttggtggtgcgcctagagtttgcactggtactttccttaaaccattaacaaatctttagcaattcaagcttagctgaatgtcaacttgcctccacatccaaggtcctgggaaaattgctatgtctcgtccgcttgattttgctgtacttaaatacaaaaatcaaaggcttgcggaacaactggaagtccacaagtttgagtaccgtactctcgagggtagattcaatgatttaaaagagaagcagaggacacataatgagacacttgtcctagtcaaaagtcattggagcgacttctagcagatcttgatttggttctgtttgcaaaaatgaatctttgcactcgagctgtggtacagggcagaa

SEQ ID NO: 24277 - DNA, 243 bp, Setaria italica
  Peptide Sequence Number=SeqID_90251
acatacttcttgtatcttctgagtttataaaagttccaagttcaaaggtgcctattctcaaccagttagtgatcatctgctattttgttcataggcatactgtattagcagttttcttgaatgattgcttggggttgtacagaagagttcgcaagatgagatgcatttcaagtgcttgccaaagtccagtgccataaagctgatagattttggtagtaccgcctttgataatcaggaacataa

SEQ ID NO: 24278 - DNA, 400 bp, Setaria italica
  misc_feature (400)..(400): n is a, c, g, or t
  Peptide Sequence Number=SeqID_90252
cgtaatcatatatgctattgtttttgagaagcttgggccaagcttgtatgattttctaaagcgaaatagatatcaacctttccctgtggaacttgtgcgggagtttggacggcaactgttggaatctgtagcatatatgcatgagttgcggcttatccacaccgatctgaagccagaaaacatacttcttgtatcttctgagtttataaaagttccaagttcaaaggcctaggctggagttttccatgtgatatttggagtgttggctgtattcttgttgagctatgctccggggaagcattgtttcaaacacatgagaatctggaacacctagcaatgatggagagggttttgggacctataccagagcatatgatacggaaagcaagttcatctgccn

SEQ ID NO: 24279 - DNA, 803 bp, Setaria italica
  Peptide Sequence Number=SeqID_90253
aacaagaaaaataagaagaaaataacaagatcgctctagtagtaccaaattcagagatggtttgactatcgtaatcatatatgcattatatgcatgagttgcggcttatccacaccgatctgaagccagaaaacatacttcttgtatcttctgagtttataaaagttccaagttcaaagaagagttcgcaagatgagatgcatttcaagtgcttgccaaagtccagtgccataaagctgatagattttggtagtaccgcctttgataatcaggaacataactcgattgtttctacgaggcattacagggcacctgaaataatcttaggcctaggctggagttttccatgtgatatttggagtgttggctgtattcttgttgagctatgctccgttagatcgcttctcacacttttatttttccagcattagtgatggatgttttcctaacgttatcaagctttttagggggaagcattgtttcaaacacatgagaatctggaacacctagcaatgatggagagggttttgggacctataccagagcatatgatacggaaagcaagttcatctgctcagaaatattttaggagagcgacacgtttaaattggcctgaaggggctgtttcaagagagagcatcagagctgtgagaaaactggatcgcctaaaggacctggtatcaaggaacgctgaccattcaagggcagtgctggcagacttgctacaaggtctattacgatttgagccatcggagcgtctcactgcccaagaagctctggaccatccattcttcagaaacccg

SEQ ID NO: 24280 - DNA, 540 bp, Setaria italica
  misc_feature (474)..(474): n is a, c, g, or t
  Peptide Sequence Number=SeqID_90254
tacgtaaggtaacttttagggacgtagttttaggaatgctgggaccgtgaaacacgtgaatatgttgccataaaaagttgttcggagcatccgcaagtaccgtgatgccgcaatgattgagatagatgtgctcaaccgccttgcagaaaatgagaaatacagatcgctctgtgtccaaattcagagatggtttgactatcgtaatcatatatgcattgtaagttctagctttttgtcaattatcctgtagttttaaaaatcagttaccatttctgacattgcatctcatttctggcaatgtcttgtttgttgataatatttatcttattggcccactcaataccctatgtatgaaatgagagaactcatctatacaaattatgataatgcacctgtagtaagatttgcttgactgcagatcttttttgttctttgctcatgaaggttccctgatatggtcagaaatcaaaaatnttctttattcaatggatatcaatggttttgtcaggtttttgagaagcttgggccaagcttgtatga

SEQ ID NO: 24281 - DNA, 1519 bp, Setaria italica
  Peptide Sequence Number=SeqID_90255
agcaaaattttcgtaggtacttttgggcgtgttttggaatgctgggaccgtgaaacacgtgaatatgttgccataaaagttgttcggagcatccgcaagtaccgtgatgccgcaatgattgagatagatgtgctcaaccgccttgcagaaaatgagaaatacagatcgctctgtgtccaaattcagagatggtttgactatcgtaatcatatatgcattgtttttgagaagcttgggccaagcttgtatgattttctaaagcgaaatagatatcaacctttccctgtggaacttgtgcgggagtttggacggcaactgttggaatctgtagcatatatgcatgagttgcggcttatccacaccgatctgaagccagaaaacatacttcttgtatcttctgagtttataaaagttccaagttcaaagaagagttcgcaagatgagatgcatttcaagtgcttgccaaagtccagtgccataaagctgatagattttggtagtaccgcctttgataatcaggaacataactcgattgtttctacgaggcattacagggcacctgaaataatcttaggcctaggctggagttttccatgtgatatttggagtgttggctgtattcttgttgagctatgctccggggaagcattgtttcaaacacatgagaatctggaacacctagcaatgatggagagggttttgggacctataccagagcatatgatacggaaagcaagttcatctgctcagaaatattttaggagagcgacacgtttaaattggcctgaaggggctgtttcaagagagagcatcagagctgtgagaaaactggatcgcctaaaggacctggtatcaaggaacgctgaccattcaagggcagtgctggcagacttgctacaaggtctattacgatttgagccatcggagcgtctcactgcccaagaagctctggaccatccattcttcagaaacccgacataacttgttgaagaggcttgagttgcctcatgtaacattgtactccaagaaggtggtcaggagaaagcaggcaaagccgtccgtcactgaaggcatcttgctcctctgtaccataaaattgctgtaatgtacactagcatttttcctagggagctctagtgcgccagatggtgcttgtacgttgttaactgggacgctctgcgagtttgcgtcccaatatctccatgccctaatatcacggtggtgttgaaaacgagtatcaagggcacccgtacagtatatgttttgtgctacgcctgggtggcctgtgcagcggttgagcctatgcgaaatctgttgaaaccatgtatgataatgtgtctctgaccgtgctgctgaaagttcctcagaatgaatgacatgttatgtttctgattttttgactactaaattggttattcttaaaggtttgattctattttatcttgtttgaggtatgaactatcactcaaaagtgtaatttttttttgagggcactcaaagtgaatatttctgtgctctt

SEQ ID NO: 24282 - DNA, 281 bp, Setaria italica
  misc_feature (1)..(21): n is a, c, g, or t
  Peptide Sequence Number=SeqID_90256
nnnnnnnnnnnnnnnnnnnnnaaaaaaaagctctcttttctcatgctgactaaatcgataagttaagccattttcaattcagatctttgtgccattctttctcatgaaaaggaaaaaaaacattacaatgccaaacggagtaacaatgggtcaaaccattactgtcaagcaactacaaagcctgatgacaagcgccggcggcatcaaacgaggacatctaggggatggccagctcggcctcggcccaggccagagacgagtccctcatcaaacgaggacat

SEQ ID NO: 24283 - DNA, 889 bp, Setaria italica
  Peptide Sequence Number=SeqID_90257
tggccaatatacaacagcagatccaagaacaaagttccaaaaagagtctgaaatactccaccactaccaaatggcctgctacatcaacctcagtccgagtggatcagccaaaaccggttacatctcctacactttccaaggaaaggcagctcagagattattgtagagttcacatcctctgtttttattgcagagaaccatatgatgccactcatgcttctaagtgcactaaaaggccaaaagctcaagtcaatgccctggtgctcaatgatttagatgttagcttaactgaggaagtcctcactcagttggatattgaagatgccttggcagtagattttggcacgctctcacttaatgccattgctggcacagagaagggtgaagttatgagattaagagcccttgtcaagaacaaagtgatgttaatgttagtagacagtggtagttcccattgctttgtaagctccggattcttaaacaagcttggcatccaacccataccggcacaacccaaaactgtgaaagtagccaatggggaggtactagtctctgatcaaatggtaccaaagttagcatggtggattcaaggacacactttcagttgtgacatgagagtgctgaatctagaagcttatgattgtatattggggtatgattggctcaagttacacagtcccattacccaccattgggaacacaagactatgcaatttttgcataaaggggagcagatcactatacagggtgttcagataggcaatttacttgttcaggagctctcagctgataaattactgaaatgggatgctggctctgatatttgggcttttgctatagttaaggttttaccacagcaagaagaacaatctaatcctgctgaagttca

SEQ ID NO: 24284 - DNA, 158 bp, Setaria italica
  Peptide Sequence Number=SeqID_90258
tttataggctcattcaggagactggcaacaaccttgctagtgcagaacaagtgtgcaacgcagattgactcgtgtgaggagacacaagcaagtgcacgatgtatgcgccactagggaggagggacgacaaaatgctgtgcataattatggcatctttg

SEQ ID NO: 24285 - DNA, 512 bp, Setaria italica
  Peptide Sequence Number=SeqID_90259
tccctaaggtcctaaacggtcggtcgtccgttccacgtacgacgaccccttcgccctgactccaacggtgggcccatcctcccgccgcccaccgagatgggccgcgacgaggggttcctgctcctcgagtggcgccgtcaaaatgcaatcctccttgaggaaaaggaaaagaaggagaaggagctgaggagccaaatcatccttgatgctgaagaatttaagaaagctttcgttgagaagcggaagctcaaccttgagaccagcaagggtcaaaaccgtgacagggagaaggtaggtggtacttccttaggatcagagccctgcatatccttttccacacgatggaaacctgagtcctgtttgactgcttgttgctagcttttcctagcgaaccaggagaagttccacgccggcgacggtaagcagtactggaaggcgatatcagaacttatcccacacgagattgctaacattgagaagagaggggcgaggaaagataaggagaaggagaa

SEQ ID NO: 24286 - DNA, 1304 bp, Setaria italica
  Peptide Sequence Number=SeqID_90260
ggatcaagctgcgcacacccaccaggccaccaccaccttgccgaggatccagatcccgagggggccaagccatggccaccgccttcgactcccccacctcctcccccgccgccgccgcgcccttccatggcggcgacgccttcctccacttcgacggctcggccgacgtccacgcctccgccgacggattcccggcctcccccggacccctacgccttccgctccgacgcgccgccctcgcccttcggcatgccccaggccaacggcggcgccgtccacgacgacgaccccttcgcccctgactccaacggtgggcccatcctcccgccgcccaccgagatgggccgcgacgaggggttcctgctcctcgagtggcgccgtcaaaatgcaatcctccttgaggaaaaggaaaagaaggagaaggagctgaggagccaaatcatccttgatgctgaagaatttaagaaagctttcgttgagaagcggaagctcaaccttgagaccagcaagggtcaaaaccgtgacagggagaagcttttcctagcgaaccaggagaagttccacgccggcgcggataagcagtactggaaggcgatatcagaacttatcccacacgagattgctaacattgagaagagaggggcgaggaaagataaggagaaggagaagaagcctgggatcgtggtgatccagggcccaaagcctgggaagccgacggacatggctcggatgcggcagatattgctgaagctgaagcacactcccccgccacacatgaagccacctccgccacctgcagcagccgccggcaaggatggtgcgccagctgctgctggaaaggacggagctccagctgctgctgcaaaggatggagcaaagccagcagcccctgcgaacggcagcgtccctgagatggaaaaggccgcgggggcagcacctgcaccagcaactgagcctatcgcagctgcctgagctaatcatttgcggtaggaggatagagttgtttcagaggaggcggtggtgaaagtgtctgaattgctggcatggctgaggcacctactgtgtattttgttggggcaccttgattcattacattacattactactatatattgttattgcattttgtagagaggtgggatgtgtgtatcctggtattaataaggtaaatgaggatgtgtgtactatgttcctgtcttccaagtgtcttgagattttgttcaaactggttgtattacgtgacgatctgctgcatatgtatattttgtgcttccttggttttaaaaacaatttcaaaaaaaaaa

SEQ ID NO: 24287 - DNA, 1591 bp, Setaria italica
  Peptide Sequence Number=SeqID_90261
tcactttgggagaagacagtgagatatgtgatattaaacatgcgcttaaggcattgagaaagaagatccttagtttggattttgacaactctatgcatgtccatgatccacaggactcatttgagtacttggaagtgctgtacaaaatcagacgactgtctgaaaggttaaggaacctagacccttgtggagaagccaaacagctggatgaactcactgtgtatgccgatgacctttctgaaatggcaatggcaaggcttgaagaggaatttgtttatcttctgacacattacaaacagccattagaacaggaagttctctcttttcgctctacagaggatggcagtgtggaagacttttcaagcagctcattcagcgaggaacaatcagaagggaaggcaacaccaaatgatgtcgctggaggaccggagtatcttgttcctgatttgattcaacccggtgcactctctgctgtcaagtccattgctaaatttatgttcctgaatggctatgataaggagtgttgccaagcttatataaactcacggcagaatgcaatagatgagtactttgcatctcttcgtctggacaagctcagtatagaagagcttatgaacacaagttggaccaaactgaatattttaataaggagatggaaccgagcaatgagggtttttatccgagtctaccttgcaagtgagaagcgccttagcaatcatatctttggtgaacttacagattcaactgctgacttgtgcttctatgagatttcatttaactcagtaatacaacttctgagcttttatgtatctgtagctattggtcctccaaaacggtaaagctttttcgtttgcttgatatgtatgaggtcctgaatgatcttctccctgaagctgaatccctgtttgaatcaggatatgatgatatgatcttgaatgagtatcatgaagcactactgcagctgggagaatctgcaagaaagacatttgcagaattcaagtatgccatccaatcatacacttcatcaaatgcagtggctcgtggagaagtgcatccacttacaaagtatgttatgaactacataagggctctcacagcatacagcaaaactcttgattcaattctcaaggacacagatcgaagacacctgcatcttgcttctgacattcagttgatggcgaatgcatatcctaatttcacagcaacagctttgcatctacagtctgttgccgcaattttggaggcaaatcttgaagctggttctagactgtacagagatgatcgattgcagaacatctttatgatgaacaacatccactacatggtccagaaagtgaagaactcggatctcaaaagctttcttggcgatgactggatccgggttcacaacagaaagtttcagcagcatgctataagatatgagagggcgtcatggaacagtgtcctctcttacctgagtgatgatggcttgtgcgctgctggtgatgctgcttctcgcaaaaccatcagggagaagataaaaaatttcaacctatcctttgaagaggtttatcgagttcagacagcatggtctgtcccagatgaccaactt

SEQ ID NO: 24288 - DNA, 444 bp, Setaria italica
  Peptide Sequence Number=SeqID_90262
atcctcaggaacgtcttggtggtaggagtgcccatctcaaacttgaggacattcagtatatcactctccatcttaacaacctcctgcttggtgtaggtgttgtcagtgatgtaacagaagtcctccacattcggcgggctgatctcctcatacttggaggcgatgagcatggcggagacaccgaggagctgcagcctctgcctgttgagcgccttgtcggagaggaagcggtcgatgtatgagacggtgaggtagagcgtgtcggagacgagcttgtactcctcggcgacctcgacgagccagtcaacgaggatggagcgcatgttggccgtgacgtcgacctgcacggcggcgatgtagtcctgcgcggggcggcgcctggcctgcgcctccatggagcggaggtaggagtagatgtcggaggcgtagggcgcgcagagctgc

SEQ ID NO: 24289 - DNA, 338 bp, Setaria italica
  Peptide Sequence Number=SeqID_90263
cctcctagaactccgatcgctgcactaccgcgggcgagcagcaggcaggaaagagaagccagcggcaggagaagccggagcagcggcggcggctccattcgcagggaagagcaagaagaggaagcggggaatgggcaatggcatggggaaggaaaggaagcagcagatgggaaagcgaggaattgtggtgtttggtggcgacggcgcgacgcgaatgatgagatctgctctgcggcgggggaaacgcgtgaacgaatggtaggggaaactgaaaaggcagcagcttggacgcggccaaaccagagcagagcagagcagcagccaaagaacaatgaaat

SEQ ID NO: 24290 - DNA, 895 bp, Setaria italica
  misc_feature (1)..(17): n is a, c, g, or t
  Peptide Sequence Number=SeqID_90264
nnnnnnnnnnnnnnnnnaaaacaatcagtatgatgacattgtaatttcagcaaattttcagagccagcaaagaatcgatgtccttcagaactatacaatggcagggccatagcaaatgcataaatcaattcttgttgcatccgaataaacattgctatacatctgcacaaaaggggcatcaatagtagccaccttgtacctatgctcttgtacacattgctatatagtactatttaaagataaagcaatagcaaaagaaggatcagtctttgccgttattctgtagttcctctcaagacctgttgtgccttctccatctggaactgtatgatattctccttccacaagctgttttccaagtacctctcgtagaatgttgcctcaccatccaattttgctgctagcgccaccatgcttcgagttccatatcgtgcctgtccttttgcagtgtcaatgaaaatagagcttaacttgtattcccattcagggtcaacgccagtatcaggcaccatagatgtatcaggcttgatcgtatccatcatcaactcttccaccatctgttttacagaagcttctgcatcatcatgtgtttccagatattttttgaagctctgtcctaaacgcagtgcctttggccaaggggaattgattgaagcattcgaaagcacatgaatcccaggagcaactgtgtgaatcacaggatcatctccaggtctattagagatgtaaaccatggttcctgagttcacatcagccaatataaggttaaaaccattgtactgatctgcttcctttgcaatttctgctgcatactccaatggaccctggctgccctgaagaacctgacggggagctgccctctggtcttggcgccgatcagcgagccggactcccg

SEQ ID NO: 24291 - DNA, 483 bp, Setaria italica
  Peptide Sequence Number=SeqID_90265
agttctacatggtacagctgacacaataactgatccaagagcatcccagcgactataccatgcatcaatgtcaacaaataaatcaataaaactatacgatggatatttgcatgatcttctttttgaaccggaaagggatgatatcgcaaacgacatcatcaattggttgagcgcaagacttgatgttcttcagagaaggtgaggtgaataggctacaaggtgcttctacttataccagtttctggaactggatacgtggtatagagtatagaatataattgtaaaataggatttgtcaggatgtttatcttcttgccatcatggtctttatcttctgttgtttgaggatataaaagagcctacctgagatgcaagtaatattggagttgtggaacataatgtatctgctgatatgcagtttgttcagtgctgcttttaaaagtaaaaaaaggtctgggttcttttttttatttaaaaaaaaaa

SEQ ID NO: 24292 - DNA, 271 bp, Setaria italica
  Peptide Sequence Number=SeqID_90266
ttctgtgtcattcaatagcatcttgttgggagaaatcttcatacctgactgggatatgttccatgtgagattttttgcttctctagtagtatatttaggcacattgctaacttcagtgcttgctaattttcgtttgttcttgtgaagagcaagcatgaatcagcagaatttcatggagcagctagagcactgagtggaggtggtgtgtatgtgagtgacaaacccggggtgcatgacttcagtgttctcaaaaagcttgttctaccagatg

SEQ ID NO: 24293 - DNA, 462 bp, Setaria italica
  Peptide Sequence Number=SeqID_90267
aggtttctgattatagatgatggttggcaagaaacagttgatgaattcgaggaagtggatgaaaccctccgtgagcagaccatgtttgcgcagaggctgactgatctgaaggagaatcacaagttcaggggagagacctgtaagaatcttggggaccttgtcaagaggatcaaagaaaaacatggagtcaagtaattgattttatcaaaatacttgtcctatgatagctaaatcttcattcattcttttttttttttgtctgagcaaaatggtacatgaaactacaggtacgtttacatgtggcatgctttacttgggtattggggaggtgtccaagtaacatctgatgtgatgaagaagtacaatccaaagcttgtttacccagtccaatcaccgggtaatgttgccaatctgagggatattgccatggacagcttggagaaatttggagtgggcatcatt

SEQ ID NO: 24294 - DNA, 616 bp, Setaria italica
  misc_feature (593)..(593): n is a, c, g, or t
  Peptide Sequence Number=SeqID_90268
acgcgccgaacgcgggtacctgatctgccggagctggtcgaagaagcggaggtcgaaggtgtcgccgaggccggcgaagacgactacgccggcgaggattgcttctgtgtcattcaatagcatcttgttgggagaaatcttcatacctgactgggatatgttccatagcaagcatgaatcagcagaatttcatggagcagctagagcactgagtggaggtggtgtgtatgtgaggtgatctttttgtagaatctctagtatctttccagttatgaatttttggttgcttttaacctaaacacaggtgttcattgcacatgtatatttgttgctatatgcagtgacaaacccggggtgcatgacttcagtgttctcaaaaagcttgttctaccagatggctcgattctaagagcaaggtatgctggtcgtcctgcacgtgattgtctgttcaatgacccagtgatggatggcaaaaggtacaagcactaacatagcttaaacggctccttttgctactatgctgttctcagaaaatactaacctgtgagttcttctgcagtctgctagaaaatatggaacctgaattattttcnggtgtacaagtacggtagtagtt

SEQ ID NO: 24295 - DNA, 478 bp, Setaria italica
  Peptide Sequence Number=SeqID_90269
gtggatggtgtgaaggttgatgtgcagaacgtgttggaaactcttgggcatggctttggtggccgtgttgcagtaacacaaaagtatcagcaagctcttgaggagtccattgcccagaacttcaaaagaaacaacctaatctgctgcatgagtcacaattcagactgcatctttaggtagcatgtccctagctgtggaaaacagatgagctactatatgtagatagaatctgatataattcctggttgttttgtagtgccttgaagagtgcagttgctagagcctctgaagatttcatgcctcgggaaccaacactgcaaactctgcacattgcttctgtgtcattcaatagcatcttgttgggagaaatcttcatacctgactgggatatgttccatagcaagcatgaatcagcagaatttcatggagcagctagagcactgagtggaggtggtgtgtatgtgagtgacaaacccgg

SEQ ID NO: 24296 - DNA, 2311 bp, Setaria italica
  misc_feature (2297)..(2297): n is a, c, g, or t
  Peptide Sequence Number=SeqID_90270
taggacgcggagacgcagatgctgctcttagagtccagggatgaggagggttccgccgccgcggaggggggcgcggtgtacgcactgatgctgccggctcttgacggcgatttcagggtcagccttcaggggagccccgagaacgagctccagttctgcttggagagcggtgatcctgaggtccagacgatggaagcagttgatgcagtattcatcaactcaggggataatccattcaagctaatgaaggaatccatcaagctgctatcaaagatcaaaggaaacttcaagcatattggggacaaggagatccctgcaaatttggactggtttgggtggtgcacctgggatgcattttacaaggctgttaacccagcagggattgaggagggccttaagagtctgcgagaaggtggtgtgccaccgaggtttctgattatagatgatggttggcaagaaacagttgatgaattcgaggaagtggatgaaaccctccgtgagcagaccatgtttgcgcagaggctgactgatctgaaggagaatcacaagttcaggggagagacctgtaagaatcttggggaccttgtcaagaggatcaaagaaaaacatggagtcaagtacgtttacatgtggcatgctttacttgggtattggggaggtgtccaagtaacatctgatgtgatgaagaagtacaatccaaagcttgtttacccagtccaatcaccgggtaatgttgccaatctgagggatattgccatggacagcttggagaaatttggagtgggcatcattgatcctgacaagatttttgagttctacagtgatcagcacagctacctttctagtgtgggtgtggatggtgtgaaggttgatgtgcagaacgtgttggaaactcttgggcatggctttggtggccgtgttgcagtaacacaaaagtatcagcaagctcttgaggagtccattgcccagaacttcaaaagaaacaacctaatctgctgcatgagtcacaattcagactgcatctttagtgccttgaagagtgcagttgctagagcctctgaagatttcatgcctcgggaaccaacactgcaaactctgcacattgcttctgtgtcattcaatagcatcttgttgggagaaatcttcatacctgactgggatatgttccatagcaagcatgaatcagcagaatttcatggagcagctagagcactgagtggaggtggtgtgtatgtgagtgacaaacccggggtgcatgacttcagtgttctcaaaaagcttgttctaccagatggctcgattctaagagcaaggtatgctggtcgtcctgcacgtgattgtctgttcaatgacccagtgatggatggcaaaagtctgctgaaaatatggaacctgaataatttttctggtgtcatcggagtgttcaattgtcagggagccgggcaatgggtttggccagtgaaagatattgattatgtgcccaccagtatcaacatcactggtcatctctcaccttcagatttagaatctctcgaggagatagccggtgataattggagtggagagactgcagtatatgctttcaattcatgttctctttcaaggcttcagaagcaccaaaatttggaggtttcactgtctaccatggcatgtgagatctacactatttcaccgataaaggttttcggtgaagccgttcagtttgcgcctctcggactgatcaacatgttcaactccggtggtgcactcgatgacatctcgagcaccgctgattcctcagctaccacaattcacgtcaggtgccgaggtccagggcggttcggggcgtattcagccaccaggccggagaattgcagggttgatggacagcaagtggagttctgtcatacagaggatgacctgctagcctttgaccttcctcgcagttcatcccgcgacggcgacctgtggagcattgagattctctacagaacttcctgaatctgtttacccttccgacatgcaatttttgtgccgtgctcttcggtaaccgccgccgcacgtgcacattgagatgatgttttcagagaaaccaatgttctgttggttctgattgtgctccattttgttcgccgtgttgtatatatatttttattcacaaaagggattgttgtgttgtatttttgtactgtaatttggtattgtgcctcgtgcatcttgtgctaccactatcgtaatctactacttgacacggtatataacataaaagagagcagtttaacatggtcccgaaaactaaaaaaaaaaaaaaaaaaaanaaaaaaaaaaaaaa

SEQ ID NO: 24297 - DNA, 1046 bp, Setaria italica
  Peptide Sequence Number=SeqID_90271
caaacaccaaccgaactccactgtctccgtcgcggctgatccacctcgcacgcgcacgacgagccatggctcccaggaagttcttcgtcggcggcaactggaaatgcaacggcaccggcgaggacgtgaagaagatcgtcaccgtgctcagcgaggccgaggtgccctcggaggacgtcgtcgaggtggtggtgagcccgccgttcgtcttcctgccacaggtcaaggggctgctgcgcctggacttcgccgtcgccgcgcagaactgctgggtgcgcaagggcggtgccttcactagggagatcagtgcggagatgctggtgaacctgcaggtgccatgggtcattttggggcactctgagcgcagagctctgttgggtgaatccagtgatttcgttgccgataaagttgcatacgcactctcccaaggtctcaaggtaattgcttgcattggcgaaaccctggagcagagagaagcaggaacgaccatggatgttgttgctgcgcaaacaaaggctattgctgagaagatatcagattggactaacgttgtattggcatatgagccagtttgggctattggaactggcaaggttgcaacccctgctcaggctcaggaggttcatgatggtctgagaaagtggctccactctaacgttagccctgcagttgctgaatcaaccaggatcatttatggagggtctgtgaatggagctaactgcaaggagcttgcgggtcaaccagatgttgatggattccttgttggtggagcatcactgaagcccgagttcgtggacatcatcaagtctgcgactgtcaagtcttcatctgcttagtgtcactgaacgttgccagatgcctgtatgagtgaacgttgctccaatttgcatcgtttgtttagcgtgcctattcttgccttttctcgtatccgatgataattgtatgttaccgaacttttaattcatcactgagttgggaatgtgcttcataaaaaaaaaaaacaaaagcacctttcagcctgttgcatcaagctacaaaaaaaaaac

SEQ ID NO: 24298 - DNA, 1197 bp, Setaria italica
  Peptide Sequence Number=SeqID_90272
tctggctccggcacctcctggggaaccctctcccggatcgggtgacattgccccggggattaaccgggacggggccgccgttcccaacggccatggcaaagactgggccatggttgccgttcagaaggctgagaaggcaaagaagcgcagggccaggagcgaactgcggcggcagcttgcgtcagagcttgatcaggtgcgtatgctctccaagcgactgaaggctgctgctgagaccttggcgcaacaggaggattcagtgcccatgcctctggctatgatgctgccgccgtcacaggtggtggatgctagatacattcgctcacagttctcacccaccggtccagtgacgcccattcctgcccaggctgcgtttgccccttttcgctcactgccgccgcaggcgccactaactgtgtcggtggttcacacagaacccttcgaggtggagaagcggacacctaaggcgaatcagttgtaccaaaactcagagttcttgcttgccaaggataagttcccacctgcggacacacatggacgcaagaaaccaaagcaccacaagaagaagaacaggtctctagaacctcgtggtgcagactttgatgctgagcggaggctatactctcatgcgttcaagaagtcctcatcacttctgagccggctaatgaagcacaaatttgcatgggtgtttaacaagcctgtcgatgcagttggacttggcttgcatgattattttgaaattatcaggcacccaatggatcttggaacgatcagggggcgactcagccatggtcagtacaggaacccgaaggagtttgctgaggatgtgaggctcactttccagaatgccatgacatataaccccaaggggcatgatgttcatatcatggccgagcagttgctagggatatttgaggcgcagtggcctgagatcgaggcaaaggttaattatcttgcattgtgcccaccattgccaaagaaatttccacctcctccaattgacttgcgtctcctagagaggtcagattctgtgaaacaccatgtggcgttggaatccaattcaaggccaataagtcatactcccacccggccaccatcaatgaagaaaccaagggcaaaggatgcaaataagagagacatgacaatggacgagaagcgtaaacttagcgagaacctccattgtcatgtctctcttat

SEQ ID NO: 24299 - DNA, 230 bp, Setaria italica
  Peptide Sequence Number=SeqID_90273
ggtggggaggggaaccacctcggcatcggcatgaagtcgtcgacggtgacccggggatggctggcgttctcccggcgtgagccgttgtacgcgagcatggtgcccgtgacgataaggaacatcgcgcagggaacctggtgttggtcggcgatggggcacagccagtggtgcgcgaagtcgagcacgacccagtccggcctcctctcgagctccccgctacggccaccggc

SEQ ID NO: 24300 - DNA, 810 bp, Setaria italica
  misc_feature (19)..(19): n is a, c, g, or t
  Peptide Sequence Number=SeqID_90274
gacggcggcgtgagccagnacccgcacctgcggcacccacccggccgatcaccaaccccgccgcccggccactcgctgctcgaacccctcccggcagcaatggctgctcgccggcggcgctcggcggctggcggagcgcccacaggaagcgcaccccggagagctcgagccccaaggcgagctcatgcacgctcgccgccgtcaccggcgcctcgctgccgagcgcgacgtacaggacgctccgcggcggctgcccgtcgagccactgcagcgcaccaggccgcgccacggcattgctatggccaccgccgtcgcgcgcgtcctcctccggctccggcagcaggaggccggcagggacggcgggcttgccgaacagctcggcgagcagggggaacaccgttcggggctcggcctccgggcagctccggaacacgaggaggcggcagcgctcctcggtcctccaggtgcgctcgatgtcggagacgccggacgcgttgggccggaacgcggcggccatccacgcggcctcctggcggcggaaggccagggacggtggggaggggaaccacctcggcatcggcatgaagtcgtcgacggtgacccggggatggctggcgttctcccggcgtgagccgttgtacgcgagcatggtgcccgtgacgataaggaacatcgcgcagggaacctgaaaactggtaccagtttagaagtggaaatgcagaacagtgtaacattgttttgagttttcaaggttgataaacattgctatgcatctaaacattctttgtatcgtaggtgtatatagaaaat

SEQ ID NO: 24301 - DNA, 579 bp, Setaria italica
  Peptide Sequence Number=SeqID_90275
tcgagaaaaagatccttcgttcactgaccgagaccgcgtgtcgccttcgacgcgcttagctccctgatgaacccgacgagccgctctaactccgtcgccgacgaccctccggcagcgacgtcgcgcttcaccagctgcgccagagcctgcgctgcccgcctgatctcatcagattccatcgcctccctcaccgtcctctccaccacgcccctctcgcacacgtccttcatgtccagcccgttcctccacacggcgccgacgaaccggctgttgacatgctggtcggcgaagaagggccagcacaccatcggcacgccctccacgacggcctccagcgtcgagttccacccggcgtgcgtcaggaagcaccccaccgcccggtgccgcagcacgtctcgctgcggcgcccacgccacgatacgtgccttgccgtctcctgcggccgccatcgccgcttcgtggaggacgccatcctggcttgcccagaccatgtccggtcggagcacccagaggaacgggtagccggtggcggcgatcccggacaagaactccttgaattgttcgcgggagatgacggtg

SEQ ID NO: 24302 - DNA, 288 bp, Setaria italica
  Peptide Sequence Number=SeqID_90276
gttcctcccgctcacgcgctcctaccccaacgccagccgcctcgcggcctcgctgcggcgcgggctcggagacggggcgcaccccaacgcgcgcatgcgcctccacgacgatctcctcaccaacgggtactacacgacgaggctgtacatcgggacgccaccgcaggagttcgcgctgatcgttgactccgggagcaccgtcacctacgtgccctgcgcctcctgcgagcagtgcggcaaccatcaggacccaagatttcaacctgatctctccagtacgtattcgcc

SEQ ID NO: 24303 - DNA, 788 bp, Setaria italica
  Peptide Sequence Number=SeqID_90277
taagggttaaaggggacgtaacgggacaaaacaggggtgacggggtggggacaggtgtgttgttggactgggccgtatcgcaaagttggcctgatacgtatcagcccacgtatctacatttgttgtatttatttttattccggatacttctcgatacgtatctactgcttctcgatacatatctactgcatattcaccacgtatccgatacggatacgtatccgatatgggatacgtcacctcgccgatgtatccgtgtagtatagtatggcacaaaagaaagtgaaggcatgacccactgccaaactgaatctgaagtcttattcagaatgccatatcaagcttcgattgatttcattatgtgtgaaaccctttaacttgaggaactatggaatgcactaaacagctgcagtgcatgagaaaatttgagtgcttcctggttcacactgcccgtaaaatgctactccctccgttcccatcccaactttcttggaacactaacatttatgataccaaataaatatcattagattcttcattaaatatattttcatagtatatccatccggtgtcataagtctttgtaattctctctataattttggtcacacataaaatggtttgactctccaagaaagttgaaatgacctataatttggaacgaagggagtgcatattgacaggtaagaaggcagcaacgatgatccggctgaaaataagatggagcattattactcggcctatgtaattaaattgtatcaacgctatttggcacaatgtgcaaaata

SEQ ID NO: 24304 - DNA, 400 bp, Setaria italica
  misc_feature (11)..(11): n is a, c, g, or t
  Peptide Sequence Number=SeqID_90278
cccggggctanggtttcgtctgctactccaccaaggaggagatggacgaggctctttcctcgctcaacggaatggaaatggaaggcagggagatcagggtcaacttggcccttggaaagaagtaacagagttgaaatagggaggaagttcttttaaaaaaagagagataggaagttgcagttgacatgtgatgcctccttgcaatgcaaagtgtgaaatgcgaccaagacggcgacgcttacttaccggagcactgcaggagcaggggaaggaaaacagaaatatttctgatgtagcatagcatgaaaaatttgttgcgatctggtgtatatttagcaaagacggttcatacattatgaattgtgattctgacagttttgaggtgctgggttaaaaaaaa

SEQ ID NO: 24305 - DNA, 383 bp, Setaria italica
  Peptide Sequence Number=SeqID_90279
tccgggcagccggtgggccaggcacgcgttcccctgtccacggtgcacaggcgggccgacgaccgcgtggagccgccgtcccggtggctgaacctgtgcggcgacgaggcccggccgtacgccggtcgggtccacgtccgcgtgtgcctggagggcgggtaccacgtgctggacgaggcagcgaacgttgccagcgacgtccgcgcagcgtccaagcatctgtcgaagccgccggtggggatgctggaggtcggcgtccgcggcgccgccaacctggtgccgatgaagatcgcgaaggacggcgcgagcgggtcgacggacgcgtacgtcgtgctcaagtacggccccaagtgggcgcgcacccgcaccattctcgaccagtt

SEQ ID NO: 24306 - DNA, 1168 bp, Setaria italica
  Peptide Sequence Number=SeqID_90280
gctattgctgttttgttctggttttttgtggaattttagtttgctatccatggtgtaccttggggcacttttcttatatgctctttgtgtgaactatggcccaagttacttgttttgggtcatcattctgatatacactgagctcaacattctgtcacagtacatatatcagattatcattcagcactgtggtttgaatatacatttatcacttctccagagattaggtttccctgtcgataaaataaaggcatcgtttgttgtcagcatattgcctctctttttagtctatatatccactctcttgcagagctctattactgccaaagatggtgaatgggttccggtaacagaattcagttttctcagcacaagaaacaacattgaagagaaacgctgtatcccttacagttggagagagaggctaaaaagtttgcacttgcccataatgaatctcttaaggatgatcattagaggcttatctagatattggatgtcattaacacatggagcagaatcgccaccatattttgtgcaagttacaatggaggtaaaccattggccagaagatggaatccagccagagaggatagagtcagccataaatagggtgcttgctattgcacatgaagaaagatgccaggctaacttgcctgcctcttgccactgttgtagcaaagtccggattcaaagtattgagaaaagcaaagaaaattctaatatggctcttgctgtactagaagttgtttacgctgctcctttagaatgccaaccagcaggatggtacaaatcactcactccagcagctgatgtagaaagggagattcatgagtcacagaaagctggactttttgatgaaataaatttccttacccaattgtctcagtgataggtggggtaaaagagagatcgatctttacgcatattattttggtgctgacctggcagttttcttccttgttgcgatgttctatcaatctgtcctaaaaaataagagtgagtttttggaagtttaccagctggaggatcagttcccgaaagaatttgtattcatcttaatggttctcttttcttaatagtggttgaccgcattatatatctatggtcctttgccaccgggaaagttgttttctatcttttaaccttgtgcttttcacatattcagtca

SEQ ID NO: 24307 - DNA, 570 bp, Setaria italica
  Peptide Sequence Number=SeqID_90281
aacctaaggaacaaagttttaacttaaccttaagttaagaacgaaatagttactaatacaaatactagactcagtgtgagtagtcagaaagctggacgatgaaataaatttccttacccaattgtctcagtgataggtgggggtaaaagagagatcgatctttacgcatattattttggtgctgacctggcagttttcttccttgttgcgatgttctatcaatctgtcctaaaaaataagagtgagtttttggaagtttaccagctggaggatcagttcccgaaagaatttgtattcatcttaatggttctctttttcttaatagtggttgaccgcattatatatctatggtcctttgccaccgggaaagttgttttctatctttttaaccttgtgcttttcacatattcagtcactgaatatgcttggggaatggagttagctcacagggatgttggaggacttgtactacgtgctatctaccttacaaaatcaatttccctagcactgcaggcattacagatcagatatggcattccaaacaagagcaacttatatagacaattctga

SEQ ID NO: 24308 - DNA, 1258 bp, Setaria italica
  Peptide Sequence Number=SeqID_90282
acagtatcagatatgaacacggtaatgacaggcaagaggagatacataccaagctcacgatcagctgtgacaaaaaggcaggcaagatgaacaaaagagaagagaagaccgctagaagaggccacaacaagagacgcagttcttcacgaacaggcttgttctgataaactctgtaatatcctagtaggatgtctctcaaccattattgtctagctaatattcttgtaggtgcatggaacctgcaaggctttggggatccctgggcatatctattaccccttgtatattcttaattgccatcctcctagtatcatattacaaagaaaaaaaatgcatgtgcttgtataggtattaacagataaggctctgtcgagatatacttcacaggctgttctctatttacagtagctttctactgttcttcctagtatgtgtagagtttgaaatgtctgtatgtggtcacaaagtgaaagttttagtaagaggcagagttaagaatactatccataaaagagagaaatccttatactgccaatgaaccattcatgaaagaacctaattattgcaatctttttggcattcagcatgtgattaaacaatgcacatactatttatgagatgtaacagttttcaaaagtcatgagaaagaacaattacaaaatctacagtacaaacatctagtttacaaatcagcatatggaaacatacatatgccgtacatgagcctctagctatcacctgatgtgtacaatcaactattctttgcatctgcaagtgctctaaagtagccgtggcattgattgaagcacctccttcccttcactctaagtggagataattatatcagcaacagcactatcatccctgaatttgaacaataaagccttagagagggcaatggtaacctgatgaagcacttatttgagctagtagatacaaagtgaagcaaacagtaatgctgcagatgaagggaaaatgagcagcaacaatgcaacgaggagagaggagcagtgaagggcacgggaaagagccatcttatgttcatgtacgctaagatgaaagatggaggccaatatcgacacatcatgggcatacaacaaatctacaatgacaggtgtcatgatagtcgatagatgctagttcatgatcactctgctcaaaatgtgtgcctagtagtatagaactttctgaggaagacttgaacataaagaattcaaccaaaaaaaataatactttaaggcaaaagttaccctggtag

SEQ ID NO: 24309 - DNA, 417 bp, Setaria italica
  Peptide Sequence Number=SeqID_90283
gtgctgatcagctggtgcgttcagtgcagtgcagcagcaaccctgacgaggactggccatggtctccccttcgtcagttcttcccaaggtcgtcgatgacgcgaccgatcaggccacccctcggcgcgccaagtggtggtacgtgacgttccacaacgtcactgccatggtcggcgccggcgtgctcagcctcccgtacgccatggctcacctaggatggggccccggggtgctggcgctgctggcgtcgtgggggatcacgctgtacacgctgcggctgctgatcgagctccacgagtgcgtccccggtgccccttggtgtcttggacatatcgatgacttagcttgcatgcagtaaatttgggagtgttgacggatagatgcctgctcgcctgcttaattgttcgtgaacgtcct

SEQ ID NO: 24310 - DNA, 465 bp, Setaria italica
  Peptide Sequence Number=SeqID_90284
tctccaccgactactacatggtgttcgccgacgcgctggtgggggcgccgtcgtactgggcggtgacgctgctggtgcccgccgccgcgctggtgccctacttcgcctacgccgcggccaagtcgtggttcttcccggactaccacaaccagatacagtggctgcggcacagggagagggcgcacccggacccggagaccagcgccggcgtcgagttcggccacgccctgcgccagttctcggtgcggtccaccggcgtcggcgtgtcggcgcgccgcgacgccgcggcggtgctccgccgcatcaacggcacgcagcaggttcaccacgcggattcgccacagcagctggaggtgtcgtgacaactgatcagcatatatatgtagagagagatagatacattattggtatgttgtaaatacaagaggaaaattaagcagttggctaggaagagctagctagggt

SEQ ID NO: 24311 - DNA, 389 bp, Setaria italica
  misc_feature (7)..(7): n is a, c, g, or t
  Peptide Sequence Number=SeqID_90285
cagacgnacggtttcaatttagctttagctagctactacagactagaagagtaagtaggacactccattccattccattccatgcagcaggtcagtagtaggtgcaggatccatagctgggatcggactgcacgacgagtgccgagttgttgaagtagcagttccaggggtgcctgccattggcggcgtagtagaggttcatggcgacggcagcgcgcgacacgaggttgtccgggtagtagcagggcccgcccttctggatgacggcgcagctcacctgagagcacgcgtagttgaggttcagagacaggatgtcgttggaggcggagggcttggccacgcaccacgtcttcttctgcgcctcgactgatgaggaggaggtgaaggcg

SEQ ID NO: 24312 - DNA, 554 bp, Setaria italica
  Peptide Sequence Number=SeqID_90286
ctcgaggaagttggtaccgtcggtgttggtctcgccgtgccacacctcctccctgccgtcgaacacctccagcccgtgccacgagaagagcagcgtgcacgtgttcaccgtgctgatgggacggcactccgactcccacacgctcttcccgctcgcggctgctgctgctgcggcaacgccgtcctcctcgccctcggcggcgccgccatgggcgccggccgtcgcggcgtcgaccacctcgacgtagcagaagtcggcgccgagcccgccggcacccggaacggtgtgcgtgcgcacgaagtaggccgcgtacttgccggacggcgacgtgaggaacagcacgggcgggcgcccgccgggcgggatgctcgccaggatccgctgcttggtcacgcgctcgatcgtccccagtggcgccgtcgtcgctgccgccagggagcaagagaggaggaggagcagggtggcgatgcaaggggaggagctccatggctgcaaggcagtagctagcttctgaaagtgctagctccttgtgtgcttgctcgattgtgtgtttg

SEQ ID NO: 24313 - DNA, 435 bp, Setaria italica
  Peptide Sequence Number=SeqID_90287
ataggtatcatgcatatccagtaacaagtacatgaacctacgtggcaagcaaggaagaaaggtacgtgatggtagcaagagataagatcatatgagtccaagccggtgtcactcagagtagtgaaaggctgaaagctccgtgaccgatggtcgatggagcctcttgacctgcatacatgcgttcttttaaccttttcactgacccaacaactaacgcacttggacgcctgctgcgttttcttaccatctgttagactatcacacgctttaatccaccctcttctgtgcataaacgcctacgttatccagagcctttttcacgcgcaaataaagctcccaacaaccacgagtacgtcggtgcgccactatagatttactgaagattttgcctttttctttctttttactgtatgctgaagattctagtagtcatca

SEQ ID NO: 24314 - DNA, 326 bp, Setaria italica
  misc_feature (40)..(40): n is a, c, g, or t
  Peptide Sequence Number=SeqID_90288
ctgccagtcctggtaagcagcaagaactgaatcattttcngttgcttccaatggcattggttcatgctcaaaaaacaaggcaaagtgagagcttttcaactggaagaagttcctatgagttgagatccaagaatcttctgtatgttaggatctgaactgtaactctcatccagaggatggcactaggtagagttggggcaattttcttgggttttctttccacaataccatatccaaccaagggttggggatacatatttatagctggccaagcagccaaccagccaagcatcaaggcatatgctagtctaagatgcctttttgat

SEQ ID NO: 24315 - DNA, 207 bp, Setaria italica
  Peptide Sequence Number=SeqID_90289
gtggcagggagcggccggaaggagcaccaccggagcgcgcgcgcttcgccccccaagaggagtattttcgcttcgctccccgtgattggatcgagcaggggcgtcgcgaatcccgcctgaaggggatctgggctccagccagccggttccaccggcggacggggatctccatctgactgcgccgccgccgccaggaaccgccaggaa

SEQ ID NO: 24316 - DNA, 247 bp, Setaria italica
  Peptide Sequence Number=SeqID_90290
ttttgaatagtcacaacaatcggattgatcaaataatcagtgaccagtaaaacaacgatataaattacattacatttcattacagcctttttgagaaaaattgcagttaagatctagaagtcgaagttcccgtgcttcccttgtagcctcgatgtattcctctcagctccaggacacgctttagtccttccaatgcctagttttggcaagccccgatttaatccatccagcaagacgcatgctttgc

SEQ ID NO: 24317 - DNA, 235 bp, Setaria italica
  Peptide Sequence Number=SeqID_90291
gacgtggggaaggtactatttctctgtcatagataattggcatagaaggatcatcgttcttgtcagcaccactgcacataacatcaggaagtgtatgctctatactcccagcggtatttactgaaaatacctgctcatgggtgtatggattcacactgatgtgtgtgttgtccacaaatgcgagctcctgcttcatttgactcagatggctgggtaggagcaggccactctgtcc

SEQ ID NO: 24318 - DNA, 1383 bp, Setaria italica
  Peptide Sequence Number=SeqID_90292
ggtattacatagtccatgctgatttcaagtcagtcgtttttctttgcagtggatggtttcaaggcaatgtgatgttcagccgttttttttggtgcagtgaaagtaaataagaacccatcatctttgctgcttgctgtatgactgtatattctaacatcactttatttccttcctttacctcacattgtaaacctgagacaaactatgtgaccaccatagcatgaccatgacaacccactctaaaggcatcctattctctccagagcaaaactccgaaaaaacccgggggaaatcctcactcacatctcttagctaatgagaaactaaaagggcaaaaaaaaaaggtgctgataaaaaacagtctagcaagtatctctgtctagctctcctcctccagggcttgctgaagaagagatgggctcctaacaaaccttcccttacgacatccgaggccggcagtcggcgttcaccttccgcacttggtaccggatcttctttgagaacagccgggtgcgcctcttctccttgtaccgcaggacactggcttccctgatgccaccagcagctccattctctggaaacaggtcaatgtctgcaagtttagcccgcacgtcggcagccgacgtcggcgactccggcccgccgccctcggtgaacatggaccctttgtcggaccacgccttgagcacctcgtcggcgtccagcttcagccccaacccagtctttggcgccttcgtcggcgtgctgtcagcgtcgccgtcgccattagcagcctcgacggagccgtcagcttcctccttgcatttagcgttgggcagctcctccttcccctttgccataaccttctccaccttcacgaccttcttcttcttgctcttcttcttctctggcgccgccggcacctgcgccattgcagcgtccggcgctgccggtgctggcggcatcggtggtgcaaccgtcaagtccttcaccggcacggccggccacatccaccaggcgccgtcgtcgtcccgccgcttcagggcgcggttgaggttgggccgagcgccgtgccggaacccgaggccgagctcgaacctgccggcgaggccgaccaccatgaggctcctgaggtaggggtgtatgccggagcttgacaggatggagtcatccgacgtggtggccgtgttgctctcgacggtaaggctgcccatgataccgtcgaggccctcggccgcgccggcggtggcctcgtcgacgtcgagaatggactcggcgtcgaagccgtcgtcgtcgaagtcgatctcgccaagctcgtcggcgtcgacggtgtcggggctcgccggtgacggtgccgggtcgcggaagtcccggaacacgctgctcaccggggccggcgacgag

SEQ ID NO: 24319 - DNA, 507 bp, Setaria italica
  Peptide Sequence Number=SeqID_90293
ggcattgaatccagcctcctcatagggcacttcaccttcattcatcgattgacttctgcgaaacggctcggagttcttcctcccgaaggacttgccggacgccgacggcttcagattccccccatacttccacggcccggtgccaccacattgcttccagtcaccgtacgacttcagtgcgagcacgcagttcaccaccctggcgctcttccctccctgctccaaatcggaggcctcgaagcacggcaggccgatctcctgcgtcgccaccaggaagttgcgcacgttctcgaagtactggaacgccgacagcgccgcgccgtcggcctgcagcacggagtccgccgtgttcaccaccaccttcgggacggcgcccgggtggacccggttgagcgcgctgcagaggatctggccgttgcggaggccgaggcggaactcctcctcggacggctcctccggcaggtcacgcgcggcgacagcccccaccgtgcggcgcagccaccccgc

SEQ ID NO: 24320 - DNA, 288 bp, Setaria italica
  Peptide Sequence Number=SeqID_90294
tgctggcccaatgttcaatatgctggtggggttgggaactgcactcgtagtacaaacagcaagagtgtaccccaaagcttatgtacttgaattccatgttgggatcgttgttgcatttgtatttcttcttctgagcttgatgggcaccctgttggtggtcacctgggctaggtttagagtacccagattttgtggctactgccttatggggatatacgtcttgtttaccgtagtgagtatcgctattgcgagcacttctggatgatactacacattgtttacaaactg

SEQ ID NO: 24321 - DNA, 609 bp, Setaria italica
  Peptide Sequence Number=SeqID_90295
gggggtggaactgaaagcaagaggcgtagctaatacgagtagcgtgctagatcgatgattaatctttttacggaaaaaacaagcactttgcacaaataggaggacgaataaatctagaggaatgcttggctacctccgacagattggtagatgaagaaggggaactgagaatgtgagacggatggactgacctccccaacctgtccttgcatctgcgctcgtccccgcagaagacccacgagtcgcagcggcaggcgccgccctcgggatgggggcacatggccttgcaggatgcgcagcaggcggcagcggagggcaagcggtggttagagccccacttgacggcggaccccagagctcgagcccctcccatacccctgcagcaatcggcatcggcccgcacagtggaagacggtgccgggggcggtgtcggcgcagcggaggggaaggaaaggtaggcgagggctgcggcggcggagaccgcgacaagggtgatgagaaaaaggagcaggcggccgcgccgtcgggcgtcggatgggcggcgggtgagggggagagtgggaggagctggcatcgctgcgcttgcttcacaggtcgggagtttcggtt

SEQ ID NO: 24322 - DNA, 342 bp, Setaria italica
  Peptide Sequence Number=SeqID_90296
aaggaactctgcgagagcacgcacctcagcaaacactgcccgggatgacgggtgccaggtcggcgtcggacatctggatgccgacggcgacgatgttggcgccggcgagaacccccgcgaagcagagtagtaagccgaatccgccggcgccggagttgaatccggtgctgacggagaacagcaagatggcgaggccggcgaacatcgccgtggtgcccggagtggtcatcgtcggccgcgtggcaccgcagtcccctgcttaatcggagagggccgtcgagcgagcaggcgaggcaccgccgcaccggggacggaagcgttgccgaagaggcgaaagaatgc

SEQ ID NO: 24323 - DNA, 499 bp, Setaria italica
  Peptide Sequence Number=SeqID_90297
atcactctcacgcctctccaccttcccgagcacatggacttgctgttctgggtccttcagtgaatctttcgtgagtagtattaaatcattctccatgcagcctttaaatttgatagactgactattctcagggcgggcacggacgataaggaattcatcaactctttcaacggacaggatagatatgcatccacaaatcatgtcatcaagaggggtctcaacataagaattctgcaactgagccttaaactcttccagaactagtggctggaaaatctcaacatattgagcttgtgaatcaaagcatacaggaatttcttttaaagcaggcatttttactacttcagaagaagataacccaacaacagtaaagtagtccatttccaatatatttttaaaccagctacccaatttaggtggctgaagccgtcgtgtacttgtaaccttacagccagaaccttgtcttcttccaacaggcactggaagctgaacaacttgt

SEQ ID NO: 24324 - DNA, 241 bp, Setaria italica
  Peptide Sequence Number=SeqID_90298
ggcacgtccccagagcgccgggcggcgccggcgggggctgcttcccgaagcacggcgcacatgaggaggccgccccgcggcgccggcggctccggcacggccgttaacctccccgactgcagcgacaggttctccagcgccatggcggagtagagcagcacggcgctgctcatctgctgcagcagctctacgaagagcggcgccaggcccaactcccgcgccacctccacgtacaggtcct

SEQ ID NO: 24325 - DNA, 416 bp, Setaria italica
  Peptide Sequence Number=SeqID_90299
gccaccaaatataatcgcatttagaaacaaaagggagtttatttttctaccaatttttttctatttgcttacttaacaaaaaaatacatataaccagtaatttcagcaatgttatttcttttcacgaaacagtgaatgaattttagagaacacatgagctggaacacttcacccatcatttcttttcttgaatgcgctattcttttccatgacacaagtgcagaggcacgaaatcagaatatttcatgatgataagcaaatggacttgactactgttcttgagaatcattattcattcttcgcaaccaaaatgtacttgaaagttgaaacatctccattaaacaaaatacaaccatagctcagtgactctcacaaaagcaaccttgcaagttaagacttaagatcactaaaccaaa

SEQ ID NO: 24326 - DNA, 281 bp, Setaria italica
  Peptide Sequence Number=SeqID_90300
acgaagttaatagacaaatggacactagtttcatcagatgggcggccctcactagtgtttgcttcactctttgaatcgggtgagtactgaccagctcccctagttcatgagcagtcttctctggcagctgtttgcatgaaagccagcatgtattgtcctgtccagttacactgcttgtccagatttcccaacaaaataaataatctgcaggtggactttacagtttacagtgcaaaatgatcaatatccattgacggaaaccccgattgtaacctttttat

SEQ ID NO: 24327 - DNA, 380 bp, Setaria italica
  Peptide Sequence Number=SeqID_90301
cgccaatgctcgcacacacaccgcacgacagcagccacctgctaacccaacaggtacagccagaatcccagcgatgtcagcggcggcggaggagtacccgtggcgcgcgcagcaggtcttcggcgactccatggcggcgcagcggagcgcgctggtgctcgcgtcgtacccggtgctgctcctcctcgtcatcctggccgcgttcgtccggtacctgtgggtcgcgcttgccatgtactgcgcgctcctcttcgtgctctcctgcgcgtcccgcaccttcgccgcccgggccgccagcgacgacgaggaggcgcggctcagccggggcgggctctcggcggccgccatcgcggcggtcgccccggcgttcccgtacgagc

SEQ ID NO: 24328 - DNA, 479 bp, Setaria italica
  misc_feature (38)..(38): n is a, c, g, or t
  Peptide Sequence Number=SeqID_90302
gtatttcttcttttcgattcatctctatgtgcaaaacncgaaaaaaataactgttctctatgaatcaacaaaaagaatcatgtatacatccatcctaaatcgaccaatatcgcattctttgagctcttttcagatgttttattttccgccatgtcatcgaaatcctgtatcagagatcctccaccggcgcctcgtcggacgcctccgcctccggctgccgccgccgctgcggctgctggccctcaagctgcatgagcttggagaagaccccgaccatgggcgcggtgttgtaggtgcacgcctccgtctgcatgtacgcgccgcggtggtcggtgaagacgtcctcgccgttgggcccgccgacgacggcgccgacgaggtcgtgcgggttctcccgccccgcgctgtaccacgagtcgaacccctgcaggcacccgatgaagtccctgtcgtgccggtacgatgcgctcgacgccgcc

SEQ ID NO: 24329 - DNA, 587 bp, Setaria italica
  Peptide Sequence Number=SeqID_90303
agagaaaaataatggccagccttgttgaagtaggaataatcctttagcccatatggaatcaacaaccatcctacaagcatcgttttgattcagaatttcccaatggccgccatctgagaaaccataccaatgttgctcaaaaactaacttcccagtaaatcgtaactcaggttttttagagtgcaagaagctgagagtgttgtcaaaatccaggcctgataaaataaccaggacattagggtttgctgcatgcacagcttcagcacctagttgcatgtacctgtaccacaaactaatattttgattgggccctcgaagctcattccgcaagctcatgcccacaacattttttgtgtcgttaaaaatagttgccattgcattgagccctttcaaccattcgtcagggtcgaaatacttgtctccaaagaagccattgccgtcagttctgctgcagcaccatcccggagtggtcatttggttatcaagtatgaccataatacttttgctgcccaaagctgagaccacttcccggaacacatcgatgaggggcaggtcgaggagggcggggttgttgacccgcacgccgg

SEQ ID NO: 24330 - DNA, 295 bp, Setaria italica
  Peptide Sequence Number=SeqID_90304
gcgtggcggggtcgtcggcggcgcgctccacgtgcttccgggcggggcaacccttggcggagctgcaccggtagtagccgcgcgggtagggggaccccttgatgggcttctgcccgtacttgcgccacgagtagtcgtcggcggggatgtccgacgacgccggcgcctgggatcctggcgccgccgtgcccacggcgggcacgcgcaccgtgcggcgcgacagcccctgccggctccgcttcggcttcttcgagcagtggcaccgcccggcggcgccgggctcgccgtggtggtg

SEQ ID NO: 24331 - DNA, 206 bp, Setaria italica
  Peptide Sequence Number=SeqID_90305
ccactgccaccaccagctgcagccagcgcgctcaccttggggtggaactggacgccccagacttcggacggcggcgcctccagcgtggcgacggatgcccccgagtcgacgtcgaagacgcggacgaagctgtcgagcgacacggcggcggcgagcgcgcccgcggggtgggcggcgagggagactaccccgagcgcgtggccgcg

SEQ ID NO: 24332 - DNA, 822 bp, Setaria italica
  Peptide Sequence Number=SeqID_90306
ccgtatttacaggaaggaaaatccaaacaccctcatctattagcaacgagaactaataaatgatgtatccctactagtagcccttttaagatttattcaaaattatttaaaagcccttttaagatttattcaaagttatttaaatgggtcaagcccacaggtgctggggacctgcgtgtagaagaactcctgcatcccgacgaccgtgaacacatctgctactcccaggaggatgtactgtgggagcagccagaagatgctcagctgcgttgcgtctccttcgctggtgagatggagccgcttcgactcgacagcggcggcgacgaccatggccacaactgagaggaccatgccgatgccggtccgttggagcacggtgatccccttctcctcccgagtgaacaagcgcatcagaggaacgaagatcttgtcgtacagtggcatgagtagtattaccgacatcgtcgtcgagctctggagtgttgctggagggatcacaaaggtgctgccaaccttgtggttcatcagcatcccatggttggtgaaaaacgtcattggctgctgaaaattgaccgcaaagatcagcagtgttgtccagatcggcagaagcctcagtattgtcttggtgacattaggtgtagcgtcatggccattgcctgtctctctcggatcagtaaactcatctttaagagccttctcttctaactccagttcggaaatgtcactgtcatcatcagctctagctggcaaacggacctttcgagtaaatgatatatgtaacagcttccttcagtactttgaaaatgctccatgaaggtttgt

SEQ ID NO: 24333 - DNA, 477 bp, Setaria italica
  misc_feature (475)..(475): n is a, c, g, or t
  Peptide Sequence Number=SeqID_90307
aagccggtcacccgtgtaattcgttactactagaagacagcctttaggtacctgttacagctcggatagcagccaaaatagagttgactggtggagaagtgaaaacatctccagaaacagcagcagtcagcattccttgaccaacaaatccaccatgggctggttcgtgaccacttccacctccgcaaataacagcaaccttatcgtacgtcccggccgcgacatcggagcggagaacaaccttgacctcggggaacccgtccaggtactgcaccccggggtacgcctcggccaggccctcgatgaactgcgtcaccacatcgttgggatcgttgatgagcttcttcccccgcgccgccatgggggcccccgtgcccggaagcgcagcgcgtcgccgtggacgtcgaaggaagcgaagacacggcggggtactggggagtcgcagtgcagggatggtacggtcagacgcttttcngg

SEQ ID NO: 24334 - DNA, 159 bp, Setaria italica
  Peptide Sequence Number=SeqID_90308
accagtttggcctcaaaatcgggggacgattccggtgcggctggacggcgtcgagtcagaggatgcgtgacaccacacgaagcttgcgttgaggcgaagcgaagtcgtgaaggcgccgggtccatccgatgtacgaggaaaacgttggacaattttagg

SEQ ID NO: 24335 - DNA, 674 bp, Setaria italica
  Peptide Sequence Number=SeqID_90309
gcagctcgccgctgcagctggctggcgtggtgttcaatggctgcttgggtctggtttatctcggccttggattttggatgttggggaggaacttcagtcaggatgcctctgtgtacctgctgcactggtggttggtggccttattgcagggattcagtttgatccttatcagcatcgctttcagcatcagagcaaggttccttggagtgacgtctgttcggatttggtcagttctgctgaccatatatgctgcatttgtttgctgctcctcggttattaacatggttgcacataaggctgtcgcaatgaagggttgtttagatgttctattcgtaccaggggcactactactccttgtctatggaatttggcacatcagggaagatggtaatggtaatggaggaactggaagtgctttatataagcccctgaacgcagaggctgctgatgatgcagatgattcagagagtcatgtcacacctttcgctaaagctgggtttttcagcgttatgacgttttggtggttaaatcctttaatgaagatgggttatgagaagccccttgaggagaaagacatgccacttttaggtgcctcagatcgagcatataaccagtacttgatgtttctggagaagctgaacaagagaagcagttgcagccacatggcactccct

SEQ ID NO: 24336 - DNA, 543 bp, Setaria italica
  Peptide Sequence Number=SeqID_90310
atgagacatgatttaaaacccagaacaaagattccatccagacaaaaataggcactacctctgtttttatttaattgatgttggttagttcaacaacatcaagcattcaagaatggagggcgtacaattatagattacaaggtccactttctattattatatatttgtaaacctaaatcatttataatatatggaagaattttacatgttaaaaatcccaggggaggggggttctaaacttaattaacaatttaatatttcactgaaaaagcattgtacaaacaaaatagtgaaataccatcatttattattatattacatcgcatctactatcagaataaatatttcatgctgatatgtatttttgggatacctaactagtgcaaatggatgtgttttcttccagcaacaatcatatcaaatgataaaagaatagagtagctacaaattatccaaaatgcaacaggagacaaaaccatatgccacatcaaatccttaaacttgcaaagtttaaaacacttttggttgacaactcaaattaag

SEQ ID NO: 24337 - DNA, 349 bp, Setaria italica
  Peptide Sequence Number=SeqID_90311
agtagctagctataggcacctagcggggatcatgtctgcactgtctccgctgctcgcccttcacgccgccgtcagatcagtagggccatccgccgccgtaggcgccatggcccagctgagccgccgccggcgccgtggggtacgcgtacgcgccccaggcgccgccagtggacgccgccgggtacgcggactggtacgacgggtacgcctccggctgctgcacctgcacggcccacgggtggtacgccggcgccggggcgccgtagccgtaggcgccgggcagcacctggttggcccaggcggcctggccgtggccgtggccgtactggccctgctgctgcaggctgcg

SEQ ID NO: 24338 - DNA, 250 bp, Setaria italica
  Peptide Sequence Number=SeqID_90312
cgcaccatgtcgccggtgtagaccctggggttatggacggaggacgccagcacgtcggtgaagttgctcgcgccctgcgtgtagatgagcccgctggggatgttccccaacaggcactgcaggaagccgtcggagtcaggcgtagccgaggttggagtggtgaggtaacagcaagaggagaaggtgaggatgagcgctagtgcggctaggcctctgaacgttgccatcttggctgcttcgtcttgcaatg

SEQ ID NO: 24339 - DNA, 720 bp, Setaria italica
  Peptide Sequence Number=SeqID_90313
ctacggagggggcacgtgaactcgcaagagatgctcgagccacaagacctgatgatcccatgaattctgttgttggtgggctagcaagtggagctgttcttggtcgaatacaaggcggacactttggagcagtgaaatatgcagtcacctttgcagctgctggtaccgcaatggactatgctgcgttgaagctggcccctgaatggcatgcctggaaagaacagctctctgaaaagaaagactggtttacactacccgagtggtctccgatccaagtgttagatgaggaagctttggctaagaaaaaagctcgagaggagaagttgtttgcccagcgagcactcggtaaacttgacaaggaggattcctagctacaccgtattttggagaactgcatacagacagaaatatgatgaattttaggtgcttatctgtttgtctcccaaaccatagtgttagaaaacactgagatttttttttaactttcctgtacttttggggaatgcccatggaaaagcaaacctagctggtgcacttccaggttttgacggccagaaacatcgctacaaatagcttgtacttcgttatgcagcttccaccttttttcttgtgagtggatttgcacttcgttttggaagttgatgtttggatctgggatcagaatatgcgttgtaaaaactttttcttatatttttttcagtacaaatgttatggcatatg

SEQ ID NO: 24340 - DNA, 255 bp, Setaria italica
  Peptide Sequence Number=SeqID_90314
cgccggcgtccgaggcagacatccccagggacgagcccaccatcgccgcgcacctcctcgcggctctccagtcgttcatggcgctcgaccagagcttccgcgcgcgcccgcttttcctcgccggcgagagctacgccggcaagtacatccccgcggccgccaagcacatcctcgacgcgaacgacaagctccccgcgggccggagagtgaacctgcagggcatcgccatcggcaacggcatgacgcaccccgtcg

SEQ ID NO: 24341 - DNA, 740 bp, Setaria italica
  Peptide Sequence Number=SeqID_90315
aatgcaaagacagttggaggctgtttccatcttccagaaagcatcactaaacttattaatttggtccatgttgatgtagagaaggcatatgtccttatgttatccagcactcacaaacttccatatgttgagtgtgctggagaattctgcgttgacgaggagggaagtttgctaggcctgaaggacctcaacaagctccgaggacaactcaccattatgtctctagaaaaagtgagaaacaaagtggaagcttcaaaggcccatctacaccttaaggagcacataaccaagttggaactacaatgggaatcaagcagggctaagtgtgctaattctaccaagcagggctttgaggtgcttgatgtcctaaaaccacagcctgatcttgaggagctaactataagtggatatcctggtgctagatctccttcttggttggagtctggttggctgagcagggtgcaatttgtttgcctacgtgattgtaacagatgggaggtacttcctcctttaggggacctgttattactgaaaaactctcgaaatacggcgaatgcaagggcttaagacacttggtcaggagttctttggctgtgccggatttccctctttggagagatttctactggagcgcttaccgaatttggaatggtgtcttgtagataactatcaactgtttcgcaatctccaacatctttctgttgccggaatgcccgaaagttaaagaagaaataacccca

SEQ ID NO: 24342 - DNA, 374 bp, Setaria italica
  Peptide Sequence Number=SeqID_90316
cagcgtggcgctccgcgcggcgagccaggcggggaggcgctccatggagaaggggcagtagatgacgagctccctgaggcgcgcgacggaggccaccatccggccgatggtgtcgtccgcggcgcccctgcccacggcggccgcgtcgaaggcgttccgcgggaagaagagcgcgggcaggtaggggacgcagtcgcgccagcggcggcagacgcaggcgcaggcggccacgtcgcggacgttgctgagcatcgacaggatgtgctgcacgacgccgtccgggacggagttcatgccggtctcgccgcattccatccgctcccacagcgctcgacgaaatgcccagcgcacactcgagaggccgctggatgcca

SEQ ID NO: 24343 - DNA, 370 bp, Setaria italica
  Peptide Sequence Number=SeqID_90317
ttatgtgatcctgagctgctactgatgtcactgaatgggggagtatgttggcagctgtttttgcggtttctgttgacagatgttaaacatttgttctgtccagtccatatgactgcttttgagattgttggaactgaagggttgtccttttttttcaactgaaaatccctcaccgagttgactgaactattgaagccggtagttcactgcatgtctttgagctcttgttaccatgaaatctggagttataggagcggtgtaagtggggtttggcggcaaaactgttggaacctttaatctgtaggtccaggaccttcaatctgaactcctgtcagatcgtcttgagcactgagttacaaaaaaaataggc

SEQ ID NO: 24344 - DNA, 970 bp, Setaria italica
  Peptide Sequence Number=SeqID_90318
tgggccaagggttacagagaattgatcgatttgtttgccaagcacaagagcgatttggaaggcttcaagttggacatctacgggaatggtgaagactcgcacgaagtgcaatcggccgccaggaagttgaatctgaacctgaactttcataaaggccgggaccatgcagatgattcgcttcacgggtacaaggtcttcataaacccaagcatcagcgacgtcctgtgcaccgcgacggcggaggcgctggcgatgggcaagttcgtggtgtgcgcggaccacccctccaacgacttcttccgctccttcccgaactgcctgacctacaagacctcggaggacttcgtggccagggtgaaggaggccatgacgcgcgacccgcagcccctgacacccgagcagcggtacgacctgtcgtgggaggccgccacccagcggttcatggagcactcagagctcgacaggttcctgaacagcagcaacagcgactgcagcagcagcagcagcaccgagcgcgacggcaacagcgcgggcaggaggatgaggaagtccgcctcggtgcccaacatgtcagaggtggtggaaggcggcctggcgttcgcgcactactgcttgacgggcagcgagctcttccggctgtcgacgggcgccgtccccggaacccgcgactacagcaagcagcacagcttggacctccgccttctgccgccccaggtgcagaagcccatttacggctggtaatcgaggtaaactgcccgctgtcaattactccggagtagtaagtagcagtacatagaggtatacatagcaccgcagtctgtaacactagcggtggttttgctcttcttccggctggcagcctcggcctgatgctgaaatgcaggccttgttcattattacaaaccactttgtttgcttgagtaacagtagttctggataaagattccagcaaggccctcgatctgttttt

SEQ ID NO: 24345 - DNA, 1257 bp, Setaria italica
  Peptide Sequence Number=SeqID_90319
tctttatgcagcaagcgcaaggacgcatacaattttctgtcagcatgtgagccttcttcattgagaaatgacaatgttggggatgaactcgacctaagaatagctagtgtcctacaaagtacaggataccatgatgatggtggattttggcttgataggaaatctagcctatctgacaagagacatgttgccatagtcactactgccagtcttccctggatgactgggacggctgtgaatcctttgtttcgagcggcatacttggctaaatcttccaagcaaaatgtaaccttggtagtgccctggctttgcaagtcggatcaagaacttgtctatcccaatagcatgacttttaattctccagaagaacaagaaaactatatgaggaattggctggaggaaagagttggtttcaagacagacttcaaaatatcgttttaccctggaaagtttcagaaagaaaggagaagtataattcctgctggggacacttcacagtttataccatcaaaggaagctgacattgcaatcttggaagagcccgagcacctcaactggtatcatcatgggaaacgatggacagacaaattcaatcatgtcgtcggtgtcgtacatacaaattatttggagtacatcaagagggagaagaatggtgctattcaggccttttttgttaagcacatcaacaacctggttgccagagcttattgccacaagattttgcggctgtcaggtgctactcaagatctgcccaagtcaatgatctgcaatgtgcatggtgttaaccccaagtttctggaggtcggagagagaatagcagcacagcgggagtctggccaggaatctttctcgaaaggagcttattttctaggtaagatggtctgggccaagggttacagagaattgatcgatttgtttgccaagcacaagagcgatttggaaggcttcaagttggacatctacgggaatggtgaagactcgcacgaagtgcaatcggccgccaggaagttgaatctgaacctgaactttcataaaggccgggaccatgcagatgattcgcttcacgggtacaaggtcttcataaacccaagcatcagcgacgtcctgtgcaccgcgacggcggaggcgctggcgatgggcaagttcgtggtgtgcgcggaccacccctccaacgacttcttccgctccttcccgaacttgtccttgtaccttactaagtaccttcggtaggtactttcgttggtcctagggttgtaa

SEQ ID NO: 24346 - DNA, 192 bp, Setaria italica
  Peptide Sequence Number=SeqID_90320
ccattcgccgctctatgtgagatatgctcaattgactcgttgatatccaacttcattcttccattacagggaaatcatatatcatgtaaggaggggcggatccactgttccttaaatatcaacacagaaacagggcgtttatctgcaaggacaccaaatttacagaaccaacctgcacttgaaaaggatcgg

SEQ ID NO: 24347 - DNA, 625 bp, Setaria italica
  Peptide Sequence Number=SeqID_90321
gtatcctactagctagacctgtgtcctgatctgcttcggaacagtacagtgtacgtagcagttactgtgtacagtgtaagctagccttgtaggtaaggcctctagagctagaccgcgatggctttgctggtcaagtgcgtgctgctctccctgtccgccgtggtcctctccatcggcagcgcatccgccatgggcctgccgccgccgccaccgatggtgaacttcagcatcggtgtgcagggcgtggtgtggtgcaagtcgtgcaggtaccccgggtacttcgcgcccatggacgcgtccccgctcccaggcgcggaggtgtacctgcggtgcaagcacgggcggcgggccctgacagtgccggggaggtcgggccccggcggctacttcctgatccagacgtcgcagcagatgtcggcgttcacgagccagcagtgccgggtgtacgtgccgcggtcgccggcgcgcgtgtgcggggtggccgattacccgtcccgcgccaacaaggggctgccgctcaagttccaggagttcgtcaagcgcgacaacggcctgcaggggatgtactccgtcggaaaccgcctcttccgcccaaagtaccccggcaggtgctactgatcgtact

SEQ ID NO: 24348 - DNA, 846 bp, Setaria italica
  Peptide Sequence Number=SeqID_90322
cgtccaaccagcacggcgactggatgcagttcgaccgctaccaggagtacaagtacctgctcgcgatcgcggcgttggcattcctctactcgctggcgcaggcggcgcggcacgcgttccggatgcgcggcggcgtcgaccccgtctccgcgccgtcagcgaggcttctcgatttcgtcggtgatcaggtagttgcatacttgctgatgtctgcgctatcggctgccgtcccgatcacgaaccgcatgagatctgcagtggtcaatactttcacagatgcaactgctgcagctatcagcatggccttttttgcatttgcagctcttgccttgtcagccgtggtttctggatacaagctatccaaacaaacgtatatttgaatcatcatcgttgtagaagagcaaaacacattatgtggtctattcattatggattgctaatccgaggaagagaaacatgcttctgtagttctcttcaacttgaaggccatgtgttatgtgtccggaggtgattgttgttgcttgccgtagcttccatgtgtgtacatagaattatacgcagcatgccggaatacgattgttttccttcccaaaatattgctatcgtcttttagcttttctgaacatgtgcaggagtggagctgtatgcttatttcagggctcatagttttccttgatacctctgaagagcataatgtttgttacccatattgtatagcatgtagctgcaactttgtgctgcgtatcttactgtccaaaatcttctggctaaattgctaattgtccggtatcacatggtggtttatataatttcatctaatattagttagtaaaaaaaaaaaactag

SEQ ID NO: 24349 - DNA, 865 bp, Setaria italica
  Peptide Sequence Number=SeqID_90323
tccaatttctcattagctagtgcggcgcaacgccatccaaagtaaagccagctgctttcggaaactcttgtctgatcagcggtgctcaacccaatgacttcctgctgggtctctcggttgcctctggcagttctgctgctcgtggccacctgctcctccacggctgctgcctcctcctacaccgtcggcgatggctccggctggaccaccggcgtcgactacacctcatggaccgcctccaaaaccttcaaagtcggtgacagcctcgtgttcaactacgcgaaagggttgcacacggtggtggaggtgagcgcggcggagtacatggcgtgcacggcggcgaatccgctgggatccgacagcagcggcgcgaccacggtgcccctcaagacgcccggcacccactacttcgtgtgcagcatcacgggccactgcggcgccgggatgaagctcgccgtgaccgtcggcggctcctcctcccccgcctcgccgaccccgacgacgacgccgaggacgtccccaacccctaccacgccctacacgacgccgatgccgacgaccccgaccaccaccacgccgacgccgtacacgacgccgacgaccccaacgtgctctggaggtggcgggggaggcaccaccgcaaccccgggcacgacgccgttcatgtcgtaccccagcgcggccggcctcggttcggcgtcgttggccgggtttggcctggtttgttgtatgatgttccagctagtgctgctctagacacaagggccatgaccgaccaggatggaggcagtgctagatatagctaagctaggtcatgtctccggtgacgtgctactgatgtgctcgttctttggttcggaaaaaa

SEQ ID NO: 24350 - DNA, 322 bp, Setaria italica
  Peptide Sequence Number=SeqID_90324
cctggttatatgtccttgcctaccagaaacaacagaaagatgagaaaaaacaacaaagaggtcgaatcaattctgcgagatataattgggaaaaggattcaagcaatgaaacaaggcaaaagcaccgaagatgatttattgggcctattgttggagtcaaacatgagagaaacagaagagaatggtcaatcaagcaaggggatgacagttgaagaagttatcgaggagtgcaaggtattctattttgcaggaatggagaccacatctgtgctgctcacgtggacaatggttgtattaagcatgcacccagagtggcaggacc

SEQ ID NO: 24351 - DNA, 172 bp, Setaria italica
  Peptide Sequence Number=SeqID_90325
ctcgtacaaaaatgctgtaacattttccgctaggaacacaacgaaatgtgctgcttcgaattgaagcaacgcaacgaaaatgtgttgcactggcctccggcgtctggcccagtggcgactactggctgttgccaacgacttgcacagatgcggaatggaacctggtgaggaa

SEQ ID NO: 24352 - DNA, 643 bp, Setaria italica
  Peptide Sequence Number=SeqID_90326
ccaagaatgaacagagcttccatactctgttgaatctaatccacccatcctatctttaacataataaagaatttatcagcaaaatccaaaaaagactcctggcatccagatcttctagatatgcagacagttatttctggtttaccaaatcagcaccactgacatacctagcaacaaatgagatcaatcggaatggagcaccgatgatcggagcgtcagaaaatggaacctcatctatctcatcgtctgctcctggttgctgcgggccatcctcatgaatctgtatatcatccaacggaactggaatgatttcttcacttgttagtccatcaaatcgatgctcactgacatcaacatgagcttgtgctacactattgctggtgcctatttctggaagctgcattgatgtttcttctggatgattactagcatatgcattgctgggagtattgttgatttggccatagctattatcaggagtaatttccactgaactgctcagacctctgtcagcaatcagttcgttacctttgctcatcatctcagtaaaaccaattgtttgctgatgaagtagtggactagtgtaatccattcgatctaccaccttattgtcagagacctgacattacgttctacttgtagt

SEQ ID NO: 24353 - DNA, 645 bp, Setaria italica
  Peptide Sequence Number=SeqID_90327
agaagcgagatggagaggaaccagaaggagaagagcgaggagccttgggtcggccgccgcatcctcggggtggccttcgcgggcgtcgtggccgtcgccgccggcgccttcgtcatgctgtcgagaaacggggacggtgcagagcaggagcagacggccgggaggacgatgaaagggccggacactagcggcgagaggatctcccgcaacaagttcgaggaggaccccaagagatacttcaagacctgtcgccagaaggggcccaaggccgccgttgacgatttcaagtaactggctgacgtcgacggctgctaacaaagtacagctcattcccgcgtaatatagtagtttccattccctgcatgatggcacgtatggtagtacgggactatgggtgttgtagcacggttgatcaaggcgagtgactatgactaccgtctacgtaccggactttacaaggctagtgtgtaataatctgtattgtaatattgggtcaattgttctgcccatggctgttgccagagcctgccaggctccaactgaacggtgggactcttggattgttttgcttcgttggccaaacaaaacagcctcaattgttttgctttgttggctttgcacgtgctcgatttcaacccacttaat

SEQ ID NO: 24354 - DNA, 278 bp, Setaria italica
  Peptide Sequence Number=SeqID_90328
catcaatttgttagtatcaatgacattccgtatgttcactctgcgcctctctgtggtgctgcccaggctgacccaggggatctcagttgagtcagtgggtggcatcagttggatcatcttgtgcattttcacgttcccactttcatcgataacaccatcctcaattagtttgggaagtttcatccttagtgcaaacacagatgctgagtaagttaagcacaaagcaatacgtactcccactgtgttggtcagttttagtgcccagctcatagacacat

SEQ ID NO: 24355 - DNA, 298 bp, Setaria italica
  Peptide Sequence Number=SeqID_90329
gccgcgcgccggggcatcgtggacgcggcagtggacggtggggtggaggacgtggtggccgccgccgtcgcggaggccgagcggctcgctgcgaggggttgggacggggaggtccttgccgagatcaggaaggccgcgtggcccaaggtgtggagcaaggtcaaggaccacggcgccgggccggcgcggccgcggctctaggcgcgcgctggtacggtcggcggctgcgctggttgtactagtgtacaactagaacatgtagctaggtgaataaatctagatggatgtatcctgcttg

SEQ ID NO: 24356 - DNA, 288 bp, Setaria italica
  Peptide Sequence Number=SeqID_90330
tgctaataatccttatgctgggcaacactatggcctgctttctccgcttcccatgggagcaacggtaggttgtattagtttcagaccagacatctatggaatttctgactgaatttgtagttgtggtaacatatcacaaaactaatacatatatgtaaaaacgaaaacttattttagtgatcgactaaattccacattttcggaaattcatgcattagttattttcagattttccctgttttcaaactgttttttactgtttatgaacatgaaattcacctgtgcccc

SEQ ID NO: 24357 - DNA, 292 bp, Setaria italica
  Peptide Sequence Number=SeqID_90331
aggaatttaatgttatttgattccttgccacatatggtcaatgcattaaagttcatccctttttttctagctatggcactttcagaagatcacaaacctaacaggatcgatgagcgaaagagaattgaaaatgctggtggtattgtcatttgggctggtacttggagggtaggtggtgtattggcaatgtcccgtgcatttggcaatcgtttactgaagccatatgtggtggcagagcccgaaattcaggtatactgtaattgagttatgcccagatttcaagttctttttt

SEQ ID NO: 24358 - DNA, 1228 bp, Setaria italica
  misc_feature (1214)..(1214): n is a, c, g, or t
  Peptide Sequence Number=SeqID_90332
ggatgatgctggactcctccgaccctgcctcccccgccgccgcggcggacgcggggcaggtgcagccgcagcgacgcgcggcgggggcggtggcccaggcgcacgacggtgggtacgccagcggcggatgggagagagaagatggtaaactgagttgtggatactcaagttttcgagggaagagagctaccatggaggatttctatgatgttaagctaactgaaattgatgggcaagcagttagcctgtttggtgttttcgacggtcatggaggatcgcgtgctgctgagtatttgaaggaacacttatttgaaaaccttctgaagcaccccgagttcttgacagacacaaagcttgctataagtgaaacatatcagaaaacagatacggatttcttggaatcagaagcaagtgccttcagggatgacggttcaacagcttcaactgcagttttggtgggtgaccatctgtatgttgcaaatgttggtgattctcgtgctgttatttcaaaagctggcaaagctatggcactttcagaagatcacaaacctaacaggatcgatgagcgaaagagaattgaaaatgctggtggtattgtcatttgggctggtacttggagggtaggtggtgtattggcaatgtcccgtgcatttggcaatcgtttactgaagccatatgtggtggcagagcccgaaattcaggaagaacaggtcaatggggagctggaatgcttggttctagctagtgacgggctttgggatgttgtggaaaacgaggaagctgtttcccttgggaaatcggaagatgcccccgagtctgcagctcggaaactgacagagatcgcctactctcgcggcagcgccgacaacattacatgtatcgtggttcagtttcaccatgataaaaccggatgaggcaccagagaacattacatgcgacatggtcaatctcaccatgacaatgacgaaacctgatgaggcatacggcagccggtttcaggtttgccctgcttcaggctattattatcctgcaagctgggtgttgggggtttctcccagatttatcactcatgtagcaactgccaagaactgttgcattgattctttgttgccttctaggaaacattttttgttccaacaggtgtaagagacatttttaatatgatgaatttttaataaatcgatgtgtgtttaacctgaaaaaaaaaaaaaaanaaaaaaaaaaaaaa

SEQ ID NO: 24359 - DNA, 399 bp, Setaria italica
  Peptide Sequence Number=SeqID_90333
ttcgccaccggcttcctcctcgggttcgtgctgctgatccagccccagttcgggtggctggagcagcccttcggctccaagtccaaatccaagtacaaggcgtatcagatcatcctcctgcttcttgcactggtcttgttggctgcagggtttgctgttggattggtgatggtgttcaggggagagaacggcaacgaccactgccgctggtgccacttcctcacctgcgtgccgacgtcaagctggaagtgtgacaattgagctgaacggagattagtgacgcgttagcgtgcttgcgtcttgcagaagtgagaacatgcgcccccaccattggaaacaatgtcaagatagatacatgttgtccctcaccttccatgacattgtcaatatattgctttc

SEQ ID NO: 24360 - DNA, 419 bp, Setaria italica
  Peptide Sequence Number=SeqID_90334
gcacgagctggggcagtagctttcgtatcccttgctgcagctctcgcaggtgcggcaggagtcgacaaagtagcccacgcccaccgtgtcgccggccttgaacttggtgacgccggaggcgacatccgtcaccacgccgacgacctcgtgcccaggaacgagggggtacatggcgttgccccattcgttcttgatgacgtggaggtccgtgtggcaaagcccgcagaagagcaccttgatggtgacgtcgccatctctctgtaccctccttgagaagttgaaaggggagaggtggccggaggcatccctggcagcccagccatgcgcctccatgccttccgccattgaaaaaactccttgatcttgatctgcttcctcaagctcacttgccttctcgggttgcagtgttccaccaaata

SEQ ID NO: 24361 - DNA, 526 bp, Setaria italica
  Peptide Sequence Number=SeqID_90335
cggtggtcgaaggtgcagccgacgacggcgccgccgcacctgaacttggtcaccttaactgccacgacaccgccggccttcttgacgggcaccagcttctcgacgctctcgtccacggcgcccagccggatctcccgcaggtcgacgccggccgcggtcgccaccgtgaagtccacgccgcggccgctgcacaggagctccggctcgccgtcggcgttggccaccacctccccggccagcgggtagtacgccaccaacgtcttggccagcgcctccttgagcgccgccgcggtgggcgccgggtggaggtagcagaagaagaggctgacgtcgagcggcggcaggaggaggtcaaggttggacagcggcaggcggtgcccctgcaccggcaacgccggcgccaccgtgacggtcacgtcgtggctgccctgctctttggtggcttcgttcaccatgtagcctgggtgacgcgcccctgtgcgtgttggctaatgaggcctgagagtgaggtgttgaggaagtgtag

SEQ ID NO: 24362 - DNA, 246 bp, Setaria italica
  Peptide Sequence Number=SeqID_90336
tccctctgccagaactatgatagcgatgatagtgagtgaggacaaaccccctccttgaagccataataatactgacaaatgtctagatatagttgtgttattggatatccgaaaatgttgcagtatttgtaaaagtgatggtcgcaaaaagttcaaaattaactcagggttcataggcaaatcctttcaacttgttagtattgatataaagcatagaacatgcagtgcacaacagtgttgtatgat

SEQ ID NO: 24363 - DNA, 1495 bp, Setaria italica
  misc_feature (1438)..(1495): n is a, c, g, or t
  Peptide Sequence Number=SeqID_90337
ccttgtgttctccaacggcggctcccccccgcccctggtcgccgtcttcccgcacgcgccgctcgccccttccctctccgtctctggcgcggcggcgctgcctagggtagtcagggttccggcaagatgggtgagcgtaaggtgttgaacaagtattacccgccggacttcgacccgtcgaagatcccgcggcggcggcagcccaagaaccagcagatcaaggtgcgcatgatgctccccatgagcatccaatgcgccacctgcgggacatacatctacaagggcaccaagttcaactccagaaaggaggatgtcgtcggagagacatacttgggaatacaaatatttaggttttacttcaagtgtactaagtgctctgctgagatcactttcaaaacagaccctcagaattctgactacacagtggaatcgggggctagtcgaaattttgaaccttggcgtgaacaggatgaggcagcagacaaagaaaagaggaaacgggatgctgaggagatgggtgatgcaatgagagcattggagaatagagcaatggattcaaagcaggatatggacatacttgctgctttagaagagatgcggtccatgaagtctagacatgccggcgtctctgtcgaccagatgcttgaaattttgaaacgttcagctcatgagaaggaggaaaaagcaattgcagagctggatgaagaagatgaacaacttatcaagtcaatcacttttcgaaactccggattttatgtaaagcggatagaagatgatgatgatgacgacgacgatgatgacgatttggtcccaggccaatcgagtaaaacaataaagatcaacggatcttcagaatcagtggcaaagccaacagatgttttaagcaaaactaatggatcagagggtgccaataaagaagggagcaagagctggatgcccaaatttatagtaaaaccaaagtcgactagcgcagatcctaagagacagaagactgaatccacggctgtccaagacaacggcaaagcaccagtagcagaacaaaagagtgaacctgcaatgcaaaccaatgttctccagtccctctgccagaactatgatagcgatgatagtgagtgaggacaacccctcttgaagccataataatactggatgtccatgatgtaacattattgcaccagaggatagttggcacgtagttcccaaaaccattgtgctatcgttgtatagcttatgtaagtctgacaaatctctggcagtcaatggctcaactgcaagtattgactcttagtaatctggattgtctagatatagttgtgttattggatatccgaaaatgttacagtatttgtaaaagtgatggtcgcaaaaagttcaaaattaactcagggttcataggccaatcctttcaacttgttccctgttgcagcagcatgaaacnnnnnnnnnnnnnnnnnnnnnnnnnnnnnnnnnnnnnnnnnnnnnnnnnnnnnnnnnn

SEQ ID NO: 24364 - DNA, 291 bp, Setaria italica
  Peptide Sequence Number=SeqID_90338
agagcttcctgtttcttcccctgccttggcctgctgctgctgctcggccgacgcctcccgcgccctccgcgaccgcagcagcatggcgcgcatggccggcgtcgcgaacgacgccgcctcgttcgccgtcccttccgcccttgacgcgcccgcgatcgagttcctcgacgccccgaccgcgttgaacgccatcgccggcatcatgttggcgcgctgctgcgcgtgcatgctgacgccggcgagcatgtacgcgcgcccggactccacgtacctctcccggctcgccacgcg

SEQ ID NO: 24365 - DNA, 261 bp, Setaria italica
  Peptide Sequence Number=SeqID_90339
cgacgcagtgccatacatggagggtctcgtgggcgcgcttgtgcggcttactgcaactctgtacagcccagaagtgttgaaggtggccatggaccacaacctggcttcagtgctcactgagctgctcaacggaccagctggaatcgacgaggtgcaacgccttgctgcagtggggctcgagaacctcagttacctatccatcaaactgtctcagccgccgcaggatgagctgctgtcaaagaagaactccataataaagct

SEQ ID NO: 24366 - DNA, 1081 bp, Setaria italica
  Peptide Sequence Number=SeqID_90340
tttttttttttttgtagtattctattattaaacttctttttgtttttaacgtttattttcttacttaagttacattcatcgaacgaacgaacgaacgtgtgactacatctggtgctgtggtgcaacctcgctacgaaatgtgacggctgtgagcagctaaggacgattaattcagataatttcttcagcactcattagtacaaatcaacaaacacaggactgcaaataaactaaacaagccagatcgtgctacaagctagctacgaaccacaaagcaccataaagcagatcaactgccgtcgtcgtcctatgtaacaccgagcagagccaaggaacattcttcagctagcagtcaggcgattgagatctcatcggtacaggcagcccctgtacgccggcgtccagtagtccatcgcggtgccgtcccggtacacttccggggtccacgagacagggaccaagcagaggcccctgttcctcaggtcgtgctctgcctgatctcccttgctcgtctctgcatgctccactacccatggaaggttacccttgttcctgctcgaattcgtgtacggctcgctcagcaactgcacttgttcatgcaaaaacttgatgtacttgatcgtctcaaatagcactgatgctgtatcagtcttcccgaatggcgaaacgatctgctgcaatgcggtgatcttctctcctatcttcactttaggcacttgtggcttgggaggagatgctttggagccctcttgcttcgacttcttcacgttgctcgtcctctcctcggacggccgcttcttgcgttcactcgcagctccactgccgctgctgctactccttgccgacacaatatcctgttcttgtttactgctgtcagacagattgctggatctcaggtacggttgcaccgacgatgtcgattctgcgtttgatctgtagccactgaaagagctgagatccggcaagctcctcatgccaaaggagccgctagcctccacagctcggccctcctggcaaatcttgtcaagtcccatacccgaataatccaaactaccatgcatgccaacactagtatttgtac

SEQ ID NO: 24367 - DNA, 194 bp, Setaria italica
  Peptide Sequence Number=SeqID_90341
ttttttacattaaccatctgcattaagccattatgaagacactagacatgcagtacatcgattatcatagcacaaaggatacgaaaacactggcgcactcggaattacaaacgaaatcatgaagatgcacccctttgatccaataaacagctcccggtgagctctagctagtagcttaacacacttagtttttt

SEQ ID NO: 24368 - DNA, 217 bp, Setaria italica
  Peptide Sequence Number=SeqID_90342
agtacatctaatgtagtgcatacttgagttcccaaatccattggtttaaattctgatataacacttggttgtgtacaacagcaaggtgttgccaaacccaaagggccgctggaggcacttaggccaaagctgcagggtatcactggtagtgggctccatctaataacacattgctgcagctttggcctaagtgcctccagcggccctttgggtttgg

SEQ ID NO: 24369 - DNA, 1006 bp, Setaria italica
  misc_feature (811)..(811): n is a, c, g, or t
  misc_feature (910)..(910): n is a, c, g, or t
  Peptide Sequence Number=SeqID_90343
acaaattaccctacggacctcggcctcgctccttgcttccccctgtgctgggcaggcctgcccagctgcccggctgccgtcctgctgttcaatcaccggaggagaggagaggagatccatccgtcgcacctctcttcttttgctgcatcatgtcggagatgaaggactccactgctgctgctcttgatggaaatcctgaacctatggatcaaactgaagacaattctatgccgtcagctcagcaacaggaggaagcaatcaagaagaagtttggaggactaatgcccaaaaagccaccactcatctcgaaggatcatgagcgggcctactttgattctgctgactgggctctgggaaagcaaggtgttgccaaacccaaagggccgctggaggcacttaggccaaagctgcagccaacacgccaacaacagcagcaacgttcaaggcgctccatttacacttcgtcagaaaacgaggatggagacggtgctggtgctgaagatatgaacatcaactgaagtagcctggaatcgtgctgtgttaagttgttggagaacattgcgtgaattgaatattgattgataagaaaaatcctgatcatcaagtgttgtggtactgtttccatactagtaggttaattagttgaaccaaacatttgatattcctgcataaatacatggagtatttatttttggataaatatatgtcagttctaccaaaaaaaaacaacaacttaacacagcacgattccaggctacttcagttgatgttcatatcttcagcaccagcaccgtctccatcctcgttttcngacgaagtgtaaatggagcgccttgaacgttgctgctgttgttggcgtgttggctgcagctttggcctaagtgcctccagcggcctttgggttgcaacnccttgctttcccagagcccagtcagcagaatcaagtagccgctcatgatccttcgagatgagtggtggctttttggctattagtcctccaaacttc

SEQ ID NO: 24370 - DNA, 221 bp, Setaria italica
  Peptide Sequence Number=SeqID_90344
gccgcgtcctggaggcgtgggagcgcgcgtacgcggacgaccgctcgtgggaggcgctgcaggaggaccagtcgggcctcctccgctccatcgacaccaagaccgtcgtccacgcgcagtaccgccgccgcctcctgctccgatccgccgctgccgccgcggcccgcatccagaaggggctcatacgctacctctacatcgtcatcgacctctcccgggca

SEQ ID NO: 24371 - DNA, 334 bp, Setaria italica
  Peptide Sequence Number=SeqID_90345
cgcggggagcggagatcaaaggcggagacggaccctggggacgccacgaggaggcggcgccgccggtcgtcgacggcgacggctgatgcgccggaggagacgatagattcggtgaccccggcgtcggagaccgagaggacggcgtcgccgccgccggcgacgacgaagtgctgcgccgtggggtcccaagcgacggacgcggggccgacgccgcgtgcgggggcaaacgtgatgacgtggcgcgcgctggagggtcccggcgcgccggcggcgaggatcaggaggagcagcagatggggtaggtgggagccggccatggtggtggggagattcg

SEQ ID NO: 24372 - DNA, 395 bp, Setaria italica
  Peptide Sequence Number=SeqID_90346
gacgaccggctatagttggtattatcatattccggagctgatcatcattgttttcccttgtctgcgcgcagctcgtcagcaatggccggtttaggagcgtggagcaccgggtcctggcgaacaagaacacgacggcgagggtctccgtggcgtcgttcgtcgacgtgggggtggggagagacacgaggcggtacggccccatccaggaactcgtccacggtggcaactccccgctgtacaggagcgtcacggtggaagagttcgtcgggcacttttacaggaaaggcagcgagcgtcgtgctaggctcgactacttcaagttggagcagtagcatactcggttttctcgttagggacgggcagcagtgcatggttgctacgtgtagttcccaaat

SEQ ID NO: 24373 - DNA, 774 bp, Setaria italica
  Peptide Sequence Number=SeqID_90347
agagcccgctgcgtcggcggctgccggcgccgccgcgggccttgccgccgcggttgccgcgcaggtcgtgtggacacccgtcgacgtgatcagccagcgcctcatggttcagggcaacccctgccccgcctcccgctaccgtggcggcgtcgacgccttccgcaagattgttggttccgacggcctgcgcggcctgtaccgtggcttcggcatgtccatcctaacatacgccccctccaatgccgtgtggtgggcaacttactcactgtcacaaaagataatttggagtgggattggctgctacttgtgtgagtatggtgttggtgttcaagaaattgatcttggcgatggggattcttcactgcagccaggttgcaagaccattatggtagtgcagggagtgagtgctgcaatggctggcggcgcgtcagcgcttgtgaccatgccactggacaccatcaagaccaggatgcaggtcatggatggggaaggtgaaccaattaccgtggggaggacggtgcggaggctcatcaaggaaggtgggtgggctgcttgttacagggggcttggcccgaggtgggcatctatgtcattgtccgccaccaccatgatcaccacctatgagttcctcaagcggctctcagacaagggccaagagagcggccttgcatgacgttcgatgacaagtatagacagcagtaatcaggtgcttttgctttgtttcttagttcatttccaacactcgatatgttatgtgttgaaaatacggtgatc

SEQ ID NO: 24374 - DNA, 931 bp, Setaria italica
  Peptide Sequence Number=SeqID_90348
atgtaattaaaatagtagtgctagctgctgctcttatggaatgtcatttgttcattgatttcggttctggagaggactcttcacgaaggagatgccttgacaattctggttcatttccttggttactgcttctcttctcctcgtttttaccccacaagacaaagtagagcccaataactatcaggacagctcctatgacccctcctgtatacagttcatctccaagcatgacagcagccatgatggccaccatgacggtttgtactggctggaagatagctgtgaaaagagcaccacccctgtcaatgcaccagatctgaagagacaaggcaacgcctgaagccactagaccagcgtagaggactgtgaagagctctcctccggagtgcagcttccacttatcactgtcattctcacagaatgctgctatagccaagagttggaccagcccaaataccagcgtgagagcaagcactgacaacctggctgggtatttcttcaaaaccggtgcctgaagtaccatccatccagaccaggcaaagcaattgccgaggaggaagagacagcccactgtccaatcccatacatgatttgaagaagcaatgctgcttcccaacatatgaaatgacttgaagttcatcaatggcattcctttgtagagggtgatgatggtggctcctcctatgcttactactgtgccaatcacttttgccgtcccgtatcttttgttgatacttacttgttctagccttaggcaagcagcaaggacaaaggtgattgcagggacagtattttggatagcggaagcataggttggagacaggtaatgcaaaccaagaaggtagaatccctggttgcaggtaattccacagaaggcaagaaggaagaactggaccagcaaagagaaggtgaagggtggtctattcttctt

SEQ ID NO: 24375 - DNA, 253 bp, Setaria italica
  Peptide Sequence Number=SeqID_90349
tggtttagaatgatgagggagctaattactaaatggtctgcatctgaagatgcaactcaaaaggtcttgaagaaagctgccactgagaaaggtcagaagaggaacaagttggcagattctgttaagaggtgccatgatttggctttagaatgtggggcaagtcctgacagtgttcatgtgctacaatttttgaaaaagaatttaacagagaatttttctgcaacataccaactcctaaagcaaggctggtatt

SEQ ID NO: 24376 - DNA, 573 bp, Setaria italica
  Peptide Sequence Number=SeqID_90350
cttcaatatctattgcatgtttgtcaacaatactgtccaacagcagtactgacatacgttcgtgagaccaggttgagccaggattaacacgaggaagaaactcatgctcaaacaaatgactgaaggggccatgtccaatatcatgcaagaggcctgcaagcttcacagtttgcatgtcgatgcgatcaataccaagctcttctccctgatacgttttaagattattcatagccttcccagccaacgaataaactcctagtgaatgttcaaagcgtgtgtgaacagctccaggatagaccagatatgtaagaccaagttgttttaggtcccgcaacctctgaaattcttcagtgtccacaaactgcagagcaagcgggtcgagcgagatgctcccgtggaggttgtcgaacacctgcttcacgtaccggcgatcgcaactcccgtaccctggcctggccaccgccgccgccgccgcgggggacggagagtggaacgtcagggtggccgccggggacgccgccgccagcgcggagtccccctccggtgaggcgcaagtaactctccctgagactg

SEQ ID NO: 24377 - DNA, 143 bp, Setaria italica
  Peptide Sequence Number=SeqID_90351
accaccacggagacagccagggaggtgcagcttctcaggccatgatggccgactgcctgtgactgggaccccggcagggtcccatcgtggctcccatgctgggccggcctcagtccttcttagttctgctctttccttgcagg

SEQ ID NO: 24378 - DNA, 1009 bp, Setaria italica
  Peptide Sequence Number=SeqID_90352
ttttttttaacctaggataaggcataaggcaaacattaatttaatcattcattattacagtcccagcttttagccgtggtaatgcaaaacaaaagcgaaagtggcaacaaatagtttggtaatttcttgaaattaaataaaagtaatctgaagcagatagcctattgataaacatagacccattgctgatgaagatctccataaccgtcatcttcagggaatagcatgcacttttcataagtgacagaggatgtccttttcacgcaatagcccagaaccttgtctattgcgtgcagtgtctcccttaattaaagtgcctcaaggtatcacgcagagccgcaaggcatccgcaacggctttaaggtagcatgagccgaactggccttgacatccatcgccgcagtactccttgccgaggccacaaaacccggacgagctgcagcagtagttgttggtgcacttggcaccattggcgttgaggccacagggcctgtctacgatgcaagggccgctctggcagcgcacaccgcagaactccacgcccatgccacagtaaccatactggctgcagcaccagttgttggggcattccttgccgccggcctggcggccgcacttgatgtcggcacggcaggggccgccctggcagccggcgccgcagtactcgctgccgaagccgcacctcccattcctgctgcagcacagattgccggggcagaccgcgccgccggcttgggcgccgcacggctggttggtgtggcaggcgccgctctggcagccgtcgccgcagtagagggagccgatgccgcagtagccgtccttgctgcagcagaggttgttggggcactccatgccgtctccctgcttgccgcagcgggttggggcaattcaggagctgggcatgggcgtcggtggccatggtggctatggcaagcgcgaccacgcacaggacgaggaccttcatggctgctgctggctagggtttcagctagctttcgtcttgcctagt

SEQ ID NO: 24379 - DNA, 1103 bp, Setaria italica
  misc_feature (1040)..(1103): n is a, c, g, or t
  Peptide Sequence Number=SeqID_90353
tagagcaaaacagcacacactgtccagtctcggctagctctagcagagtggccatggcgacggcgacgacggccaggctcgtcctcctcgtggccctcgtggccggcagcgcgtgggccgtccaggcggccgcggatgagagccagaaggcgccgttgattcacgcgctgcgcccgatggtgggctccgccggtgacctcggccggcgcggcggcgtgccgtgcgacagctggcggctggcggtggaggcgtacaacaagcgcgactggcggaccgtgccggccgactgcgagggctacgtcggccactacatgctcggcgggcactaccgccgagactcccgcgttgtcgtcaacgaggccgtcgcgtacgccgagaggctcaagctcggcggcaagggcaaggaggtgtgggtgttcgacatcgacgagacgtccctctccaacctcccctactacgccacccacggcttcggcacgaagccgtacaacgcgacgagcttcaacgcgtacgtgctggaggggagcgcgccggtgctgccggagacgcagcggctgtacaacaagctcatcgcgctcggcatcaagccggtgttcctgacgggccgcaccgaggaccagagggccatcaccgttgccaacctccgccgccaaggctactccgggtggatgaagctgctgctcaagcccgtcggcttcaaggcctccgccatcggcttcaagtccggcgagcgccagaagctccaggacgcggggtacgtcatcgtcggcaacatcggcgaccagtggagcgacatcctcggtgcgccggagggggcacgcaccttcaagctgcccgacccgatctactacatcggctaagcgaagatggcctccgatccgtaacatccagcgccggctactctccctcgatccatcgcctgttttgtaatgaactgcgtgatgttacccctcggttcttaataaaccgttccatgtcgtcttttactcaacggttaggatttgagtggaataagattcgattagtcaataaaaaaaaannnnnnnnnnnnnnnnnnnnnnnnnnnnnnnnnnnnnnnnnnnnnnnnnnnnnnnnnnnnnnnn

SEQ ID NO: 24380 - DNA, 1099 bp, Setaria italica
  Peptide Sequence Number=SeqID_90354
tctattcttgttggtcggtcgtccggttgtattcctacgtccgattgttagacgcccgctggtgggctccgccggggacctcggctggcgcggcggcgtgccgtgcgacagctggcggctggccgtggagacgaacaacaagcgcgactggaggacggtgccggcaaactgcgagcgctacgtcggccactacatgctcggcgggcactaccgccgggactcccgcgtcgtcatcgacgaggccgtcgcgtacgccgaggggctccagctcgctggcaacggcaaggaggtgtgggtgttcgacatcgacgagacggccctcagcaacctcccctactacgcctccaatggctttggcacgaagccgtacgacgcgacgagcttcaacgcgtacgtgtttgcgggaagcgcgccggtgctgccggagacgcagcggctgtacaacaagctcatctctctcggcatcacgccggtgttcctgacgggccgcagagagaaccagagggccatcaccgtcgccaacctccgccgcgagggctactccggctggatgaagctcctgctcaagcccgtcgggtacaatggcaccgccatcggcttcaagtccgacgagcgccagaagctccaggacgccggctacgtcattgtcggcaacatcggcgaccagtggagcgacatcctcggcgcgccggagggggtgcgcaccttcaagctgcccgaccccctctactacatcggctaatgagctaggacccgctcgacaacaccggccgatcgagcatccaacggctctacgtcgtcaatccatcaataatctgtccatgattcaggggtttgcagtgtttagtgtttgtttgtgatgagctggtttttattttttatcacaccctcatcatgcgtcagtcccccatgtagatgcgtcagtcagttggatttcaactcgatctttaatagcgtgtttggtttagcggttgatgcggtgcggcatgggccggctcccctccaaacagaatggttccatctgaatattaattgcggaatcaagtggtctggaactagttggtaggtcgtactattccttcggttgtcgtccggtagt

SEQ ID NO: 24381 - DNA, 284 bp, Setaria italica
  Peptide Sequence Number=SeqID_90355
gtccggcgcagcactccactcagggatgacgtacggcgcgcgcggcctctgctgcctctgccgctccgctggcggcggggccgcttcctccatctcagtgtcgccggagtaggccccgctggggttcggcgcttcctccgctgaagagtcgctcacgctggggctagggccagcgctgccctccgcccccgccgcctcagcctcgggttgcggtgccggcgaggcgggctttgggggcggaggcggcggcatagaggaggacggagtagggccagcgcgcccca

SEQ ID NO: 24382 - DNA, 404 bp, Setaria italica
  misc_feature (308)..(308): n is a, c, g, or t
  Peptide Sequence Number=SeqID_90356
attgttgtggacaacggggatccttccaccaagaatcattctaaactctataaagttatatacagagggttgaggggaacattggggcttaaacaaatcataatcaggtataaatattctccaccaaacaaaggggtgtagaccactccctagctgaaaccgaaaacaattgatgagaagcttaatccaaggcacacaaatcaaccacttaacatccaaacaagagggaataatccctttgtcttgtctatgtgcaaattatcatatcagacataagcataggtatctaataatagtgtgatccccanataaaaatatgactatcagttaatcatactccgaagaaagtcaaccggtcaaacgatattatatccagcttggtacattgtgaaagagaacactga

SEQ ID NO: 24383 - DNA, 264 bp, Setaria italica
  Peptide Sequence Number=SeqID_90357
gcaggagcgtcgtcgattggtggcgccatcacgagagcagcggcggcggcggcggcggccgctgctccctctgggcgaacgggggcacggcggccgagggcggactacgcgccggcagcgagcgcgacgacgaggaccccaaggtggcggcggccaggcggcaggaggaagaccgcaagttctgggaggcgtgcctggcgtcgggctacccctgaggcttggatcgcggccagatcagtggccgcgccagtcagccggcctcag

SEQ ID NO: 24384 - DNA, 287 bp, Setaria italica
  Peptide Sequence Number=SeqID_90358
ggcgttgtactggctgcaccccaggttgagcagcgtggcctgcgggtcggcgaaggcggccggggcccacgcggaggtggctaccagggctagagctggcaagaggagcaggaagcgagccatgcggcagtgcatcgagaggtttgggagccggtaagatgcgcggggaggagatgaagcgagaaggcaccgtcgccgttgaggtttggggttttggaccgccgcgccgcgccgggcgggcgggcgtggcgttgtggggtggggcgggctaggggtggtagtgacgg

SEQ ID NO: 24385 - DNA, 447 bp, Setaria italica
  misc_feature (16)..(16): n is a, c, g, or t
  Peptide Sequence Number=SeqID_90359
ggatctggtagctttnagggagtcaacttccgaagagaggcgtgcaacatcatcactacataactcaatccgatggcatacacaagagcaaactgcaggttgcagacgtacagtagtatagcagtggcaatctgtgcgcagtgcagcagagcctgggcaatccctggagagagggtccagtggtcccggcagtagcgcacaccctcccagacggcgaggctggccagcatccccagcagagccatcggcatccggtacaggcagcatgcgaagacgaggatggcgagcgcggcgtagttgcgcgcgtagcggcggacgttctcctggacgcggagcctggccgtgggtcgaggtgggcggccaggagtaggagacagaggccgggggcccgacgaaggcggagggaccagggacgggtgggcgcggcgaggtccgcggaggagaggc

SEQ ID NO: 24386 - DNA, 531 bp, Setaria italica
  Peptide Sequence Number=SeqID_90360
gagcaagcacagatcaagaggccacacaatggggaacagcagcaacaacaagaagttgcccccctacctgctgctcgtgctgctggcgatcggcgccgccgcggtgagcgtcggcatcctgcacaagatgagggagcgccgcgtcctctccgtcctcatccaggaacacgaccagcagctcatgtccttccaagtcctcctcgagaaagaaaaggaaattaataaagagatgagaaggaaagtggacgaactggaagccaaaacatctgtcctaagcattgaaagggcagaattgaaaaacaagctcatggattcagaaactaccaccacatatcttaccaacacccagaaagaactagaagcagctcttgtggagaaagagagccatatcaaccaaatgaaagagaatacagctgcttcaaaccctgatcagacaacaagtataaaagaacttttgcagcaaaaagaagccgagcctgataaatctgaaaattctagtgattccatacctgctacaacagaagatagcta

SEQ ID NO: 24387 - DNA, 369 bp, Setaria italica
  Peptide Sequence Number=SeqID_90361
cataagttagtccatatacttcagcccctgagaagactttccatattgataccattttgcagacatactttagctggaggcttcacatcacaatttactttcaaaacgcaagtagccaaatacatcgatatgttcaattgaacactctcttattctgcaaataataatactgagatgaaggtctgccatggctgtagcacatttagagccttctaccggcgttttctgatagtgtgttctgtacttctatgagttatttatccagcctaccattcaagaattctcatcagctaaatattgctatcccctttttggacagaaagaaaaggaaatttaattaaagagtattgtagtaaggtaaagttggta

SEQ ID NO: 24388 - DNA, 488 bp, Setaria italica
  Peptide Sequence Number=SeqID_90362
aatacatcgatatgttcaattgaacactctcttattctgcaaataataatactgagatgaaggtctgccatggctgtagcacatttagagccttctaccggcgttttctgatagtgtgttctgtacttctatgagttatttatccagccaacacccagaaagaactagaagcagctcttgtggagaaaagagagccatatcaaccaaatgaaagagaatacagctgcttcaaaccctgctacaacagaagatagctccaacaacactactgcatcagagagtgaccaccaggatgagagcaatgttttgggagcaaacaacgaaaatgcaacttcagacacagtggcacttgagaaacctgaaaactctggtgactccatgcctgctacagcagaagaacaaaattccagtatcactaatgcatcagagagcagccagcaggatgagagcattgtagcgggtgcaaacaatgaaaatgcaacttctga

SEQ ID NO: 24389 - DNA, 446 bp, Setaria italica
  Peptide Sequence Number=SeqID_90363
gagtttctaatcttgctcgtatcttcctgcgaagctaaagagcagtcagtttgcttgtttggatgcaggtaacgtgggcaatattttcctgatcatcgtaccagctctttgcaaagagaagggaagcccgtttggagcccctgatgcatgtcaaacttatggactagcatattcttcactctcattggcaattggtgctgtgtttctgtggtcatttgcgtataatatcatacgtgtgacatcacaagtgtctgaaggagatggcgatgctctaacaaaccagacagcagtcttcattccaagaagtgctaccggacctgtttcagagaagttctcgacctctataatgaacgaatgcacactcccattgatatccacagacatacctcccaacaaatctaaggtcccattgttaggaagagcaaggcagtttctgccatcgatcg

SEQ ID NO: 24390 - DNA, 333 bp, Setaria italica
  Peptide Sequence Number=SeqID_90364
ggtgtattctttcttctccgggggaccgtcgctgcggctgcccgcgccgtccacgccggcgccggcgccatctcctacgccagttaacgtgacgccgacggcaaccccgccagggagacgcagaaacaaagcaggaattgttgcagcaattgcaatgcctatagttgctgcggtgctagctatcagtacggtttgtctctgtttcctgtggaggaggagaagaccagcaagagaacagacaccatcttactcaactaatgatgcggacatcgaaagcatcgattcacttcttcttgacatatcaactttacgtgctgcgaccgatcactttgc

SEQ ID NO: 24391 - DNA, 735 bp, Setaria italica
  Peptide Sequence Number=SeqID_90365
gcaaccccctgtgcaccgcgggcgggctcgccgtgctcaaggtgctcgagaaggagaagctccaggagaacgccttcgtcgtcggctcgtacctcaaggaccgcctccgtggcctccaggagaagcacgagatcatcggcgacgtgagggggacgggtttcatgctcggcgtagagctcgtgactgaccggcagctgaagacgccggcgaaagaggagatctgccacgccatggaacacatgaaagatatgggcgtcttggtggggaaaggcgggttctacgggaacgtcttcaggatcacaccccctctgtgcttcacaaaggaagatgctgacttcttcgttgaagtgatggacgttgcgctgtcgaagctctgagcctttgagcgctagctggcccagactttgcaagggatggtgtatgtatggaaggaatcttgcaaacgtttaacagctgtacctgagtttacctgaagtaactggattgcagtctatctctgtgaaatctacagtatgtaattcctggagagaagaaatcatgaaactgagattcatgaaccaaagtagacaaggttggcttgttgcaattgttttagatatgtttgccatgtaacgcgccagggatatggagcggtccagtttgaacttcctattagcaatcagttatcaatttaaaaaaaaaaacaaaaaaaaacctaaaaaaaagagaactagccaacggacgacacagggagta

SEQ ID NO: 24392 - DNA, 385 bp, Setaria italica
  misc_feature (20)..(20): n is a, c, g, or t
  Peptide Sequence Number=SeqID_90366
atggaggtggcggaatgccngtgcgatggaacatgcggtgggtagcgggatggaggtgggggcgggcaagtggtgcgctggggatggcggcgagtggtgagcagggggtgggaaatgaggtggaggtgcatggtgagctgggggtgggaaatgaggcggtgacgtgtggcgagctgggggtgggggtgaatggtgatcggagggtggaaaatgaggcggcggtgcatggtgagaaggcggtggcggtgaatgatgagtaggcggtgttggaaaatgaggcggcggtgcgtggtgagctggtggtggtggtgcatggtgatgagcgggaggtgaaaaatgaggcggtggcgtgcgatgatgagggggtggagggtggtgagcaggg

SEQ ID NO: 24393 - DNA, 520 bp, Setaria italica
  misc_feature (236)..(236): n is a, c, g, or t
  Peptide Sequence Number=SeqID_90367
ctaatcgcatttccccgcaacatccagcacataagaaatggaaatggaatgaaacaaaagatcccaaaactctaaaacaaaggcaaaacaaatagaccatatgacctgtccatgaatgaagacatataagctaagtaaaatagttatccattatacattcagttgcctttcaagagagaaaatgttgattttgttcttaagctagatccatgtcaattagattaaggattacatgngtctcagtatcaaaacaggtatcataacagaataccagctagaattcagaaagttggcatataacaacatatctagaggaatacaaatgatgtgcccagtggtaatttaatgacaggattagtttagctggcttgaagatgacaggctatgtagcattttctttaatgcatttaaacatatcaaaatcacttgggtaacactaacaatgataccaattgcaagttctctaaaaagctatatattaaacaaatgctggaagaggctatgaatattaacaacagag

SEQ ID NO: 24394 - DNA, 979 bp, Setaria italica
  misc_feature (1)..(18): n is a, c, g, or t
  Peptide Sequence Number=SeqID_90368
nnnnnnnnnnnnnnnnnntttttttacaaaaccaatagtaatgactgtaatacctgcaacttgttccatgctgccatgatgccaatgctattgacttcaagctaacaatggttgtacacgatcaactgtgatactgtgttatcgagtttttatacatcatcatccagagcaattcttagtcagagagacagacaaacagtaggcatcttgtggtgcagtgcgggccgcacggagttagcttctgccctcgctccatgaaaaccaatcagagatgctcgataattagatgacaccagctcgggccacatcagttgtcaccaatctcctatggttagaggaaatctcaacgggagtgcatcagcaggtgcctccagagtcacctctttaaacaccgcactgtatgaagcatccttgaagcccaactttctgaagagcttaagggatgccgtatttgattcactaatttttgctctgaatgtgtgaattccatatttctctactgcaaatgccatcatcagtaagattgcttcttgaccaattcccttcccacggctcttatgttcagctatcataatctctatctccgccagctgcatatcatcagggtcattcatatatatgtttacatcaccaaccatagcttcggtgtgccgattgccgggcgagaaccgtccctcgatcaactccttgtccaacactatgaatgtatgcttgaggggatcgagggtccaggagcggtggacgtcgaactcttgggcgagagagaggggctccgacgcggtggcctccagcagcgcagggtcctgcatccactcgtggtaccgcggcacgtgctctcgcaggtagggcaccagcaccgcccgctcccccagcacataccagcttcccttcccgccgctcccactctctgcctccaccgcggcggcggccgccggtgccgccccggacacctccattgcaagcacggattcgaccgtgc

SEQ ID NO: 24395 - DNA, 305 bp, Setaria italica
  Peptide Sequence Number=SeqID_90369
ctacgagaatcttaaaaagcaaggcctcgctcccccgtctgacgacgagaaggactacggggaggtgtcatccgaagaggatgaggacgccattgcctcgcgcaccgtcgaccgccgcctgttcgaggtgatccgccgtatccgcagcggtgaccccgcgatcctcgacaaagacgccaaggtttactcctcggaggaggagggcggcgagaagaaggaaggagagtccaagaagaaaaagaaggccaagaaggagaagcctttgacctcaaggacgttaacgcccgacacctgctcgaggaggg

SEQ ID NO: 24396 - DNA, 1890 bp, Setaria italica
  Peptide Sequence Number=SeqID_90370
ttaaaaacggggaaaaggtaaagtaaacaaaataaaccgaaaagaaaggaataagaaaggaacgaccaaacgccattgcctcgcgcaccgtcgaccgccgcctgttcgaggtgatccgccgtatccgcagcggtgaccccgcgatcctcgacaaagacgccaaggtttactcctcggaggaggagggcggcgagaagaaggaaggagagtccaagaagaaaaagaaggccaagaaggagaagcctttgtacctcaaggacgttaacgcccgacacctgctcgaggagggccccgagttcacagctcagaccagccggagcagcaggtacgataggatcgcctacgacgagcagcagaagaaggggctggaagccttccttgaggcacagaaggaggttttaggtgatgacgatgacgatgatttgttccatgagaagccgaaggctggagcagctgctgatgaggatgaggatgaggaggagaagcagacgaaggagctagctggtgaggtttttgggaaggatgaggagctggacgagaacgagaagttcttgaaggaatttttccttaagaggccgtaccttgactcgggtaagaagtcctatctggaggatatccaggaattgtcggacgaagaggagctcaaagatcaggaaaaatatgagtatgtttacagtttccggcatgaggaggctgaggcatcaggggcagtggtggcagaccgggtaatgggacattcaagggttgttgaagggtctgtgaggaagaaggaaagcagcaggaagcagcagcggaaaagcaaggaggagcggatggcccgggctaagcaggagcaggctgaggagctgaagcatctcaagaatttgaagaagaaagagatagcagagaagcttgagaggatccggatgattgccgggattgaaggtgatgctgcttgtaagcttggtgctgatgaccttgaggaggattttgatccagaggattatgacaagaaaatgcaggagatgtttgatgacagttactatgaggctgatgatgttgatcctgagtttggaagtggtgaggagatggatttgaagaagccagattttgataaagaagatgaattgcttgggcttcctaagggctgggatagtgaaaattgtaaagaagagtcttctgccaccgatgggaaagctacaaaagggaagatctctctcaaggacaaggtggagcttgagaaagagatggaagagtactacaagttggactatgaggacactattggagatctgaagactcggttcaagtataagaaggttaatcccaacagttttggtcttagtacctatgagatattggcatcagatgacaaggatctgaaccagtacgtttccatgaagaagctagctccttacagggagagtgaatggaagataacacatcataggaagttgagcaaggatttgatccttggtggacagaagaaagtaggaaagaaggacaaatctggcaagaaatctgggtctgccgagggcggccctagttcttcaaaaccagagaaagacaagctgccaattgaacaagagttaactgatgacaagaaaaagtctaccagaagcagacgaaggaagcgccgtaatgaggatctgaagatgtctgctgatcgactaggagcatatggaaagctaaattcgaagcgtcacaagagccattgagctttggagattcatcaaagtacatctagggaattttgcttctctttttatgcattttggagggagtgaaatctcaattaacgagagtctttgcttctactttgggagttgcaaactagtgtaatcctcgtactcatttctctgagtttgcagacagtgttgtgcacctcctttcctgaaccatataatttaa

SEQ ID NO: 24397 - DNA, 448 bp, Setaria italica
  Peptide Sequence Number=SeqID_90371
gcgagcgcccaaaaccctagctcccgcgcggcaccgcgcagatccggggctcccgcgcgatggcggaggcggaggccgcggggtcgtcgtcgtcgaggcggcggatggaggacaaggagggggcggcggcagcggcagcggcggcgatggaggcggacgcggaggcgggggccaggggaggggagaggacgaggacgaggagggcgagagcagcgactacacgtcggaggacgagggcaccgaggactaccgccgcggcgggtaccacgccgtccgcgtaggggactccttcaagcagggagcctacgtcgtgcagtccaagctcggatggggccacttctccaccgtctggctcgcctgggacaccgcccactccagatatgtggcactgaaggtgcaaaagagcgctcagcactacacggaggccggccatggatgagatcaagat

SEQ ID NO: 24398 - DNA, 127 bp, Setaria italica
  Peptide Sequence Number=SeqID_90372
tttcttctgccatgcgagccaaagctcggtcaagcaacgccgctgccggccgattcacccacgccgtcgctcctctttgcgattccacccgcccaagggtccaccagctcctcctcaacgccccacg

SEQ ID NO: 24399 - DNA, 271 bp, Setaria italica
  Peptide Sequence Number=SeqID_90373
atcctaaacccctaaactaagggtttccgcccatggcgaccacgccgccgccgccgccggcgtcgatcctcggcacgctcggcgacttcacgtcgcgggagaactgggacaagttcttcgcgctccgcggcacgggcgacagcttcgagtggtacgcggagtggcccaacctccagaccccgctcctcgccctcctcggggaccgcggcgcggcggcggaggcggatgcgggggcgtggggcgccggccccggagatcctggtgcccgcgt

SEQ ID NO: 24400 - DNA, 348 bp, Setaria italica
  Peptide Sequence Number=SeqID_90374
cgcgcgtcggagaccgccgagacgaaggccgggagctcgtccgggtccagtgcgcgcgcgatggcctcgagctcggcggccgccatggcctcggtgtcgcggtccgagagcttgaggaggcagcggttcacgcgctgcttcagcggctcgcgcctcgctgcggcgcccatggctggcgtgcgaggcacgagcggcaccgccgtgttctcgctcggctagctattggcgtgcgccgggccgggttggagttgggaggcggcaccgtggagtggcatggaagatgcctagctagtggtggagtggtgaactggtgatctctttctaataggtgccgccgtgccggtgccg

SEQ ID NO: 24401 - DNA, 435 bp, Setaria italica
  Peptide Sequence Number=SeqID_90375
cggcgcagcgcgtccaccacgccctgctccagcgcgtcgtaggtgttgaggatgaccccgcgggccttgcgcgcgttctgcgcctcgccgccgtcgaagttgagcatcacgtcgtcccggtccgtcgtcctgatgaagctggggatgtccttcaggcgcatgcccggcatgccggggatccagtcgatcgcggtgtccaggtacccgtttgtcaggtcactttcgtctttcagtggcacgtagcctcgcctgatgagttcggcgaagtggaggtaccccatgaagccgcacgcgctcgttgtccagaagaccaaggccaggatgcccatctcctcggcgaccctctgcgcgaagctcatcacgccgtcggctatgacgcagctgaccgctggcgctcggctccctggcctggcgttcagcctcgccagcaggtcc

SEQ ID NO: 24402 - DNA, 214 bp, Setaria italica
  Peptide Sequence Number=SeqID_90376
ggccgctgcgactgcgcaagtggtcaactcgcaatcgcagacgccagatcccagacgagccagcccgcttcccggcgccgtccggaagcgcacaaacgctgccgtcgctgtcgccaccgcgcccgggctcccccgcgtccacaaaaagccgccacggcccgtacgccgatggatcctggcccggcggccggtgatcccgcctgcagcccgcgcg

SEQ ID NO: 24403 - DNA, 734 bp, Setaria italica
  Peptide Sequence Number=SeqID_90377
ccgtctcccccccggtcgcgcgatgaggtggagtgccgccgctgccgccgtatccgccgcggccaccgccgccgcgtcagccgcgtgctcctccaccacggggtcctcggcgccaagcgaggaggacgccggcagcaggaggcgccgcggcgccgcggcggcggatgagaggttcgcgccgcggttcgacgggctgcgcttcatcgagaccctcgtcacggcgcaccgctgacggaccggcgcgcaagcccctggcggtcggcggcaacctgcgggttgtgattggtggtccaggtcgccggagcatttggtagctagtagccggtaaccagctgacatcgccgtcgccgttcaccttgtagttgttggttaacaaaggctactcaggcagaatgaggtactgctacttctaattaaatgtttaaactatcgtcaggtcggtgctacgctttcttttagtactgttcaagattcagttcgcgctgagctggttgttcacccgtcaatggtgtgcctgttgcttgctacgaaccaacggttcctggatggagtgaggtcccctccacggctcaggccatgtttagctcccaacttccaatttgacactatgtaaaaagaagattctccatcacatcaaacttgcggtacatgcatggagtactaaatgtagatgaaattaaaaagtaattgcacagttttgttgtaaaactactcacactgcttttgagcctaat

SEQ ID NO: 24404 - DNA, 562 bp, Setaria italica
  misc_feature (515)..(562): n is a, c, g, or t
  Peptide Sequence Number=SeqID_90378
tgccgtcgcggccgcgtccggcgccgagctcctcgcctgcgactgcgacgcccccgcgccgccggctgtcgggaggtgcgacgggctgctcctctcgcggcagcaccacgacgacgaggtccacgagggtccggcgtcgagggagaagcctcgcggcggaggcggcaacaggttcgcgccgcggttcgacgggctgcgcttcatcgagacgctcgtcacggcgcaccgctgaaaacggcgcgcgtcttttccggtggtaaattcgcgccatgattcggcgatctattgttggtggcgtttaggccaccgagttttgttaggaaaaattggggtttccctttccccttcttcttcggtgctgtgtttttcttcttcctgttgttgatgacgatgattagtgtgtccgtgtgcgtgtctgagagacatagaggattaagactataagcggcatgtaaatttgagcacatacttttaatactatgttccattattattcatacaaaaaaaaaaaaaannnnnnnnnnnnnnnnnnnnnnnnnnnnnnnnnnnnnnnnnnnnnnnn

SEQ ID NO: 24405 - DNA, 591 bp, Setaria italica
  Peptide Sequence Number=SeqID_90379
agtgtgttgtgtgcatgcataaaattttcatcttccgaaaatggagctgctcttctcatctatggagtcaaataccaaataccttgggaagtcatcgtgtttggaagtgaaagaccctgtgaatgctgagcacttgatcgccatgatgctgtaccccaagttatgaaggtgctgagggtccatgtccgagactcatttccagatagagaggtggagtcacttgagcagttgggcgggaagcttcagaatctgagcgacaagttctttggccagcacaggagtcttgtcgttgccttctagttgcgtggtgaggaaaaaaatgacgtgaatctcagaatttggctgtcttgctataaaaatgttgctgccccacctctgaagaaacaagttgcagttcggacctcgattcatgttttgcattcgatcagacgcattgttgtactatttccgactatttataaagagaaaaggtgcaagctcgaccagcagttcaaatgtacagaagtagtattaaatatgggcctaccataataagtaataactattacctatcagtgacattaataaaaaataattgaaaatgcccataat

SEQ ID NO: 24406 - DNA, 309 bp, Setaria italica
  Peptide Sequence Number=SeqID_90380
cagccacgacagtggccacgacgaggaacagcagtgcgatgtaggcgatgccgggtatgcatttcttggccctacgcatgtctttcccggagctcagtgagggtggcaccgtgcagaagagcaccacgagcaggccacaaacagcgctgtagaacaggaagcattcaggtgccactgccatgtgtccaccggtcagatctgaggatcccttcacgtagccaaggactttgccggatagccctgcaaccgatggtgccacgaccagggcagatatctcgaatcctcgatccagtgattccttgaaacgta

SEQ ID NO: 24407 - DNA, 589 bp, Setaria italica
  Peptide Sequence Number=SeqID_90381
ggagatgcacatacttgggagtctatgctggtagacaatcggaaattcttatcctttgcagtcctggagttaccatggcttttgaaattgtccaatgaggaaatgtgggatggtgaaaatcagacttcaaggacagatcataccactaggaaatatcggttttcaacaaaagtagaagcaacaattagcatcatatattggttagctgtaaatgggttggctcccaatgataatctaattatgattcttgcaaagtctataatggagcctcctgttgatgaagagttcgatgtacttggctgctcagttctcctgaatctcatggaccctttcaatggagtgaaaataatagaggaagagctaaaaagacgagaatgttatcaagaaatcagcagcgtgatgagtatagggatgttatatagttccctcaataattctaagaaagagtgttccactcctgagcagaggagaaatctgttgcttcacaaatttcatgagaagttcacctcagcagatacagatgatttagaccagattgatatggcaaatacaaccttctggagagaatggaaatcaaagttagaggagg

SEQ ID NO: 24408 - DNA, 222 bp, Setaria italica
  Peptide Sequence Number=SeqID_90382
ttcctagtattgtcggtagttttgggaacaataaattacctaatttctacaatacaaggagtagcaataagatcgaaggtcatgttcagcagtgcaagagattggtcctgcaatacgttcctctcatcctgatcaatggtgagaagttccttgagaagaatgatgtgtgcgcactcgtgcaagcgtgtccagccagtcaaaagcgtcagccagctcattctt

SEQ ID NO: 24409 - DNA, 547 bp, Setaria italica
  Peptide Sequence Number=SeqID_90383
acggaagggattccaaatccggcacgcatcgccaaccgagccaatcgcctccgcttccgttcgtctctgctcctcggtttgattgattccgtgaggttggtgataaggaaaggggagagaacgcacgccatggggtccaaagcacctctcttcctcttgctcctcttgctgcttgtggcctcaggacctgcacgagccaaggatgctggttacggcccagtctacaaggaacaaatttcttcaatcaagattcctgtccatctcaagagtagcaacccaatatgctcagcctgtgaaaacttcacgaatgaagctgtcagttatctcagtaagaagcaaacacaagataagattgtagaattccttcatgatgcttgttctcagtcattctccttggaacagaaggtgatcattttgagcatttttgttagttcttaagggaaaatacaattttgtatattgtggaaaagaaaaatacttgctggcgtgattgcaagatgaatttacatgcataaacatctggttaccttactacctgccatctgcc

SEQ ID NO: 24410 - DNA, 475 bp, Setaria italica
  misc_feature (413)..(475): n is a, c, g, or t
  Peptide Sequence Number=SeqID_90384
taagaacggaagtttagaagaataaattgctaaattactttctcatcaaggagtgcaataagatcgaaggtcatgttcagcagtgcaagagattggtcctgcaatacgttcctctcatcctgatcaatggtgagaagttccttgagaagaatgatgtgtgcgcactcgtgcaagcgtgtccagccagtcaaaagcgtcagccagctcattcttggacgagggattggtgagtgatgcatgaagattggaagattacacaaagagcaagaggatcgtgaaaatagtacagtatttgtttgtacataaggcgataaaccatggcttctgtattcttctcctcctgcattcttggaaatccttatattgtgtatacaattgtttttcatgccaatctgtcaatttcgtataacctnnnnnnnnnnnnnnnnnnnnnnnnnnnnnnnnnnnnnnnnnnnnnnnnnnnnnnnnnnnnnnn

SEQ ID NO: 24411 - DNA, 581 bp, Setaria italica
  Peptide Sequence Number=SeqID_90385
gattacggagatcaagccaagaaagaagttactagacaaaacaagtaataggcctatgcagggacaccgcccttttctctggtgtgcgaagtgacagtacttgtgtgttttgccaccacctgcttgatgaaattatgtccaaactgaaagatccagatgcggagtttgagataattcaaattctcatcaaggagtgcaataagatcgaaggtcatgttcagcagtgcaagagattggtcctgcaatacgttcctctcatcctgatcaatggtgagaagttccttgagaagaatgatgtgtgcgcactcgtgcaagcgtgtccagccagtcaaaagacgtcagccagctcattcttggacgagggattggtgagtgatgcatgaagattggaagattacacaaagagcaagaggatcgtgaaaatagtacagtatttgtttgtacataaggcgataaaccatggcttctgtattcttctcctcctgcattcttggaaatccttatattgtgtatacaaattaagtttttaaaaaaaaaaaaaacaaaaaaaaaaactaaaagaagaactagaccaaggacac

SEQ ID NO: 24412 - DNA, 1046 bp, Setaria italica
  misc_feature (998)..(1046): n is a, c, g, or t
  Peptide Sequence Number=SeqID_90386
tttaggttagttagtacgtaagttgtactagttactttgttgttgtttttgtcctacgattgattgattgattccgtagcggaaatcgtcaccattccaaagcacctttctttctcttagtcctcttgctgctcgtcgcctgggcaccatctgcacaagccagggatgctgatcacagcccaatctacaaggaacatattcctgtccatctcaggagtagcagcccactatgctcaggttgtgaaaacttcgcgagtgaagctatcagttatctcagtgagaaacaaacacaagataagatcatggaattccttcatgatgcttgttctcagtcattctccttggagcagaagtgtcttgaattgatggactcctatgcaactctcctgtttgccaagattacggagatcaagccagaagagttctgcaaacagcatggcatgtgcagggacattgcccatttatctggtgtgcgaagtgacagcacgtgtgtgttttgccaccacctgcttgatgaaattatgtccaaactgaaagatccagacgcggagtttgagatcattcaaattctcatcaaggagtgcaataagattgaaggtcatgtccagcagtgcaaaagactggtcctgcagtacattcctctcatcctggtcaatggtgagaaattcctcgagaagaacgatgtgtgcgcgcttgtacaagcttgtccagccagccgtaagaggacagccatctcagtggaggagggggtattgctcagtgatgcttgaaggttggaagaacatgtgaagtgtgtagcaatggtgcaaatagtgtgtttggtgccgtgttgtacataaggtcataaatggatgaaggatggtgtctttgtgcttctgcattcttttcattttgtatcgtaaacagtgtgttatgtaattttttaacgacatccagaaagtttcatcattagtcaaatgaaatataagattgtgcagcattttattgcataaaaaaannnnnnnnnnnnnnnnnnnnnnnnnnnnnnnnnnnnnnnnnnnnnnnnn

SEQ ID NO: 24413 - DNA, 761 bp, Setaria italica
  Peptide Sequence Number=SeqID_90387
tttttttttaaggtaactcttggagttgctctaacgggatccatcgtgtggtacagataaaaccacgcaaccacaaacgcctcaacagacaacagtcaccgtcgatgatctgaggaatgctctcggtggcacaaatgcaagggcaacacaagaagggttgggcaggggaacagaataaacagaagggtcagccagaaaccatcgactccagctcaacgcgaacggtgccttccgatgtttcctcaggagaatctctgaatattccggtacagctctttaggaataccgggggagtgctgctccgactagggcggggacgagaacagcagggaagtgttggttccaccgaacccgaaagagttggagatggccgctcgtatcggcatctttctcgcggcagccaatggcgtgaacgcgccttcgaacagcgggtccggctgctccaggttgagcgtaggcggtgcaactccatggtggatggctagcacggtgaagatcgcttccactgaaccagctgcccctagcagatggccgattgctccctttgttgaggataatgcgagatcaccagatgcagcgtgatcgccaaagatggttttgatcgcgttcgcctccacagcatcaccaagaggagttgatgttgcatgtgcattcacataatcaatttcatttgcactaagccctgactgatctaaagcccgcttcatggctaagatagcacctctaccatcatgttgtggctgagttatgtggtgcgcgtc

SEQ ID NO: 24414 - DNA, 390 bp, Setaria italica
  misc_feature (1)..(33): n is a, c, g, or t
  Peptide Sequence Number=SeqID_90388
nnnnnnnnnnnnnnnnnnnnnnnnnnnnnnnnnggttcatcaaggcgttcgcgtggttcttttcaatcatctggaataattggccggtatcaccatcactagcaggatcaatctgtcgaccgggtcggttggtaagctaccttgaccgcgacagtccgggaccaaggattacaggtacagcagggtcagaaacgcagaaccacgacaccaagctagagtcagaaactcagaatcgccgttccaaaatctagaaggccgtgtgttccagaacagagcgcgacgttgaaatcagcctgactgcctgtgattaggctggtaaatccctttaattttctcccttttgtcctctagaagcgggcggcaatttcgaccccttgcatttgcaacaaa

SEQ ID NO: 24415 - DNA, 1173 bp, Setaria italica
  Peptide Sequence Number=SeqID_90389
cctccagcccccctcctcggagcagcagcagccgccgcggccggtggtggtgctgatccacggcttcggcccggacccgacgtggcagtgggcggcgcaggcgggtccgctgtcccgccacttcgacctggtggtcccgacgctcctcttcttcggcgcctccgccacgcggggccccgctcgctccgacgccttccaggccgccgccctcgccgcgcttctcaccggcgaagcccatctccccggcgccgccgggcggaccgtgcacgtggtgggcaccagctacggcgggctcgtggcgtaccacctggcgcgggagctgcacggccgcggtgccgcgacgccggtggcggtggggaaggtggcgctgtgcgactcggacgcgtgcaagggcgccgacgacgaccgcgcgctggcggcgaggagtggcgtgggcgaggtgacggagctgctggcccccgccgacacccgggcgctgcggcggctgatggccatctgcgcccaccgccccatcaagtacatccccgagtgcctcctccgcgacatgctccggaagtacttcgcggacaagagggaggacaagatagcgctcatcaagggaatcaccaccggggaaggcttcccgctgactcctctgtcccaggaggtcttgatcatctggggcgagttcgaccagatcttccctgtcgagaaagcgcacaagatgaaagagaagcttggggagaaggcgacggtgaaggtgatcccgaacgcgggccacctgccgcagcaggaggatcccaagctcttcaaccaaatcctcctcgacttcttgctgcacccttccacctctaacggcagcgccgccgccaaatagctcgggtgcagctttctgttgcagtgttgcatgcatccggagttacgttcatggagattctgccttcttttgtacttccagctggttttggaatacagagggcaatgcagattgctgtattttagcaaggtgtaaggatgaaggatgtagccttgctatttttgttcgattcttttttttctctcaagcagttgattgttttcatgttttggattgatgtcacaaagtagctacacctaagaagggtccacatatcacttaccagtgatggggcattggaccaattttactgtacagtaagagaggtcagcatttcc

SEQ ID NO: 24416 - DNA, 298 bp, Setaria italica
  Peptide Sequence Number=SeqID_90390
agagagcaacgccatggccatctatgccacagtttgttgccgatgaaaaagccacatcctcttccaacaggcgcttgaatttcatctgtaggtcgcggcgatcggtttgaaagatttggtttcatggacatgcccctttctgaatcttttcattcttgagtggccttccatcatccagcagcccagattaacaggtgcctgaatgatatgatgtaatggcaacattttagggcaggtgctatgtgtaactttgtaacaagcttccaatcgaacgccaagattaagatgccaaaaaaaa

SEQ ID NO: 24417 - DNA, 344 bp, Setaria italica
  Peptide Sequence Number=SeqID_90391
gccgtggggccgccgttccaggcccggcgggcggtgggaagtgggggtggcggcggcccttcgtcacgcacttcgtcgggtgccagccctgtggcggctggcggaacccgatgtactcgagagagagctgcgacgacgggatgcgacgcgcgctggggttcgccgacgaccaggtgctccgcgcgtacgggttccggcacgctgcgccgctcaacgacagcgtgcgcccgctgccgttcgactaccccgcgcgtaacaattgacgcgaaggaattgggccaatgtgggccttaattgtatcctgtatctagctattatctggagtccggagatgatgggtgggg

SEQ ID NO: 24418 - DNA, 414 bp, Setaria italica
  Peptide Sequence Number=SeqID_90392
tacagcccttgcacaaaccatagtggacagtgctgggatcatcgtttcaaatcctgacatgacgctttgctacgacgagagaggtgagcatgccataattcccaaattcttgatttttctctttcttcacgagttgttcaagaccaatattggaaccgataactcttgccgcaggtgccaagtacgagctgccgaagtatgttttgagcgagccaacaaatttgatccgccaaggttgaacgttcatttggtcgctgattctcgattgtaactttcggagacaatgaacctccttttagcactgtatagtaatcttattggtcacgttgtagacctgccactgaaatcgcttatacatggcagtgctgactttgctgcatatatacaacagctccatcagttgcacttgaaggg

SEQ ID NO: 24419 - DNA, 760 bp, Setaria italica
  misc_feature (1)..(1): n is a, c, g, or t
  Peptide Sequence Number=SeqID_90393
ntaacagcctttccatttttctactctccattctagcagttactacgcttgggacttacactttggcaacgcaaattgacttaccaaaggcctcctaaattttcgcaagtgcgaagcttggtttgggccaactccccctggagttgctcttctgccgctctctgccttgcccctccacccgcccctcccgccgcgagatccggctccgctcgcagaagcttctcgaacgcccgttccatgagcgtcagatcggccgtcgccatgggctgcgctggatccactcccaaagtcgatgagaacagtaagaagctgaaaaagcccaaggcttggaagcacactcagccaattacaccagcacaactgaaacagatgcgtgatgaattctgggacacggctccgcattatggtggccaaaaagagatttgggatgctcttaaagttgctgcagaatctgatttagcccttgcacaaaccatagtggacagtgctgggatcatcgtttcaaatcctgacatgacgctttgctacgacgagagaggtgccaagtacgagctgccgaagtatgttttgagcgagccaacaaatttgatccgccaaggttgaacgttcatttggtcgctgattctcgattgtaactttcggagacaatgaacctccttttagcactgtatagtaatcttattggtcacgttgtagacctgccactgaaatcgcttatacatggcagtgctgactttgctgcatatatacaacagctcca

SEQ ID NO: 24420 - DNA, 186 bp, Setaria italica
  Peptide Sequence Number=SeqID_90394
ctaaagagttccctgagtgtaaattttgcatataccgaaactaagagtgatcgatattcaatcattttagttattgcacagtcgttcgcatccatcgtaaaagcagtaaaaaaactgtacccatttttttcaataggttttactccatgtacgggcatgtttccaagctagctgaggagatcaaga

SEQ ID NO: 24421 - DNA, 1023 bp, Setaria italica
  Peptide Sequence Number=SeqID_90395
cgatgagcgaggcgtgcccttgaagcccagcgtctcgaacagcaccggcgcgtagaacatgatgacgttgatgccggtgagctgctggaagaaggggatcatgatcgccatcgtcagctgcgcgcggtaccggcgcttcacgatgttgcgccacgggtggcggacctgccgggcctcctcgctcgccgccaccaggtccgcgtactcctcgccgatgtcctccgtgccgcggatgcggcggagcatgcgccgggcctcgtcggcgtgaccgcgctccagcagcgagttgggggtgtcgggtaggaacagggagcccagggtgatgatgccggcgggaaccgccgccagcgcaaggctcacgcgccacccgtaaccggccttgatcttgttggtgccgtagttgatcagctccgccgccaggataccgatggtgatcatcagctggaaaccgatgttgagcatgccccggaggcgagcgggagccatctcagacagatacaccggcacagactgattggcgaatccgacgccgactccgagcagtatgcggccgatgatgagcatggcgacgttctcggcggcgccgttgagcgcggcgccgatgaggaaggtgagccctccgccgaacatggaccacttgcggcccatgacgcgggtgacggtggcggcgaagaaggaggcgacgagggcggcgaggtagagcgaggaggtgaaggtctgcagcagctggttgtcgtacttgcagtactggttggtcttgacctccttcttcttgtggaacacctgcgggaagaacttctcaaggaaagggtccatggaggtcactccgcctgagataccgatatcatatccgaagatgagccctccggtggcggcgacgacgcaggtgaagaagacgaagagggtgagcttgccggggtagtccttgcccccggccgtgttcaccatggcaccgccggccatcctcgcgacgatgcaatggatcctactattatgagctggctagaggcagctagcaacaag

SEQ ID NO: 24422 - DNA, 372 bp, Setaria italica
  Peptide Sequence Number=SeqID_90396
ggaggaggagcgggcgcggcacccgtacgcgcatatcccgttcggcgtcgggccgagggcgtgcatcgggcacaagttcgcgctgcagcaggtgaagctcgccgtggtgggactctaccgccggtacgtgttccggcactcgccggcgatggagtcgcccatccagttcgacttcgacctcgtcctcgccttccgccacggcgtcaagctcagggctatcaggagggagtgaaagactggctgcgtagctaagcttgggctcacgtgtggaactgcatccgtgatggtgtcatggtttgtcttctcgtgtgtaacttgtactacttcatagcatatcaaaatatcaatagcagattgtatttgcatacaaat

SEQ ID NO: 24423 - DNA, 284 bp, Setaria italica
  Peptide Sequence Number=SeqID_90397
ggggtttggcggagttggaagtgggtcccaagtaataaacagatagcattaaaccacccataaatatcttctactactatacttgcaaagagaggactaggacaacgcaccaacatattgtgaagcgaagctaacgtattagcgaataataacatgagagcaagtaaggacccgtagcaacgcacgggcatttctgctagtgaacatttatgaataaacttgattaggttttacctcaattttttaaataaagtataattggcattaattccaacataggttta

SEQ ID NO: 24424 - DNA, 610 bp, Setaria italica
  Peptide Sequence Number=SeqID_90398
tgtattttgatttggcagggaaaggcctgactccaaacctttttatttgtagttctttagtgagctgtttctatagaaaggggaaggttgatgaggcaaatttggtgctgcaaaaacttgtagataccgacatgattccagatatcagtgcaaccagacttgagattgggaaattagcaaatgcacttgatactgttgctggtggaaatcttcattctgcaaaaataatgttgaacattgttatttttggtctatgcaaattgggaaggattgaagatgctaaaaacatgtttgcaaatctaaaaaccaagggatttgttgctgataatttcacttattctagcctcatccatggttgttccacttcaggatttgttgatgtagcttttgatctgagggatgagatgttaagtgttggtctcactccaaatatcgtaacctacaattcactcatatatggtctttgcaagtctggggagttatcaagggcagttagtctttttaagaagttgcagtcaaagggtatctcccctaatgctatcacctacaatacactaattgataaatattgtaaggatggtcacataactgaagcctttaaagttaaaac

SEQ ID NO: 24425 - DNA, 438 bp, Setaria italica
  Peptide Sequence Number=SeqID_90399
aacgcttaaaagagttcctttagatctgtgctagatttcagagttgcttgcttattactaagaaactttgagaactccataaccttttcctctccgcccttttcaggggggttgtcgataaattgggatgatgatggtgccagagcccaaaccgatgagagcactttattgggtttgtccaactgctccaaaatggctggctcttcattttcttgttactatcccaaccattagcccatgcgaattaacaagcataccgccactggcccctggatgaactgctgctgttgtctgcagcattactggcatgtccatattgtgagcctccacagtaccagaaggatgagaaagttgagttgatgggatttggacaacctttgacacaaccccagaggatagagaggagcataggcctgatcgaggtccaaaaggccatgt

SEQ ID NO: 24426 - DNA, 538 bp, Setaria italica
  Peptide Sequence Number=SeqID_90400
gaggatagagaggagcataggcctatattcaactcaattatcagttccatactaacaaaactcaaaacattcgaaatggcatgcacatcgatcaaagaagcatcaaactgcttaagcaccagattctaagatttgtcacctgatcgaggtccaaaaaggccatgtccaactacgtatacagatgatcctgctgttggacaaacaaattctggtctgattgtatttaactcaattggaacctcttccatttgaagcaatgcaacatcaagcggaccctttgagataaaaaccacactagcactgcaccacacctgtctctccgcatggtccaaacgaactgatattctcttctctcttttgaaacccaagttaaacaatgaaacctcatgtttgacagcatcgtcgttagagaatttgcattgttgtggctgcaatgatctgttttctctggcactgagatattctccagcagatgaggtttgtgcacctaaaggtgaagttcttcccaatctccaaggttccaagagatgagcatttg

SEQ ID NO: 24427 - DNA, 1371 bp, Setaria italica
  misc_feature (1)..(48): n is a, c, g, or t
  Peptide Sequence Number=SeqID_90401
nnnnnnnnnnnnnnnnnnnnnnnnnnnnnnnnnnnnnnnnnnnnnnnnttttttagtttttagatataaaaagatcacatgctttataaccgccagtattaactgggatttccaatggagtccatgccaatgtaaaatgtggcttgtagtaaaatatcaacatcccaacttgattttcttagttacgctatactatcagccttgatgaacgaacactttacactgaaggtaggatcacaggaaacctctgaaaatttccttttcagttagtacaagaaatgacagaaatactagtccttttcaactagtacttaaaaaaaccctggttccaatgtaaatccgattttttgacattcccgtaggcataatatctttctgctcacacttcaggaaatataagcccactgttctctgataacacatttctgctcggaaatctaggagcaaactatgtatatattgacacacagtgtttctcctttacaaggcctttgccctcaaaatcatagtagagcggcatgtaacaatctgggattttgttaggtaatctcaatccctcaaccagtgtttcctgtcccaaaaaagcaacttttgcactttgccatgaccagggaaatattgtccgtacccaatcctacttccatttgttgatccaatctacattttgctgggcatcatacgcttaaagagttcctttagatctgtgctagatttcagagttgcttgcttattactaagaaactttgagaactccataaccttttcctctccgcccttttcaggggggttgtcgataaattgggatgatgatggtgccagagcccaaaccgatgagagcactttattgggtttgtccaactgctccaaaatggctggctcttcattttctgaatacttgaagataatttcaagtgatttgcaggggatgctgaaattcagatgaggtattgtgcttccaccaccatgcttagcattacttgttactatcccaaccattagcccatgcgaattaacaagcataccgccactggcccctggatgaactgctgctgttgtctgcagcattactggcatgtccatattgtgagcctccacagtaccagaaggatgagaaagttgagttgatgggatttggacaacctttgacacaaccccagaggatagagaggagcataggcctgatcgaggtccaaaaaggccatgtccaactacgtatacagatgatcctgctgttggacaaacaaattctggtctgattgtatttaactcaattggaacctcttccatttgaagcaatgcaacatcaagcggaccctttgagataaaaaccacactagcactgcaccacacctgtctctccgcatggtccaa

SEQ ID NO: 24428 - DNA, 322 bp, Setaria italica
  Peptide Sequence Number=SeqID_90402
ggcgagggggaggaggagggcgagggggccgccctctgcggggtcggggtggagaaatccgagtgcggggactcgggcggcggggtgcgcgacgcgccccgcggcgtgctcgcgggagacggcggcgtgatgaagacggtgaggttcccggccctcccgatcatgggcggcggcggcggcgacggcgaggacgaggaccccatcgcctgagctcgagcgggagcttagggttggggcaggctgtggcggcgctgcggagcgcggcgtctagtggcctggggaggagagcgggagtgggggcagagaggggcgctcgtgggaa

SEQ ID NO: 24429 - DNA, 506 bp, Setaria italica
  Peptide Sequence Number=SeqID_90403
actagtaccaactacaattagactactttagtagaaaatacaaatacccaaacaaatacaagaagcttgcacgcaatgggaaacactccaaacccatatgagcaggctatttccatcatagggagaacccttgcacgctttgatgaggataacctgataccatgctttggatttggcgacgcaactactcatgatcggtcagtatttagctttaatcatgataaccagccctgtgatggcttcgagcaagcactttctcggtacagagaaatcgttccacaacttaagctggctggtccaacttcatttgcaccaatcattgagactgctattggaattgttgatagtagtggtggccagtatcatgtcctgcttaagttgtggaacgatttctctgtaccgagaagtgcttgctcgaagccatcacagggctggttatcatgattaaagctaatactgaccgatcatgagtagttgcgtcgccaaatccaaagcatggtatcagg

SEQ ID NO: 24430 - DNA, 1818 bp, Setaria italica
  Peptide Sequence Number=SeqID_90404
accgggtttggttctcctcggctcggcgttgccctcgtggccgcgccgcgcccgtggtttgcgtgcttcttggccaagagtccggcgcgcaatgcgggtcgggggagataaatctccgggatttacacgccccgtttatttatccgtctatatatctggggtttagcccgcttatttaggccagtggttggttcttcggctccttactcttctcctgcctcatttctcatcttgtttcttgcgatctcggcgaggggattcgttttccagaattgggagggaggagaccgatcgatcgggaaggaaggagggacggccatggggtcgtttttctccaaggagaatcagcccggggggcggcagccgcacgactacaatcacagccacaatcagaacaacggtgccgcgactgcgagcagagggggcaagaatcggtatgccaagatcggcgacgattaccacaccctggagcaggtcaccgatgcccttgcgcatgctggtctggagtcctcaaatctgattgttgggattgatttcacaaagagcaatgagtggacaggcaaagtgtcctacaataaccagagcttgcacgcaatgggaaacactccaaacccatatgagcaggctatttccatcatagggagaacccttgcacgctttgatgaggataacctgataccatgctttggatttggcgacgcaactactcatgatcggtcagtatttagctttaatcatgataaccagccctgtgatggcttcgagcaagcactttctcggtacagagaaatcgttccacaacttaagctggctggtccaacttcatttgcaccaatcattgagactgctattggaattgttgatagtagtggtggccagtatcatgtcctgcttataatagcagatggacaggttacacgcagcattgacacaggcaatggacggttgagcccacaggaaagggagaccatagatgccattgtgaaggctagcgattaccctctttcaattgtgcttgttggggttggtgatggaccatgggacatgatgaggcaattcgacgacaacataccttctcgggcattcgacaattttcagtttgtgaacttcacacagatcatgtctagacctatacccacaagcaaaaaggaggccgaatttgctctttcagcattgatggagatcccagaacagttcaaagcagcaatgagtctccagcttcttggcaaacgaagaggatttcccaaccggccagtgttgcctccacctgtgagcaatcagcaacagtactctggattttcagcagtcaaacagacccaatctactagctactctggctgttcagcagccaaacagacccaatctactggctatggagcagcaccgaaaaccccatcggcgcctcgagaggatagcgatataggtgatccgcagacctgtccaatctgctggaaccaagcgaagaaccttgctttcgggtgtggccatcagacgtgctccgactgcgcaaaggatctgaaggtgtgcccgatgtgccaaaaggcgatctcggtgaggctgaagctctactgaagcccttgagaaactcatcatatgcaatcaccagttgaaggagcagctagcttttgatatgaattaaatactatgaggttttgcaacttgcagtatggacgacgacgaggctcaaacttaatacactcgtgcctggttatagcagcataaacacagctgataactaaagaaacagtccatattataagcgattcagtattttcttagtcttgctgcatacatgtttatgtgtcagtcagtttcatt

SEQ ID NO: 24431 - DNA, 656 bp, Setaria italica
  Peptide Sequence Number=SeqID_90405
agtgcatggaaccgaggccgaggcccttggccgaggccgccccccttgccgtacttgtacgtcctccagcagcgcctcccggtacgacctcacggccttctcctcgccgacgaacgcctgcaccgtccggacgttgccgatcacctcctcggcaatctcgccggccttgacgtaggacttgcggacgcgggccatgaggccgatggtgacgtaggcgtaggtgccgccggcgatggcgatgagcgggacgatggcgagcgtgacgaggctgatctgccacacctgcgagaagccgatggcgaagccggccacgaaccggctgatgtagtgcatgaagttgcccaccttctcggagatggcgtcctggacgacgaggatgtcgctggtgatggcgttgatgacctcgccggtggacgcctcggtgtcgaagacggcgatgtcctggtccagcatcgcgcgcaggtaggccagtcgcatcttcgccgcctgccgctcgcccgtgtgcatccagcacgccacctcggtccacgacgagaagaggatgacgatgccgaggtacacgaagtccagcgagtacttggcgacgcggccggagacggtggtggggaagaggtaggcgaggccgatgatgttgagtagcgtagtctttgtaccta

SEQ ID NO: 24432 - DNA, 772 bp, Setaria italica
  Peptide Sequence Number=SeqID_90406
aacgtgatcgcctccgagagcttcgccgcgtggttgatctcctccatggtggcgtcttccttgccgtagagtatgttctcccggatgctcgtcgcgaacagggccggctcctggttcaccagcccgatctgcctgcgcagccacttgacgtcgagctccttgatgtcgtgcccgtcgagcaggatcgagccggaaagtggctcgtagaagcgctcgatgagggagaccacggtgctcttgccggacccgctcccgccgacgagagcgacgatcttgccggccgggaaatccaggctgaacctgtcgaggatgacgacgtccggccgtgacgggtagctgaagtgcacgctgcggaactggatgtgcccgtcgaccgccggcagcgtgcggccggtcttggagctcgccttgttcacggtgctcctctcgatcatctggaagatggggtacgccgccgtcctcgcccgcaggaacgtcgatatgttcggcgccgcctggccgagcgacaggccggcgatgacgacgttgagcatggtggtgaaggactcgccgccgttggagatccgcttgtggacgacgacgccggtgaaccagatgagcagcgcccaggagaggaagagcaccgagtgcatggaaccgaggccgaggcccttggcgaggccgcccctcttgccgtacttgtacgtcctcagcagcgcctcccggtacgacctcacggccttcttccttcgtccgtacgtaacgtccttgtctaccgttccggttacgttaa

SEQ ID NO: 24433 - DNA, 456 bp, Setaria italica
  Peptide Sequence Number=SeqID_90407
gctctacttccagcacttcgcccttcactcagtcctggtcctactgagcagattgatgattcttttagccaatggaatcatccaaacgttcagcatgctctgtcccaggttgttacaatgtcagtatcgtcatcagttttacatcctcttctcagagcttgtgccggttatctttcatcctacctttcatcacatgtgaaaacagcctgtgttttgctcgacttgtgtcgggggccattggcaccatggattcccatgataacagcaaaggtagatcttgcagttgaacttctggagggcctcctgggtatcatccaggaagctggccaatatcttgctcgttctcgagcagcgctgaagtatgttctcttggcaatttctgggcatatggatgatgtgctcacagaatataaagaagtcatgcataagttacttttcattctggagatgctagta

SEQ ID NO: 24434 - DNA, 574 bp, Setaria italica
  Peptide Sequence Number=SeqID_90408
taaaagaaacacacaattgagaaaataacgagatggaagtgtcaaatggtcattctattcacaaacgaataacccagatgtttgaatcttcaacacatttcaatactaatttaacatcagcgtctgcatctggtcagatcttattcacatccacaacacaatctgagggcttgggctttctaaaacttgccactaaattagtgcaagagttagttcctagcactaggatcataagaactaaaactggtgctacttagagtgtacaaccaacctctttgcgaccaatcgaataccagcattttgctgatagtcgtatatttccagagaaaagaaggcgtcaaccttgctccctcggacaaacagagagtccagttccgtggcatctaaattgctaaaaacaagcttctgaatgttgccactaggctccttctggcatatatctgttgtgtagatcgcagagtcaccgctgacaatagttgggatgtttaggcggacagttgggcgattcacatatccatacttcttaaccagggctctccattcagaggtgctgcctgattcctgagatgacctt

SEQ ID NO: 24435 - DNA, 2359 bp, Setaria italica
  Peptide Sequence Number=SeqID_90409
gctgctcctcttccgcaaacttatactgtggtgcaggaaaagaaaataacagatagcaaaagccatgaatcttcaagatcagaggtgcatgctgcatccaaaggattaatgagttctcaaagaacaaaccaagtagaagctaatccagcttttgcaagttgggatgctgattttcagtctgctagctcaggaagtgctgctggagactccaatcaacctgatctatttaagagctcttctgctgccgagtctttaagtttcccagatcctgtgattgccattaaccctgcagtaggtactgaaaataaaacaaatatgaaaagtgccatcctagaacatcattcagaagatttggcttcagcaagtggtacattatttgatgataacctttctaatcaaaaggttgcccctatcttggagagcaacagtggaaccattcctgaaaataatgctcttgagttcactgactcctctcttaatatgaattttgctaagagtgatcaattgcctggaagggatgatactggagtcaatgatgatgaagcttttgatgactggcaagattttgcaggaagtggtaatcagggcagcctatcaaatgcagaacatatagtggagcctttaaagagagattcatctgaaatagaaacaatagatcccttgccagtaggtaccacggaatcaactaacaatgctaatgaagactcctctgatgattggcaagcttttgcctctatttctggtcaaggaggagatatagtcaaatcggtggagggatcaacaagtggtcacggacaagatttggtgggttcatttggagagaaaatgagcagcatctcgcttgaacattcttcagaagttaatcctgttgatttgtggcctgttggcaatgataaagcccaaaacactgcagaaatgggtaaggaagcaaatgattcttttgatgattggcaagatttcgctacctctagtaaagtgcaggccatttcattgaatcaaactggagacatgatggaagtcccaaaagccagtcacaaagaaacagacatggattcatggttcatgggagattttaaggagccaggaaatactggtatagtgaatggaaataatatgttggatgattggcaaggtttcaccggttcagatcaagcacagcaaaattcatctagcacaggtggggaaatgatgagtgctttgtctgagcagcaagaaggaactgtttctgtccaatcgtgggtgcatgacagcaataaggaagctgcaaagacatcctcaacaaatgtagaaaacgacacatatgatatttggcaagattttactaaatcaggccacctgcaagaaaatgtgactaatcttgggagagaagtgactagtgtctcacctgagccagctaaacaaattgattctttggatttatggctaaccagcaacttcaaagaatctaaaagcagtgaaggtgctgggagaattgatgcctcatctgatggatggcaggattttgccagttttgatcaaactcagacaagtactaaaattcctggagaagggcacttggggaaaaatcctccaggaactgaaactttggatttatgggcctcgagtcatgctaatgaaatgaaccttgaacagataagtgacaacaatgatctatttgatgactggcaagatttccaaaattcccgtccgcagcaaacaaacctacaagttccttcagatgcttcattatttgatataccctcagcatctaggcctgatgctttaggagggctagcatctgggagtattttgcagctagcttcatctgaaaaccaaaggataaaaaggaggattctaatgaagcaaaatcagttccatctgatgaacacttgaaaagcacaaatggaatgcagcatatggacaatgttgatccactatctttgttatggccaactaataataatgctattaggaaacaagaatctgttaatacaagtgtagaacagttgcttgctcagatgcatgatctgtcctttatgctcaaagatgaactttcagtccctgataaacctgtggatcattcgaagccctgaaatgcacagcagcaaaaattgtgctctgctgctatatcagccaggcagatcgatgctgaaagcttttatgtgctggtctgctggacaaatcgcaccaaatatcacgagtgaaaaatgcaagtcgcatgaaaccttgtttttccaccaatgtgccctttatcagtacattgatcagcagaggattgtatttgtttctctgttgcttcgttgcattgagcattacagtcaggttggttccttgactgtcgctgagttgaggtagagaaaatcatgttttctgtgcctgc

SEQ ID NO: 24436 - DNA, 315 bp, Setaria italica
  Peptide Sequence Number=SeqID_90410
gaagcagagcctttgtgaaaaaatgggtaggggacttacagctcagtaccttgttattctatctacagttcgagctctttcggtaaaacagttttaagaagcttacagaaaggtgatgtgcttattatgagagtttgaaacaggatggtccctcttgagtcttgacattttaatatcctctttatgctgcttatcttagtttgctcctgctcactttggtgcaggtgtcttttgtttaggttagggaaaaataaagtgatcccatgctttctaactttgcacattgttatttcagtttctctttcaggttacttt

SEQ ID NO: 24437 - DNA, 292 bp, Setaria italica
  Peptide Sequence Number=SeqID_90411
tgccgtacaagcctgaggcttgacaaagatgtcactttgcatctacatgctaatatggaaacagatagctgcctagctagctaggggcctagctgccatccagctaacaagaaccgcctacagtgagtgagaaagggagagaatttttagtggttagcttcccggccatagggatatttacttactcccttccattacatcatgcatcttgtcatcacatacacactcccgtgtctcatctgcataacaaattactactgggcagcaatggcgtgatgtgacgtgtggatga

SEQ ID NO: 24438 - DNA, 526 bp, Setaria italica
  Peptide Sequence Number=SeqID_90412
ccggtgatctgcgccaccgagctccggtggatcctcaccccgtcggcgaatttcttgatgtcgtccagcgacggctgggaggcgccgctaaactccatctcgaggttgagcacccgcttgaacgccgggaacttcttgaacgccgagagcaccgacgagtcatcggactggatgaacacctgttgcttggtctccttgtcgtagccggccttggttagcgcgctggacaccgactccaccacaccgagacctctcttggcgagatatgaggcatgctccatttcgatcagtatgccggagacgttgctggccttggccatgtctaggaattggggcaaggtcaggaacctgccggcattcttcgatgcaggatttctcttcaggcctgcctgagcaaacggagagaaaatatcgggcttcaatgtttggatctcactccatgacagttcgaacgagaagatgccagacttgttctgaatctcatggacagtggagcttttggacacgaaagcagtggccgcggtcg

SEQ ID NO: 24439 - DNA, 332 bp, Setaria italica
  Peptide Sequence Number=SeqID_90413
caggccgccgtgcgctgcggccgcgcgcacggcgtgcgcgtccgcgtccgcagcggcgggcacgactacgagggcctctcgtaccggtccctgcagcagggcgatgtgttcggggtggtcgacctcgccggcatccgcgccatcaccgtcggctccgacgccgtgtggccgctggctcccacggcgtgggtcgagtccggcgcgacgctcggggagctctactacacggtcgccaagaacaactccgaggtcgcgttcccggccggcatctgcccgaccatcggcgtcggcggccacttcagcggcggcgggatcggcatgctgatgcgcaa

SEQ ID NO: 24440 - DNA, 521 bp, Setaria italica
  Peptide Sequence Number=SeqID_90414
cctcgtgccaagtcagacatgttaggttgtattgtaatgctttttccatcttcaagaatatgagctgtatcttgcaagccggaggactcatgaactgcacttcggcccttaactttaacagtgacagtaccaccttttgactctaaggtgttctctactttatacaaatcaaatggaagtgttctattttttctaatgcattctccaatgtaatcctctcttacaatcggtatcttcagcctccttgctttcctaacttcagcattctcattgtcgagctccccgcatgaaattaaacaatcaacgtctttggcaaccctggcatggaagttggcaccagcatgtttgagcttctgaatcgattcatccaccacttctttagattgtcctacaatagaaaaccttaatttatccaatccttcaggagagagtaacgacattcgctgagttgatttacttccagatttctcaggtgacattggtggaagaaccctctctggtttcttaaccttttgagactt

SEQ ID NO: 24441 - DNA, 270 bp, Setaria italica
  Peptide Sequence Number=SeqID_90415
gtccaaagatggttgaagattggttttagcttcaagccatctcaggtcttgtggactaatgtgtggcttgtggctaaaacaagtttttaaaaccgtcagtgatggccaataatagctatgagatccgagggacagctgtatgacctttcttgttctttttaaacttttatagagcactgggttcgttattctgtatcttgttgtgtagttgtaatttatcaggctcaatttgttggtgtccccttgaagaaaatattattggatcttaga

SEQ ID NO: 24442 - DNA, 304 bp, Setaria italica
  Peptide Sequence Number=SeqID_90416
gcgggagaaaggtgacggttgctgtggcggcggcgaagtgatcttagggtttgaggtggtggggtttggtcttttcgcaagtacggccataagctttgtccctttcctcctcctcggctccccttccccctcgccccactcggttccgtgtcgctcccgtcgctatcgcccagcgcgctgctcgcagaattcctcgcatcattcgtttgaagaaattcaaatccggggcgctcgcgtcactcccagcgacgaacccgcgcgccgattcggctccaagttgaaaatccgcatgcgctcgccatgt

SEQ ID NO: 24443 - DNA, 390 bp, Setaria italica
  Peptide Sequence Number=SeqID_90417
ccctgctgtaataactagaggtggcttgttgagaagtcttggtgtagtgcaaatgtcaaagatgaggtgcacaattggaagctcagccaatatccactcctcacaaataaaaatggggagaggctcagcatctagaggatgcaaaggacacaagaagagaatcagagtcattatgactcatgacatttgatagtgaggccataacacaccccttcctgaccagttcaagggaactgccaaccaagaggtgtgccacacagggacaagatagcattgaccatgttagcaagcagaagttagcatcatgccaccatgatgtaatctggtgtttcgttttcccgaaccttctgtgcaggagtgaggtaaagttacatttcgctctatttgctg

SEQ ID NO: 24444 - DNA, 568 bp, Setaria italica
  Peptide Sequence Number=SeqID_90418
gtactactaatcttatgccattttctgaatgctgtgcaggcaaagagggaactaccgcaactgttggctggagcttcctctgggttatcttcttcggacttgtttttgctgggttggagcatacgcagtgtacaaatacaggctgagggtaaaacaactctgcacctctcaatctcctctctaccctttggtctttacttgcaagcagtcactgatattactatgatgacgataaattagttcatgcctgaaccatatctgcgttattatttgtcatcagagttacatggattcggagatccgcgccatcatggctcagtacatgcctctggataaccaagaaggagcaaaccagcagcatcatgtcgcgcatgcggatgatatttgaaacggcgctcctttttctggagcagcataggaggagaggggcgtgcaacatctcacctgtgctgccgcaccaaggcaccagtggacatcagactttgcagaggtcaactaggcgcgaaagatacgggtggtgtgcgaggagatttgccgtaccatgtatgattctaagagagacacattc

SEQ ID NO: 24445 - DNA, 599 bp, Setaria italica
  Peptide Sequence Number=SeqID_90419
tttacttttaggttattttggttacgttttgttagttaaggtttaaacttaaattgttgtttggggtattccttgtaagtcttgacgaggagaatgaaattctaaaggcagaacaagatgctcaaattggtaatggtaaaagaggagatgtcacaatacttccgacccttgtcatcaacaacaggcaatacagaggtaaattggacaaagttgctgttctgaaagcaatctgttcaggatttgaggagacgactgagcctgctatttgtttgagcgaagaaattcaaacgaatgaatgtttggacaacaatggtggttgctggctggacaaggctaataacgttactccatcacccttgaaaccagctggacatttacacccatcaggttcttcgtttgagcaggcagagatcgtcttcccatctttagtttcctgccagaaccctccattactaatctcacacctaccaataccagaagcttcacaatgtgtatatccatcaccaacaaattttacacctttcacaatagggcactcacaaacacgcccacggaaggtatccttgcatgcagttaacgtttatttagcctttgttcca

SEQ ID NO: 24446 - DNA, 642 bp, Setaria italica
  Peptide Sequence Number=SeqID_90420
caaatttcgtacaagaaaaaatgaaacaaaaaggctataattaacaaaccaattatccaaattataactcgattgcaccttttgttttgaaattttgttcgctgacagttccatgccaggctagggacatctgcagactgctggggctgggaagtctagagaaactccaacaaaattgttatctgactcttcaagttaaaatttggcaagtaaataagaaaatcatgatccaacagagttaccattcagctctccatcctatccaacttaccaaacttcttctcccgcttgccaaatttggtaagccaacttacctcatcaaaatgtgagtccctcctgttccgctattccagctacggccgatatcgcggacaatagcggcgctatttggcttagctcacatgacgattagcggcgatgttgataatttccagtctgatggtgggattcgaacatggagctgcgggagagaccaagccggccggatgtccagggagctgcgggagaggccaagctggcggccgaacgagctgaatcggccagcagcaatgacggcactagctgtcgccgatgagtgggtgtagggcacgcgcaggccgctgcaaatctcctggctagcacacgcacccagcagagtggcca

SEQ ID NO: 24447 - DNA, 271 bp, Setaria italica
  Peptide Sequence Number=SeqID_90421
ccgggccgaagaatccgccgccgccgcctctcctcctctggtcgtcgttgttggtattatcgttgtcgtaccccggcggcgcgccgtagacgtgcacctccctggtgttgatgtacaagggggacccgcgctttttgccggcggttgttgcttcatactgctggctgctaccgtaaccgtccttctggtcgtcgccgttgttctgcccgccggcgaagtttgatctgctgcgccacatcgtccgcgatgtgtcctagtctcgtagtctcgt

SEQ ID NO: 24448 - DNA, 309 bp, Setaria italica
  Peptide Sequence Number=SeqID_90422
tccaccgctgttgtaatcgtcgctaccgccgccgttgctgttgtagcggctgtcgtcgtcggtcgcctcgtctttgctgccgctgctcttcttcagcctcgaggacccgcgctttttgccggcggttgttgcttcatactgctggctgctaccgtaaccgtccttctggtcgtcgccgttgttctgcccgccggcgaagtttgatctgctgcgccacatcgtccgcgatgtgtcctagtctcgtagtctcgtctcttctaaccccgtaggtggaggcagataataggatgccttcgatgctgaagaaga

SEQ ID NO: 24449 - DNA, 230 bp, Setaria italica
  Peptide Sequence Number=SeqID_90423
ggctcatcgcgcggatgatggtggagaggggcgtcggcgtggaggtggcgcggcgcgacgacgacggcgaggcgttcgtccgggaggacgtcgccgcggcggtgaggcgcgtgatggtggaggaggaagggaaggagctcgcggtcaacgcgaggaggctgcgggaggttgtcgtcggcgacgacggcggccggcaggagcggtacgtcgacgagctcgtggactgcatg

SEQ ID NO: 24450 - DNA, 336 bp, Setaria italica
  Peptide Sequence Number=SeqID_90424
gggacaggggttcgtgattatatacatgtggttgaccttgctgaaggacatctttttcgcattacgaaaacttttttgaaagctcatctaacataggatgtgaagcatacaaccttggaactggaaagggaacttcagtattggagatagtcaatgcatttgagaaggcttctggaaagaaaatccctttggtcatgggtcaacgccgccctggtgatgctgagattctcttttcatcgcctgcaaaagcagagagagagctccactggaaagcgaaatacggcatcacagaaatgtgcagagacctgtggaactgggctagcaagcacccctatg

SEQ ID NO: 24451 - DNA, 344 bp, Setaria italica
  Peptide Sequence Number=SeqID_90425
ggactggatactatcctacgctttcctggcacatgccaaccgcacaaatcagatagaccgagacttgaccaccaacaattccgctaatcatcgcccgataagcaccgttaactggcttaacttatactccctccgtcccgaattactatttatttttacttttctagtttttactttactagatttacagatgatgcctcgacgagccaggcgcgcgccagcaagcacaagctggaggcacgcgagtcatgctcctgccgtccgtgcgtggaacacgcgcagagcaggggaaccggcgaaaccgggcggcatacgtgcacgcaaccacgcgagcgatcgaggcg

SEQ ID NO: 24452 - DNA, 270 bp, Setaria italica
  Peptide Sequence Number=SeqID_90426
gatgagcctgccgtcggcgttgcggccggtggggcggccgaagaaggtggagccgtagggcggccgcgtcacggggtcgaagacggagtaccaggcgaacacggcggggttgttgccggtgtcggcgaaggagtcgccgaagctgaagatggagtggtatcggcggtcgacggcggaggaggtggccgcctctgctgacgccaggaggaggagggtacagactgccaacgtgatgatccgcatcttgctccggccaggagctagcgccat

SEQ ID NO: 24453 - DNA, 560 bp, Setaria italica
  Peptide Sequence Number=SeqID_90427
aaggaaagacaagacaaaagtacaattacaaagggaaaagactaattaatttagtactttgtggagcgagacaatgaggaagttggtgaaccagttgccaactactttggtattactggactagagaccactgttcttgcttacactgggaatgaagatgctaggaaatttttccttgatggtgagttgtcactggatgccattaaggactttgctgaaagttccttggaagacaagctcacaccattctacaagtctgaaccagtacctgaatctaatgatggggatgtcaaaattgttgttgggaagaatcttgatctaatagttttggatgaatcgaaagatgtccttctggagatatatgcaccttggtgtgggcactgtcaatcactggagcctatttacaacaaactagctaagcatctacgtggcattggctcccttgtgatagccaaaatggatggcactaccaatgagcatccacgtgcaaaggtctgtattactgcctttgatggttgattttggctgaccatcaattttcttaaaatggctattgcctc

SEQ ID NO: 24454 - DNA, 371 bp, Setaria italica
  Peptide Sequence Number=SeqID_90428
caatccaatcaagaagcagattttactatttgctgttgcaaataagtcttcgaaatttctgcccatctttaaggaagcagcaaagtcattcaagggaaagctattatttgtctttgtggagcgagacaatgaggaagttggtgaaccagttgccaactactttggtattactggactagagaccactgttcttgcttacactgggaatgaagatgctaggaaatttttccttgatggtgagttgtcactggatgccattaaggactttgctgaaagtttcttggaagacaagctcacaccattctacaagtctgaaccagtacctgaatctgtgagtcttgagaaattgctgatatccccgttcgactggt

SEQ ID NO: 24455 - DNA, 2040 bp, Setaria italica
  misc_feature (2002)..(2040): n is a, c, g, or t
  Peptide Sequence Number=SeqID_90429
ctgccggagagggagaggaagaggaagagccaggcagccatgtcccctcgatctctcgccgccgtcctcctgctcctcctcttcgccgccgccgcctccccctccgcccctgccaccaccaccaccaccggcggcaaggatgaggaggaggacctccagtacctcatcgacaacgccggcgacacccccgccagcgaccccgacggatggctcccggaccctgagggcgaagacgactacggcgacgacctcttccaggaccaagaccaggacctcgacctcccagcccaccaccagcagatcgacgagacccacgtcgtcgtcctcaccgccgccaacttctcctccttcctcgccgccacccgccacgtcatggtcgagttctacgccccctggtgcggccactgccaggtgctcgccccggactacgccgcagccgcgtcccacctcgccgcccaacacgcccaggccgacgtcgccctcgccaaggtcgacgccaccgaggacaccgacctcgcccagaagtacgacgtccagggattccccaccatcctcttcttcatcgacggcgtccccaaggactacaacggcgcaaggaccaaggacgccatcgtcgaatggatcaacaagaagctcggcccgggggtgcaaaacatcaccaccgtcgacgacgcccagaggatactcacaggggatgacaaggccgtcctggccttcctcgactcgctatctggtgctgacagcgatgagcttgctgctgcatcaaggctggaagataccgtcaacttttatcagacttcaagtcctgatgttgctaagcttttccacatcgacccagcagcaaagcgcccatccgtagtattgctcaagaaagaggaggagaagttgaccttctttgatggggagtttaaagcatcagctattgccgattttgtatctgcaaacaagcttcctttggttactacactaactcaggaaacttccgcttctatttttggcaatccaatcaagaagcagattttactatttgctgttgcaaataagtcttcgaaatttctgcccatctttaaggaagcagcaaagtcattcaagggaaagctattatttgtctttgtggagcgagacaatgaggaagttggtgaaccagttgccaactactttggtattactggactagagaccactgttcttgcttacactgggaatgaagatgctaggaaatttttccttgatggtgagttgtcactggatgccattaaggactttgctgaaagtttcttggaagacaagctcacaccattctacaagtctgaaccagtacctgaatctaatgatggggatgtcaaaattgttgttgggaagaatcttgatctaatagttttggatgaatcgaaagatgtccttctggagatatatgcaccttggtgtgggcactgtcaatcactggagcctatttacaacaaactagctaagcatctacgtggcattggctcccttgtgatagccaaaatggatggcactaccaatgagcatccacgtgcaaagcctgacggataccccacgattctcttctatccagctgggaagaaaagctttgagcctatcacctttgagggggaccgaaccgtcgtagagatgtacaaattcatcaagaaacatgctagcatccctttcaagttgaagcgccaagactcatcaacagcgagaactgggagcactcagacagagggtgtgaagagctctggtacaaatatgaaggatgaattgtagggcattgaactaccgcatagcttagtgctggctgttagttttggggtggttcctcttctgcaaccttccctttctggagaagggaggaggagaaatcaatactactagttgtcgatcgagtagaagagtggtcaggttgaggacttgaccagtcagatgggaaccgatcgggatataatcgaataaaaagcaaatcctttcctttaaaaaaatattgtcttgccttgtcctnnnnnnnnnnnnnnnnnnnnnnnnnnnnnnnnnnnnnnn

SEQ ID NO: 24456 - DNA, 947 bp, Setaria italica
  Peptide Sequence Number=SeqID_90430
ttttttttttttctagctaggcttcacagctcaaactcggatagcaagatgcgattcagaaacatacatatacaccagcatcgatttccaaaagcaaagagccaaagaaatccgctagctgagttaccaggcatccagtacaagtttgcatacgttggcaatccaacacaaacagggtagacacaacgctagacagccagagtcttgtaagcgtgaaaacctcaatgtcaatgattccacacgcattgcaggaatccagcaaacaacgaacatggcctacatctccaaagatacaattaatcatgtgagatcacatgcagctacgctctttctgcttcaatttattgttgagcctggatttgctgctcaagctgaagcatattctggaacttgttgcgcagatcatagaactcatttcttacaacagctaatgccatgatgcacccatctctgttcttatcctgacataactgacggaactgcatgcaagtaaacttcaccttctgagcaccaacactagcgctgctccctttgagctgatgcacgtaggcgtccaccttatcgaagtccacgacgggctgctccagcagggcggcgagctcggagatgatccggtcggcgtcgtcgcagaagagggtgacgacctcggcgacgaagcccggcgtgcccccgtcgtcctgcagcatctgcagctgctggaactggtcgtccaccagacccgaggcgaacatggaggagaggagggcgttgagctgctccctcagcgcggcggccgccatggcagcttgctcgaggagtgggaactggaagtcgggggtggcgtaggaagtaggcagagcttgtgggggggattggagggggtggtgggtaggtgagttgaatccgatccgagcggcgggcgatcgtgacgggggaatctatttataaaccgcgcgccggtgaggagg

SEQ ID NO: 24457 - DNA, 769 bp, Setaria italica
  Peptide Sequence Number=SeqID_90431
gctcattaaactgtgcttgaactcgcctcttcctagcaatgacgttgcccgattgtataggggaatttggagggtctgaacaagttagagcatctctcctttgaaatccttggtggcttacttgagctttcaaatcaagcttcttattctgcaaacttcctggacatgatgcgctaagtggtgtccgagggtttggaagaaagaggctgctagctttctctataggagagggccacattttttgtgcggcaggatcatccaaaagcacgcgcagcttcatggagtacctttcttttgtgcgatgcaattctaacctatgtctctccacagcgctgatatcttctttgatgtactgcagatcagtttgaatctcattcaactcttccagcttttgctttctaaggcagtgcaagaagactagcaatatttgcatatttgtctctgattcttgttgttccatttgccgcttcttctcagaaatcaaagtcataaggctatctaactctttaacccccatttcgtttccctgttgcaatgcatatcgaaattgatcgattggtgatgctgctttagcgatttgccgggctgatattttcttcagaaccttgtctaggaggaagttagggtagagctgagccttggtgaggtagtggcggcagcaggggcagtcgctcttgcggctgaggtgcgtgacgatgcacatgtagcagaagctgtgaccgcaggcggtgaggaaggcgtccttgatgaccgccatgcagatcgggca

SEQ ID NO: 24458 - DNA, 827 bp, Setaria italica
  Peptide Sequence Number=SeqID_90432
tccttcaattgtgatcgtcaatgcgttgtgccggaaaggattgctccagaaggttactcggtatctagagaaaatgtccaaacatggctgcgcggcaaatgttgttacctacaatgctgtcatcaatgggatctgtgagcaagggcatgtggacagtgccttggagttactaaacaacatgcaatcctatggctgtaaacctgatatcgtcacctacaacactctgctcaagggtctgtgcagcgctgagcgatgggaggatgctgaggagctaatggctaaaaatgacccagaatgattgcatcccagataatgggacattcaatactgtaattaatttcttgtgtcaaaagggattgattgtgcaggcctttgaagtctttaagcaaatgcctgagaaaggctgcaatcctaactcaatcacttacagtacaatggtaggtggacttgccaaggctggcaagctggaacaagcccttgagttgctgaatgaaatggccagcaaaggattcaactcagataaaatgtatcagttgttaactgagtatctgaatagagaggataaaattgaagaggtggttcaggcagttcataaactgcaaggtgcaggcgcaccaccccacgctgcactctacaacacagtactgttagggctttgcagaaatgggaaaacagattatgctatcgatgtgtttgctgatatggtgtcctgtggttgtatgcctgatgaattgtcgtacattatactcattgaaggtttggcatatgagggctatttgaaggaggcaagagaattgctaagcaagttgtgctctagaaatgttctt

SEQ ID NO: 24459 - DNA, 266 bp, Setaria italica
  Peptide Sequence Number=SeqID_90433
ggggtcgttagtgtgcgctcgctgcctgctgtagctctccttgagccaccttgagaagaagccatggccgttttgtctgcctttcttttcttggccaattcttttcctcccatcaaatctgagccccttcctgagaggcgggtggcgcagtggcgcctgtgccggccgccggcgcccggcggtggctacctcattccagccggcgcagccgcgcgcgtggccaggaggagcaccaggcgcaggcaggcgacagcaccaggaggcag

SEQ ID NO: 24460 - DNA, 1377 bp, Setaria italica
  misc_feature (1373)..(1377): n is a, c, g, or t
  Peptide Sequence Number=SeqID_90434
tttgaggccattgaagcggatggtcaggaacttgagctggacctatcaagtctcaatactgtaaatacagtgttcgcggctttgtttagtaaactaggtgttccaataaagaccactgtctcagcaacagttttggaggaggcattgaatgggtcagtagagatttctcagcttcagctgggcaaatctgtatgtaggaaggtagaaaagcagacagctcacttctattctgtggacataacagacaaagaagccaaaatgggcttagtgtgtagagttcattcaactgctaaaagtaaatttaagttgctgtactttgagcttgaggacaatggtggattgagccttgctttacaggaagatagtgcgaagactgggaaagttacttctgcggggatgttctttctaggttttcctgtgtaccgatttgaacaaaataattcggctgctgctgcgaaggatcctgacagcgcattctttaaaagattggatggcttccaaccatgtgaagtaaatgaactgaaagcaggaactcattatttcgctgtctatggtgataatttcttcaaaagtgcgagttatactatagaggttgtatgtgctgaacccttttctgctgaaaaggagaggctacgaagtgtggaggcaaagataattgcaaaacgatctgagctgtctaaatttgagtctgagtatagggaggttttggcaaagttcaccgagatgaccagtagatacgctcaagaaatgcaaacgattgatgagctgcttaaggaaaggaatgcaattcatgcatcctataccaacaacccgactctgcagcgtagttccagtagcagcaaagggaaatcaccatctaaagggtccaaaagtgaggatgatcaaactgtaaagaaggaaaagaaatcaaagagccagcccatggaggaatccagaagcgatgacgatgctaccaaaaataagaaggaaaagaaacctaaagatcggattcgaaggaagaagtggttcaacattcatatgaaagtggataagagaaggccctgctgagaactgaaacatgaaggaatcttcatttggtccgtggaaagatgcagcattgccttttgttgatcactcctgtgatcataccattctgtttcctgaaaagtcaggaacctcgccagtttcagaaatgatgtaaagaaatgtaccacttagttttggggactcttactgttagttggatactgttctctgtcaacctcaagctagacggttgctgatgaatgtacacgaggttttagtagtgtgtgatgttgtacattgtgaccagaatccaattcagattcattcgattagttaaaactgagacacgcaacaggggataggacgannnnn

SEQ ID NO: 24461 - DNA, 308 bp, Setaria italica
  Peptide Sequence Number=SeqID_90435
cggtggcggcaacgcacccgtcccagtcccagccatggagcgcgacggcttgtcgccgtcgctagactcggtgaagcgtgccaccgccgcaacccagacgggtagcgttggtagcggcaccagccagccaatgagctgggacttcagccactcggcgtccccccggctgagcaacgaagtcatgccgattaactatgccgccgccgcaaggtcatcggcgccgtacgcgcgtgaccacaccatctccgagagaaagcgtcgggagaaaatcagccagcgcttaatcgagctctccaccgtcatccccg

SEQ ID NO: 24462 - DNA, 416 bp, Setaria italica
  Peptide Sequence Number=SeqID_90436
cggcgtgtccatccaccacaccaccatcgcctgcggtgacgactgcatctccatacaggacggctgctccgacttattcatccgtagcgtacgctgcggcccaggccacggcatcagcatcggcgggctcggcaagggcggagcctcggcggtcgtctccggcgtcaccgttcaggacgtcaccctgaaccagaccatgaccggcctccggatcaagacctggcaggtagacgaaaccagtaagtttctgtgacccctggcaatgccaacaacgttgcctgacaacgcgagctccttgtgcgttcgacgcgaagcagggcgggtcagggtcggtcaagagcgtgcgattctccgacgtgcagatgtcggcagtgaagacggcgatcgtgatcgaccagtactactgcgaccacacg

SEQ ID NO: 24463 - DNA, 541 bp, Setaria italica
  Peptide Sequence Number=SeqID_90437
cttgcaaagatctgcataccaccacgcagcggagcaccaggtggagagtggactccttctgtatgttgtagtcagcaagggtacggccatcctcaagctgcttgccggcaaagatgagacgctgctggtccggggggatgccctccttgtcctggatcttggccttcacgttgtcgatcgtgtcagaggactcaacctcaagcgtgatggtcttgccagtgagggtcttcacaaagatctgcatctgcaaacattaagggacagaaacaagagttaaaccaccttaaacatgcagccatacaagacacagaataatgcgatactgaaactgatcaactcttgaaaagaaaatgaacatctcaaggcagagtaggctaactaaatttgacaaaaaccttgctaacaaacattataggacacaggacactgcagtattggaaccagccaattctgaactcatcaatgaacatctcattaagtacatattaacagctctgcattctatgttcaacagaatacaaaactaaacttgaagccaatc

SEQ ID NO: 24464 - DNA, 175 bp, Setaria italica
  Peptide Sequence Number=SeqID_90438
agcgacaattggcgccgcgtgcaccatgcacgccaactgctgcttcgggctcagtaacaagctctacgacctgagggaagtgctggggcagtggaggaacttcaccggcttgacgccggaggagaagagccggaagttcttatggaaggatcccaccaagtgcggttcgccggat

SEQ ID NO: 24465 - DNA, 288 bp, Setaria italica
  Peptide Sequence Number=SeqID_90439
gttcaataaaacttagcaagtaaacttcatcggtgaatatgaagcaggtccctccaaaagccataatcctcaggaacacatatggatcccaactgggatagcacaaacatggtcaggatccatgcttttctagccctgaacagccaattcctgcaagtgttcaataaaaacttgcaagctaacatcgtcggtgaaaatgacttcagatccctctgaaagctgtgttttctgtgtcacagatggattcaaccgagcaagcagaaacctggcctggctaccatgctgatt

SEQ ID NO: 24466 - DNA, 406 bp, Setaria italica
  misc_feature (22)..(22): n is a, c, g, or t
  Peptide Sequence Number=SeqID_90440
tccatgcgtccatatacaaatntcctgctttactgattaggctcgctaatcaccctgctataagtacggtctcctgctctgttcattaatttccatcactcgtcggacacctgctgttagcaatccctgctggtagcatcatccggtgccgaccaacctcgctcatggcaaggttccacctctacgtcgccgcggcctgcgccgtcgtgctcgcgctcgccgccccgaccctcgccggcgaccccgacatgctccaggacgtctgcgtcgcggacctcgcatcccgtaagtcaacgacgacttgttcgacctctgccaagattcttgtgcctgatcttgccgcggctgactgatcgatccatttgttgtgctatcagcgatcaagctgaacgggttcccgtgcaag

SEQ ID NO: 24467 - DNA, 592 bp, Setaria italica
  Peptide Sequence Number=SeqID_90441
gcgagaaggcgcttgcttgcttgcttgtcctcgcgagcgagctcgatcgttcctacccaccccgtcgtcgccttccccggctaacctgccgatcctccgtgcgcgtcacagctccgctccctaatctcccggcctataagtacgggcccctcctctgctcgtttccatcactcatcgggcacctgctgatagcaatctgctggtagcatcatccagtaacgaccgacccgccatggcaaggttccacctctacgtcgccgcggcctgcgccgtcgtgctcgcgctcgccgccccgaccctcgccggcgaccccgacatgctccaggacgtctgcgtcgcggacctcgcatccccgatcaagctgaacgggttcccgtgcaaggcgaacatctcggcggacgacttcttcttcgacggtctgaggaaccccggcaacaccaacaacccggggggggtccctggtgacggcggccaacgtggcgagcttcccgggcgtgaacacactgggcgtctccatggcgcgcatcgactacgccccgggcggccagaaacccgaccgacaacaacccaacccgacgacgaccaaccgaaa

SEQ ID NO: 24468 - DNA, 860 bp, Setaria italica
  Peptide Sequence Number=SeqID_90442
tgcaatctgctggtagcatcgtcccgctcctgagctccggccggccgatcatggcaaggatccacctctacgttgccgcggcctgcgccgtcgtgctggtgctcgccgccccgaccatcgccggcgaccctgaccatctccaggaccgatcaagatcaacgggttcacgtgcaaggcgaacgtgacggcggacgacttcttcttcccgggtctgaggtaccccggcaacaccaacaaccctgcggggtcatggtgacggcggccaacgtggagaccttcccgggcgtgaacacgctgggcgtctccctggcgcgcatccgacttcgcccccggcggccagaacccgccgacctcgagcgtgccctcgaggtcggcttcatcaccaaccccaacaagctcttcaccaagaccgtcaacaagggggacatcttcgtcttccccagggggctcgtgcacttccagcagaatagggggtactggccctgccgccgtcatcgccgccttcaacagccagctccagggcacgcaggccatcgccatgacgctcttcggcgccacgccgccggtgtccaccgacatcctggccaaggccttccggatcggcaacggggaagtcaacgccatcaaggccaagttcgcgcccaagtagaaggaagcctttggcagtctgcattcgttgatttttgaataaatcgcgcatgtcgtttgcaggatatgtatcgtgaacgctagtgattgctgcgtgcggttgaatttgttcgtcttcggtttcagggattgctgaccacgcttgtcgttgttaatttaatttgtgtgacaccaataagatcatcacttttactaaaaaaaaaaaaaaaaaa

SEQ ID NO: 24469 - DNA, 1116 bp, Setaria italica
  misc_feature (1104)..(1116): n is a, c, g, or t
  Peptide Sequence Number=SeqID_90443
cgtgtctcaccgagaagcgagaaggcgcttgcttgcttgcttgtcctcgcgagcgagctcgatcgttcctacccaccccgtcgtcgccttccccggctaacctgccgatcctccgtgcgcgtcacagctccgctccctaatctcccggcctataagtacgggcccctcctctgctcgtttccatcactcatcgggcacctgctgatagcaatctgctggtagcatcatcccgctcctgagctccggccggccgatcatggcaaggatccacctctacgttgccgcggcctgcgccgtcgtgctggtgctcgccgccccgaccatcgccggcgaccctgaccatctccaggacgtctgtgtcgctgaccgcgcatccccgatcaagctgaacgggttcccgtgcaaggcgaacatctcggcggacgacttcttcttcgacggtctgaggaaccccggcaacaccaacaacccggcggggtccctggtgacggcggccaacgtggcgagcttcccgggcgtgaacacactgggcgtctccatggcgcgcatcgactacgccccgggcggccagaacccgccgcacacccacccgcgcgccaccgagatcatcttcgtcctcgagggcaccctcgaggtcggcttcatcaccaccgccaacaagctcttcaccaagaccgtcaccaagggggacgtcttcgtcttccccagggggctcgtgcacttccagcagaacagggggtactgccctgccgccgtcatcgccgccttcaacagccagctccagggcacgcaggccatcgccatgacgctcttcggcgccacgccacccgtgtccaccgacgtcctggccaaggccttcaggatcggcaacgggaaggtggccgccatcaagggcaggtttgggcccaagtagactgccttcggccgtctgccttagtggatttctaaataaatcgtccagactgcaggatatgtatcatgactcatgagcgctagtgatctcatcacgaggtttcagtgttttacagaaaatctattatctatatcagtggcggcgccagctgaaaattttagctgggtcggagaaacaaaaaaaaaaaaaannnnnnnnnnnnn

SEQ ID NO: 24470 - DNA, 570 bp, Setaria italica
  Peptide Sequence Number=SeqID_90444
ggaaaatccttgtgtctctccaagaaattgtgataaagatagtttgaactgctccaagcatgaagatgctgttcataatggcgttcccacatgtgaaaacttcagggaggatcacgagggcgaggaagttgtttggcttcgctgtgatgtttatgacactggaatagggataccagtgaaatcattgccgttgctgtttaagaggtacatgcaagccagtgctgatcatgcaagaaaatatggtgggacagggcttggccttgcaatctgcaagcagttggtggagttgatgggtggtactctgactgtggtcagcaaagagaatgaaggatcaaaatttacatttgtgctgccttgcaaaatccctgtaaaagaggagcacagtgatgatccagatgaagtggacagttctcagagtggtttcactaacagtgatatagaaggctccttcattttcaagccacaaatgcgaacttctcttctgtcgtcaggagtttcagtaatgaacaacacaaagttattcggtgccaagcttatgtgctatgatccacctagtatattagatgattg

SEQ ID NO: 24471 - DNA, 309 bp, Setaria italica
  Peptide Sequence Number=SeqID_90445
agacaagacaaaggaaaacagcttcgccgaggaagctccacaaattgcggagactgaagccaatcgatggagcggcaacccaaaaaagggctccccgcggctccttctccatccctgcatctacccaagctacccttcaagtcggcaaaaatctcacctggaactgccatccatcgcagcccggtgtccacgcctccgacgcggctgtagatgcccggatggcggctcctcatcggacggtgctggtgcgagcatgccacccgcctttcccgcgtggcccagcagctcctcgtcggccgctagatgcag

SEQ ID NO: 24472 - DNA, 810 bp, Setaria italica
  Peptide Sequence Number=SeqID_90446
ggaccactgggttcatcttccttgaccatatctgtgaaatctgcatcccgttggaagggtaattcaaggcccatttctttgagaaattccttcatatcaatctggaaagatactgtgaaattgggcaccctgatatccacatgacacttctctgttggcaaattttgttctaagaataaaggttcagcaaaaatttcttagttaattcaaacaagccatcatgagtatcaggcaggaagatatacatggagaacttccgttcagtccatcctcgctgataaggaagcttaatgactttaaatccctcatgaactgcaaaaggtcgagttctatcatattccacaaaagggacatcaacacaagttccatcaagacaatagaacttttgtgctgtagtgctccttatatcagcccgattaagccaccttcccctaaaatatagcgcgctgccaagaacaagtcctgtattctggtcaattgatacatccggttggagcgaggtaacagtacatttcgtggactcttggacccacaagttaatttgtttcgcagcatcttctggcttgttcaagaagtcggccgtcctcgccgcggagcagtacacattgcgggcagtctccacgaaccccggggacagcctcgtcgaagcgtcggcccagactcctcccgcgaacgccagctgcgggccgccggacggggaccggtccctgagcacccgcttcaccacacgcgacgccacgttcgccgcgtccgctgcggcaccctttcccccgccaccgcacccaagcacctggaggagctgcctccgcg

SEQ ID NO: 24473 - DNA, 661 bp, Setaria italica
  Peptide Sequence Number=SeqID_90447
agctaaacaatctaaaacctttctgggaatgttctgcttgtcaaaatatatggtggttgttgcattgtaccttgcaagcaatgtgattgggatggcactattttttgtcccagctgtcactaactacatagaaacatctacttggcgaatttgcagtatgctgtcatggtggtgtcagccacaattgtatgttggacggggaatgcaagaaggactagtacctttactgaagtacacagctttttggatgattctcttgtcaagtaaatttttattcagctactactttgagattaagcctcttgtgggacctacaaaagaaattatgaagatcaatgtgaacaaatatgagtggcatgagttcttcccacaagtcaagagtaatgctggcgctattcttgctgtatggacccctataattcttgtctatttcatggacacacagatatggtattctgtattctgtactattttcggtggtatgtgtggtattatccatcatcttggtgagattcggacaatgggaatggtgagaagtcggttttctaccttaccagaagccttcaatatgtctcttgttcctcctgcaatgccaaaagagaaaaagggagtgttttctagtttcttggagaagaaaatattcaagaaagtaggtaaagct

SEQ ID NO: 24474 - DNA, 456 bp, Setaria italica
  Peptide Sequence Number=SeqID_90448
gacaaaatggaaaatttgatgccgttcaccacaatcagggtttttgtaaaaataactggctcatctaacagctggattcctacattccagcacaatgccccagcaaactgacagatcatgtttggtggaggaaagaggagatacaaagagttagagaaggcccctgttcctttgaggtggttcagagtcaagtgtcgcacagtcaatgtagactcttgtttaatctgtgttagtgaggtggctactgatgcatttgatgatgatgctgcctgctaattatggaaggtttgctcgctgttgtgatgaatgcttgggcagttcgtcggactgctgcttaaacatttcgttgtaggagtcctggatgccttgtaaattggttacatgttaatagatgtatggtttgagcatattgcaaataattatgatctggatttctgcactttctgctgtcaaatt

SEQ ID NO: 24475 - DNA, 554 bp, Setaria italica
  Peptide Sequence Number=SeqID_90449
cattggtgatggctacagcagtgcagacacctttgccgctccctgacatgtcctccccaagcagcaacttggtatacttctccttcatcagctccatctcttcatcctccattgacttctcatcgacaacttgttgcagtttcttcatgctcatcttgctcattgacggtgagaggcgcgatggtgctgcccccttgtatgatgctgtccggctcatgctctggctgtgtccccgtggtgacgccgcatgtcgctcctgctcatcgccgctgtcggagaacgaggcgacgcgaaacaggggacgcgagtagttgcgatcgtagctatggctgtggaagcccgggaaccctgaaccatcgctcattgctgttcttgttcagacaatctgcaggagagatgagttgcacaagaatggcgatgaagcgccaagagcagaaggccttgtatgttgacctcttggtgatttggatgagggttgttatattacaactatggagctagtctggcgtgccaagacaggtcgtttcaaagatgttaattgtatggcatgtgag

SEQ ID NO: 24476 - DNA, 380 bp, Setaria italica
  Peptide Sequence Number=SeqID_90450
gccatccataagctcagtcactctttcctgcgcttccgaagggcggcattatgaaacagccttctatcgtcttccatcttcaccactgtagctaccgctcttagagctaacacccaatacaaggttagggaataaggaggcagcatcaacttcttcattgcaaatgctgcaccttgcctaattagataaagtaaaaaaaaatggagaaagggaaacatgaactgggatgtttactctaacccaaaataccagaaaccatatccagtttcttatgacaaatgtcacttcagatcataatgactgcctcagttgaattaacaaaaatatgccagtgcagagaattttgcttgtaagggattgccgtactaacttacattact

SEQ ID NO: 24477 - DNA, 1074 bp, Setaria italica
  Peptide Sequence Number=SeqID_90451
gacctttttttcttttccgttttttttctaaaaaaggtgtagtgacttggatggcaagtctaagtttgtgggaggccatggacccaaacaaacaaggaacatgtggagtagagcatcgggttacgtacaaggctctgcatctacagtacatccatcctcccttgcatttgcatgcctacaacaaaacagaatatcatggaaaatcccatgtacgcctgcacaaaaaccctacttcatcaccggcccatgtccttcattgtttgttctgcaggaatgccagggcctgctgcgatctcatctcggcctgtgcttgcgcttgcgcttgcgcttgcacctgcggctcccccgctttcttcagcgacctgtactgcagccgtatgctttctccactatcaactgccttcacaaggtaccagccattcaggcactgcgatgtgatcactgcctccttcccaacaaatttatcaggcgtccttttgtttcccatgatcaggactctgtcgcccaccgtaaacgggtactgcacccccttgaatgctctggagttttcagcatctaaccccacctcactattctccttgctacttccgtttcgtgcatccataagctcagtcacttctttcctgcgcttccgaagggcggcattatgaaacagccttctatcgtcttccatcttcaccactgtagctaccgctcttagagcaaggttagggaataaggaggcagcatcaacttcttcattgcaaatgctgcaccttgccatttcaagaactttcttcagcatgaggccaccaaaagagtgtccacatgagagaaccatagcatcttcaagaaaagccccagacaaaggatctgagagtacacttctgagggatggttcattaacaaagttcccctgtgattcacaaggtgcttctgagtgatgggaaacaatatgctcttccgcacgcaaatcatccataaattggcatgcggatatgggctggtagatctgtggtatgcaatgtgaagcagctagaaaattaggaagaagacaagtccaaatatagcatcggcacgaggcatcagcctaaa

SEQ ID NO: 24478 - DNA, 635 bp, Setaria italica
  Peptide Sequence Number=SeqID_90452
gtttctaattggtgatagaaaagcaagtgcaaaaggcaagcaagatttttttctagacattgcgtagcaagtctgcaaatggttcgagcactgctactgaatctccatctagtctggttgatgatcagcagaactcttgtcccgagtttattgaaaatggaagcagttcctgtgaagaagcatattcttgtgagggatctcagcaacacttgtctgacaatgaggaaatcattccgccttcagaatctcataatgttttagatgagggatctctggggattcaagttgacgacagggatgccagctctttaccagtatttgctggcacagaagatttagcttccaagaagccccagccagacaacattgaagatgttctgcctgtgaaacctgcctatataaacgatagttccgtgatttccaactctgttgacaatgaagctgatttgccactggagggagcccatcctgctcatgagttcgaacacactggagcaggggaggagaaaccctgtcctgctcaagagttcgagtccattggggcaggtgaggaggaagagttgaacctcctgagatctatgggctgggatgagaacgaagtagttcaacctcttcagcaagaggagattgctgat

SEQ ID NO: 24479 - DNA, 1185 bp, Setaria italica
  misc_feature (1156)..(1156): n is a, c, g, or t
  Peptide Sequence Number=SeqID_90453
gctctctcttgttcaaactgacccttcccgatcacaacgtgctctagtttcagcttcccaaaagctttcttgatgatccgtccctcaacagaatttgatgttgccagcctatatacatgcaccgggcgtgtttgaccaatccggtggcatctgtccatggcctgcagatccatctgaggattccagtcactgtcatatagaatacatgtatcagcagaagtaaggttgataccaagcccaccagcacgtgtgctcagaatgaagacatttagattgctgttcacgtcattgaattctgctatctgccgccgcctctcttccaacttgacaccaccatcaattctgcaaacctcgagaccttttgaatccaagtaatactccataatgtccaaaacttttgtccattgtgaaaatattagaaccttgtgctttcgtgcaagtaaggaagttagtaacctgtccagaagctgaaatttgccgcattgctctagaagcttatcaacaggtggatacaggcttgttgttccaaatgcagcttccaaaagatcaggatggctgcaattcttcctcagttgaataaatagactatttagctttgccttaatgccaggcctccgcaacacaatatctgattcttcattcaagtagacatcaaatgttttctcaactaagtgatcctggattcgcttctgaagctcagtcatgttagcataaatgattatctctttctttcgtggaagcatctgctcgacatcctctttcatccgcctaagaaggaatggacgcagaatggcatgaagttttgaaacaacatggacccttcttttctcctcagtttcttctttttcttcacttccttttgcagaaaaatcaaaccatgattcaaattcctggtgtgatgcgaatatatcaggcaaaatgaagttcaatagcgaccacagctctgcaagattgttctgaaggggtgtcccagtcaaaaggagcttattatccattggtatacgctttatctcccttagcaatttacacttcgaatttttcaaccgatgcccctcatccacaacaacatacttccacttatagtgagcaagaaattttgcatctgacatggccatctcatatgaagtcactactataaggaaaatcagggctaacngctagtttttaatttaggcatgtaatttt

SEQ ID NO: 24480 - DNA, 474 bp, Setaria italica
  Peptide Sequence Number=SeqID_90454
actgcaataacattaacaccttctggcagtcccatgggaagcaacatctcgggcctaaacatgcctgaaaatttccatgcttggttcagtatatggattgtaggcaggcttgaaccgcagctttgacatgcctaggcttgagaagaaatcttctaatacaccaatcagatcaccaagcgtcaaaccataatcacagataaggccttctatctggtggaattcagcaagatgagtccggtcaaccgcttcatttctgaaaacccggtcaatggagtaatatctctttggagcaaaaggtttctcttgagcaagcttgtacaaaattcttgtggaaacagcagttgtatgagtacgaagaagatttttctctgcttcatcccgtttccagtcataaccatatcctttggagccataagacccccaagaattaggtagaaacttagactttaactttactacaaagaataagtacta

SEQ ID NO: 24481 - DNA, 1908 bp, Setaria italica
  misc_feature (1)..(3): n is a, c, g, or t
  Peptide Sequence Number=SeqID_90455
nnnttttttttttagtaccagccaccacgattctgcagattttaaaaaagtagggaaacggctgcttctgttcacaaggattggacttacaacttatgacatgtagcaaaacattcagaaagattgaacataaacaaccttttcttttgggtaccaatcccgtatcattcaaaattgttagtacacaaactaccagactttcaacacaacaatcttcccgcttcaatctacaaatggatttgttacattttgcgatttggacctcctctgtcaaaaagtacaagtgctgggatttcagcttcaaggaagtacagcagcaaaaaaggccttgctgcgttccccaactcattatagtcccaaacggcatagtgggttgctcttgatgaggttgaaatcaacctttggtccaaacaggtccctaatgttgtcaattccatatagaatcatcgttggcctttcaagcgaaagaccccatgcaataacattaacaccttctggcagtcccatgggaagcaacatctcgggcctaaacatgcctgaattaccaacttcaacccatttctttaaaccatcatggtaactgaaaatttccatgcttggttcagtatatggattgtaggcaggcttgaaccgcagctttgacatgcctaggcttgagaagaaatcttctaatacaccaatcagatcaccaagcgtcaaaccataatcacagataaggccttctatctggtggaattcagcaagatgagtccggtcaaccgcttcatttctgaaaacccggtcaatggagtaatatctctttggagcaaaaggtttctcttgagcaagcttgtacaaaattcttgtggaaacagcagttgtatgagtacgaagaagatttttctctgcttcatcccgtttccagtcataaccatatcctttggagccatagcccccagattggtgaacttgctttactttctcaagatagtcttcaggcagctgacttgtagctgcaggggctttcaggaaaaatgtatcatgtgaatcccgagcaggatgctgttgtggctggaacagtgcatcgaaattccagaagctgctttcaacgaaattgttggttggcatctcagtgaatcccatcataatgaatatgttctcaattgcctcacgaacctccatcaaaggctgcacataacctttggcaataggttgtccttgagctccataattataatctttgaattcaaggtccttccagtcaccactcctaaggtgttctgttgtcacatcagttgccaaagtttttctcttcacaacaaactcaggccctttctttagtgagtaccaaatcgatttctctttcgtaataagctttcttctcttcaaatcatcaatcactttatcaggaacaacctcgccattctctagccttttaagctgctcttgcaactcatcctcgacattctcaacctttctaaggaccaagtccttgttccccttctcgaaccctatccacttgttcctcgcagcagccttcatgcccacatcaaaagcatcccccaatttcgccttgagtgcgtccttggaggcgccctccggtgggatggcggcgacgagctgcgcctcgggggatcccctggcggcgtagcccttggcctcgtcggtgagcacccaagtctccttgatgatatcggtgctgtcgacgatgcggaaagctgagaggctcttgatgacgccctcgagctcgaggtgggagacgccgagggaggaggcgaaggcgcgagagtcggggacctcgcccgtggagttgaggtgggcaaggaggccagcctccacgtcggccgccggcgacttctcagccatggcgcaaggaagtggtagcggcggcggcggcgaggcttccgagagtcagatgacaggaagggc

SEQ ID NO: 24482 - DNA, 289 bp, Setaria italica
  Peptide Sequence Number=SeqID_90456
gggagaatagggggaaatctgacttatagcctagcaatagatccaaatctgattaaataaagcagtaaaaggactaacgaaccttttagaaatatataaccatatttttccacctgcaactgaaaggaaatgaaagaaaaaagaacggcaagaatccacatgccttgctagcagaatcatctacgtacttctgcaggccaaatctggaagatcgggtaggagaacgagggggcaacgggcacattgtccgcggccagacggtttacagacccgcacccgcgaggcaaaa

SEQ ID NO: 24483 - DNA, 278 bp, Setaria italica
  Peptide Sequence Number=SeqID_90457
ggcgcggacggtgtcagccctgtctgtggagcggatgcggagcttgtgggcggccgcgacggcgggggagagtccgcaggagatcaggtaggagacggtgatggggcagggctcggagacggtggcgcccgcgagggcagctgcggagtagccgtgggaggggggggcgtcgatggggttgggccagctggggtttgtgccggcggcggagggaatttgccggaggcggaggagccgccgccggcagatggaggcgaacatgtcaggtgcggcctgct

SEQ ID NO: 24484 - DNA, 242 bp, Setaria italica
  Peptide Sequence Number=SeqID_90458
cggatgttaaagacggcgatgatagagccttcgacttccatggcccttcaaactttttgatgctatcaccatcagcaactcgaattttggaatctgccgaagtgattataatcctattggaatcacttgtacaaaacttcagactgttgatccgactggcagatgactttttcttcccttgcacaaacaattccttctctagcttgatgttttcacctgattgattgtagaagcggcatgct

SEQ ID NO: 24485 - DNA, 865 bp, Setaria italica
  Peptide Sequence Number=SeqID_90459
cactgtccaggcaggacacaacctcttgcatggttggcctcaggcaaggattgtgattgatacacttgcatgctacttcaagcacattcagcatttggtcatcatgtcctcttcctctaagtgcaggatccaagacctcaacatcctttccctgagaccgtatctcccttacccattggacaagttcctttgacttggtcaagacctggacaggcctcttccctgtgagcagctcaagcaagaccactccaaaactgtatatatcacctctcagcgtggccacccatgcctgcccatactcaggtggaatgtaaccaagagtgcctacgagctcagtcgtgacatgtgtgtcataaggaaggatcaatctggcgaggccaaaatcagcaacataagcattgaattctctgtcaagtaagatgttgctggatttgacgtcacggtgaataatgtgaggcttgcaggtgttgtggatataagaaaggccgcggcctgctccctgtgcaatcttgagtcttattggccaatcgagaaatgagttggggtcatccttgttgtgaagccaatcatctaggctcccattctccatgaaagaatatatgaggagccttgagcttccctggatgcagtaaccccatagtggcacaagattctcatgctgtgccatggagagtgcttcaacctctgctttgaattctctttccatcagacacatttcaccattgagtttcttgatcgcaagcttggatccacagggcagctcagccctatagactagaccattacctccacagccgataatgttctgctgatcaaaattatttgtggcatttaagatatcactgaatgtgagtctttgtttgta

SEQ ID NO: 24486 - DNA, 254 bp, Setaria italica
  Peptide Sequence Number=SeqID_90460
agtagggtaggaaggaaggtggagaatgggcaggaggagaaggaggaggtggggaaggggaagaaggggtcgtcgccggcgtggaggtcgaggaggcggaggaggaattgatcgcggctcatggtgggcggtggcggtggacgcgagctgctgctggagagggatggggagtgaggagtgaaaccgcggcgaggcgagatgttgttggattcggagggggaagcgatgacggcgaccgtgatgggaagtgactg

SEQ ID NO: 24487 - DNA, 139 bp, Setaria italica
  Peptide Sequence Number=SeqID_90461
tataaagagatgaatgatgagttggctaagtatttaaaagatattagcttacttgaaagtcttgacggtagaaaagtaaaaggcggcaagcttggtaagtactttgctcaaatctctggaaatttgattggtggtacaa

SEQ ID NO: 24488 - DNA, 365 bp, Setaria italica
  Peptide Sequence Number=SeqID_90462
ggcaagttcgagaaagccatgagggtttgggagcaattggtgagggatccaggtgcgagtcccaaccttgccacttacaaagtgatgcttgatggcctgtgcaagcttgggaggtttaaggaggcaggggtggtatggagtaggatggtggctaataatcaccaaccggatacagttactcatggtatcttgattcatgggttgtgccgatctggggatgtggatggtgcagcacgggtttactctgagatggtcaaggctgggcttattcttgatgttgccgtgtataattccctcattaaggggttctgtgaagtggggaaaacaggtgaagcttggaaattctggggattccgtagggtttt

SEQ ID NO: 24489 - DNA, 305 bp, Setaria italica
  misc_feature (24)..(24): n is a, c, g, or t
  Peptide Sequence Number=SeqID_90463
acgaaggtcaaagattcctgttgnaccttggagggcaatgagtatctggagcttcattagaccctactataccatagttttcattcttcctttcccatgcttttgctctactaatagcagggagacattattcgggtccacactggactctggtttcatttggttgcaagtgtggtgcacagtattgtgtttgcaccccgtgatcaaccgggagtgagattcataggtagggatcgaaagagagggcaggaggcacggtcctcctatgtggcttggcaatttgcatggcagattttgaatttgat

SEQ ID NO: 24490 - DNA, 816 bp, Setaria italica
  Peptide Sequence Number=SeqID_90464
gggaatggtttggttcattgaagaataagagtactacaatggagctacatgttgtcacatctcagtgcaagcaaaccttcattgaaggggagaggcatggaaccttcaactgggaagggagcctggatcagttgggaagtgatgttgggaacaagcacagggaactcttcacccaactggaggcagctcagctcaagatagaagacatcaattcaaaaagatcaaggcttctttcagaaatcagcaaagtcaaacagattctagagcaggagaaaaacatatttgctggctttcctgctgcgctacagcagatggatatgaagtcattggaggaggaatataaagctctgcaaggtgataaagctgtagaaattgagtacttccactctcttgaagaaactattagcggaatgaagggcatttctgaacctgttaaatgctgttgtggcctggagtagaaggtagaactgggtggtgaaaccatggatctaagctaaacttttacaattgataggtatgagaaacattagctgataatgtacgagactacgaaggtcaaagattcctgttgcaccttggagggcaatgagtatctggagcttcattagaccctactataccatagttttcattcttcctttcccatgcttttgctctactaatagcagggagacattattcgggtccacactggactctggtttcatttggttgcaagtgtggtgcacagtattgtgtttgcaccccgtgataacaaaaaaaaaaaaaaaaaaaaaactctaaaagagaactctaccaaggacacacagggatagg

SEQ ID NO: 24491 - DNA, 508 bp, Setaria italica
  Peptide Sequence Number=SeqID_90465
ctacgatactagatcaggttttgtacaacagatccatatgtggagcgacaaaccgtcatgattccagatatcgatggacattgctagcatacaacacaaacttgaaccacctagttcaaagtactgcaaaaaatgactctaagacaaaaataaatcaagtcatcacttgggcttagtaatggctggttggatcattggacaagattttataggtcctatatggaggaatgattatagccttataggcatcgaacaatagcaagtactggcagagactctcaacagcaattcatgggggaaatattcctagttgtactcccaaaacctctggtgaactacaaattgataaactcaggctgacatactaaaaacatcaccaagttcacaaaaacctgtaggaatcaacagcatatccaatctgttcctaacttcctgttgtaaatttaacagatgaacttctgctaaatcaactgttagatttatttctaagaaatatctgaccaccaat

SEQ ID NO: 24492 - DNA, 290 bp, Setaria italica
  Peptide Sequence Number=SeqID_90466
tcggcgtccgtggtgttcgacacggacagcgcccgcgggtcgccgtcgcgccggcaccgcagcagcgccgtggcattcgggaggggcgacgcgtccatggagcggacgtagccggcgtaccggcaggtcttgcaccagacgacgccctcgacggcgatggtgaagttgaggtccggcggaggctggggcaggcccatggcgtcgccgcgtgatggcaggcagaccacggcggcgaggaccacgaggggcaggcagaccacaaggcttctcgccagacaagccatcgtaag

SEQ ID NO: 24493 - DNA, 772 bp, Setaria italica
  Peptide Sequence Number=SeqID_90467
aatctggtatcaggttagatggtatgtaatctgccttctatatggtgggtgattagaatcacccacatgctctctctctctctctctctctctccctcccctcttggatcaactatattatagcaggcctctagttagtcactactttctttctttttttcttttcttttgattgctgcactacagtcaacaggaagcggaacacgccgtttcttcggagcatagccgcctagcctagctgcaccgggacaggaagaactcgtaatctggatggtggttcacggactccccacttcccttcgggacaacagctcttgccatggccagtgcacccatcttcagtgtcctcagcctctctttctgaacttcagcacaactggcctcgtcagttggcaattgcttcagatctgggcatctcagctgaaaccactgttctcccttggcattgtaactctggagaccgacaactggtgaaactacacgcggatgcccaccagtcatatccatggagcatttttgaggaaccaatttgcccagtgaatggtaagtaagaaatgctgcacggaagttcccacgaggtacacgataaacaggataccatgccacacagaaccaggaagctggatgaagctcacacaattttgtgttttgcagcttttcagggtccccaaaaattcggtggtcagaaacgtttgcaccgctaacaagctccttaatcttttcaaataacgggggccgaaaagaaggctgctctgtttcaaagtactcaaac

SEQ ID NO: 24494 - DNA, 513 bp, Setaria italica
  Peptide Sequence Number=SeqID_90468
aattccattataaaaaataatactgttcctgtcgcaccagatgctccagcagccaatcaaaacaagttccctgaagatgaagaagttcctcagttgtttgaggatgtgcaatgtggtgcctatttgtgcaaaagcactccagaaacagaggacaaacagagcaaggagactgatcataagcatcaagatggctgcatttgttcatggatttccgtacttggtgcaacatcaatacccacaagattctggtcatgagtgcaccacaggtatacctgctacacaagctcatcggtccagcgctgtgtcagggatgtgcctggtttgctaacaggtgtttttttatgtcaccatgttttcaatcaataagtctcgtagtctcaaaggaagaaatagttgtaactgacagatggactcatttggggttcctatatgctattacattgttatataatagtacaaagatattggcattaattcctttatttgtggaaacaataatattatacagtgatt

SEQ ID NO: 24495 - DNA, 257 bp, Setaria italica
  Peptide Sequence Number=SeqID_90469
caggccacatctccccgtcctcgccaccgcaccgccaggttccggcaaccggcacgaccgtccgaagccgcgccggcgccaccgcgcacacgacgcgaagagatgcaggatagaatgaggcggcagggacaatacggtgaagcagacatcacttccatggtcgcggcccagttgcatcactacaaggcacagcaaagggtgcagcaacaccctgagaacagctacactggaagggatcctgggcaagcttctgggga

SEQ ID NO: 24496 - DNA, 1344 bp, Setaria italica
  Peptide Sequence Number=SeqID_90470
gaccgacccttcagcctcttgttgcctccgctcgcttgcccgcctctgctggatcgagatgcaggatagaatgaggcggcagggacaatacggtgaagcagacatcacttccatggtcgcggcccagttgcatcactacaaggcacagcaaagggtgcagcaacaccctgagaacagctacactggaagggatcctgggcaagcttctggggagcaccagtacactcccccgaaggtgagacagagtcaatgggatcgaggtggaccaaacatgccaagcaaggttccatcatacgcatataatgaaggccaaggtgctgctggtgcacaatccttttatgatggacagagatctgatgcaaaggttggtctagaaaagcagaccagcaaggaaactagggaccatgctcgtacagataggactgaaacaagatatgaggattataatcttcctcggacatttgaaggtcttgagcaaagttttcatgaagacattatgatgctatccaaggaactacatgatgcagaggatgctgaaaattctagacacagggagagattgaaggagataaatacgcagtaccaggagaaactattagcacttcgggctcggcaagcaaactatagagatgaattcctgcgtaaggaatctttggcacgccagcagcaataccagcaggccagcatgagccattatgccaataattccgcgggtggggagcagcatggttatcacccaacagccttgcctggcgagcagcatggttatcatccaacagcagcaaccactcctgctgctggtggagctggaggtgcttatggagaggctcatcggggttatgcttctgggcagtacgaatccttcagtgatcgcccagattacccggagttccatggtggcggcagaggtcgaggtcgtggttttgaacgccgtggccaatacccaggtggtcgtgattacaattctggtggccggcgattctagatatgtttttagcgggacagtccagtcatgctggcctcatctcggcttatctcaggctgctgtgatgcactcgatgctttagaagctttgttgcaatctcctggaaacctaaatgcttgtagaacgtgttcaagttctacaatcgacgtcaccaatatgctagcatcaagctacttctacggttttgccagagttccttctgggtgtaatttgtagaggaaccggagaatagggacgttattgtttctctgctacccattcatgttatatgttctctgaagacaaaaaagtacatgtttattataatttcaaaataaataaaacgagccctgattattaagtttaaaaaaaaaaaaaaa

SEQ ID NO: 24497 - DNA, 286 bp, Setaria italica
  Peptide Sequence Number=SeqID_90471
gcaaagcctaacgttctagaggaaggggagctgctggcgctgcttagggatgagcaggccgaggaagacaggatgatccagaccgacatcagcgacgaagatctcttgaagctgatggaccggagtgacctgtcaggaccgcctggtgctgctgacgccacgccacttatccctctgaaaggccctggctgggaggtcgtggtgcccacgaagagtggcggcggcatgctctcgtcgctcaccagctgagtgccgctgcaaagttagccgcaccggcccgtatttt

SEQ ID NO: 24498 - DNA, 372 bp, Setaria italica
  Peptide Sequence Number=SeqID_90472
ggctaagccaaacctaaatccccctcccacgccgccgtctccgccgccaccaccgcatcgatgggacgcaaagactcctcctcgtcgtcctcctccgccgccgccggcggcgggaagaaggacaagcccatgtcggtctccgccatgctcgcctccatggacgcgcccgcggccaagggcaagtcctccaagtcggcggcgccctccaagcccaagggcaagccatccaaggcgccggcctcctcctacatgggcgacatcgacctgcccccctctgacgacgaggaggacgaggccgagctcgccgccgccgccgccaagcccaagccgtcccgcgccgccaccgtcgacctcagctccggcgtcgcgccg

SEQ ID NO: 24499 - DNA, 592 bp, Setaria italica
  Peptide Sequence Number=SeqID_90473
atctgttctccttttgaagcttgtaaatgaactgattcatcgcaacaattcttgaattaagcattgctgatgactcttcggagctcattttctccctaggtgttgcggcatgagcagaacggataatacatttggccttagcaccatactccaacgtagaaactgtcttgtgcagttcctttggatcaggactagcgcacagaatcatcaggatttttgatttatcatcctcaaatgaatcctgtagtagcatcgtgagcttgctgtctctgaagggaacatgggaatcaccattagcaatggactcaaccactcgctttaaagcagtgtttccttgattaatttttgctgtctgaattttggcttcaaacccggtctgtcctgcagcctcgatgttctcagatccagccatgtctacaagcattaaccttcctccaacagaagggatgtccaggataatcatgcagtggctccgcgaacttctctcgttacaaagcgtgcttttgacagttcgacgcttctccaccttggcaacttctctcgatatcttcccagcttcatttccacatatgtatgtagcattcttggcttt

SEQ ID NO: 24500 - DNA, 558 bp, Setaria italica
  Peptide Sequence Number=SeqID_90474
taatggcaccactaagctcatctagcatatcatcaaggcgtggtatagggtatcggtagcgaatggtaatgttattaatagcacgacagtctacacacatacgccatgagccatctttctttggaacaagtaacacaggaacggagcaagggctaagagactcacgaatataacccttgtcaagcaatgcctgtacctggcgctggatttccttcgtctcatccggatttgtacggtacggtgcgcggttcggaagctgtgcgccgggaatgaggtcgatctggtgctcaatgccacgaagtggtggaagtcccggtggcaaatcttttggaaagacatcagcgtactcctgcaaaatgttagcaaccgcagggggaatatccaaagatggtgcatcatcaagtgaaacgagcacactagagcatataagggcatagcatggcaaaggagcatcgcgtaactcatcaaattcagcacgtgtggcaagcaaaacaggagcattcaacttgatttcagaattaagagatgtcgatggttcaagttgtttagcagttttag

SEQ ID NO: 24501 - DNA, 674 bp, Setaria italica
  Peptide Sequence Number=SeqID_90475
ggtctgcagcccgctgtcccccgcgggggacacgaccgtggtcccgccgcccccaccgccgccgccgatccagctcgccaacgacgacgagtgcgtcatctaccagtactgtgagttcctccccgacgatggtgacggcggctcctacttctgcgtggtgatggggtacagcgagctgcagaccaacgtgtacctgtacgagttgcaggacatgaattgggttgtcagagcctcagcggcggcgcagctcgctttatcgccacggagatcgagggttatgctcttcagtaatgagaaattctacattttgtccgcaaccaacaagattcttgtgtgcgattttccatcctcgagtatctcattcatggagctccccagtggggtggagaacaagcacggtggttgcatcatgctgtcccggggagacggttctggaatttatctcatgcatgttaaagaatctcagcttcaaatcttccactgcaggaaggacagcgataatccaggcaattgggtcctagtggattatatttgtttgcgtcaggtgtgcgctaatctggatatcgcaacttggccttctgtgggtggacatactgctagtgttaagatatgcgctgttggggacaatgccaggtttgtgttcttggagatgtttggcactgttgttttcttgg

SEQ ID NO: 24502 - DNA, 2309 bp, Setaria italica
  Peptide Sequence Number=SeqID_90476
tatgtaatatattcatgccaacagacaagtaaaaactgatgaaagaatgatacagactggtgaagatgccatgcccagccatgtgtggccatacaacacttgcaggcctcagctctctgaaacgacgaatcaagatttcttttcctaggtcaaacaattatccctctatactagtactagcacaacaggttttgaaggaaaaaagcgaagcagaaaaaagcaaagtggaggaattgggtgaaagaatatactattgattattatacaatgatctgcctacaaaaaataccagcttgcaaactaggagctgccgtgggacttgaacgatgaaattgagtgcgctgagaccgaggcagttgggctgtttacttccctgtcgccgttggcagctctaccctttccgctgatcatactggcaacttcttgagcgacgtccatgaaccaatcgtcgccaggaaggacactatcagggttgattccagtagcagaaaatgcagccattgctctatcaatgatatccaaaatgacttgatgtacatgtctagagagaaaacgcccttgcccgaaaatgatgacaaattgcatatccaggtagaactgctgcagaccaaggggacctagaggctttggcccctgttctatctcttcccagaaggcctgatcctctgagagccacagtatgaccgtctctgtgaggcgcatcattaacaaagtagcgaatctttctctaccaacaaacatttctgcagcaatgcttgccatcctgttcagctttgcatatagttcctggaaaattggagatggaacccaatctggttcttcaacagtattatccatattgatatacatttctgcgctgagatgggtatcaccatcatctgtaaatataagttcaagagcatgctgcctgcaaaagctatctcttagtctgtccaccattcgttgtagttttcttttccattcacgttgctcaggcacacggttttgcttatctgttcctcttttacgcaaatcatccatgctagactggtttattgatgataacttcatagctgccctaggtagcaactcctcagctagtagagatgcattagctaataaagctaactgctgttcttcagtctctgccattctaacaatcttatgtcctaaaccatctaagttagcttcatcatccatcgaaccaggtaaagcacttacaagcaagttgacatatgaattgaatatttgtgtgatcccgtccattgtagaaccacctaattgtaaactaagtagcggtgcaacatcctcaaagaaatcctgaaccattgaattgaagcggtgtgcgctgctagagagcttaggctgaagtgccaaattagcagcagatgatcttgttaatggacgaataccagttgggggataagtgagtatccagttatctgctgcagctagtgcagcagtactctcctcaattctcctcaggttagcatctaacgcttgctcaagactgggcttgaattgtttcaggagaacagatgaaacagacagaccacgagcttccagcaaggaacaatggccaagtgatatctgaacacattctgcagctgccctcaagcctccagcagctgcacaagaggacaacacatgcctctttactaggagcgcaaaggacataacttgcttggtagcccatgtaaccagttctgatgcgtaacatgactcatcaccaaagacatctacagagtcactgagtgcctgagctatgactgaaaaaacctgttgagcaagtgctgcagtgtatgccccaccatatgaagtgctagatggatgtatagtttgcatattacattgaagcctttgattatgtgcactgagtaagaggctgtgagctcgggggccatcaccaagtcttttgagggcagaagccgcagctcgaagctcaataccacgagtggaagactgacaagcagcttcagcaagctgatcagccagcctctgacgattatcagagatagatcttctcaaagccgaaacttcagctgcagttagagtctgttttcgttttgcgtcaacagcaactcgttctgcttcatccagtgcatctagtgcttcatccactcttcgctcagctaacaaaacgtcaagcatgtcaggaaaatctgcagaccatttctgaatctctgaaggctcctgatcttcaacattggatatgttatcttctgcagaaccttcagggcctgatgtcaatgaatctatctgaactccttcagacagaccgtgaattaaagctgcctgtgtattaagcatatttctaattgacagcagct

SEQ ID NO: 24503 - DNA, 622 bp, Setaria italica
  Peptide Sequence Number=SeqID_90477
cggagctcttccgcctcgtcggcgaccctgggcccgacgcatctgggaacgcgttcctcgagttggtttcttgggatgacaaactggcgaagtcggtgattgaattgaaggctgacaaggaggccaatgtcgtcggaattcggccaaggccaaattttactgttaaaatgccaaaggggttctatctcaagaaggaaatgagggagtgggtgagggattggcttgagctgccatatgtctcaccatatgcaaatgcatccaatctggatccggcatccccgaaggctgagaagcgatcaattggtgtgttacatgaggtgttgtctctgacagtagagcgaaggatggcggtgccagttattgggaaattttgtgaggagtataggctgccaaatgcatttgccaatgcattcacgaggcacccaggaatcttctatgtatcgctcaagggtggaatcaagacagcagtattgagggaagcttatgatgagaagggaaagcttgtagatagagatccaatgcttgagttaaaggagagatttgtggcagtcatggaagaggggcataagaagtatttagaagacttgaagatgaagagggaggagctgcagaaagagagaga

SEQ ID NO: 24504 - DNA, 793 bp, Setaria italica
  Peptide Sequence Number=SeqID_90478
tactaagtactaagttaatttagaagggaaagacttaatagaatgaagaagggaaagcttgtagatagagatccaatgcttgagttaaaggagagatttgtggcagtcatggaagaggggcataagaagtatttagaagacttgaagatgaagagggaggagctgcagaaagagagagaggttgcaggtcatgaggatgtaaaagtagctgcagagattgaggatcagcttgaggaagaatggcacagtgggggttcaggagacaatgacacatgatacatattatatgcagtaggaggtgatggaaggcagcattgttagtggttcttgcaattccatttgtccttggtcagtattgcctggtgaactggtaaaggaaattggttgatgcctggtgaggttcttgtcagtaatatttaagacagcctttgttgttagttagttcattggagctggggaggatacagctggttttagtgttgggatttttgcaatctatttagatccaagaattattttgagctggtcagtgcaagactatttctttttatggaattttctgaaaaatattgcatcaccatgctcttgtgcatccatcattaacacagataccacaaataagacataaagtattcctttagataaacgcaaaacatttctgcacttgatataatccatcataacacattcaattgcaaaaggaaattctaacaaccaaactgaattttcagctgtgccccatttctttccaaaattcaaatgattatgagatgtgttatgtacctctatccag

SEQ ID NO: 24505 - DNA, 295 bp, Setaria italica
  Peptide Sequence Number=SeqID_90479
cgcgcgccttggccatgacggcgtggagcaacgactccgggccgaaggcgaggcggatcatctccttctcgccgtggtcctggatgaggaggaggcccatgatcttggcggcgtggtccgggtccagcgcctggatccgggagaacaccaccttggtggcctcgtaggcgtccatggccgcgccaggagaagggggccggacgagacgaaacccttgcaccgccccgcaccgcagcagcagctatcacgggcttctcgcttctccctcacacgcctttacctggctcggctcggc

SEQ ID NO: 24506 - DNA, 664 bp, Setaria italica
  Peptide Sequence Number=SeqID_90480
tctctcctccgccgcgccattggtggcgctgttggtcctggagaacacgggcggcggcgcccaggaggagggcgacgacaccgagagcggcgagggcgcggtgccggcgccgccgccgcagcggccggagttctggcgcgagagcaggaacggggagtgcccggcggcggcgacggaggttggcgtgcccggtccggaggccgggagcaggccgaggtccttgcgcgccttggccatgacggtgtggagcagcgcctccgggccgaaggcgaggcgtatcatctccttctcgccgtggtcctggatgagcaggaagcccatgatcttggcggcgtggtccgggtccagcgcctggatccgcgagaacaccaccttggtggcctcgtaggcgtccatggccagcggctctgggtctacagaaagcaagcaatcacagcacaagagcttccttctcctttttcctcttctctcccgagttgcgttcttggagctgtgttcgctgctgtgctaaacggagcgagcaagcaagcaagctcgagctcaagacagcttcacttggtgcggcgccagtgaggcagcggtgagcagctgctccatttcccagaacccggaggtcgcggcggcgggcaagctatgctacgctactctactggcagcagcgacc

SEQ ID NO: 24507 - DNA, 849 bp, Setaria italica
  Peptide Sequence Number=SeqID_90481
cgttgtgtagatctccacaagttgctcctcaaagggcaatcccgacagcaaagtgagtctagaatagtacgagcgcaaatcatcatatgcctccctttccaacttccctttcagggtagtctcgtattgctcaaggaagactggaagggtagttttagtcacgaccccatcaaagtatggatcaggtttttcaactttcctgatggcagaagtgccagcccagaatgaatgattgacatacccaggtgcccactgtttccgacagctgtacagagcagaaaaccactcgttgtctttgagattgtactggtcgaccattgctccccactccctctcaaagtcagtaagagtgacactatcataaacaacctccttgaaccttgaggaaattgcctctttctcatgtgtgcgtcccacgttttcaagtagcttcttcaagatatgccaaaagcagaagcggtgccttgcatttggaaaaacctcagccacggcctctgcgatgacatctgagtagccggtcgtgatcgcttctggcggcttaccattcatacagttcaaccacctcttcaacaaccaaagatagttctccttggtgtcaccggacaggagaccacagccaagaagcacgaggtggccgtggttgttcaccccaaggagagtggccaatgggaggctggagcgtgagtgctgtaaatacatcacgtcaagtgtaatgacgtcaccaaagtaacggtattgcgcctgggccctagagtcagtccaaaagaaattcttcacgcgcctttcccgatcaagatcccaactgtggatgaagtttggtttcttgcattgcattgtttcaacaaactt

SEQ ID NO: 24508 - DNA, 527 bp, Setaria italica
  Peptide Sequence Number=SeqID_90482
tagtctaaggtccttcctattgtttctttctaccttctacccttcccaaaccttctgccaatgtgttgtcacgaacaaacttctcaatgtcagcttccagcaaggagaggcagcaatcttctatttctgtttcaaggagtgccatctcgcaatcaatataatcacatttctgcatactttttatttccttgtgaactatgcgaagctgttcacgggcgttctgcagttcacatgaaagctttatccgctcctcctcagatttcagcagatcagttgccttactaaaattcttgggtttatgtgtcaatgcagtagatgtatcaagattatcaatagcgaacagaaccttttcttcctccttcctttgagcttcataagagcgaagcttcagtttaaggccatcaattttgcttcgcaactcagtttcagattcatgtgcccttgttctcatggcagatagttggtttttgcgagtttggagaagattcaactgttccttcttttcattcatcaatgcaaagttagaa

SEQ ID NO: 24509 - DNA, 1035 bp, Setaria italica
  Peptide Sequence Number=SeqID_90483
tttaacaaacatatacacgcctcgtatagtcgtatatagaggtgatttaccaactttattacaccataatgaaaaacacaagctgagagacacctggcgagcgcaaagatcgccagccagaccactcccaccccgactcgtttacagacaaatacagcaacgccaaacttacagcaccaaattcgtcgaaatcatgaaagggaaaaacacggtacatactggacccatgaacaagcaagcggtatcgatcgggaggcaagacggaagcgcgcgtgcacgcgcgtctagtgatccctggtgatggtggaggagtccttgttggtgttgccggtgtcgccgccctgcttgttgccctcgcccatccccagcgtgttcatcaccgcgtccttggcgcccgccgccgcggtcttcacctgatcggtggcctgctggatgacgctgccggtcttgtccttgccggcgacggcgctgtccttggcgtactgcccggcctcgccggccttctgcttggtggcctcgagggcctcggcggtcttctgcttggcagcctcagtggtctcgccggccttctgcttggcggcctcggtggtctcgccggccttctgcttggtggcctcggtggtctcgccggccttgtgcttggtggcctccgtggtctcgccggccttgtgcttggcctcgtcggtcttctggcccaggtagctgccggtgtcggacgccttctgcttggtcgcctccttggcgtcgtggcccttgcccgccgcgtgccccgccgcgcccgacgcccggtccttggcgtgctgcgccgtgtccttggtcgcacccatcgcctgcccagtcttctcctcggtgcgggccttggtctcgccggcctggtagctagccttgtcctggtgggaagccatgatctctcactcttctcaaactaaaacacgaacagatcgatcgctcaaagcactgggaaactaaaagcagtagtgaacacttggctactgacgacgatgctgagctgaaagcctgaaaacccctaactat

SEQ ID NO: 24510 - DNA, 2053 bp, Setaria italica
  Peptide Sequence Number=SeqID_90484
attgtatgttgttagtggcagtggattcctggaggctctttggctttcttggacttttgtggcagattctggaaaccatgccgatcaagttggcctggggccaagaattgtgtctgtgtcaattagctccgggggcatgctggtgtttgccacaatgcttgggcttgtgtcagatgcaatatcagagaaggtggattcttggcgtaaggggaaaagtgaggtgatagagatcaaccatatactaatccttggctggagtgacaagctgggatcccttctgaagcagctagctatagcaaataagagtattggtggtggtgtagttgttgttctggcagaaagagacaaggaagaaatggagatggacatagcaaagctagaatttgacttcatgggaacatctgttatatgtaggagtggcagtcctttaattcttgcagatttgaaaaaggtttctgtttctaaagcacgggctattattgtttttagcttctgatgaaaatgcagaccaaagcgatgcacgggctttgcgagtggtgctgagcctgactggagtcaaggagggtctacgaggccatgttgttgtagaaatgagtgatcttgacaatgaacccttagtgaaactggttggaggtgaactaatcgaaacagttgttgctcatgatgtgattggacgtttgatgatacagtgtgcactccaacctggtctggcacagatatgggaagatatattgggatttgaaaatgcagagttttatattaaaagatggccagaattggatggcatgaggtttggggatgtgttgatctcatttcctgatgctgtaccctgtggagtcaaggttgcttcaaaagctggaaagatcttaatgaatcctgatgatgaatatgttttaagagaaggtgacgaggtccttgttattgcagaagatgatgatacttatgctcctgccccactaccagaggtaaataagggtttcctgcctaacataccgacccctcccaaatatccagagaagattttgttctgtggctggcgccgtgacatccatgatatgataatggttttggaagcatttcttgctccaggttcagaattatggatgttcaatgaggtgccggagaaggagagggagataaaactgactgatggtggtttggatatatgtgggttaacaaacattaaacttgtacataaagaagggaatgctgtcatcaggcggcacttggaaaacttgcctctggagacatttgactcgattttaattcttgcagatgagtcagtggaggactccatcgtacattctgattcacgttctttggctacacttcttctaattcgtgacattcagtctaagcgtcttccattcaaggagctgaaatcacctcactgttaacactggttacactggcttctgtcacagcgcctggattcgggaaatgcagaatgcatcagacaaatctataattatcagtgagatactggactccagaacaagaaatcttgtatctgtctccaagattagcgattatgttttgtcaaatgaacttgtaagtatggcacttgcaatggtagcagaagacaagcaaataaacagagttcttgaagaactttttgctgaggagggcaacgagatgtgcattcgatctgctgaattttacctgtatgagcaagaggagttgagtttctttgatataatggttagggctcgtgagagagaagagattgtgattgggtaccgccttgctaacactgaccaggcaatcattaacccagaacgtaagtctgagattaggaagtggtcagtagatgatgtcttcgttgtcatctcaaaaggtgactaattttcaagagcatctcacttttttgtgtaagtgaatattctaatgctaatccatgctaattgaaatgataaccgggcagacataatgtacagtcctgatccaaaccattagctctatacatcagtacatgttaatttgtagcattcaatttgatctcgcataaacagtttccatgtccagccctggaacttttgttgtagcaaatggt

SEQ ID NO: 24511 - DNA, 603 bp, Setaria italica
  Peptide Sequence Number=SeqID_90485
atgatgaaaagggtctggttgaatttgcttggagccactcggtgatttcagatcaactttacaagcatgtaacaaatgtttgcaaattcaggaccatcttctttacaggggaatgcgcccgtgcaatgaaccttgtatacactcagtacaataagattgatatttacaacgtgtatgcaccaaagtgcaatactgaccactcagcattttcatctagctctgacagcacaacagaaaagactgcgaagaagaagtacaaaagattgaggatgtactcgggatatgatccatgctactcaatccacattgaagattacttgaacagtattgatgtacagaaatcacttcatgcgaatatcagtggatggatcaaggatagaagatggagtatctgcagttactcaatattcaacaactatgacgacaacatatttactgttcgtcctctttactccaagcttgtcaagactggactaagagtttgggtctacagcggagatatggatggcagggttccagttattggaacccggtactgggtagaagcgctcgaccttcctatcaagtcacagtggcaaccatggtacctaaataatcaggttg

SEQ ID NO: 24512 - DNA, 416 bp, Setaria italica
  Peptide Sequence Number=SeqID_90486
attacagcaaagcaaagcagagcaaaagctctcaagaactcaaagccagaagccctgaggatcggagaggcgtacaagaacagcagaaaacaatgaggccgggagcagggttcaatgtgacggcggcagcggcagcgaaggccgtggccgcgccagcggtcgccggcagcgccgcgcattccgcatggcactcgccggtgccgtacctcttcggcggccttgccgcgatgctgggcctcatagccttcgccctcctcatcctcgcgtgctcctactggaagctctccgggtacctggagggtggcgccggccgcggcgacgaggacggctccggcgccgacggcgcgaagccggcggcctcggacctgccgccgccgatatgggaggagaagatacttgtgatcatggctggggac

SEQ ID NO: 24513 - DNA, 212 bp, Setaria italica
  Peptide Sequence Number=SeqID_90487
aacctgcccgtcgacctcagcctcattctcaaccactgcggcaagaccgtgcccaccggcttcaagtgcctctaagctagaagatgcagatgcatccatcgtgaatcgtgtgtgtggcagcccgccagaagatcattcccattttatcccgtaatcccgttcgatgtttggtttactatagctttcgaaagcttgcatgcattgtggagaga

SEQ ID NO: 24514 - DNA, 291 bp, Setaria italica
  Peptide Sequence Number=SeqID_90488
gcgccgatcccccacggacgcgccggcgaccatggacatgtcggcgatcgccgcgcgcctcggcctctcggagtcccgccccgtcgtccgcaaggccggcgagctccgccgcctctgcgacgtcaacttcgactcctccgtcctcggcatcggggaggtttgcaaagccatcatctgcctggagattgccgcgtccaagttccaggtgatatttgaccgagcggaggctgtgcgtatgagcgggatgtctgagaaggcatacatcagatcgttcaatgcgctgcagaatgg

SEQ ID NO: 24515 - DNA, 447 bp, Setaria italica
  Peptide Sequence Number=SeqID_90489
catctttgggctcatcttcaggtcggtccttggtccggacatagagctcaaattcgatcaatgcgcgggctaccattgaaatgactcgagctgggctggtcagtgacaaacgtgccacgccccgcagcacaataatatttaaatagtttatcaggtacttgcagaggcgtgtttcgcttcacaggtacagattcacaattgctaatctgacgcctatagacataattgcgcaagggctcaatttcatctcgtgccgcaatgaaaccaaagatcctagcaggtccaggccgagcatgatgatatccagcaatattaatatcaatgaactgaaccaaagacattggcggcatcggcatttaattgagcaatcccaacactgatgatgttggtttcagatttatcatgaagattataatctgatccaaatacatgcgtaccataccaata

SEQ ID NO: 24516 - DNA, 1009 bp, Setaria italica
  Peptide Sequence Number=SeqID_90490
ttcaacgtatgaaactgaggaaatcaagttggtgaactccgtgcatccctcgatgaggcaatcatctttgggctcatcttcaggtcggtccttggtccggacatagagctcaaattcgatcaatgcgcgggctaccattgaaatgactcgagctgggctggtcagtgacaaacgtgccacgccccgcagcacaataatatttaaatagtttatcaggtacttgcagaggcttcatcaatcacatacccaagattgtatatgtatgaaacaacaaatagacactctttcagtagggattctatgagtaggattattacttagactgccgataagtaaatttctaacagcatggagttgagatgagcatcccaaatatactaaaatacatttccatgtagatagttcccaagtttgcatatgaattaccatgcagattgttaatttttgcagcatatatgcaagatgacttgcgaagaaataatgcctacatgtggacgtctcaatgtttaatgcatggctattttcataatgatacaaggagtatgtagaaaattgtgagtttgcaaaccacattatcccctttctctttgcatatgctgttatttagagtgcacgctgttcttttattgtagcagagactgagattaacatcacccacttgtaagtttaaagcctgaaaatggtcattgcaaaagacatgcagctctgacatgatgcaagtctctcatgtaaaggtatttttacaatggtaaataggagcatgcaccaaaataattttgcgacctttcaaagtgcataagcataacaaataaaaccatcatgtttcatgaaaacattaccgtgtttcgcttcacaggtacagattcacaattgctaatctgacgcctatagacataattgcgcaagggctcaatttcatctcgtgccgcaatgaaaccaaagatcctagcaggtccaggccgagcatgatgatatccagcaatattaatatcaatgaactgaaccaaag

SEQ ID NO: 24517 - DNA, 653 bp, Setaria italica
  Peptide Sequence Number=SeqID_90491
taattagtttacctaaggtagtaccctttcgtattgttagagatcaaggtagttgtgagtctccaccgcaacaacaaagctcatcacagcacccggcttcggagcagcatcttcaaagagtcggatcacctccctgaagccactagtcttggcatataccttcaggttgataccactggcaatgtcacccaggcggaggacctcaacgtcaatgcgggcctccactgcattgatcaacaccgcaaacttgacatccaatgcacagttgttgccgtacaggcgacggtgttcaacgtatgaaactgaggaaatcaagttggtgaactccgtgcatccctcgatgaggcaatcatctttgggctcatcttcaggtcggtccttggtccggacatagagctcaaattcgatcaatgcgcgggctaccattgaaatgactcgagctgggcgtgtttcgcttcacaggtacagattcacaattgctaatctgacgcctatagacataattgcgcaagggctcaatttcatctcgtgccgcaatgaaaccaaagatcctagcaggtccaggccgagcatgatgatatccagcaatattaatatcaatgaactgaaccaaagacattgggcgcatcggcatttaattgagcaatccccaa

SEQ ID NO: 24518 - DNA, 1647 bp, Setaria italica
  misc_feature (1)..(4): n is a, c, g, or t
  Peptide Sequence Number=SeqID_90492
nnnnttttttagttttgaccgcagaaggggaaatcatatccttattctactaacagtattgtatcatgcaaggcaagtcaattccgtgcagatacaatgagtgaatgtggcattgctattacgttacacttgcagaaccatataaacttaatgatacgtaagtagctttgcacaccaggcctccggaaataacatgcttaatctgcaacaggggaagttagcaaatgaatttttttttcttgctactatcttcaggattccctctttgtataggatttccagttgaccttcactgaaacttctccaaaattccccagctctgccacttcttcttccatacagtgataactagagccaaagctgcacttccaccaagagcgcgacacttgctcctccttttgcccaaggacaggattgtttccaggagacccttcgatgtagagatcaaggtagttgtgagtctccaccgcaacaacaaagctcatcacagcacccggcttcggagcagcatcttcaaagagtcggatcacctccctgaagccactagtcttggcatataccttcaggttgataccactggcaatgtcacccaggcggaggacctcaacgtcaatgcgggcctccactgcattgatcaacaccgcaaacttgacatccaatgcacagttgttgccgtacaggcgacggtgttcaacgtatgaaactgaggaaatcaagttggtgaactccgtgcatccctcgatgaggcaatcatctttgggctcatcttcaggtcggtccttggtccggacatagagctcaaattcgatcaatgcgcgggctaccattgaaatgactcgagctgggctggtcagtgacaaacgtgccacgcccgtgtttcgcttcacaggtacagattcacaattgctaatctgacgcctatagacataattgcgcaagggctcaatttcatctcgtgccgcaatgaaaccaaagatcctagcaggtccaggccgagcatgatgatatccagcaatattaatatcaatgaactgaaccaaagacattgggcggcatcggcatttaattgagcaatccccaacactgatgatgttggtttcagatttatcatgaagattataatctgatccaaatacatgcgtaccatttttgaatgcagggtagagtctaattggtggaggccctagaagtttaatgtttggatatgtaaacaaaatatgattctgctcctcgtagctacaaccagccttcgggaaattaccaagtgcatcagctccttgattctcgtcctggtcgcagtcctcgccgccgctatcgctaaccaaccattcatcgtcatcgtcgctgtcatcgtcgctggatgattcctcgtcgtcgtcgctggacggttcctcatcgcaacccggaggagaaggcggccgctttttgccgcgggcaggattggatccgcctgcctcagtctcgattggttgcttctcgatctcccccacaaaccctagctgaagaggagggacggtggcgacatccatatgcaattggatctattacctgctcgtccgctggtgaccctggccccgccgccgtccgccgaccgcaagaaatagaggaggttgcgccgccgccgagggctcggatgcaggaagagga

SEQ ID NO: 24519 - DNA, 678 bp, Setaria italica
  Peptide Sequence Number=SeqID_90493
tctacccggggtggtacccggcccgccttccgctaggctcttgtggccagctctgccgtttctcgggttggttctgcgccgtccgggctccggaggtctgcgttgcattcaagacagcaccgaatggggagcagaagtcgccagcgaaagctgtttgtggttctttaacctaaggcaatgacgacgtctgcggatggcgttttccttcgtgaaggcattgtcaaagcaacttttgcaccacctctcttggagttcctgggtgaaaatctggtccggccagccggaagagcagtggtgacgactcaatgtcatatccttgttggaggcgttgctctgggatccaggctttcatgcttggccatggttgaggtgcccctatttccagtgcagggttctaaggtgaagtatttgaggtgcttgaggtcactgtccaaatcgactccgtacgatttctacgtgatagcgattagcagagcagtaggacgattttagcgtcaagagttctaagtatgaaggattgttgttgtacatggataaagcaaggtagcaagcttgaagcaaggacatgaaagaaatttgaagctcagtctttttagctttctttttttcctaatttgagactcggagtctaaaaactcatgtaacttttggatatatacttgtggatatagaggccgg

SEQ ID NO: 24520 - DNA, 497 bp, Setaria italica
  Peptide Sequence Number=SeqID_90494
agagaaggacaaggggaagaacaaggctgcagaagcggagcagcagctcaagctcgaggaggaggacatggccgtgtcgacaccgagctctcactcccagccgtgcgccactgacaagagcggcgaggagcaagcgcaggccagcgccagtggcgtcacctctgatgatgggcccgaggaggacccgctggccctgagcgaggagatgatgagtgcgcttctgggcccagtaagcccaaagctggaggtgggcccggacggctcgggcatggacagtgacagtggcccgtcgtccctggtcgtggacagcgagagtgggcctggtgggcctacgggggacgtggcccaagagctgggcgagaacgacaaggccatcatggactgggacttgatggcgctggacatctcgaccgccggtgacatgtgggaccccctggtgtgggactacgctgacatggacatcgtggtaccggatggtgggcaccagcagcagcagg

SEQ ID NO: 24521 - DNA, 248 bp, Setaria italica
  Peptide Sequence Number=SeqID_90495
agcgtgtgaagagcctgtccccttatgcgaagccatggcaatgttttcgactgcttgtagtatttcaggcatcttgctgcaatctcaaccggcaaaaatggagtagtttcccggtaggaaaaggtgatgccaaggactcttctttcaaaatccatgacaggcccaccaataaaactctggcacaagagctcattgcagtctaactcgctgtttgttcggaccagctccccacatctcatctgaaaatt

SEQ ID NO: 24522 - DNA, 1072 bp, Setaria italica
  Peptide Sequence Number=SeqID_90496
acctgtttagtagccttcttgacgctattcttctatttgcctaataatgtactcacattatcttctgactgcaaagtgctcacgggaaccatagctccttccacgcatccatctattttggaatgacttgtcacattcatcagaggcaacatgttgtacattcagcttcgcaacaaatgtagtctgatctgtgggtctatgtacaacagcctgcaatgtcactgtattctgcgtacccgttgcatccaccattttatccagaaatatcgcactaaactgtgctacagagcaaagattaaccccatcaagttgtgagatgacatcaccaacagcaatgcctccacatttttctgctgagaggccgcaaatcttgtttaccagaactccagaaggtggctcagaaaatttgcaccatatactttccaggacatataggtccagcgtgtgaagagcctgtccccttatgcgaagccatggcaatgttttcgactgcttgtagtatttcaggcatcttgctgcaatctcaaccggcaaaaaatggagtagtttcccggtaggaaaaggtgatgccaaggactcttctttcaaaatccatgacaggcccaccaataaaactctggcaccggtgcacatgtacagaccaagagctcattgcagtctaactcgctgtttgttcggaccagctccccacatctcatctgaaaatctttcgagtacatgtcccgacctagagcaactacaggcctaggctgcaaggaataacattcagggagatcactgagttccaccaccggaagatatatccgggatcctggaaacttgatagtcacaatggcaatattataatgcaaattgcacatcactagggacccttcaacagtttgtccattatgcagaaacacttcaatcttaatgtcaccaggtttgtaggcctcaaactgagtgtcagattttctaaccaaagaagcagagttaagtatccacgtttcttggcccacatgatcaaccactgtccctgaatacagccttgcccttgctctccatcagcgatagcgtcaaggaacacgatgga

SEQ ID NO: 24523 - DNA, 1409 bp, Setaria italica
  misc_feature (1)..(15): n is a, c, g, or t
  Peptide Sequence Number=SeqID_90497
nnnnnnnnnnnnnnnttatcatcttatttttcgggtattgattacaaccatacataggacaataaactaatagaggcacatacctaagaattgtgatcatgagattcttaaaaaagctttcttttggctacaataactagtaccttgctcaatgccaacaacttacattggcagaagcacaaagaacaatgtaacaagcacttaggaattctactccacactaaccgaagtcttcctagctttcttgtcattaacatatatctggtagccatatgaaataaatccccagatggccaacaacatagcaataatcttcactccatccatcttgtcgtggaagaaaatcacagcaaaaactggaatgatgggtagagctagtgtgcttatcacatttgaaaagagggatgacaccacaaagatcaaaccaaccactccaacagaagctatctgccaagatatagcagtccacagaagtgtcatcacataggacagcctccctgagctgaaggcatgcatctccccctttaaagtcttccattcaccacttgcgaataacccaataagagaagctattgttgccactaatgctgtatatatctgcatgttcagcacgactgagaaagtttccctcttaataaccttctcaaatgtaacttgcattaaagacagaatcagtgagtatgtggccgatgctcctagcgtcaacatgaaacccaatatgtatctcccatgcgataaaccattagtaccctgagaatcttcatcaactccaagaagtgcggcagaaaaggtaaggaggattacagagttgaaaatcaatgcagtgaacttttgggcattgagaaaatatgagaagacagcattgaaggccagctgactagcacatatgagcgaatatgttgatacaggaaggtacaacaggccataggaatacatcaagtcatctgcagcaatgatgagccccaaggcaatatatatcagggtaattttggtgacagaagtctcagggctagcggtggttgtttgtgtagattttgaacggaacaggtatagggcgatgaatagcacaggaaagccagcagtttggacaaatgtggacatccacttgctatttccaccttgattgtagtagaacctcccaaggagtgttgatgctgtctgaccagcaatgaggaagaaaatgtttagggctaccatcaaccaccaatgccaatgcttggtaggagagttctgaggagctgtttcgttagcagaagaagtttcaggtttggatgatcccgtgatctgtatctggacctcatcttccctgctgccgcctcctcccacgcccgcgcccccgctgctgccgtcgtcgccggccatgccgtgcccccgcgcgcgatccgatgcgagtgggctgggcgggtctt

SEQ ID NO: 24524 - DNA, 235 bp, Setaria italica
  Peptide Sequence Number=SeqID_90498
ttttgtttactttattagtattggtctatttgtcttcttgggttggtcggtatttggtaggtttgcaatggtttgccatgctcgtatttcaacaccatcagctcaactagggctgcctgaactccaacttgggatcattcctggactgggaggaacccaacggcttccccgccttgttggcctccaaaaagcccttgagatgctgttgatgtcaaaggcaataaaaggaaggagg

SEQ ID NO: 24525 - DNA, 576 bp, Setaria italica
  Peptide Sequence Number=SeqID_90499
gaatgatccgtggactgcttgggatcgacaacttagtaatgatcttcagtcacaaatgagtacagaacttgacagatatttggatttgagtaacccagttccacgttctaaagaatttgacatcttaaaagtggtggatgggtaatgcaaccaagtattcgattcttgcccgtatagcaagggatctgttagccattccagcttcatctgtagcctcagaatcggctttcagcaccagtgaaagaataatcagtgatttccgtagcagcttgacacgcctgagacagtagaagcgctcatttgcacacaggactggtatcgagcagaaggttcatctgagtttagaatggtgtctatcaatgatcttatcatgggtgaaatggctgaaaataataccaggctatgatttggtcgatacaaaatgttgctagctggtcagctggtccttggatgcatggccactgcaagtcagaatcctcagtgtaaagatttacagagatcttgaaagtatcggtgttgtcatgtttgtgtgccagactttggttaccgggtcttgtcaattagatattgtgcctg

SEQ ID NO: 24526 - DNA, 193 bp, Setaria italica
  Peptide Sequence Number=SeqID_90500
ctcagtcctagctagcagctcctttgctcctcctcatcccctttctggacttgtgcttcatctccatcccttccccaagcagccaagaagcgtagccgagaggctgaagcaatgggcgaccgggcgtacgcgggggcctccaagccggtccccgtgcgcgccaccaacggcaccgcgaacggcggcggcgccg

SEQ ID NO: 24527 - DNA, 1193 bp, Setaria italica
  Peptide Sequence Number=SeqID_90501
agaataatactttacaagcatcaacaaaactgccacagccatgcatggatgctctgtatgaaagttcgtacattaagtttatgaccaaaaaacgttcacaaaaagcacgaccgcactgttccagtttcattcatccaaatgatgagctggaaaacaggttttcagctgaaagcaatttttacggtggatctaatggatccataatatcagaagatacttttccaaactcttcacctctgaccctgggcaatgaaagaataaactctgatactcattgtgatgtaccagaagggagctcagcaaatacatcaacaggaaaatatatggattaccttcaaggagttgcctcaaagctgaaacatcttgatttgaacattgaacaggtgcacggaactgagatgcatttatctctgagcacacctgctgtcatttcttttggagaaacagatggtctatcaaatgcccttgtcccttatggtggtggagtgataattccatacgagaggcccttgcagttggtcaaaaagcagcggcctcaggctaaggttgagttggattttgagacgacaagagtttggaatcttttgatggggaaagcaagtgagcctgatggaactgatattgagaaggagagatggtggcagcaagaaagagaagtttttcaaggtcgtgctaattcatttatagcacgcatgcgacttgttcaaggggacaggcgcttttccccttggaaaggatctgtagttgactctgtagtaggagtatttctcactcagaacgtagctgatcatctttcaagctctgcctatatgtcccttgctgcaacctttccgtcacagtcagtcaatagcaactgtaaggatgatgctactaccaccaaagacaatgaacaaaccatcagtgcaagtgcactaggagagaaaaacatatttgacctttttccaatggtaccagacctgatagaggagtgggttgcgaggaactatcaatgacctatgagaaaatacacatgggaccaaaggacaatactaggactagtgaattgattgaaggtgaaacttattcctttggttacaaatcagcaaatggaagtgttttcaatcaccaagtgacaggaattgaacataaagaacaacaatttccagatttctccttggtagaattaactgagcctacagaattcatccaacaga

SEQ ID NO: 24528 - DNA, 556 bp, Setaria italica
  Peptide Sequence Number=SeqID_90502
gcagcagatgttgccatgtgcgcaatgcttgagatagacaggaatactcatcttaaggccgagactaattcaaggcccatgactaattcaaggcccagggtgcggcaggccggcagccgacgaaaggctcataatcacaaacctccctaactcctgcacgggccagaggtaaagcggtgatagcacggcccggaaggaaaacatgggccagccggccggctcgatcgatcttccgcccgctacatactgcagggccggtgcattcccgacgcgaaacgctcgaaagccgtggccgtgcctcgttggttcggcctcccaaagccgaagatgcccacggtcgccttcgcggcaacgatgcccacagtcgccacacgcaacgcaaaacatctgggagaagcgacccgtacgcacacgtaaactgccgataaaatttgcacgagcgaggtcacgagtctagttaggtcttggaaggagagttcggtgctgccggttctaccctatagacgattccctgtaatttaatggggtctggtttcccttttttttttttttgctg

SEQ ID NO: 24529 - DNA, 207 bp, Setaria italica
  Peptide Sequence Number=SeqID_90503
attagtgcattgttcttacagctttcaccagcaatgtaatactcagttgcaccttcatgcttcatcacgtcttgatcctgtgcagcattatcatctgtggctgttatcaattgatcaccagagcacatggtgtactgttccacattactcacgtctggtagagatatggcatccccaccttgctctacaaccactacgatgttctcc

SEQ ID NO: 24530 - DNA, 651 bp, Setaria italica
  Peptide Sequence Number=SeqID_90504
tgccatctttgattacaccttgtttgtcaattatatcttcttgatccaccttctcgttatcttccacaccattctcattcttggttgatgtcaattcgtcaccagaagagtgctctacttccttctcttgatcttcaatatcaatgccatccgtggtcacaaccccttcaacaacagcaccttgctccccaatctcttgattttctgcagcattatcatcagtggttgctctcagttgatcaatggtgtactgttccacattactcacgtctggtagagatatggcatccccaccttgctctacaaccactacgatgttctcctctagtaacaccacaccattgccatccttgatcacaccatgtttgtcaatgacatcttcttgatccaccatcttctcgttaacttccacagcatttccatccttggttgctcttgattcgtcaccagcagattgtttcacttccttctcttgatcttcaacagcaatgtcatctgttgccgcatccctatcaacaatggcacattcttcctccaccacctcttgaccttctgcagcgttatcaaccacggttgtttttatttgtaacctaacttaggttagttacttaattttaagtttacttttaccaaccaaccttaatacttaga

SEQ ID NO: 24531 - DNA, 718 bp, Setaria italica
  Peptide Sequence Number=SeqID_90505
ccgccctctcctcttcttccacgatattgccatctttcacctcttttgacccatcattggtgcattgttctacagcttccagagtagtgtaatactcggttgcctcttcctgcttcaccaaatcttgatctcgcccagcattatcctctgtggttgttctcaattgatcaccagtgcacagctccaccacctcaagttgatcttgtacagaaatgacatcctcaccttgctctgccaccaccacatcctcctcttcctcttgcgatcccacagcaacaccatcctcggcagcatccagtatgctaacagcaccttcttgctctgtcaccttctcatttacttccacagcattgtcatccttgactgccctgtttcatcaccagcacattgctctactgcagcgttgttactctgatcttccactacagcagcacaatcctcagtggccccttcttgctccaccacctcctcttgatcttggaccatgcaaccgtccacggctgcccccaattcatcaccttggcactgctccccctcctcctgaccaagcaaaggtaatcaattctgttcgcagagcactcatcaacagcaagaccttccttctcccgatcttcagctgtaggccacacttgctcctccgccggtactagccctagatcctcctcccccatacctgcgccaagcccagcaacccgatcctccccgtgctgaggctgga

SEQ ID NO: 24532 - DNA, 1149 bp, Setaria italica
  Peptide Sequence Number=SeqID_90506
tccttctttctttcctacgtattatttgtcctattcttttctactttctttttgtaccctattctatttggttgtctatttgtttcttactagtctttcctagtagttagttgttaattacttcggtttgccttcttcctgcttcaccaaatcttgatctcgcccagcattatcctctgtggttgttctcaattgatcaccagtgcacagctccaccacctcaagttgatcttgtacagaaatgacatcctcaccttgctctgccaccaccacatcctcctcttcctcttgcgatcccacagcaacaccatcctcggcagcatccagtatgctaacagcaccttcttgctctgtcaccttctcatttacttccacagcattgtcatccttgactgcccttgtttcatcaccagcacattgctctactgcagcgttgttactctgatcttccactacagcagcacaatcctcagtggttgctctcagttgatcaatggtgtactgttccacattactcacgtctggtagagatatggcatccccaccttgctctacaaccactacgatgttctcctctagtaacaccacaccattgccatccttgatcacaccatgtttgtcaatgacatcttcttgatccaccatcttctcgttaacttccacagcatttccatccttggttgctcttgattcgtcaccagcagattgtttcacttccttctcttgatcttcaacagcaatgtcatctgttgccgcatccctatcaacaatggcacattcttcctccaccacctcttgaccttctgcagcgttatcaaccacggttgtttttatttgaccactggtgcatagctccaccaccttatcttgattacgtacaaaaatgtcaccctcacattgctctgccaccattacatcctcctcttgcaattccacaataaagccatccttggctgcattcagtacgccaacagcaccttcttgcttcaccggcctctccttttcttccacaacattgccatccttggctactcttgattcatcattggtgcattcttctatagcttccaaagtagtgtaatactcagttgccctttctttcctcctcctgtcctctccgtctccgtctctctccatctcctcctccgc

SEQ ID NO: 24533 - DNA, 496 bp, Setaria italica
  misc_feature (23)..(23): n is a, c, g, or t
  Peptide Sequence Number=SeqID_90507
agtggaggattgcgcagagcttntaaggagaatcatccacaagtaatgtatttgaagctgaatagtctccctcttcccatggaagatcaggttcttccttattccacaattctcagttccttcagaactaatggtttgtgcatgttctccagtgttttatgtccagtaaatgtgcatttagacatgtcccaacaaaatagcaggcgtggtttgaaatctctcataacgatattaacaaccgaagcgacattttctttttttcttgaagaccatacacctagctcgaaattcagggcgcagaagttgagaaaatcatcacagtaaggccttcggaaaactgataaaaaaggtatatcatcatatatcaacatcttctgtcacattctagatcaccattgtcgtaaaataataattataggcgacaagactagaaactgaacctaattttcctcgaaccttggcatcagccatgtgagcattgtggtagtcatcattg

SEQ ID NO: 24534 - DNA, 1637 bp, Setaria italica
  Peptide Sequence Number=SeqID_90508
tttttttttttttaaacattgcaagcagttcgagacaataaactctgccacaccattcattcatttggtacatttcatagagcctacaggctacagttaaactggtacaacaaaaatactctgtaatcctcaatacagggatacaagcaaactggcactcctcaaagaagaccacaacatacaagtttaagaacttgatccctgaccatgtatcactactggactcccaggaataggggagttcaagcacaacatgtcaagggagagtgccctttatcggcaatctgagcatagaaattccaatggggatcacattcggtgatgaagggttgaccaaatggattattacgaacaaaacactcaacatcatctgcagcagctagattctgcagatacatgcgaaggtctccaccaggacccagtgaattgtcattccagttcagataactgtaggagcgagggaaaattgcagtatgtggaggattgcgcagagctttgtaaggagaatcatccacaagtaatgtatttgaagctgaatagtctccctcttcccatggaagatcaggttcttccttattccacaatttcctcagttccttcagaactaatggtttgtgcatgttctccagtgttttatgtccagtaaatgtgcatttagacatgtcccaacaaaatagcaggcgtggtttgaaatctctcataacgatattaacaaccgaagcgacattttcttttttcttgaagaccatacacctagctcgaaattcagggcgcagaagttgagaaaatcatcacagtaaggccttcggaaaactaattttcctcgaaccttggcatcagccatgtgagcattgtggtagtcatcattgatatccgcaagtaaaccattaagatctaagatgagaagctttttcttcggaaaccctaaggaccgtcctggtgaaaagaaaagattgagcttttccatatatgcctcagcaaaatgggaagtgctcagatagttagcattgtgatcgtttgatgaacatagtacatcttgctcttgcagaccatttctctccatatttgtgtagtccaaactactctttcccagttcactcctcttttcaaaggtgctgtccaaattactagttcccagttcacacctcttttcagtggcacggttcaaatttacaccatacgcttctgatctctctgcattatccagtggaactaagttagtcatggctactttgttctgattttgattctccctttgttccttgggttcaagacatgaagtagtgttctcagaaacgactgccatcaaaccagaattatcagcagcggttggcaatagagaatcctgtgaagtagatcttttgcgacgattgtgcctttttccgcctctttttctcctcttctttttctctaaactgctggagttgatagaagctccattttcattttccttatattcttctgacttctgcaaagagctacagccagtacatattcttttctggtatacttcgtccaggttccctgacaagtcggtactcttcagctctggaaagtttgagtccttattgtaataatcagatccttgtgcagtgcaattatcaattgggaatcttacatcagatctcttatataac

SEQ ID NO: 24535 - DNA, 286 bp, Setaria italica
  Peptide Sequence Number=SeqID_90509
caaacgttgtatgcgctcaagcgtggagaagggaaacgccacacggtcccacaatatcattcctccatttgttccagctgcatcaactccccttctattcgcttggggcagctctccaggttgcgaagcagacaagaatccggcaggctcacgacctccccctctccgctgggcaggctgctgttacgcttccgaagcaccaaccaatccctcagtctcgatgcaaaccgtgctatccacgcaaaagttagggaacttgaaaatttcaaccttgcccacacctcag

SEQ ID NO: 24536 - DNA, 1046 bp, Setaria italica
  Peptide Sequence Number=SeqID_90510
tttttttttttagtaatcaaggctagagcagctgaacaagtagctgtaccattagttcatacactttgcatcaaacgaaaaaattgaggcatgcaatcagaacatgctagtttacacatttttttcagcactggggagctactagacatgaggatatagcaaaattttgtaggctacctggtactgaagatcagaagatcgcagggatgtttcacttgcattctagccctgcctctgcagctcgccggggcttgtttttcctccggcttccaatctgcctgaacccattagtcctcgttgattcatcgctgcttgatcgaacactagagttattctcttctaggacaaggttagagccttctttcagcggcctgcccctcttgttaccaacagatgaagtgctgttcttcagcttcacgtcatcaacttcttccccatctccatcaaccttttcaactaaattttcgacatctgtttgatcgatcttatcggtgaagcgcttttggggccttcctcttctcttccttgcaggcacaacttcttcgccactgcttcctttgtcctcatggctcctgacaatggttagcttcttccctctgcctcttcctctacccatcgattcgatatcagcagtgccaatcactggagctggctctgtcgatgctgctgcttctgtttatcttattgcttttttgttggaacttggaagatgagtattttcaaagagatgacttgtgattgaatagtccagccaaaaacatatgctagaaatcttccataaagcttgcgtcgactccaagcagcatcatgcaccccaggactccaagtccgttggcgaaaagatggatgctttgctgttgctggaggaaaagaaatgcctagcacccaatggatcggcggcaatcttcggctcgcgatgccggaagtaccgcggatcgggaggtcgcagcaaaagattgagatgtggctttcgggatgggaagcgggaaggtttctatcaacgaacagctagcgctctagagttctggatggttgagctccaatag

SEQ ID NO: 24537 - DNA, 495 bp, Setaria italica
  Peptide Sequence Number=SeqID_90511
tcgtaggtacgccatcgaccttgagcagctccaagagcggacccagcgaatgcttgactgggaccgtatcaatgatgtagtcaaggctcctgctcttggcctgcatctgtttcttgtcggtgctgacaatgaagtcgtctgccttgagcccctccctcgcctccttctccttgtccggcgacgtgctgacgacggtgacgcggaggccgaacgccttgccgaacttgacggcgatgtggccgagcccgcccagcccgaccacgccgaggctcccgccggccttcaccatgccgtgccgcctcatcgggctgtacaccgtgatgccggcgcacagcagcggcgccgccgcgtccagcggcagggtgtccgggatcctcgccacgaacttcttgtggaccacgagcatctccgagtagccgccgtaggtgacgctgccgtccgagaggatgccgttgtaggtgagcacgagcttgtcgcagtagttctcgtcggagg

SEQ ID NO: 24538 - DNA, 258 bp, Setaria italica
  Peptide Sequence Number=SeqID_90512
ctgctttagtagcagaggtagttagaagggagggagttgctttgtggaacaccatactcccatctattgtttctctctctaacagtggtcctatcgaggctgagttagttgccatgattctaaggtggcttccagaggatatcactgttcataatgaagatttggagggtgatagacggagatctctgttacgcggccttactgagtcactgccacaaattctgccactgttgtattccctacttgagaaacattttg

SEQ ID NO: 24539 - DNA, 1095 bp, Setaria italica
  misc_feature (1)..(10): n is a, c, g, or t
  Peptide Sequence Number=SeqID_90513
nnnnnnnnnntttttttttttttttttttagttaagtaactaaatagacatagataaggtcacaatggaacatttgcaactagagggttaagatccatattaattacagacatcgcccttcaatggaacaagtaagagtttataacagctgctgggaataacagtaacagcaaaaacacgaccggagttgcaaacttctttcctctccagggacctaacggacactctgatttgctgccaatggatgaaacggcgccatgagtcagcattatgcagtagctgcacctaagcatttggcggccagagctttggatcttgagttgtgtccaccacggtaggaggcatccactgccacatcgccatcccagggaatgctgcagggattggggcgcctttgttggttggagcttgctgtggtggtgcgaatggagcaaaagcagcaggatggtatgcagctggatgagggagatggggaacatatcctgtaggagctgtactgattgctttaacttgctgctccagcctctccttttctgccttcagtctcactttctcttctcggagctcattcttctcctccttcaggtccttgatattctctcgcagcttctcgtttgattctttaagcttttctgcctcacctctaagttgtgccaccatacgagctgcatcactcaagatatttgctttatccaacttagcttgcttaccaggattcataactgaacttaattccagaaacctgtcattcagcctgtccctcctcattttctcacgacaagctttggattttggaccagatgaagatggttcatctctagcccttttccccaaattagattgttcaaacccacaagcatctccactgacaccatcaatcccaagtcctccgtcgccggccaggttgggcacgccatcacagaagagggcgagatctccgtcgtcgccggcgccaccgaggaggaaatcttccacggggtctccgccaacgcagccgtccatcgccgccgcggccgtgggtccggcgccggaggaatctgcggtcacggctagggttccgcgggtcgggcgacgagaggtcgagaacgaatgggg

SEQ ID NO: 24540 - DNA, 1509 bp, Setaria italica
  Peptide Sequence Number=SeqID_90514
atctttaccaaaaaccaaatcgcgcacaagacctatccggctatcccttctaaactgggaccctctgcttcaccgaccatgtcaacacagctgcaaactgcactagccatttcacaatcatccaagcgaaacaaatttgaccctgaaactttcatagcgccctgctgggtaagcagggccttccctgtagggctgtaggatccaacgacaactcagctagaccttgacaaaactttcttcaccctgccattcctcacttgtcatgacacaaaacaagtttcacatgatcagctgcaattgcttctttccacctttgagaaaggaaggctgtagcttctttactggaaaatacagttcgtcgtaaatgttcaccctctgccaaatctgcactgcggcaggttgaataactcttttcatctgtgataccactgaagcaagaatgcttctcttcagctggcacactatttccatcactatgaggaataccttcatttttgttttccacatgcgtaaccggtcgcatcatcttgactgatgcatgtttcacagtctttgtgctgggagtgactgggtcatccttggaacggaagtccttcaagtgttcactaccatcttcaatcgcaacacttatagatcctattagcacacgagagtttttgctaggagccatgttgtgttcatcatctacatctaacccatgttttggacactgtttctcaatctcagcttgcactttccgtgcccaagttttgtttctatttggcgaggaacagacatttggatccctgtaatttgaagacctcgctaaagcaagttgctttgaagcaactgcggaaccagatataatgctattttcagcaagcttctctgttcttcctaaatgatgccttgaaataacttgtggccgtaacacagcacctttatccattacaggccctgaatcacagctgacatcttctaccaataggttcgcattaaaaccattgtcagtttctgaagtaactggtggtggaaattgaatatattgtgacccttcttgctcatgaaggtctggatctgaaatagccttgaaactttgaatgccaggataacatgttgcgtcatccatgattttgggtaactgaattgccacatcatggtccttgaggtcttttaacctctgttctttctgcctaagtttcttcatccgcttcctttccatcagttcggcttgccttttctgagcagcttcctcttcctccaccagcaacttctggcatcttaatgcttcagcagccttctcagcacaccatgcttcaaccagcttttgttcgagcatgtaactagcgcatgcaacaacatttttcaactcagttgcaattttgtctgcctctccatcaaacaaaaacttttgtatacaagcagccgtgtttgtgcaaagaaatgttttctcacttgcttcatcgagaacactaaatagttcattcgatgatacaggcagctgcattgaaacctttgtttgaatcaaat

SEQ ID NO: 24541 - DNA, 485 bp, Setaria italica
  Peptide Sequence Number=SeqID_90515
cggtgtagtagagggagccgttgagctggcggagctccagcgtggagatgaaggcctgccccgtggtggcgttggagaggcagacgctgagggaggggccggcggggcgcacgacggcctcacgggtcaccaccttggcgtcgtcgtagatgacgatggtggaccagcgggaggccccccaggtagaggtcgaactccgggaacacgttgctgctgtcgaagttgccgtacaggaaggtggcgcggacaaggtagcgggtgcgggtgcggacgcccagcgtgtagcagtgcttgctgctaggggcggcggcggaggaggaggggaagtagcgcaccgtcgagtactgcgtgcgcttctccgacggcacggcgatggtggccgtctcgccgaaggggaaccacccgccgtcgcccgtccactgcaggcccagctcgtccgtgtagtttgccgacccgccgcagtcgatgctcacgaaaccaggcat

SEQ ID NO: 24542 - DNA, 548 bp, Setaria italica
  Peptide Sequence Number=SeqID_90516
ggaggagcccttcgccttccccgagaaggcgcaagagccgttctccgtctcctaggaggcgcaagagtcagtctccatcacaaaagcattacagaagaaagagaagtccaagtgtcactagctctccaatcaccgcatcccaaagttcccaccttgggttggcagagaataagaatgctactgataagcaaaggctagaagaagaaaagaaaaggcttttccgaaggaagctactgctatagttccacttgttatatttgatgatgcaattggtgatcctttatctactcttgaccagttttgataattcgtttttggatctggaacgtactagaggcgacaaaaagaagttgaaatgagactattagaggaggaaacagcaaaaagagttgagcaagctattaggaaaaaggttgaggagagtttgaatcgtgaggaaattaaacatgagatacaacggcgaattgaggaggggagaaaaaggatacatgaggaggtggcggtccagattgagaaagaaaaggaggcagctttaaatgaagccaagc

SEQ ID NO: 24543 - DNA, 510 bp, Setaria italica
  Peptide Sequence Number=SeqID_90517
tgttttttagggttcttttctaagaatactagaacggttaattccttgtttaattctgttatgcccctatatttatcctcacagtgccaatctttgtaccgcagaaggaggagcccttcgccttccccgagaaggcgcaagagccgttctccgtctcctaggaggcgcaagagtcagtctccatcacaaaagcattacagaagaaagagaagtccaagtgtcactagctctccaatcaccgcatcccaaagttcccaccttgggttggcagagaataagaatgctactgataagcaaaggctagaagaagaaaagaaaaggcgacaaaaagaagttgaaatgagactattagaggaggaaacagcaaaaagagttgagcaagctattaggaaaaaggttgaggagagtttgaatcgtgaggaaattaaacatgagatacaacggcgaattgaggaggggagaaaaaggatacatgaggaggtggcggtccagattgagaaagaaaaggag

SEQ ID NO: 24544 - DNA, 1869 bp, Setaria italica
  Peptide Sequence Number=SeqID_90518
taagttaacttaagtaaggttaaactagactttacggcaacgttttaagggcttcaggatctgacggtaattccttgtttaattctgttatgcccctatatttatcctcacagtgccaatctttgtaccgcagaaggaggagcccttcgccttccccgagaaggcgcaagagccgttctccgtctcctaggaggcgcaagagtcagtctccatcacaaaagcattacagaagaaagagaagtccaagtgtcactagctctccaatcaccgcatcccaaagttcccaccttgggttggcagagaataagaatgctactgataagcaaaggctagaagaagaaaagaaattatttttattaggtttaggtttaaactttagtttctttaaaaagtttagtttttgtttagtttctttaagtttcttttaatatgttcggttgtgttacgggtataaagtttacttagcgttacaatttagtacattatttagttagtgccctttctttttggcttcacttgctgtgtgttagacttctctgtaatgatgatgccatattagctaggcagtagtacaatagtctgagcatgtttgacttggtttgatcatggtggtgtcatctcagttcgcttctttttcgtgctctaaatctgtaacgcggtgagattttaacttgtttctgttccatttaagccatcccatgtggtatgcgatgacatgccatttcgaagtgtccaaaaatcattcttgcttctgcagttccactaataagtagtagtgtggaatttactgtataattgctgaagtttgaatattgactttgattgggtatgtagcatgtaagaatatggtttagcaggaatattgaaatacttcatgataagctataaaactgccacaagttacttgacattcttctctacaggcttttccgaaggaagctactgctatagttccacttgttatatttgatgatgcaattggtgatcctttatctactcttgaccagttttgataattcgtttttggatctggaacgtactagaggtatgcctgaaatgcattagcttgtagtcaaaactatgctgatgaaaggcatagtagatcatagatagtgttaagattttaaatcatgtgctttgtttttggctgcttttatggccttcaggagttgaataaaaaatcggcattggtcatgccctgcctccatggttcgtttcattaacttgctatatcacctgcaggcgacaaaaagaagttgaaatgagactattagaggaggaaacagcaaaaagagttgagcaagctattaggaaaaaggttgaggagagtttgaatcgtgaggaaattaaacatgagatacaacggcgaattgaggaggggagaaaaaggatacatgaggaggtggcggtccagattgagaaagaaaaggaggcagctttaaatgaagccaagcagaaagcagaacgtgaaaaacaggagcgggaggagcaggagaagaagctcgaagaagaacgaaagaaagccgaagaggcgttgatgaaagaagcgatggaacagcagcagaaagagctagagcggtatcaggagctggagaagcttcagaaagaaagggaggaggccatgaagcggaaacagatggaggaagagcagcagaggcagaaccagatgaagctgctgggcaagaacaagtcgcggccgaaactgtcgtttgctcttggaatgaagtagcatctggttcacagaagtgaaactattcccttcctttagtttagtatcagtaaccgcaaatctctgtatcaaaccgcccatgtgttctgcagacaattgcaatgtgttaaatgttcttcacctgctccctgcggtgctgt

SEQ ID NO: 24545 - DNA, 1642 bp, Setaria italica
  Peptide Sequence Number=SeqID_90519
aaaaagatatgaggtggtgctaatccgcttatagaacttttgtacaaaacttgtttgatggaaaatgggacatatgttctgcttatatttgttggaattggatctatatgaggtgttgcttggtgtcgtttgaattagcaagtgtggtagtatgttgtgctatatcatttttcaattaatcttttacgaagatgtacatcattcacaacacttcagaactatacagattttcaagggaaaaaaatgctcccgtttccttgctgtacagagttaaaatcagcatgtaaagagcagataatgcttagatgtagttatgccatgttttgcattacttgcctgtacggactaacgagagttgctgtcgcaaaaagcatggaatcctcaaagattttactctgtgctgtattgctgtgatgctccacccccaaaggttactgtaacagtgtctgaggtaactgctttcggcacgttttagggcttcaggatctgacggtaattccttgtttaattctgttatgcccctatatttatcctcacagtgccaatctttgtaccgcagaaggaggagcccttcgccttccccgagaaggcgcaagagccgttctccgtctcctaggaggcgcaagagtcagtctccatcacaaaagcattacagaagaaagagaagtccaagtgtcactagctctccaatcaccgcatcccaaagttcccaccttgggttggcagagaataagaatgctactgataagcaaaggctagaagaagaaaagaaaaggtgggaagtatctgctttgctacatagtctagattattccttctactgaccaaaatgttactgctgctccctttcctgtatctcctctgcaatgttgacattgaatttttactaatttagctgctgttcaccagaatatatcgcaaggtcagctctatttgacatcagttgtctatctattttcctgcaattttgacattgaattttattattgcatttttgaagtaataacgaaaatagctacttgaaaatattgattattggatgaggatcactttggttttgtaagatgattgcatttcgaaattccaaattcggtaggagctcctgttttccttgaaattgtggctttaggtagctagctccaaagaaatcatctataatggaaaaaaaacgcattgtgactttcctgtcaaaaaagtgcatcttagaaattaagtggctgttctggaaaaaaatatgttggatgttagaaaatggtgtgttcatgtgcccgaaccctgatttgtgactcttgttgggtttcaactctagccttccccagttgtctgtttatgtttattttaatgccattagagcagttgttagatatgttcggttgtgttacgggtataaagtttacttagcgttacaatttagtacattatttagttagtgccctttctttttggcttcacttgctgtgtgttagacttctctgtaatgatgatgccatattagctaggcagtagtacaatagtctgagcatgtttgacttggtttgatcatggtggtgtcatctcagttcgcttctttttcgtgctctaaatctgtaacgcggtgagattttaacttgtttctgttccaatttaagccaatacccaataa

SEQ ID NO: 24546 - DNA, 409 bp, Setaria italica
  Peptide Sequence Number=SeqID_90520
tagtatttcggtatttcgggtttccttcttttcggctcccgcgcccgccatgaacggcctccccgacgccgacgctgcggcgccgctggcgaccgccgcgccaccgcagaagcgcgacgagtggagcgagggcggcatcgtgcgcctgctcgaggcctacgaggccaagtggctgctgcggaaccgcgccaagctcaagtggagcgactgggtcgacatcgcccgggaggtgtccgcgcattgcgccgacgacgccgcggccgcggggaaggcccccggcggcggaggcggcaacagcgccaagacccccaaccagtgcaagaacaagatcgagtccatgaagaagcggtaccgggccgagtccgccgcggtggcgcgcgcaggccccgccgccgccggcccgtcgtgg

SEQ ID NO: 24547 - DNA, 381 bp, Setaria italica
  Peptide Sequence Number=SeqID_90521
cccagcagcgccgccggcgggggcgaacactactaccacgacgacggccacggccacggccactaccacctccagcaagaaccgctgcactcgcatcagcagcagccggcgtacggcgaccactactaccagcagccgctgtacgcgactccgcccgcgccgctcgcccgcacgtcctctgtcctggaccggctcaggtccttcggcctctaccgcttccgctccggcgacttcccgcccgagtacggcgccgcggcggggccgaaccactcgcaggacgcgtccgctccggtggaggaagaggcggcggcgcagcagctgccggaggtgcactacgccaggagccggtcggagccggcgcccgcgcgggaggagaggagg

SEQ ID NO: 24548 - DNA, 351 bp, Setaria italica
  Peptide Sequence Number=SeqID_90522
catttcacagctcgagcaagagatcaagcaaatcaaaaggaaagcatggcagcgggcttgcaagtatttggccagccggcatctactgatgttgccagagttctgacatgcctctttgagaagaaattggaatttgagcttgtccgcattgatacatttaagacacatcacaagcttcctgagttcattaggctgcgggatccaaatgggcaagtgaccttgaagcatggtgacaacactctcgttcattcaagggatatatgccggtatgtctgtaaccagtttccaaatgatggaaacaagagcctttatggatctggggctctagaacgggcatcaatagaacagtga

SEQ ID NO: 24549 - DNA, 376 bp, Setaria italica
  Peptide Sequence Number=SeqID_90523
gtatttcctcctccccagaccgatcacttcacccagagagcgagtgggatcgcacgcccaacgctagccttgccagttgccacctgattgcggcgcgcactagctagctagctctcgactctcgctggttgtggttggtttaaaggcgacggcccccctcggcatgcgctgtcctgctcgcccgggaaatggcgcccgcagcttcgatcctctcggccacctccgccgccgctgcttccaagcgtccgcccgcttccgacgctgagccgctgctgcagggcgacggcgaggcggcgcgcaagggccagcagccgagcaggcagcagcagctggagtgcccgcgctgccagtccaccaacaccaagtttcttgctta

SEQ ID NO: 24550 - DNA, 451 bp, Setaria italica
  Peptide Sequence Number=SeqID_90524
tcatcgccgggcgcgagacgacgtcctcggcgctgacgtggttcttctggctcgtgtcgtcgcggccggacgtcgtgtcgcgcatcgccgacgaggtccgcgcggtgcgggagtccaccggcacgcgcgccggcgagccgttcgggttcgacgcgctgcgcggcatgcactacctgcacgccgcgctcaccgagtcgatgcggctgtacccgccggtgccgatcgactcgcagtcgtgcgccgccgacgacactctgcccgacggcacgcacgtcggtgccggctggtccgtgacgtacagcgcctatgccatggggcgcctcgcggccatatggggcgaggactgcgcggagtacaggccggagcggtggctcggggaggacggcgcgttccggccggagagcccgttccggtacaccgtgttccatgccgggccgaggatgtgcctggg

SEQ ID NO: 24551 - DNA, 647 bp, Setaria italica
  misc_feature (16)..(16): n is a, c, g, or t
  Peptide Sequence Number=SeqID_90525
ttaccacgtatcaagngaaaaaaatcttgttcttttaattagtagtagaaataggtggtaaaattgccgcgttctgttggcaaaaaggacgatccctgacaatgccacggctgatgtggcggtcgacgagtatcatcgatacaaggtgcgtcatatgcagatatgcagtatgggtattctcaatttctgattactgtggttcttttgtggtgtccttgtttgatgcctgatggatgttctttgaggtcaaggaagatgtgaacataatgaagaacatgggctttgatgcataccggttttcgatctcttggtctaggatcttcccgaatggaactggtgaggtgaaccaggaaggagtggattactacaacaggctaatagattacatgattcagcaaggtaaatttctcaaccagccaaacataccttataaagaaaactatacgtgtcagcctcaaaccagattcctgaccaactttgttttttaaaaagaaaactgacttatgggcttatggctctggtgctaattcaggaatcaccccatatgcaaacctctaccactatgacctcccgttggcactccatgagcagtaccttggctggcttagcccaaagatcgtgtaagattttcaaactaggaatcgaga

SEQ ID NO: 24552 - DNA, 1725 bp, Setaria italica
  Peptide Sequence Number=SeqID_90526
acgccttcatcaaggtaccagggacgatccctgacaatgccacggctgatgtggcggtcgacgagtatcatcgatacaaggaagatgtgaacataatgaagaacatgggctttgatgcataccggttttcgatctcttggtctaggatcttcccgaatggaactggtgaggtgaaccaggaaggagtggattactacaacaggctaatagattacatgattcagcaaggaatcaccccatatgcaaacctctaccactatgacctcccgttggcactccatgagcagtaccttggctggcttagcccaaagatcgtggaggcgtttgcagactatgcagaattctgcttccagatgtttggagacagggtgaagaactggtttaccttcaacgagccgaggtgcgtcgcggccctgggctacgataatggcttacacgcaccaggaaggtgttctggatgtgctgctggagggaactccactacagagccgtaccttgtcgcgcatcatctcatactttctcatgcagctgcggttaagcgataccgtgataaatatcagctctaccaaaaggggaggattggaattctcttggattttgtgtggtacgaacctttcagtgacagcaacgcggatcgagctgcggcgcagcgagccagggacttccacctcggctggttcctcgaccccattgtaaacggacggtacccatactcaatgcaagagattgtagaggatagactgccattgttcagtgatgaagagtccaggatggtgaaaggctccatagactatgttggcatcaaccactacacttctttctacatgaaggaccctggtacatggaacctgatgccgatcagctaccaatatgattggcatgctagttttgtctatgaaagaaacggtgtccctatcggcgctcatgcaaactcctactggctgtacattgtaccatggggaatcaacaaggctgtcaactatgtcaaggaaacctatgaaaatcctataatgatccttgctgaaaatggaatggaccaaccaggtaacatcagtatttctcagggtgtgcacgacacgataagaattcgctattacagagactacataacagagctcaagaaggcgatagatgatggtgccagagtcattgggtactttgcgtggtcattgcttgacaacttcgagtggaggcttgggtacacttcccggttcggcctggtctatgtggactacaagacactgaaaaggtaccccaaggattcagctttctggttcaagcacatgctctccaagaagaggagctagaattgcggacaagagggccaatggtttcaggtgtcacacaaaagttcactctgtacatctaactcctagatgtcagattagctttaagaaaccgtgcaaataatagtgtttcgatctcgacatctctagatttgtcaattgttgcaatactaaaataataaagtggtgccttcaaacaccttgagcctcaatgacagaactagtagaagcacaatgactggatgacaggcagatggcacaaaattcaacatctccgctaaaaaattcaataacatcaactccataacaacagataggaccaaaataaaattccattgcatccaagaggctgaaacatgaagtcattatattcaattatccaaaaagttgtattcgattatatgatatattatctcagcataaatgaacaaagaagcat

SEQ ID NO: 24553 - DNA, 286 bp, Setaria italica
  Peptide Sequence Number=SeqID_90527
ggtttcaatggcaagcagagcagctgcgctcgcaagggagctcaagaacatcaagtcggagttgcacttcatgcaggagaggtgtggtttgcttgaggaggagaataagagactcagagagggaaatgacagcggagtcagccctgaagaagatgacctggtgagactacaattggaggctctactggcagagaagtcgcggctggcgcaggagaacgccaacctgacgagggagaaccagagcctgatgcagctggtggagtatcaccagttgacctcccaggat

SEQ ID NO: 24554 - DNA, 1708 bp, Setaria italica
  Peptide Sequence Number=SeqID_90528
gatggtgattccatacaaggattcctcagttacgttatttgggctgctacctgatttacctgaaggctcagtcgtccaggtgttttcagttgaggtgtctgtaggcaattctgtggaagcatctattcctcttgagatccaacaattggttgaagattttgctgagttatttgaagttccaagtgatctttctcctcccaggtattgtgatcatactatcccattagttcctggagctgccccctttagtgtcagaccatatcagtttgcacggcatctcaaggatgaagttgaaaagcaagtcaaggaaatgctagcaacagttctgatccagaagagttctagtccattctcatctttggtccttttggtcaaaaagaaggacaacagttgcagattttgtgttgactacagacacttgaatgctattactatcaagggcaagtacccagttcctatcatagatgagttcttggatgaactatctaatgcaagttggtttactaacctagatctgaggtcaagattccaccagattcggttgaaaccaggagaggaattcaaaatagcctttcagacacattgtggccaatttgagtttggagtggttcctttttgattaactggagctcctggtacatttcaagatgccatgaacacaactctggctccattcctcaggaagtttgtgctggtgtttttcgatgacatccttatttatagcaaactctggaggaacatgtggttcacttcagattggtgtttgagttgttggccaaagacaagtggaatgtgaaattatccaagtgtcttttactcaaaggaaaatctcttatttgggtcaaatgatcggtgaacatggtgttggtacaggccgtagcaaaattgctgctattgctagttggcctagcccatcatctgctaaggaacttaaaagtttgtccgtaacttcggtattataagtaaacctctaacagaacttcttaagaagcatgtcttatttgtctggacacaattttatggagaatcatttattgctctcacctgtcctgactctccccaacttttcaaaggttttctgtattgaaactgatgcaagtggatattggatagaggctgttttgcttcaggaaggacatcctttagcatttttgagtagggcactgggacccaaatctcaagggttatcaaattatgagaatgaatacatggctattttattggcagtacaacaatggaggcaatacctacaacatgctgaattcataatttatactgaccagaagagtttagctcagttaaatgaacagagagtgaacactcaatggtaacagaaagtgttcaccaaattgttgggacttcaatacaaagttgtttacaagaaaggtactgacaatggcgtggctaatgcactctctagaaagtctacccatgatgttcactgtgcaacggtgtcaacaacatcacctcaatggttgttggaagtacaatttggttatcaataggatgaacatgccttgtcactcattgctaaactttctattgaccttgcagcagtgcccaatttgagccttacaaatggtttgctcagatataagaaccgcatttgggttggcaagaatgcccaactacacttgagactgttacatgcttgtcattctagtgccattggtggtcactctggaattcctgtgacatatataaggta

SEQ ID NO: 24555 - DNA, 912 bp, Setaria italica
  Peptide Sequence Number=SeqID_90529
cttcagaagcccacaaagcatacaaacaggcagagaaacttctgaacatgatagatcctggctaccagcaacttcaatttcctcttgaagcttttggattttagaccatatagaaccatctgtttcttcactgatttctgaaaggagcaattcaactaaccaaatatatccatggtgcctatatgatgaaatctgtgagtggagaagtgagtgcaaagtcgcccagcaaagcctggctctaagcgcgacatcagcatcatcacatccgtctttaatgctgctaaagcacttgtatgattttgttacttggatcatataagcaaactcattgtcaatcctggaaaatgtgctgacagttccatcaagtttcctcataaccttgtccagaagcacattcaattggtcatattgtgcagactgagacaatgccgctgatatagctttcctcagcatgtctccgacaccttcaacaccatgcttcacagatatgtagaaggcctcaggagcatcagcaaatgcaagaagggaagcaaggggctgggcatcatcataagtataggttgaaacactaccagccaggcatgtttcatttatttgatgcactacatagtcaaaaatgacaaaaaataaatcccgcttctcttccctggagttggctcgtgaatactcaagacaaatatagtcaattccgccaaggagatctatccgctcaggaacaaaatgtgtatcacgaacaccgttctgagttacatctgatacatggtacagcatgtttgtcagcatgcaaatgagcttgctgtgcaccacttttgcccatgagtgctccacactaatctcaagaagagtcttaaccacccttatgtccagacctcccaatctactcctgataattttcctccatcacaaacaaaa

SEQ ID NO: 24556 - DNA, 1592 bp, Setaria italica
  Peptide Sequence Number=SeqID_90530
tcagtgtctcgagttgatactatgctgcattgaacgcgcagccacaaaggcacctttgctacaactgtatgtgtaacatgcagcatagccaccatcaccagcacggaagtcagcctcagctactcgtccgacatggccagcagaagcactaacaccagcaccaacagatagatgtgcctttccactgaatgtcctgatggcatccgtattcctcagaacaatgatgaagtcagctatctcacctccagcctgagctccatatccaacaccacaggtggagattgctgaaggaggtgaccaggagccatcggcccttcgagcaacaaccagcccagtgccaagtttgtatgtaaccatcatcccgaccttcactacagtaactatagcaagaccttttgcttgtctaagaatagcgtcaggtatagccttctctggtttcaaccttcctaccttacagtaactgcgtaaagaatttgcagccttgtatatctcgtattccattgtgtgtgcccaagggaagttcagccatgacctcaaggtactcaggtctgtcacatcccgagttggaagttgtgacgcacgactgatctgattcatcaattgtggttgtatactctcaagccgtactccacagacatcacaaaccctttgaggttctgaagttctaaattttggaggcattaagcttctaccctttgtacaaccattacaaaatacaccaccacagaaacgacaatgatggcgagagcatattatcggatgaaatcgtacgctgcagagcatgcaagaggtagcagcactgtcaggcaaccactttgttggctctgtctcaagtagctcattcgcaataccagcattagcatctgcaagtgtttgcgccatatccttccaggcttcttggaggaagaagttggataccaccgacatcccgcatctcccaaaatcatatgtagcagcagatttcactctatcttttgccgcaacaaccatatcagcaaacacatcccacatcgtcatctccttattgtcttcatccagctcccagctaaactcttcctccgggaagtacccaccattgcaaccaaaccccctgtgccactcctcacggtcctgcgccgtcattggtgggacagaaacaggcacccaaatgcccgtatgttcatgaagtggttcatcgtagaaactattttcctggttccgtctctattaaagtttcagttgtatccgtgatgcatccattagcaatgggggcgcagctagcatcatggctgttgcccgtgccatttttggcaggtgactcgtctgcctcttggtcaaatatgttgagtcccgccaggccttcaacgcgctcgccgtcgtcgtcccacctcgccggcgagtcgccgccgccggcatccccggagcctccgccgccgggccgcggcgggtcgattgggcggtgggcccgctcagtcccggccatgggaccgctcgggcgggtcgcgtcgggtcgattcgccggcgatcgggtggggcaatccgtgaattttgcttccgcgtttggtaaaggaggcggctttttctgttgaggtcgccgcggatttggagtttgg

SEQ ID NO: 24557 - DNA, 421 bp, Setaria italica
  Peptide Sequence Number=SeqID_90531
gatcacaagaacacagcccgagacttcaccagttcaccacaacactgggcttgtgtggtcttctctctcccgcgcaccacgggctccgtctccgccgctcgtgctatcctgtcagatcctaagaaatggcggcggcagcaatcgcagccctatccttcgcttcagttccttgcagagagcatcagcttcgacacggagccagtaccttcaatgcgcaacaattcagtgcttccagctcccaccggcacaccgccaatctgaaatcgggaggaccaagaagactacgcgccgcgaagcgtgtcatcgtcgcgcaggccggcaccggcaggtacaaggtggccatcctcggcgcggcgggtgatatcgggcagccgctctcgctcctgatcaagatgtccccgctcgtctcggcgcttcacct

SEQ ID NO: 24558 - DNA, 1845 bp, Setaria italica
  Peptide Sequence Number=SeqID_90532
cacttcctaatttccccgatcgccttgaaccctagcctctccgcccccttcggcccccgcgttccccaaccctcatccgaccgcgctccacgcctgatttggcgccggaacgccccgcaggtcgctcgttcggagcgcaggcgcgccggcgcgcccggatccggcggaagcgcggcggatttcggcggttcgccgtctcgtcggtcccggcggggttatgaaggcggcgggatacgacctctacgatagtagcgggactgatgatgatctccccccagcacaaaatagaggactaagaggacgatctttcagtgggaacggacgcgcatctgctggggcatttccttacatgagggcaaacaatgatttggagagcgaaattcatcgggttgagcaagatgcatatactggtgttcttagagcattcaaagtgcaatctgatgcaatatcatgggaaaaagagagtttgattactgaactcaggaaagaactgagagtttctgatgaggagcatagggagctattaaataaagtcaatgaagatgggaccatccgtcgaatgagggagttaagacaggctggtggaaccccaagtgctctgcatcgtggcagcagggctctatatgatgcagaacctgggcccattgccaagagacaaaggccatctcattcgattccttcgcaatctgcaggcctccagtcccctgtgatgccttcccactcagttccatctgcaaaatggggcccactatcagcaagaggcaaaaagccaaagacgcccatgccatcggcactaccatctgcggacccaaactcattaataaatcacaaagtttatacaaggtggccagatgacaacaacttctatgaggccaccataacccgttataaccccgtgacgggtgaacatgcactcgtctatgatatcggcacacaagcagagacttgggaaatggtcaggctttgtgatatgccacctgaagatataagatgggaatttgatggacatctttcaaatcgagatggttggggcccttctggccctatgctgacgaggcacccaaccaacaatggtgctatgacaggtccaatcaggggtagaggcaggttatcaataaatgagcctgtaaaggactacactccacctcaaaatggcatcaataggaatttcgataacattgacattccaaacactgaaagtgttgtgacagaggtggagagggtattgtccaatccgaatatgcgtgaaattgaaaaggcaaggaaactgctgaaagatcaagagcagtcactactggatgcaattgccagacttgatgaagcatcagatagtgaaagtgaggatatggccacggcagggcgaacgggtcctgctggcgatggaaatggcattgctacttagttgtttctggcatgttgttggaatcggaaggttaacatgccgttttgtggaccacctgccccaatcactggacaaagaaaccatgtgatggcgaactgacatgaaatgggagcagttgccagttggtgcctgaaatgggattctttggttactccaacgaggggcagggagatgacgaaaaaaaaactcccaaaaaactgtttgggtgccatctcttctggtgattatggtggtggtacttcccatgtaactctagaagtaacttcatattctagaaatgatcattaacatgaatcacctgaagatgtctaaccctagcgtaatgtccaccgtaccgtgttctcagatgtacattgtattttgccctggttgtgattctagcgaacaggcaaagttggctgttcttgtattctaatgtgaaaagacttctcataccattttca

SEQ ID NO: 24559 - DNA, 464 bp, Setaria italica
  Peptide Sequence Number=SeqID_90533
ttgcaacaacaaatatctgaagctagcattgttgctgcaatatagatcctctgctattacgttgttcgcaaacaggttctggtaataatggcgtcgtcgaggaggattgcgacggtggcggcggctgtgctcttggtttgcgcgatcctagcttggacgccggaagcggcgaggatggggcggagaggtgatgttgctgtcgccggtgtcgatggaggaggtggtgacagcggcaatgtgcgctactgggagtgggagcagcagcgagggttcgtcggccgccggccgaggctggcatcgttcacgcggcgtgacggtgttgcgctgccgaatgggcaggccgctggtggcgaggacggcggttccaagagagaggtgcccagcgggccggatccgatacaccacggcggcgtcgcgccgtcgtcggctgctccgacgactccgtagagcgacggggcgagagg

SEQ ID NO: 24560 - DNA, 552 bp, Setaria italica
  Peptide Sequence Number=SeqID_90534
caggagcatggtgtgatgggagctctgatggtggggctgatccatgtctgtctaggggtgaagactctgtttttgagcctggtcctggtgctgagagactgcgaggcctgatgaagaaggtgctgtcatgggattaccgtaatggcagctgttcgtcactcgcttatgaccagaccaagagagattggtatgttcctaaaagtaaaggataattttggtgtcttgtggtttcttataaatgcaacacttgaccccttccatgaaatgaacaacacgaaggaacacaacttgttgaccaagaaaattgtttatatgtactactactcatacatatgaccataagagagaagcggttattgcacggaaatcaatgatgatggaaattgacagatctttcatatgttcaatatcgctcgtgtgcaaacaagaaaagaacatttctctcgtgccctgtttgtggtcaaggtctcactttccacctgttttttgtgcccgatcacaatcaaattggaagaccctgatttggactggacctgaagtatgcaaaaggga

SEQ ID NO: 24561 - DNA, 313 bp, Setaria italica
  Peptide Sequence Number=SeqID_90535
atgtgcctgatttgcagtggccttgttagtttcttcttcgctttctttgtatcatcctaactagtgatcttgttagattttcgttgttgaagtaccaggtatagacgcatcttgtagatcatgacgagatgatgtagctgtaacctgtaggcacatctgcattaggaccaaatgaggtagctacaggtgcaggagtaagattctgtagttggcaaatctgcaacagttgcaagcatagaatgcatttgtgatatggcaccaatcactttattgtaggtccaattcgaacccattaggcaatattatgctactg

SEQ ID NO: 24562 - DNA, 581 bp, Setaria italica
  Peptide Sequence Number=SeqID_90536
gtaagaaacgggcgaatgtggccacatacaatgtgtttctcaagtacttttgcaagatggggaagatggaggaggctaatgagctcctgaatgaaatgttggagaaagggcgagttccaaatgggatgacttatgagataataaatgtgggcatggtagaaaaggttttgttcctgatataagaggatatgcagcagatatttctaagaccttgacatcttcctgaaaggaatcatatatggacggatggaccacctgtgcaactcctatgcgatgtacaatacgtgacgtcgttgcttgacacatataccatgatgctagcagcccaaaagtttcatcagtgaagaacactttgcttgcccctttctgtttactgttacaatgtgggttgctctatggcaatctcatgagaaaatggggtactggagtgctttgcagttatcatcatcaaaactcaactcctgtggttgctttgatcagatgtcacgtactcacacttcaaaggcaaataatcttcacgaagaaatggagcttttggcaaattcctttgagaaagctgccactggtatgtcagtactccc

SEQ ID NO: 24563 - DNA, 438 bp, Setaria italica
  Peptide Sequence Number=SeqID_90537
cggcatgaaccagctcgccgccggcttcgacgccgcgctcaagtcgctgctggccgggctcgcccccaagctgccgggcttcacctactccctcgccgactccttcggcctcacgcaggacaccttcgccaacccgctcgcactcgggttcgtgagctcggacagcgcgtgctgcgggagcgggcggctgggcgcgcagggcgagtgcacgcctaccgccacgctctgccccgaccgcgaccgctacatcttctgggactcggtgcacccgtcgcagcgctccgccatgctgggcgccaaggcctactacgatggcccggcgcgctacaccacgcccatcaacttcaagcagctggccagagcatgatgagttgacaataatgcatgcactcatcagatagtgatcgtttctcatttgtttatttgttttatgtccca

SEQ ID NO: 24564 - DNA, 246 bp, Setaria italica
  Peptide Sequence Number=SeqID_90538
caccacctgggagtccgccgctcttcagctccttacccagttttgtcagctgcatcccctggaggtcacactagaccccatcggcctgttccccgccagaaaccggttggatccggcgtggcttgaccgcgtcagaaatatcgaggtgctggccaccacctactccatggtcaccatctccaccaacatcaggtgtatgacagccctctatcggctgatcgagctccaaggaagggccatgaccat

SEQ ID NO: 24565 - DNA, 246 bp, Setaria italica
  Peptide Sequence Number=SeqID_90539
ggcgcttgcggttgcggcggggacgggggccagcaccaggcagcgggcggctagttccgggagtcggcgctgcgacagtggcggtggccgggcacccgggcgcggacttgccgcgcgcagcgggtggcgagttccaggcagtaggcacgtgcctcctgaggcccgagcgcgctttgagctctcaggctgaagagtcagatccccacagccccatgatggatcccaacatgaagcagcttcaagaga

SEQ ID NO: 24566 - DNA, 440 bp, Setaria italica
  Peptide Sequence Number=SeqID_90540
ttcaaaaaactagcatacaaagatactgcagtaatcaaaatttgttacaacatcttatcaagttcaatttggttacagtttactagtaacagaatgaccatgtctctctaactactagtaaccagcagcgccccaacattacaaaatgataagtgagatttgcaagtgccagtacaaaacctaccgcatctagtaaaacccaaatcccgaagcctcatcaagttcgtggggctttaaactacaaatccgcagcgaacagcaagacctgattaaggattgcatcactagaatactagtgaaagacttcaccgatgcgcaatcacacacacaaaaatgcaggcttgcggtcgatcaataagatcgaatcgatagatcgcgacaaaccaaacacacgagcagccgcaggcaccagcgcacgggacaagaccagatcagagcaa

SEQ ID NO: 24567 - DNA, 376 bp, Setaria italica
  Peptide Sequence Number=SeqID_90541
aatgcaacaactttttgcatagttcaagcatgattcagaatctgcggacccaggcctcttttgatggtccgccttcatttttagaacatcaccactgcgctgccggtttgagaatcaaaggatccaaattcaccgcatcctttgccgagctaatattcggttcaggaggactagacagcgggggtggagggactaaccgcatgacaacatttgggcaagtgtcctggaaaccagccgacgatgtgaagctcagtttctcagggctttggcaggtccgttcgttgtcgccccggttcaacaatctcggaatccttgctattccactaggcagcatgaaacaagaaaaccccaccgcaacagctacagaagaacagac

SEQ ID NO: 24568 - DNA, 223 bp, Setaria italica
  Peptide Sequence Number=SeqID_90542
cggcgctgtgtagggacggagatgaggaagaaatggtgagatcccaaagaaaacctacctagtgggcggcgtggcggcgggcctcctgttctcgcaatgcgtcgaattgggccggcatgggctgaaacagggcaggcaggtcgcgggaggacggagacgagggtggcggcggaggagatcgtgtggcggcggcggcggtctctcccgcgaggaggagatgtcg

SEQ ID NO: 24569 - DNA, 262 bp, Setaria italica
  Peptide Sequence Number=SeqID_90543
ctgctacactattgagtcttgaccccagaacaaacacacaacgacgccacagtgagtcagcgacgaccatgtcgtgatgactgctggcccacctgccctagtgaacaagtgtgcgccaacgccggtcgcgtcaacccatctcttccccacagaatccgcatcatctcgcacctttgaactttaccacgtcaaggtcaagcgcgtctccactggtcgacgagcgcggccagtgcggcctccgactcgccgccttcgcgcaggg

SEQ ID NO: 24570 - DNA, 444 bp, Setaria italica
  Peptide Sequence Number=SeqID_90544
cagatatcaaaaagaatttttcgtgccgggcatgggtaaggatctcgcatcccttcaatccgaatgacttcatccaaagcttagtgaggcagttccgatcagccgtgggggtcgatgttctgttggagaccaagaagacaggaaaagagttggcagaggagttctctggatacctaagcgagaatagtttcctgattgtgcttaataacctgtccacctttgaagagtggaatggggttaaagcatgtctgccgccgaaccacaagaaagggagtcgaatcatagtttgcagcctacaagttgaagttgcaagcttgtgtgcagggcaagaatgccaagcgttggagcttaagcagttctccgctcatcagactatttatgctttctacgagaaggattgtcaagatacaaataaaaataccagtggtagtgtccagctcagat

SEQ ID NO: 24571 - DNA, 2556 bp, Setaria italica
  Peptide Sequence Number=SeqID_90545
tttttttcaaacagcaatggtggtaaggcttcaggtttcttgtaaaacggtgttgctacaccaatttgttacaaaaggatagggaacaactattaaactacaaaaaatgttacaccatgatctggggcagttttggtagctaactgttctgacatacatcaagcgactccttgcagcttcactgctatgacaaaatggtgaagggtacaaccgccatggacactgcgaagtttacatgctccaagatctcgtaaggaaagtttggattaccacccttgaaatgatttgggagattatttttcctttcatctcaaagaatccatcatatcatcactccacaagtggctcaatcgaggccacgattccttgcagtggctaaggtatgctgagattggggacctgtttgacaaattgaatggtgagcaaccacctgccactaaaactgtgagttgctgaggaatgtaaccatgcatcgtgcactctgaaacatcttgtcgatcttctgccaaactaagctctggacctcaaggagcttctttactttgctctgaagaattgagtgccgccgtattgtttcaccatgtatcttcaaaaataatttcagaacagcctggacaaactcaaagttattcctgcaggaaagctcatgaatgaaataatccaatagtgacaaaatagactgaagctcaggtctctgctccagatcttctgactcttcatcatctattatctgtagcagtcgtagttccatatctaaagacgaaggtgacaggcctttcatgtagtcagtgaaagccgaatagttctttgtttctccacatgattgtaaaagctgactgaattgagaggagagttcagccatcttcttctggtttgtgttctcagtggtactgctgttagtttctttactgctggcagggggctcaaacaatatctccccagaaagggatggaacagagggtaagaagaaaggtgccttctcaggtttcttaggcggctctattggtttattccgaacctttataatatcaagatttgtcaaactttgccattggctccttggaagcaaggaaagggtgatcatatttggtatttgatcatccattatgacaaaaggtttaacattagactgatttgagtcccctgaattatgagcttgttcttcctcagatctttccgttgatgaaacagctggcaaacaaacattccggacatgtttaccacttgcataattttcaatatttgttgaggtcgagaacaaagattgattaacccagaggtagacgccattttgatcaacatgagtggtagccaacacgtccatattaggcgacatagacagagatgttatagatacatcaacatgcatcgcatctatctgtctcgctaaactgatgtcccatatcctaagagtcccatccatactagatgagatgagccattttccatcttcactgaagcacagatcagtgatacggtctgtatgtccttcaaatctacgaaccattttcatggccaccgtatcaaacaatactagtaccatatcatctactacggttgcaagaataccatttgcccggtggtatgcaatcttagttacagatttaccaacatccaatctagattttagcttgcaagttttaaaatcccacaccttaatatcaccatggtatccagcagtaatcagggagccatttgtagcatcgcaagctaaaccaacaacttctccatcatgcgcacattgcattgccaatgaagtgtcgatgtaactaccacgactaatccctgattgaaggttaaatttttcgatccaaccaccttcagtgcccaagatagtaaaattaccgcaagcactaatcacacaggccttgatcggtgtctcagtgcctgatgatggtgttagaatatgttcaccaataacaaagttctgaagacgccatacatatgcccgtggagtatccatgtggcacgtaacaacattacaccaatcacgtgcacgtatctcagcacagtcaaatgtaatgactggttttagcttgatctcttcctcctttactctaagcttctttgctctttttgtgacatgccgctgagaaagttctctactttgttgatcctggacaactgagaaaagacgaaaggcacgatcttgaccagcagataagatgcatttcccattgccatagaatcttatgcatctaggtggagcactgtgaccacttcgaaaccgtaacagacgagcacctccatcattattgtcaaatatccacattttaattgaattatcagcagctgagctcatcagaataggttcattggcaaaaaaatgaagcgaaactatagattgatcatgggcctccctaatcacagaatgcagccgtctcttctcaagattccatatgctaataacgccagaagagcctccagaggctagaaggggttgcccatctgttcgaaatgacagtgcagtcacagcaccacgaatctgatggttgaaagacattaattcttcatcatatcgtatattatgaacatgaactgtcccatcagaacata

SEQ ID NO: 24572 - DNA, 278 bp, Setaria italica
  Peptide Sequence Number=SeqID_90546
aaccccggaaacaatggttcagtttcaccacgtaaacttgttgatcttgttgatccaggacacttgaggtgtttccggtggattcaggagaaaaaggcaggttcctgatgcaatggaattattggtgttcgatttggatgcaggatgccggtggaacgacgacgagcacgagccctgccctgggttttccaggccccggtggacggcgtgtggcagcggtttgaagcgaaagcgagtggatttacactgatgactcggccacagtcttgcttccgccg

SEQ ID NO: 24573 - DNA, 400 bp, Setaria italica
  Peptide Sequence Number=SeqID_90547
atttattcttgtttctttgtttttctgtttctattgtctgatcaaagatgtggatgatgataacaaaagtaaaatacagttatccctgtctgattccttcacaagggtgctgagaatactttgaaactgacacattgtgtttttccgttcattctgctagttatcataaagttctttttgttggatattggcctttgatgaccttatgtttgcagaacaggtgaatatttgcctgatatctgttgatatttctcatgaactaggacggtctgaggtcgattccacatgaacttaagtaatagcttgttgatatctatatagttgcttctgttgtttgattaacagatttgaatgagatggctgtgacgactcagtaatattcaagctcaacagaccaaat

SEQ ID NO: 24574 - DNA, 179 bp, Setaria italica
  Peptide Sequence Number=SeqID_90548
tgataataaatcaggtattgagaggaagactgcatcatctgcaaagtctggttcgcctcctgaaaactctttcacgaattttcaacaatcagtcacagatattgaggttccaaagcctaagagtaagatatattgtgatgacaagggtaaagatgagggcttcccttatgcaaggccaa

SEQ ID NO: 24575 - DNA, 449 bp, Setaria italica
  Peptide Sequence Number=SeqID_90549
cgctctcgtcacgggtctcgtctggcgatggagtttatctggccgagggaaactatgttattagctctgaagatgctgaaggggctggagctctgaactcgttccagcagggcattgtggatggacatggacctccagggcctattgctccggttcctgcaagatttggtgctgatcctgtcagaagtttagatacaggagttgaaaacagcaatgccgagaatagaacagattttgataataaatcaggtattgagaggaagactgcatcatctgcaaagtctggttcgcctcctgaaaactctttcacgaattttcaacaatcaggtgagatgactaatcgcaatactaattgcttctaccatgaaatcgggccatcaataatactaatttggatactaatttcgaacatcaataagttacatgttaccttgtaaagcacatactgt

SEQ ID NO: 24576 - DNA, 386 bp, Setaria italica
  Peptide Sequence Number=SeqID_90550
ccgatttttcaaagcatgatcctgcactgtgccaataggcctcgatccctggagctgtaacaacctggcatctccattgcaagtattcaacacttcggcagcctgagaaaccttctttactgatgcccccacaggtcgccccacatccgatggtggaggcgggcactttgcctggtaggcattgtagagaactgagcggattagccggttgtgcagctggaggttctccctccccagggtctgcaggcacagcttttcaaagtcttgcctgctgagcctctctgataagtagccattcaagtagccaaaatatcggcgcgagcgatccggaccaacccgcttctccagctgagccttcagctccctgagatcaatccggccgttct

SEQ ID NO: 24577 - DNA, 621 bp, Setaria italica
  Peptide Sequence Number=SeqID_90551
tcggagatgccgccaagaaccaggtcgccatgaaccccagcgcgagcgtcatggcgaacaccatgcagtaggagaggaacatgccccccgaccccgtgaactgcggcagcgtgttgaggaggccccggatctccggcggcgccgtctcggagatgtagacgggcaccagcgtcacggccaggccgatggcgaagccgtcgacgaggcgcgacagcaggagcacgtgcacgttgggcgaccagagcatgaggaggccggcggcgaagtagagaagcgaggaggcgatcagcatggggcggcggccgacggagtcggagacggggccggagaaggtggtgatgacggtggcgccgatgagcgaggtggcgacgacgaggccctccatggcggggtgcgcctccaggtggaactcgcgcttgatgtagagcaccgcgccggcgatggtggcgttgtcccatccctgcagcatgttgccgatcgccgcagcgatggccacaagcacggcgccccgcatgctggcgatccgatcggagcacctgatgatggaacgaacgaacgaaagaaagaagacgactagctagtcgcccatgcgaggtagcaggaggaagaagacgagtggaa

SEQ ID NO: 24578 - DNA, 341 bp, Setaria italica
  Peptide Sequence Number=SeqID_90552
acagactacaagagcaaccggcgcgccgcgtgccttcgcacgctgacgagggagacgtcgtccaggaccggtccgcacagcgtcccgtcgggcttcatgtggtggttgtagctctggaacaccacgcgcgtgaggttcgccgccgcggcgaactcgaggctggcgcgcttgaacccgcccgtcccgcgggactcgtacgacaccctcgccgtcgcccgggcggcgtaggcctccacgaccatgggctccgcgcacccgttgcccgcgtccccgacggagaaggacaggccgtaccaccgcccgggcgtggtcggcacctcctgcagcagcgcggcctccct

SEQ ID NO: 24579 - DNA, 749 bp, Setaria italica
  Peptide Sequence Number=SeqID_90553
tttttatgataatctaattgattaatggggcaaaacagttcttgtcaaatctgaacccaattggccactgttttgtcccaccaagatctttacacatcaataaattaaaaagatgaattaggagtggtgtacaagacgaaacaagcatacggacagaagactaatactacattttgcatctaaccaacaaagtaaactcaccggcctttccttcgggacttgaaggggaacccgccaggaggcgaaggcgagaaccctatcggaagaggtggtggctcaccctcaccagcgagcatatcaagcacctctgtgcttgatgggcggcgagctggtgaccgctggatgcaaaggagtgcaactgtaatgcatagcagtgcttggtcccgatcaacatcctgcagtgcagggtctacaagatcgagcaaccggccaacttgagcaagatgccttgcccacgaaatgagactcgccttctcaaactctgacattggtgaggttgccatttggagcgggcggcgtccagatataagaactaacaacaacactccaaagctgtaaatgtcacatttctctgatagaggccctccgccaccatattcgggagccacatagcagaccgtgcctcgcatgcttggtgtgctgctcactgctccaccactcttgggcacaaattccccactggcccaatccctgctgcttcttctcacaccatccacccacgaactgatgctggcattgccattgctgct

SEQ ID NO: 24580 - DNA, 300 bp, Setaria italica
  Peptide Sequence Number=SeqID_90554
cgcggagcgcggcgtgcagacccgcgaccatacgggtgcgtggagacggctggtcgtcgcaggggagacaaggcaggagctcggcggcgacaacggcggcgcgcgcgttggacatgacgctcgggggcgcgccagtgccggtggagtcgcctgcctcgtccgcgccccccatggtgccgagcagcacgtcgacgacggagtgcgccagatcgccctgctcctgggaggccacctcgcggaggaggtccggcccgcccgcgatcgcggcctccaccgcccgcaccacctccggcggcgcgt

SEQ ID NO: 24581 - DNA, 414 bp, Setaria italica
  Peptide Sequence Number=SeqID_90555
ctctttgagatactcgtgagccggaacaacccaatccttctctccatttgtaagcgcctgcatttccggcaatgccttgcctacctggtcatagatgtgtggccgctgagggcgccttttgagctgtgctattcgctgctgggaccttactgccttcttacaaaccactcctttttgccaaagtcatcagaaccaggtttcagcatcacattagccctattcttgacctacaacatatacaacttcatggagtacatggattgccagctctcagctcgtgcctggtggaacaaccaaaggatgcagcggatcatctcatcctctgacctaggaacttaactaacgaaacaaaattaaacctaaacaaaaccgtaaagaaactaaaactaaacaaaaagaaaaccttaaaagaaa

SEQ ID NO: 24582 - DNA, 255 bp, Setaria italica
  Peptide Sequence Number=SeqID_90556
aaacaatgcaattgaagccagaagcgctcaattcattgaagttacctgttagagtcaaagctggtttcctttggttcagtgaagctcaaggttccatggagcaggctcggacaggagccagttttggtttatcttgatcgaatttttatactagctgaaccagcaacacaagttgaaggttgtagtgaggatgctgtccaggaagcaaaaagaagtagagttcgggaaatggagataaagttattggagcgccag

SEQ ID NO: 24583 - DNA, 308 bp, Setaria italica
  Peptide Sequence Number=SeqID_90557
ccaggatggcgagcgggtcggcggcgaagagcgccgcgagctcggcgagcttcaggtccgcgtagagcgtgtaggagaggagcgccgggcaggcggtggacgaggcgcaggactccagcgtcgacttggacagggcgttcggcacggcggcgaggaagaggaggaggatgaggtggagtagggatgacggtggtggccgcatgacggctgtcgggcgcggtcgcgtgagtcgctggcaccgatgccggctcgggccgatcggtgattcgccgggcagcggctggcgagagctgggagcgagactggcg

SEQ ID NO: 24584 - DNA, 152 bp, Setaria italica
  Peptide Sequence Number=SeqID_90558
gaagccgaagacgaccagcagcatcagcgcggcggcctgcagcaccgcggcctccgggccggtgaccgtcggcacgcgcagcgcgaggtcggccaggttcagcgtgccggtcagcgcgtagaccagcgcgacgccgatcaggaacagcgccg

SEQ ID NO: 24585 - DNA, 509 bp, Setaria italica
  Peptide Sequence Number=SeqID_90559
gttggttgtagcgtcccggcctcgcggcggatctcgtcgcccaccgcctcggcgcagaggccgcagacccagcggcccaggtactccgcccgcaccgccgcgatgtacgccggcgtgcactcctccgtgaacccgcagcactcgcacttggccttctccacctccatgccaccgtcgtcgtttctttctctcgaatccttgatctccttcccttgcagcagcagcttcctctgagacagcacgcggccacgcgtacagctctgttgcttaccgctccttctcccagacggcgtaggacgacgggacggacggcgccgcggcgcggtgggtgctctgctcgctcgggacgcttgcgacgatgacgacggtttcggcggcggatgaggccggtgtcatcgcaggtgacgtctccctctccctctctccctcctcctcggcttgcacgccgctcgccgccgctgcaaccttctcctccttccccggccgcgcaatctcctgcttctacaacc

SEQ ID NO: 24586 - DNA, 382 bp, Setaria italica
  Peptide Sequence Number=SeqID_90560
cgtgcactgggaattgatttggcttctgttcatatttattctgacacttggttgcctcactctgtagaggacagtcacctccaatttgtgaatacctggatgcaacaacatattgatgatgccgccaacttgcttgggatgccaattctgatcggggagtttggggtatcacttaaggatgggaggtttggcaatgagttccgtgaatctttcatggagacagtctacacaattttcttgagctcttggaagagtggagtggttggaggaggctgccttgtttggcaactctttcctgaaagcgcagagcacatggacgatggttatgctgttatttttgcaaaatcatcatccacattaaatgtgcttgcaaatcactcaa

SEQ ID NO: 24587 - DNA, 256 bp, Setaria italica
  Peptide Sequence Number=SeqID_90561
cgtcgcctgggccttgctaagatgatcggcgttagcaatttcacgacaaggaagctcaaggagctgcttgcaaccgcaaatgttcccccagcagtgaatcaggtcgaattaaatccatcttggcaacagcgcaaactaattgagttctgcaaagataagggtattcatgtgactgcttattctcccttgggaggccaatttagatccaaagtactaccgtctaaggttctagatgggattgcgaaggctagaggga

SEQ ID NO: 24588 - DNA, 499 bp, Setaria italica
  Peptide Sequence Number=SeqID_90562
agtcatggtcatcactgtcattgtgtcgctcataaaagttgttgtttctcttatcatcctttctcctttttagaacttgagttcttgttggtcttttctgattcatgttgatgttgcagagttttctgtgcatcctcattttcattttcatctccatctgattcatgttttccatgatcatcaaaatttctaggctggtcaaaagtagctacatcggaagcagtgtatctcttctttttggctctctcaacagagtccccctcttttcttctcgatactcttttagataggcttcggttgatcaggctagtagatcttgctgatggttcttgtattctgtcataggaattaacagagaccatcgctttgctgtaaaccatgtcatgatcctgttcttcccgctcacgatctaaaagtggatgaacctggtttgacatccaaattttgccacaccacgatccagccactttttctttgctgtgcctgatcgctgtcgttc

SEQ ID NO: 24589 - DNA, 271 bp, Setaria italica
  Peptide Sequence Number=SeqID_90563
tactaaagtctggcacgtaagttgtaaggttttgtaaggcttcagccttatacaattttttctactttaatgaaatgataaacagtgtttttgtttacttgagaaatatgcctttaattacttttgttcttgcttaatattgctgcaatattatcgagctatggcaagtccttcaattttctttactgggtgtgcaaggaattgtcactcattagatgttcctatactcttcctgctgacatatcatatgagtaatttgttcgttacttag

SEQ ID NO: 24590 - DNA, 360 bp, Setaria italica
  Peptide Sequence Number=SeqID_90564
cgtcgtccggtgacgcgctctggcgccgggcacggacgatgtccatggcaaacgcgtggatgtcggagatggccttcttgagccggcgctccgtgccgatgttgagccacttcttgatcttccatgagacctcaatgggctccaagaaccggcgaacgatgaggtcctgcgcctcgccgaacgtgtgcatgaaatcggacctcgcctcggccatgaccccgccgtcggcgaggcagcacgggtcgtgcccgaacgccaccatgcagatggtgtcgaacgcgaagcgctcgagcacgtcctgcaagtcgaggacagcgccaccgccgtcgccgctggcattccgccgcagcagagggagca

SEQ ID NO: 24591 - DNA, 321 bp, Setaria italica
  Peptide Sequence Number=SeqID_90565
gttttgtcgatgaactgttccagatatattttggaggaagccaagttcaggtgacgagatataatccacagatacacgcttttggatggaaagtatgtagttcctcatgttcaaaccatgttctttgtagaaggtgtcatgctgaacattcaaccaaacagaaggctgcttgacactggacagcaagtctgtgacagagaggatagaatatccgccagaatcgaatctgtaggtgcgagaccaaattgcttgtgttactgctcaaagtagcagattgaagctcatccttggtaaagtccagagtctaaacctattacctaa

SEQ ID NO: 24592 - DNA, 188 bp, Setaria italica
  Peptide Sequence Number=SeqID_90566
ccgccaccgcgcccatcacgatgtagtactgcagccggagcgggcccacccgcttcagcaccccgcccccgccgccgccgccgttcatcgcgctcgccatggccgggcgagctcgcctgcgccccggtgcccagccactgactggataccgcgtgcgggtttccctggcctgtagtattaatgatgtg

SEQ ID NO: 24593 - DNA, 513 bp, Setaria italica
  Peptide Sequence Number=SeqID_90567
aagacaagacaagacaatactgcagcagccagagcgcgccgacgacgcccagcccgacggccagcccggtgaccaccccgttccggtcgttgctcacgacggtcgtgttgggggaagcggacggcggcggggaagccggcttcaccgaggcgttgtttactcgcacgattgggggcagaaaatcagaaaccggccggcggagcggcactagtatctccgcgaactgctgcgtcctcggctcgggcccgttgagggagacgagcgactgggagtcgacggcgaaggcggcggcgattgtcgcgtaggtgtcgcccggctgcatgacgtaggtgacgagcgccgtggcgttgtcggtgacagccgggcactggcagaagacggggaacgtgaccatgacgccgacgtcgaggttggtgggcaccagcgtcgggttcacgcgctccaccgcctggtactgcgtgagtatttcttgtctagtctttggttggttggtagtattgtatttccttagtt

SEQ ID NO: 24594 - DNA, 212 bp, Setaria italica
  Peptide Sequence Number=SeqID_90568
ggcgacctctggattggacctcccctgcacaggctcctcaagaacacatgtttggctcttcgccccggctctctctagctatctctctctcctctccgggagggagggcaccgtgcgtttatcaggggagggaggacgggtacgggatctccgagccgggaatatgcctccggccgcaggaactgcttccaccaacgcctctctctctccct

SEQ ID NO: 24595 - DNA, 251 bp, Setaria italica
  Peptide Sequence Number=SeqID_90569
taagccttgctatgcagaggagacgagaaatggtactgcaaaacacatagtttcattgttaaaattgaccagctgaacattgatcttaatccaagactgttggttatgctattgccaagacttctcaaaatgcaattttaatgtatgccaatgtatgtaatgtaatgtaatacaagaatgcactataatccattagaacaaaaagaaaccaaactttaatacattttacttatgcatttgatcatcaatgt

SEQ ID NO: 24596 - DNA, 329 bp, Setaria italica
  Peptide Sequence Number=SeqID_90570
atggatgaaacagcaattgatccaattagaccaagtcgtttacaaaaggtgactattttctctgaaaccttgagctgaaatggaattcaaaagaactgttaccagaaatagatttaaggttcgatgtcaaacgtgcaccactagtatataacacaatgtaggtgcccctgaataaataaggtaaccatttaacaaaatgattattgaatgtaatcaagtcttgcaaatatctgctgctgctgctgctgccatctggagcagtttctttcattatcgagggacactgagaccggtcttgtagcgtttcacagattagaagactgtatcag

SEQ ID NO: 24597 - DNA, 302 bp, Setaria italica
  Peptide Sequence Number=SeqID_90571
ggcactccgcctccacgctcagatctctgaaccgcacctctatcgtcggctcctgcacatccaccctgtccatcctggctctgatgttctgcagcagccggaggttgtccttgaggacgtccacgatgagcctgtccaccaagtctcccggccgtccggtggcgcctccatctgatgggttcttcacggcggcggcatcggcggcggacgacgtcttctcggcctgctccttgtcctgctcgccaccgacctcgacgccggccatatcgtcagtggcgcacagaactgatggtgccggccgc

SEQ ID NO: 24598 - DNA, 443 bp, Setaria italica
  Peptide Sequence Number=SeqID_90572
tcccaaatttgcgatgggcccttgaaccagtgtcgtgccctgacgatccacgaccacaaaatgagggtgaacagtccaccgactgcgaccggagtgtagttgagggtatccttggtcaccgggtatgagaccggcaacgagaagagcacggtgatggttgccacccacaggacggcgatccagcccacaagcacactgtaccggccaaggttgaatgggcctggcacgaagctcttgtacgccagtgtcacacggaacaggattggaagcgcataggcaatgtagactgcggttgtcgcgactgatgccatcgcctggaacgcgacgaggctacccagagacggcaatgccatgcaaagggaaatgaaagctgagaaccagacagcgtttatcggcacttcttgcttgttaactttatgccagagggatgaaagtggagggtt

SEQ ID NO: 24599 - DNA, 246 bp, Setaria italica
  Peptide Sequence Number=SeqID_90573
gtcctggccgagccagccgctgagggacggcggcagcgaggggagggagaatgaagacggcttgaggaagatggacgccatgttgccctgcatggcgtagtgaaagtagaatagcaaggcccagaatgtggtggagatcaccgcgagatggcagatccaggacggccgccggagagagccggcgccgtagccgtcgtcggccatcgcttcttcctcgacgctgggcaggtagaccgagcggcgctt

SEQ ID NO: 24600 - DNA, 375 bp, Setaria italica
  Peptide Sequence Number=SeqID_90574
cagtggaaatacagtgttatccaagaattcccagatattgatttgctgcaaccttcaacttctgcaccaagtacttttgcgtcatcgcaaagccatttaaaagcaataactgcctcaaaacgcatgaaatcaggcccaaatcaagtttggatgaacataccagcaaacaccttccagcctcgggcacgtcccctttttcagtatagacactacagtgagcagcaacccttaagattgaatcctgctgaaatttctgaagtcatagctgaagtttgttctgaagcaacttcaaatgcaagtcagtcaattgctcaaacaagattgagcacccagagtcggcaaccttcagcagatgtggcattcagtgtccttata

SEQ ID NO: 24601 - DNA, 315 bp, Setaria italica
  Peptide Sequence Number=SeqID_90575
gacgaagaatgcaagggtccgtcatcgcgatcagggctccgtgatctgttcaaccgggccaaagaggcgtccaagctgctggtcatctcaagagtgtccaatgaaaaagtcctcccctggatgatctccagctcagggtcagttcgttgcttcgacaccatctccctcagccagaagctctccttgcaccgcctcgcggtgcgccccatcgagctgcatctgctcgcgtgggagaagccagctggtccagtggggaggatcttccactcgccgaagctgcccctgccttcaacgctgctccctcagccacaccaa

SEQ ID NO: 24602 - DNA, 324 bp, Setaria italica
  Peptide Sequence Number=SeqID_90576
tgatccaaccctgaggtcatgagacccgtgtgtggacgcgaccgcggccgcaaccggaaccagccgttccgcgcccaaacacctccgatcacacgaacgaggacgacgcctcctcgccgccgccaaagaacgcgccggtcgcgccgccttccggtagcagcgccacgccgccacggccaccacccgggccccgccctcgtcgggcgcgaggagccccgagttccgggtcatgttggtcctcacgtacccggggtccacgacgttgacgcgcagcgcggggtgccgcctcgccaggacacgcgagtaggcgttcatggccgcctt

SEQ ID NO: 24603 - DNA, 252 bp, Setaria italica
  Peptide Sequence Number=SeqID_90577
tcccgcacacgccgcctcctgagcagttgagaaggaacttatcgtagggcccgtagaggtcgatgtagccctcgagcatgatgtcccggagcttctgcccgccgcgcgccgtccggtagtgcacgtccggcgtcccgtccggcagcagccgcgggctgacgaacgcgaagtcgacggacggctcctccaccgcctcgcacaccgccggaaaatgggatccgccgtgcagctcatcggcctcctcggcgtctc

SEQ ID NO: 24604 - DNA, 838 bp, Setaria italica
  Peptide Sequence Number=SeqID_90578
ttctttttttttttttttaaattagagttgttggtagatttatgacaatttttctcaaaataaatacggatctttcgaagaccatgaacatgttgccatctcttcttttgaataagtgagcaagtaaccgaaggaggctaattgcatccatgctacacttggttgctacgaaaaaaaaataaagaacgcttaagatctttgcatggagtatcaaaagcttcataaaccttcaccagttattctaccgatcaattgcttctccacttccagtgttcatggcattctactctatatatggccgcatgagtacattttaagaccagtcaattacttctgcttgtcccactcatgtatcttccactctggcaattgctgaatgaccatctgtccagttgaatctgcattgccgaccgtagcctggcaagccaatctccacgtcttgggtttccttttgagcatctccttttccttttcggtttttggagaaagcatttccttgccttcaaccacctcgacgatgcaggtcccgcacacgccgcctcctgagcagttgagaaggaacttatcgtagggcccgtagaggtcgatgtagccctcgagcatgatgtcccggagcttctgcccgccgcgcgccgtccggtagtgcacgtccggcgtcccgtccggcagcagccgcgggctgacgaacgcgaagtcgacggacggctcctccacctcctcctccggcgcgccggcggagccgggcgcgcccatctcgacggcgtgggcgacgcggaggcggcgccgactctgctgccgcggcgcgcggagcgagcagacctgcttcttggcgccgccg

SEQ ID NO: 24605 - DNA, 270 bp, Setaria italica
  Peptide Sequence Number=SeqID_90579
cagagagaggtgaggtgatctgatcccaccagccaccacctggctgtgcgccttccccgggtctccctctcgcgcgcgtgccactccaccctccgccgccgctccgattcgccgtcctccggccgccgctggccgtggacttgacgcgttgtcgctgcgcaccgctctccacgggatcgacgcgccgccgccgctggctgaatctagcttcttcttaattttataagtagacagggtaccaacccaacctccggacccaactccgcccag

SEQ ID NO: 24606 - DNA, 529 bp, Setaria italica
  Peptide Sequence Number=SeqID_90580
atatcttcagcaatagatctaggtcgtcctacaggaaggccaaaaattttggtcctttttctcagagtggaactccaaccaataagctttccaagaagttgaagccccaatagacggattggctcaaattccctcttaagaagattgatgaaaatgtaacaaccaccaagtgaatttacttgctccaagaaagatggtagaagtgagttctgcgaaagggcacggataatcatatgaagtatatcctcaatgcatgcaacatcttgacttctttcaagaaaggaaacaagagctttgatatcgtgttgagaaacctttagctttaagctcatttctgccagactcaacaggagaagtcggatcttgcggatttgttccatgcttggtctctctccgatcacctttttgctaaccagcaaaggcttagaggacctagaatctaccttatccgaatagaactgtcgtacaacatcaatgatcctagggagcccacataacattggtaaaaacttcccatcagcttcaaaat

SEQ ID NO: 24607 - DNA, 513 bp, Setaria italica
  Peptide Sequence Number=SeqID_90581
tcaccattgtgcaggttatccaaaataaactacaaacgtttggccaattaaaaaataatgtaaaggagaatgttggtggttacaaaatacccaaacaatagagtgtggctcttatactagaccagcgtccaggagaccttctaggagactaagtggctagattgctgtgttctatacaaggcctcgtaccccctatttatagccttgggaacgagattgttggtggttacaaaatgccaaacctaggattcggaggactcccgaaggtctcgagaccccctcgtcttcccgctattgcgggttccaaccgtccacctcttgctgtcagggagggcgagaaagacgggatgacctccctaccccaggaaaaaatggacttctgagccttcggaagcattccggcggaaactatcgctccggcccccgatcttggtccaattccccaacaaacactttatcggaaaagacttattttcccctcagtatggagaccctgagagccgaccctgtgag

SEQ ID NO: 24608 - DNA, 579 bp, Setaria italica
  Peptide Sequence Number=SeqID_90582
cttcgaagtgggacgacgccgagaagtggatttccagcccgacgtcaaaccgtacaggccgcgcggggcctgccactgggactgtgccaaagaagtcggcattggcatttcctgaacatggaggccgcccaccggccgttgctaaggtggttgtggatgtgcccaccaacactgcacccttggttaagaattcagatggtctcattcaatctgatttatttaaacctgcacaaagtgcttcgatcgttgatgaacctgctcctgcaattaggtcagtctcgatgagagatatgggaacagaaatgactccaattgccagccaggagccttctcggactgggacgcctatcattgcatctagtccaacatcctctcggacaccaactccgcaacgtatgactgaattcagtataagtaatatcgattctaacaagaaggagatgtctgaggaggagctacaaatgaatacgagacaggaaattatggatcttggccaaagattaggcaagactactatagccgcatgggcaagtaaagaagagaaagcttctgcacatttcagaagtaccactacagata

SEQ ID NO: 24609 - DNA, 285 bp, Setaria italica
  Peptide Sequence Number=SeqID_90583
cacgccgctatgggaggaagagcagctctggtcctaccttgtacttgaagaggctgcggaagtagctgaagcatgcaaggtcactgctgggtctcgcgacattatcaataagcctacacaagttgctgagtgcttcctgtacatgttggatctgtgttgcaaaggaagccaatcgatcgactatgatttggccacccatggcgccaactactgggtatgtgatcgcaatcgcatcgtacatcagttacagcatgaagagagagatgtcaacggtggtgataaaga

SEQ ID NO: 24610 - DNA, 739 bp, Setaria italica
  Peptide Sequence Number=SeqID_90584
ctttgtcgacttcgtccttgcctatggaggttcctgttcggcaggcagctgatcaggaagctgcagaggatgaagagaatagtggggttggtgggggagcgaggaagaagctgaggttatccaaggagcagtctgcgttcctggaggatagcttcaaggagcacagcacactgaccccaaagcagaagagtgatctagcaaagcggctcaatcttcgagcacgccaagtggaggtctggtttcagaacagaagagctaggacaaagctgaagcaaactgaggtggactgcgagtatctgaagcgatgctgcgagacgctcgcgcaggagaaccgaaggcttcagagggaggtggcagagctgcgtgccctgcggaccgccccgtacccgttctacggccatctacctgcatcagggttcagcactgcccgcgtctgcccctgcgataacaaggtcatcacagctcaccaccccggtatcaccacatcatcaacggtagtggcaccgccatcaccggtgtccaccttgttcgccaggcctcaattcggacccttcaccgtccacccggtgctccgccgccagccatccgcgacctcgtgaggcacaggccgaaagctcatgtgcgtaattgtagattgtatactgtaaatatggagttacttcgctgttcaaccaaagatcaaaattaccattagggatcgatgcatcagttatactattgtacatagaaaactaattaa

SEQ ID NO: 24611 - DNA, 492 bp, Setaria italica
  misc_feature (67)..(67): n is a, c, g, or t
  Peptide Sequence Number=SeqID_90585
cagatcaaatctttccaaaatgctcacgcacaggtgttatacttacatgttacatcgaggggtcttntaccagatatctgaggtgagtgatacttaccattttcctatagagtgtctcctcttcatatgcagttgaacatggaaagccatgatgtttaaatgtatatagtgttcaaacttacttgatatgctcaggatcatcccaatccagaccatcaatcaatatatcatacttgtgatccatatgtgactgcaagcaatcaagaattgccagaacatcgtttacctggctctttgatctgttttctgcggtaaaagtataaactttattgccaacttctatccaactgcacccgatgttcgttttcagccctctctccttcatcaccttcctcactcttgccacatcactccagcagccaatgcttgcatacaaatttgctagctgcacatgagttgcagcacaacttggttcaagcttcagacggtgct

SEQ ID NO: 24612 - DNA, 397 bp, Setaria italica
  Peptide Sequence Number=SeqID_90586
tatcatgaaaacaagcagtgagatagtgaccaagcatctcaatctctggagctctggatcatcaatattttcacaccgtttggcagaagatatcgatgatccagagctccagagattgagatgcagggtgaattatcacgcactacgattcaagccacatatcatgaaaacaagcagtgatatagtgagcggagcttactatctccgttcagaaggtcatttcatgtcaatccatcttcggtttgagctggatatgcttgcttatgctgggtagggctttgatcaaaccagtgtgtcatttcttaatgctgaagtgtatccattgatggagaagcctgcccttggatttccttttcctgtagtaggcttaggaaagagcctacccaactcatttcag

SEQ ID NO: 24613 - DNA, 416 bp, Setaria italica
  Peptide Sequence Number=SeqID_90587
ggccattgctccgatattcatggacagggaggaagggcgtgcatctggatttgaggagagggtcaggcaggtcatgttcaacacccattttggcgcccccacaagcgcaaccatccagagtctttctacacaaactcatggccagagtgcttctgccagacgaaagctaggaatcatgctgaccagtgcccacccgacagtttaaatgatgtccttgtaagccagttccaggataaagaagatacagaagtggaagctactaatcaaactgactccaccagccaaaccgaagagttggctgatggaactggtttagctacggtttagtgactgagaacagattattcgtcacagactcacagacctgggtatgacatttttggaggaagggattggtggctccagatactaaactt

SEQ ID NO: 24614 - DNA, 2079 bp, Setaria italica
  Peptide Sequence Number=SeqID_90588
ttaattctaagtcctagtctactaaaattattttctatccatcatgctctcacacataatatttaatggataaggaataatgttgaaaagaaatggcccaattttcttagataattttttgatgcatcacttatattctcagcttcaattcatttgacctataatttgagttattttaatttctaaatgcatggaattgaattgtatatataatggttatatgaatttctaccaaattatatcttatactgacatcagtgctactactccaggattatgttgtaaataagttgtggagaactgcagattcaaatggctggagagcatcttctgcaccacgcacgtattggtctcccccaccaattgaatctgagagcaatgggtacttgcgtgtccggtgcaacggtggcttgaaccaacaacgtagtgcgatatgtaatgctgttgttgctgcacgaatcatgaatgctacactagtgctgccagagttagacacaaattcattctggcatgatgagagtggttttgtaggtatttatgatgttccccacttcatcaagacattgaaatatgatgttcgaattgttatgagtgttccagaaatcactgcacagggaaagaccaagaagcttagagcatataagattgacccacctagagatgcaccggttacttggtacaggacaactgctctggagaagataaggaagtacggtgcgatatatttaactccattttcacaccgtttggctgaagaaatcgatgatccagagctacagagattgagatgcagggtgaattatcacgcattacgatttaagtcaaatatcatgaaaacaagcagtgatatagtgaataagctccgttcagaaggtcatttcatgtcaatccatcttcggtttgagctggatatgcttgcttatgctgggtgcgttgacatattcacacctaaagaacgggaaatccttttgaagtatcgtgcagatcattttccagaaaagtcacttgtctccaaggaaaggaggctcattggaaagtgccctttaactccagaagaggtaggtcttattctacgtgctatgggatttgacaatacaacgcgcatttaccttgcttctggtgagctctttggtgggaaacgtttcatgaagccattcaaggctatgtttccacgtctggagaaccacagcacggttggacccggaaagctggaagaaaatacccaagggctagcaggatcggctgttgattacatggtctgtctcctgtcagacatttttatacccacatatgatggcccaagcaactttgcaaacaacctcatgggccaccgcctgtactacggtttccggacaacaatcacaccaaacaggaaggcccttgccccgatattcatcgacagggcccaaggccgtactgctggctttgagcagaggatcaggcaggtcatgttcaacacacatttcggtggcccccacaagcgaatccatccagagtctttctacacgaactcgtggccagagtgcttctgccagacaaacactaggaaccatgcggaccagtgcccacctgataacataaatgatgttctagaaagtcagttccagagtgaagaagaaatggaagaagctagagcaactaatcagactgactcaagtggccaagcagaagagactatgatttaactgaggtagctaaggatcattgcttgagaacatattgtatacttgggctggatcgtttgattgagaccagggtgacatttttggaggaatggatcaattgatggttggagatcaactatgggctattctgttaaattggagctgttgaggttgtaattcgggtaggattgaactataggtaggcctgggcatatagagttttgatgtagaaagcattatgcatgtctatagttttcgcctcattgatgagcgcagaatggatgtgaattatgtggcaacaacaaatttcgggagcctttacatgatgctctctccgttccaaattattccaaattgtaagtcattctaattttcttggagagttaaattatattccaattttcttggagagtac

SEQ ID NO: 24615 - DNA, 285 bp, Setaria italica
  Peptide Sequence Number=SeqID_90589
aagatcaagtacaccaacatgttcgacgcgcagctggacgccgtcaagtccgcgatggtgcgcgccgggtacgggaacgtggacatcgtggtggcggagacggggtggccgaccaagggcgacgccggggagcccggcgcgacggtggagaacgcgagggcgtacgtgtcgaacctggtgtcccacctgcggtccggcgccggcacgccgctggtgccgggaagccggtggagacgtacctgttcgcgctgtacgacgaggacctcaagcccgggccggagtcgg

SEQ ID NO: 24616 - DNA, 642 bp, Setaria italica
  Peptide Sequence Number=SeqID_90590
ttaagtaatagacgaaggatgcgagagggaagaagatttcgttgattcagacaaggcgaaggggaaaattctcagctgagaccatcaggtcccgctcccgcggtgtgatttgggctcaggcgctcatctcctactcccccctcccgtcgccgctacctgagctccgttcccacttgcctcctcacgtgatcccgtcccccctcaccagctaccactcggcaccaattctctccctcggcaagtgaatcggctgcagagtgcgggggactcgttggttaatcggttctactagttgctactgatcctgcaggttactggtgggaactaggcccatgttgagcggccgcgccgtgacgctgagcgagaggggcgactccggcacgcgcttggacgaggatgtcgcgcccgaggccggcgacgaggaggccgagtccaccgcaagggtgctgtaccgggcctcgttccaggagctgatgcccggctacctacagtacgacaccatcatctgggcggcgatatccctgctgctcgtcctggcgtgggggatcggtctgctcctgcttctctacctgccgtacaagagatacgtgctcaagagggacatcatgtccctcttgagcacgttattcttctttgttacgt

SEQ ID NO: 24617 - DNA, 353 bp, Setaria italica
  Peptide Sequence Number=SeqID_90591
atcgttggctggatctcctgtagtctgaagccttatgttaactttgttttcagcaggatgagggatgctgtatccacaaaatgccacccttgggtcctggttgaggacgaatctggcggagttggcgagggtgtggtcctcctccatgatggagaaggtcgacgcggtcgagtccgtcgccgacccgtgctccatcgccgccccgcctccctcaggtccggcgagcggtggttgagatttcagggaggatttgagcgtgcgcaagaaatttctggcgcgggagctcgaggacggggggagggtggcgggtggcggcgcagtgctcgaacagatgacaaggggcgggggcgatt

SEQ ID NO: 24618 - DNA, 352 bp, Setaria italica
  Peptide Sequence Number=SeqID_90592
agattcttgcatacttcgatcgtggtcctaaatgacgttaggagttagctaggacttgtgattgtgtatgagcataatactgtgaggggaccgaccggctttatggttaaatgggccaacagtggcctgatcttgtaaactcaacacttttaattaacttagggtttctataaattatcaacagtgtttctttttacctagttacacgtgaaacagatacagttttatcagcacttggcatctctgggaaacgattaaattttttagaccctatggatgcacaggatactacaataggacctgtacaactaactaattaaaccaatgaaactatatatgacacctagcttat

SEQ ID NO: 24619 - DNA, 447 bp, Setaria italica
  Peptide Sequence Number=SeqID_90593
ggtggtgcacgtgcgtcgggaagtagctgccgtagccgaccatgtagctcatgcccttggggttcttgcccaggacgtagtccacctgggacttggcgaacctgacgatctcgtcgggcttgacctcgccgtcggggcacttgagcgatccgtgcgacacggcgaggtagtcggcgtagacggtgaggaggaaggtggcggagctcacgtactgcatgttgttccagtcgtccacgtacaggagcccccccgggcgtcatcctgatgttgtggccattgttcttctggaggcaggcgcagaggaagaactcggccttggcctggaactgcttcagcgtgtcggcgtaggcggcgacgccagcgcctccctcgaagagcaccttggagaggagcacctggaggccggcgtacttgttgtcccaggagaactcgagcacggaccagccg

SEQ ID NO: 24620 - DNA, 323 bp, Setaria italica
  Peptide Sequence Number=SeqID_90594
agatcaaccttgaattcttcagctcttttgacgtagtacaacaaatcttccatgccgaactgagcatttccttcctccttcatcttaaggtctttgagtatgctgagctctctattagctacgtcacttaactgttccgacatctcttccaaaaactctaagaccttccttgacgtccttggcattctgggttcaattgcaaaatcagcatagttgccataccccagaagtctagcaaatttgtgtcttagctgaaccaaattttctaggattcccagattgtccttcccacctttctgtccataagcaacagcaatctgctt

SEQ ID NO: 24621 - DNA, 323 bp, Setaria italica
  Peptide Sequence Number=SeqID_90595
aaaagggatctagcaaagaattaaaatatctaaaagcagttccacaaactaagatacgacactcgatagaatgtgagacggaggttagagcctcagaatagcatgaattctgagcctattaggtacaaactatttaaaagtaacagttatccgtaccaataagttcgccatttgtgatttgtcaagaacacagttttgcaaatttgtatgtttcgtaatagcagtattgagtattgaacaccagtcacagtattttgtttaatgaaattctcttgtgctaatgatttcttattaaagacaagtgacactcaggtttgaacgtc

SEQ ID NO: 24622 - DNA, 200 bp, Setaria italica
  Peptide Sequence Number=SeqID_90596
ggcggacccgcgccgggtgtcgcagaaggccgacgtgtacagcttcggcgtgctgctcctggagatgctgacggggaaggcgccgacgcacgccgtgctgcacgacgagggcgtggacctcccgcggtgggcgcgctccgtggtgaaggaggagtggacggccgaggtgttcgacacggagctgctcaggcaccccggcg

SEQ ID NO: 24623 - DNA, 671 bp, Setaria italica
  Peptide Sequence Number=SeqID_90597
acgcaggcttgaggaagctcggatgcttttttattaagatggagatggaaataacccttccttattcctgcgactgacacttggcgcaaaccaggtgagggacagagagagcttgcagaagctggttgacagtatgtgccagtctgggcaggtgctgaaagcttacaaacttcttcgaggtataatagacagtggtgtagttcctgatgttgtcacatataacacaatgataaatggactgtgtaaagtaaggaatcttgatggagcacttaggctcttcaaagagctccaacccaaggggttcactcctgatgagatcacttatgggactcttattgatagtctcttgagggcacacagagatgatgatgccatgatgttgttccaggacatgttacagagtggtggcacccctagtttgtcaatctacaatagcatgatgagatcgctatgtaggaagaataaattatcacaagcaatcaaactatggtttgatcacctgccccaaaagtacaatctctcagccgaagatgaagtaattgccagtgcccggaaaaagtttgaagatggctccctggatgaagcagttagggagctaatcaagatagaccaagaacatggttcggtaaactcaagtccttacaccatttggctcataggcctctgtcaag

SEQ ID NO: 24624 - DNA, 205 bp, Setaria italica
  Peptide Sequence Number=SeqID_90598
gagaacaaaacatcccacaatgaaacccaacggcgcatgcgtatctacaagctgatggattcatctgcaaccacgacctggtaattaaaactcacggcgtcgccttctcatcagcaccttctgccgcgccgcggcgtgccgtgcggcggcagcggcgacggcgaggccggcgggacgttgctgcccttaatgaactcgaggcact

SEQ ID NO: 24625 - DNA, 1064 bp, Setaria italica
  misc_feature (1040)..(1040): n is a, c, g, or t
  Peptide Sequence Number=SeqID_90599
cagaagacggcaccgcattcatcagtacaaacgaaaattctaagttcagacagagactacaggcaagggccctcattccacagggaatggaatcttttcaatttataacagtccatcccttgcgggaaaaaagaaagatatagaagtccattcttatacatgccctgctaaaagataatgtgatgcacattcagtggggcctgttttctttgttgtgtagaactgaaaaggtgcctccaacgtgctcccgtcttatgcagtcacagtcacacgagcagcatcccgcttcgctgcaaactccagctcctctggcgtgaagggaagtggctttgttggtgcgggcaggcggccaatgctatcaaccttgtcttgctgcttgggtggaggccgtgccgcctttggcagaaggcggcccttcttctcaaaccactcaggcttcaggagcgcccggaatccaagcttgttgtaatacactaatcttactgttccaccagcagcttcaactgcagcttttgccctagcagtcgtccttgatacctcaaggtgaataggccatttgatttcttctgctccacggcccattaaacggataccatcttttatttgctttccaatggcacctgtttccttcagtgtcttcatcgtgatcagttcagaggaatcgatttttccagcattgatgagctttgcgattttccccagtccacagggctggaatgtgagggagaagcggttcttgaatccacgtcggggcaggcggcggcgaagcggggtctgaccgccctcgaagccgaacctggcggtgccgcgcgccttctgtcccttgtgcccgcggccggcagtcttgcccttgccggagccgatcccgcgtcccttacgcgtcttctgcttccgcgcgcccgggttgtcccgcaggtcgttgagccgcagcagggaccccaccgtccgcaggggcctcggcgcgggcgccgacgcagccgcggccgccgctgcctgggtggcgtaggaggaggacgcggaggcgacccgtggcggcgggntaggcaaggcacacaggggatagg

SEQ ID NO: 24626 - DNA, 258 bp, Setaria italica
  Peptide Sequence Number=SeqID_90600
cgtcctcctcgtgcacgagccccccgagatgcaggggctcttctgcgagccgttcccgggcacctcgtgggtcctgccgccggacttcccctacaccgacagcttctcggccgacactaaggagagctacgtgaacatgcttgagaacaacatcgtccgctacaacggcggcggcgatgcgagagcgctgccgccgtacgtgtacttccacctggagcaaatctcactccggctccagaaccacaccttctgcgaggg

SEQ ID NO: 24627 - DNA, 966 bp, Setaria italica
  Peptide Sequence Number=SeqID_90601
cttaaggaaggtaatgatcatctcctccattgctgcattaggtttatactcttcgtcaggttgccctgaagatccaggtgtctcaatattaggtatagatgccccacccggcgacattacacaaagaggttgcaagcctggttcaactttcaccctcttactcaaatcatcagcaaagattatcgcaatgtttttcaaatctctaacatgccggacaacagaaattgtcaatgttgccaaggagggacttcgtcaggtggttcagcagcaaaggatgccaaaggatcttctacagagcagcctaaggcctatcttagtaaacttagcaaacactaaaagtcttactatgccgttgctacaaggtttggctcgcctgcttgaattactgtcgaactggttcaatgtcactttgggtgcaaagctattggatcacttgaaaaagtggctggaaccagaaaaacttgcccaggctccaaaatcttggaagactggagatgaaccaaaaatagcagcagctatgatcgagctttttcaccttcttcccccggcagcaagcaaattcttggatgaacttgttaccttggtaattgatgtggaaaaggcacttccagaagaccaattttacagtgaaatcaacagcccataccgtgctccgcttgcaaagtttctgaaccgttatgctgcggatgctgttgactattttcttgctcgattaagccatcccaagtatttcagaaggtttatgtacataatctgctcggatactggagagttaagggacgaacttgcgaggtcacctcagaaaatacttgcaagtgccttttcacagttttaccctcagactgaagcagctgctactcaattatcttctgttaaggatgaagcccttgctggggccatatctgatagttttactggtacaacaatcttcatcaaatatggtttccagttctgatagttatttaa

SEQ ID NO: 24628 - DNA, 1567 bp, Setaria italica
  Peptide Sequence Number=SeqID_90602
cttgcttgtacattgagctagactccttatccttaggctcaatcaccagtgaaacccttataaggaaggtaatgatcatctcctccattgctgcattaggtttatactcttcgtcaggttgccctgaagatccaggtgtctcaatattaggtatagatgccccacccggcgacattacacaaagaggttgcaagcctggttcaactttcaccctcttactcaaatcatcagcaaatgatggagcatcagacgagcgttttggatcaccaccaacgacagaaggattaagcatatcacctatttgattctggctctcactttcctgcacgactttcatctcactttgtctctgcctttcccatgccaccaccaatccagcaagttcgattgcaagccgtctattttccgctgttgtgttgtatggtaatccaaggcgactaagagagttgaccatctgaggaacaaagtgggctcggcaactatagaaaaggtctgcatggcgaacgataagctggaatatgtgaatcatgtttggaattgaatgcccctcctccacaaggactttcttggtgtatctgatccatatcggcatgcggctatcaccaggaggaagtcttctcggaagggcaggcatgagaatatcaagagcttgcttcaccaatagcttattttctggttggcatgtccgtaggagagcaatgaagacctgtaatataatcttttcaggagcttgataggcctctaagaagtgacaaacatttacaaaggcccactgtttgctggagttatcttcacgcttgagatggttccaaccgaattttatgagctcctttcgatggtgcaccagatcgttctgtagatacttcaaaagcaatgtcgctagctgaaggagttctatcctcaatggttcatcatattcagcactgacctcttctggaggatcaagaagcttgtcaacaatagttttaattatagaaggatcaacaacttcccaactctgtccattttggaaagaatgggctagcattggaagtataagaatctgcatggtaacaactaaatgatcttgcccatattgttttgactgaaaaatgttcagaaagtggttaaggatagttttcttcaaacttggggtgtatccttcagcaacctctatgacataaaattccttgagaaagctataatctatacgactgcggtacaagaatattgatagcatatcaaagagtgcaccaacttcagcacgatcgtgtcttaaataattcaggaagcattttataagccgcttgctttccatcacctggggtaaactcaaatcctgctcgttctgcaaacgtgcgagtcttgcaggtgacttccaagcaagtagcaaagtgtcgaagacaacccggttgttacggagccactcaggcatcaatttcacaagggctgagacaagctccaatcccattaaaataactatcagaactggaaaccatatttgatgaagattgttgtccagtaaaactatcagatatggccccagcaagggcttcatccttaacagaagataattgagtagcagctg

SEQ ID NO: 24629 - DNA, 167 bp, Setaria italica
  Peptide Sequence Number=SeqID_90603
tacaatggaaagggtttcgcactttgctttggttcgtctttagagacaggttcctcatcatcagaaatcccagtttccttgatttcatcatcatcatcaaattccaacaagcctttatcattctcttctaaatatttgtagaactcaggatccttttccgacagccg

SEQ ID NO: 24630 - DNA, 461 bp, Setaria italica
  Peptide Sequence Number=SeqID_90604
cggcccaaagacgaagtagtcgactaccatttcgtcgagcggagtcgacagcatcacatcgtcagactccgatgcatagtccaagctatttagtaatggttcgtacgaagggttcgggtgtgtgctgggggttgggctatgtgctgtacttagaatctctcttttccaaacggggagaatgcttggggcttctgcaccacatgccatttccgctattgctatcatgagttgaatcataccgaaaccatcagcaatgctatgacacatgtggaatccagcaacaaatccgccacatttcagtcgggtcaactgcataagaagcaatggtcttccaatgatggtcctcgtatcaccagcatcgcacagcagctcctcgacgcacgggtacggcggcagcagcggctccccgaactcctccagccgtacgtcggcgtcggcctccacgaacgccaccccttcct

SEQ ID NO: 24631 - DNA, 269 bp, Setaria italica
  Peptide Sequence Number=SeqID_90605
actggactgatatttctatccatattgatggagaagtgtctagaaaatggagattctggctttccgagcttgatgaagtgcatttggtatgtatagttccttactaccatccacttcacatacacaggaacctagtcctactgttctagtagtatatttaaagtacagataccgtccatccagttctagtcttgtggctgcttatatgctaaccatcaactagtggagattgcaggcatctatagcaaaaagggcatccagaggatgct

SEQ ID NO: 24632 - DNA, 381 bp, Setaria italica
  Peptide Sequence Number=SeqID_90606
gcaacaggcccctgctatggtttggatcggcgcttccggctgcgagttccgtcccgccggcctccgccgcccccggtcagaatcgttaagctccgacccaaatcaagtcaagggcaaacaattcgctccattattcagtggcaggggcgctcgattcatcaacatccgcggtgatccgagcaagcagccgtgagcttgacttcaccggtttgtgaaagaagatgacaggaagcgggcgctcgtcagtcgtctgctgcagtactcgcttgtgcaccacgttctccgcattccgtttcaccagatcaacatatgccgcacaccagagggaaaaccgtacctgcagaaaaattgttcaaactttccaaacttcaatttcaacat

SEQ ID NO: 24633 - DNA, 271 bp, Setaria italica
  Peptide Sequence Number=SeqID_90607
caacgtgcatgctagctgaattggcggacacacagaggcgattctgatgtctcaattgcaaaggtgaacaaagtgcatttaactgagttacggagatcaaccgatgtggagtgcacgctcgcggttaccttagaaccagatggcatcaaatcgacctcctccatgcccctgcaggtttgtgaaagaagatgacaggaagcgggcgctcgtcagtcgtctgctgcagtactcgcttgtacgccgcgttctccgcattccgtttcaccagatc

SEQ ID NO: 24634 - DNA, 1305 bp, Setaria italica
  misc_feature (1289)..(1289): n is a, c, g, or t
  Peptide Sequence Number=SeqID_90608
ggaggaggccggggtgcggcggtggctcgtcgacatcacccgctggcgcccctcccccgcccagttcgatgccgcagcctccctccttccctcgcacgagcgccccgccatcgccaggtttgtgaaagaagatgacaggaagcgggcgctcgtcagtcgtctgctgcagtactcgcttgtacgccgcgttctccgcattccgtttcaccagatcaacatatgccgcacacctgaggggaaaccgtacctgcataaaaattgcttaaccttcccaaacttcaacttcaacacctcgcatcagggagactacgttggcatagcatctgagccgctttgccttgttggcctggacattgtgtccatctccaagccccagggagaaaccaccaccgagtttatcatcaacttctcttcgtacctcactgatcatgagtggaactgtattcttcgtgctggcacacacagtgaagtgctaacagagttctacaggtactggtgtctcaaagaagcttttgtaaaagccattggtgctggcgtaggatttgggttgcatagactggaattccaccatgaacactggactaatatttctatccatattgatggacaagtgtctagaaaatggagattctggcttttcgagcttgatgaagtgcatttggcatctatagcaaaagggcatccagaggatgctgtaagcaactacaagaaaacattgtccaatgcaaccgttgtgcaggaacaattacattctacactagagagtccagaaggagctttcactttgtggacagtggaacaacttacacaatcactggagtaacagccttacaggtatcaggcattcttgaaatctactacagcaggaccaaaggaagagatgtgtgaatatgttcccagaattctagactcctgataatctactacacagccacagccacatggaaaggcttggttttacctctgtattgcttctgttacagaaaggggttcttttggccttctgtttaccataacagaacatgacatcaggagcacaaaggtcttcgcaatggctgcaacgcctttatcgttctatcctgcattcttgcagacatgtagtgtcatggggctaataagcattgacgtgccctgcattgagaaaagaggcattactcttgtaattgagatttgaaagagatgaagataagtgaaagaggaggttttaggatgaaatcaatctgccaatgaagagcaggggtatgtgaggctatgagagccacatgtagaattgcaggcacgtcgtttanagcagcaggaacctct

SEQ ID NO: 24635 - DNA, 381 bp, Setaria italica
  Peptide Sequence Number=SeqID_90609
gtcaatgttctttcactctcgtgtcgccaagcagatcattgatatttgtgcaggtacctccgttgtatttcggcccaaagatcatcttaattatgtgtaggatcttgcagaaccaccaaaaaatccagtcctgcatggaaagatgtgaggacaatgcttgagataaaatggcacaatatccttggcctcacagcatggttgcttagcattgctcagcgatggagttgctagcatagcagtaatgaggccacctgtgcttgtgccagcaatgacgtcaaagtagttagctaagcgtgcattgctcccatcaagctccatatagatagcccatggatcattgcgaagtttcgattcgattgcctgttctcccaaattgaagtc

SEQ ID NO: 24636 - DNA, 381 bp, Setaria italica
  Peptide Sequence Number=SeqID_90610
ctctctcaagagtttaaaccatgcactggtgccattggttctcatccaactctgtcatttttctttacaggccaatgaccaggcagaggtggtgaaattgggactccgagcatctgttaattgttagggaaacttcaggttcccagtaccttttttgtcttgaaaaggatgggcaaaataagtcattttgtgttcgtcttgttgtttggtctagaagattggagaggatggagataactccacatgaagttattgattgtcacctctgtaagctgtaggatgttttccatttcccttttgcagtcttccatgtcaaaacagacttggcaacttgcggtactaactgtatcatggttactgaattcaagttcagcttttgac

SEQ ID NO: 24637 - DNA, 1650 bp, Setaria italica
  misc_feature (1624)..(1650): n is a, c, g, or t
  Peptide Sequence Number=SeqID_90611
gagcgctccgccgaggagctcgaccgctcccgcgggttccgctcctacggcggcggcgggggcttcgggggaggggagcgccgcggcgggttcgacgacgagggccgccgtggcccgggcaggagctcggatctcgacatgccctcccgcgccgacgaggtcgacgactggggggccggtaagaagttcaccccggcggccgccgactctggccgccgcgataggttcggcgggccctccccctcggccgcgcggatgacattgacgactggtcgcgcgacaagaagccgctcccgtcgcgctaccccagcctcggttcgggtggtggcggtggattccgcagctcgccgggtttccgcgactcaccgggcttccgtgactcagcggcttcctcagattccgaccgttgggtccgtggagccacccctctgccacacaacggcgaggggatgggggagaggccgcgcatcgttctcaatgctccgaaacgtgatccttcggctaccactacgccacctgctgaggtggcacgcaaccggccaagcccatttggggctgcaaggcccagggaggatgtgctggccgagaagggggtggattggaggaagatcgagagtgagattgagcagaagaccagccggcctaccagctcgcactccagcaggccaaatagcgcgcattcctcccgccctgggagccctggttcgcaggtttcagcagttggaagtgagggagcacccagggcacggccaaaggttaacccattcggcgatgccaagccaagggaactggttctgcaggagaaagggaaagattggaggaagattgaccttgagctggagcatcgtgctgtaaataggccagagtcagatgaagaaagaaatttgaaagaggaaatcaaccttatgaaggtggatctgaaagaaattgagggaaagataagtgatgattctgaccaagcctcagtagatgcaaaaaatttggctgagaagataacccagttggaaagtcaacttgagcagcttacaagggagttggatgacaagattcgatttgggcaaagaccgcgttctggtgcaggcagggttacagcacttccacctagtccagcagaggaaccacaagctacagttgtggacagaccgcattctcgtggtggtatggaaccacatgcaaggccagaagaaagatggggatttcaaggaagcagagaaaggggatcttttgatggaagcagaagttcagataggccaatgaccaggcagaggtggtgaaattgggactccgagcatctgttaattgttagggaaacttcaggttcccagtaccttttttgtcttgaaaaggatgggcaaaataagtcattttgtgttcgtcttgttgtttggtctagaagattggagaggatggagataactccacatgaagttattgattgtcacctctgtaagctgtaggatgttttccatttccctttttgcagtcttccatgtcaaaacaagacttggcaacttgcggtactaactgtatcatggttactgaattcaagttcagcttttgtcgcaaggcgtttatttgggaatggtggaatggagaccttgaatttgatgttttgtgtcaaaannnnnnnnnnnnnnnnnnnnnnnnnnn

SEQ ID NO: 24638 - DNA, 243 bp, Setaria italica
  Peptide Sequence Number=SeqID_90612
cgcggatgatccggaggccgtctcctaccggctctgggtgaacgggtgcctgtcgtggggcgacaagatcgcgcacgggttctacaacatcatgggcatcgacccgcacctgtgggccatgtgcaacgccgcggaggagggccgccggctgccgtcgctggcggcgctgcgggcggtggacgccaccgagtcttcgccggaggtggtgctcgtcgacaagggcgccgactcggtgctcctcga

SEQ ID NO: 24639 - DNA, 273 bp, Setaria italica
  Peptide Sequence Number=SeqID_90613
cttgccgccggcgaccgccgccatggacgacgccgcgaaggcggagagggacccagcgtggtggggccgccgcgcgtggtcgctcctctcggccgtccgcgcgcgggcgccgctggtgcagtgcatcaccaacctcgtctccatggacatcgccgccaacgcgctccttgccgcgggggcgtccccggcgatggtccactccctccgcgaggtgcccgacttcaccccgcgctgcgacgccgtgtacgtcaacgtcggcacgctctccgagga

SEQ ID NO: 24640 - DNA, 364 bp, Setaria italica
  Peptide Sequence Number=SeqID_90614
ttttagttaccttagttatttattttttcttagttcctattatttagtctttcctttaagtatttgagggtccttgtaagatgactggtcagagaagactccgccaagaaaccagatattcccttttgaccattagcagatgcgagatctgctggtgtcctttcaggaaagtcaggagatgggtctgtcaaagctccaggagctgctcccagggcaataagcgcaactacagtccgttctctgcatccaagccaaaccattccaaaacaatcaatatgacaaaaagaaagatgaatgtattacatgctgtcacatataacaacttaccggccaacaaaaggcagcccagtggagtgcagtccca

SEQ ID NO: 24641 - DNA, 437 bp, Setaria italica
  Peptide Sequence Number=SeqID_90615
gcccgttcgctgcaaccatggtgcttgatccattaagaaccagggagaattatgttgattaccaggatagaagcttgtattttgtgtcatggcatgcagcccctggtaattgcctatggatgaagttggtgtgtatgagttgaagacagaagaatcaatcacgggtccagttccattttcatgctgctgcatccgagtgaaagagtggtatccggctcctcctgaataaatatctgattctgcgtcctcgtattctgaggcttgtccactaaatgagctttcaccctctatagtctgcgaaggtaattgacttgaaggactatccacagcagcttcttgaatcatgttattatttaccctagtacgagatgacttcccaccctttgtttcaagataatgcacaagtacaatgtgcataaagtcctcttccagcatcc

SEQ ID NO: 24642 - DNA, 2211 bp, Setaria italica
  Peptide Sequence Number=SeqID_90616
gaaaacttagatatatccgagcagcagcttgagcagcattcgaacaggaccaatgaatctccgcttgaggctgcagtgaatttctctcattaacatctccaataccaggtagaccagatatttcagccatattagcttccttaagattgagggcctgaagatgactggtcagagaagactccgccaagaaaccagatattcccttttgaccattagcagatgcgagatctgctggtgtcctttcaggaaagtcaggagatgggtctgtcaaagctccaggagctgctcccagggcaataagcgcaactacagtccgttctcggccacaaaaggcagcccagtggagtgcagtccacccatgaacatctctgaaatttatattcacgccagcagcaagcgttggccttatagcccaatcatatccaagggcagctgctaagtgaagcacgccctgtccttcatcatctaacacactgggtcccttaccacccacgccaactttattgagaagccagacatgcaatttatccttaatcaagttttcagcaaactgatcctgctgatcatcagtagaatgctcattattatcaacagccaactttagcaaattggaccactcatcattgctcatcatcagtgaacctatcttcttgcttaattcaatcatctccaagctggggttagatacagttgcctggtattcatccggcccaagggacaatagtttatcaaggcgtatctggaaataaactttgtttgttgcaccatgtggactaggagcatccatgtattgggtgacagttggtcggaattcaaactctcgcacttcactgcaggccaacctgttggagcaggtgatatagaaaggtactctaccaggtttatgctggggcgaataacagataagagtaccatctgctaaaatctttgctggaacttcaacttctccaaacatgcatgaccacttgcatctctcagtgacttgactgttattcaggatgttaccagtaactaaaatcttagtctttgaccccacatatgtccagcttggggcaaactcaactatactaaagagctggtcctgcgagagcattggcgagacagtaaactgatccagcggctcacggcttgatgcttcaatgatattatctgcttcttcagtgctccagtacaccccggaactagattgaatttgggaatcttccacttcaggaagctctttgctcatccatcttgtaaaactgtcagttttcttaaagctgtcttttaggatatcagatagattggatgactgagtcttcaaaaatggatagccaccaatggctgcctccagagaaccatcattttgttgcgggaagctgttttctgctgtagacaaatcacctgtagcactagggaactgccaaaatgactctccatcagctcctgcagcaccaatatctttgagactgaggccatcggaatatacttcatcaaatgtcaaatagtcaattcccaagccttctgtggaagtgccttgatcaggaggaacagaaaactgtagtggaggcatttgaacaggcccattgtccagttctatcaccggattccacgatggaacatcagtttgatttgcacgcccgttcgctgcaaccatggtgcttgatccattaagaaccaggggagaattatgttgattaccaggatagaagcttgtattttgtgtcatggcatgcagcccctggtaattgcctatggatgaagttggtgtgtatgagttgaagacagaagaatcaatcacgggtccagttccattttcatgctgctgcatccgagtgaaagagtggtatccggctcctcctgaataaatatctgctgcaccgaattttgctttagatattctgattctgcgtcctcgtattctgaggcttgtccactaaatgagctttcaccctctatagtctgcgaaggtaattgacttgaaggactatccacagcagcttcttgaatcatgttattatttaccctagtacgagatgacttcccaccctttgtttcaagataatgcacaagtacaatgtgcataaagtcctcttccagcatccagtacgtcctcctttggaaatttatattatcttccccatgggcatagtaacagtgaagcacatcaatacttccagatttcagcctttcatgggcttccttgacagtcttctgatcatttttcttcct

SEQ ID NO: 24643 - DNA, 1601 bp, Setaria italica
  Peptide Sequence Number=SeqID_90617
atcgttttggtggttgttagaagatgtattatgctttctatcacatacttgttgcaagtgtagtatgtgatgaaaagcataatacatcttctaacaaccaccaaaacgatgaaaacatacacaatgcaatctaaaatcataacagcgaaaccctctcaaactcccaaacgctgcacacacgcagccatcaattcatatgatgcgacccgtatctctacatcagattcatactgtaaatacactgctccttaaacgatacacaaggtttctactgtacacaaggctatgtcataataaacacaaactgccacaactaagcccaaatccaagcatatcggatcatgcttcagcaatgctacttcgggttaccagccaggtgcacgatcaaatcagtagcactcgagaaaatgggcaatctacagaggcgaacaattaatcatcaacgctagaaataaccatgaatagatgtatcatcattcaaaagctcctgtaattcattcatcaaataaccatcgtccatctctgctgactcctccaccatcttttcttgcatagcctgggattcctgcatttttgacacgacagtgtaaatcctgtggtactggtctcttgcatccgggtattgagccatggacttcactctggcaagagctttctggagccgttcttcagtttgctttcgtccttcttgcaagaaatcataatcatctctggaaggcttatcttggatcaaactgctacttgttccaccactgctgccctctgttgaaccttctgtagaacgaaacccacgcaacccagcccctctacgcctccaacgcaggataattttctcaacgatcccaacagaccaaactattttccgataatgcttcctcacttggtgacctcgcacatgagcctggatcttgacaattcgctgcctaataagaagaaattcctttctccccttccatcccctgaacttattctgtatacgagttgcagcagaatgcaggggatcaagctgccctggcttggatggcttgacagaaaggagcgaaagggcacgctcatctgacattccacctttatcatcctcatattgagcggcttgcttcctttggaaggattgcaccctgaaaacttgatatatccgagcagcagcttgagcagcatttcgaacaggacccaatgaatctccgcttggaggctgcagtgaatttctctcattaacatctccaataccaggtagaccagatatttcagccatattagcttccttaagattgagggcctgaagatgactggtcagagaagactccgccaagaaaccagatattcccttttgaccattagcagatgcgagatctgctggtgtcctttcaggaaagtcaggagatgggtctgtcaaagctccaggagctgctcccagggcaataagcgcaactacagtccgttctcggccacaaaggcagcccagtggagtgcaatagaaatactaccgacttaggaaggactagacaagtagaaatttactaacaagtaccgttactacggaccaacaaaaaaggaacaaagaaacccaaaagttaaaggaaaagttaaagaaacaaaagaaa

SEQ ID NO: 24644 - DNA, 542 bp, Setaria italica
  Peptide Sequence Number=SeqID_90618
ttagcccttatccctgcattcactcactattaggtcatagcttttgtctttttgcttccttttccaatagtacaacagcaggaaatgcttccaagacaactcttggtactaccagagacccattgctttgaagttcagagacccaagtggcatcaaaattatgctctccttctagaactaacatgttcctataactcttcaaatcataccacactggtgatatgtgagtaagctttgcactaaacaactttgccatgtcataacctttggagttccagggggtcacgtaggcgaggacggggttcgggaagtggcgctgcgaccggttctcagaaacccttgtgtgctcctgcatacaacacaccagcaccacacgatccagaatagaaaagaaaaggaaaaattggatctgtgacaccgaaagatctcagttttagaaatataccatccaactgatcactagaatacaaggtaccactgaaagatctcaccgtttagaaatttaccaatccgtcacgttttccatccgtcttgccgtttct

SEQ ID NO: 24645 - DNA, 1758 bp, Setaria italica
  Peptide Sequence Number=SeqID_90619
gttcaaaaacaaccaagcaaatgcgcatcatgctgtagaagatgtataacagtataatattctataaataaaaagatgaatacagttggctctttaacttcacatgtgtgtactcaaggaggagaaagcttcagtacagcaatttctcacggaggatgtgagctattatcagatgatagtagcaatgctgaaaagaacaatgcccaaagtgcatatggtaccaaaaggccatacagatgaggttctaatacctcacagcagtagtttaactgacacacctccaaaaataacaaaggcatattgaggtattcctatagaacatcaaaaaagtagtccaaaccttgtccaatctcccaaatcgaaaggcctgttccccaatttcgcgcttcatccaaacgtacagaaagagacatcagtgttgggtaaaatacagcatgcctcacaccttcatctgaatagatgaaaaagtgctctacacttttctcatcccactgcaaagatggcttgtacttctcaagtaaaagaacaaaatccctcccagtgatagcaccaccaccgctgcctctagacagtagaaaatcattcccgtaaaagttgatgccaaggaatatcatccgagaatggtcacgagaagaacctttggctgaaagaagtgttgttaaagaatgctgtacccaattcagaggtgcactgggaccaggattttgaggcgctgagaaatcgtatgtcataagagaaaaaccatctacggagtcagccagctgcaggagatcttctggtccaaagtcctgattattgagttcttgcattcttggagctgggataacataaattaattccaaatggtggctacttgatttggagctgattgaatgcaaagcctcccccagctccttaacaaactgaagtgccatggaacgtagatgtggatcatccagcacaccataagcagcccatcttgaccaggactctagcacaataccgttgtagcccttatccctgcattcactcactattaggtcaatagcttttgtcttttgcttcttttccaatagtacaacagcaggaaatgcttccaagacaactcttggtactaccagagacccattgctttgaagttcagagacccaagtggcatcaaaattatgctctccttctagaactaacatgttcctataactcttcaaatcataccacactggtgatatgtgagtaagctttgcactaaacaactttgccatgtcataacctttggagttccagggggtcacgtaggcgaggacggggttcgggaagtggcgctgcgaccggttctcagaaacccttgtgtgctcctgcatacaacacaccagcaccacacgatccagaatagaaagaaaggaaaaattggatcgtttagaaatttaccaatccgtcacgttttccatccgtcttgccgtttcttcacggtttcacttccttctgtcattgtcagctgcccttctttccctctccggcaaagaacagagctcctcatcctccgggcaaaattgaaagagcctgtgcttgctgcttccattggccggaaggtgagggcgccgttgctgcagcctacgcggatgaaagtaatccttctcgacggaagcacccttttactgctgcagcatgccaacgagagctccaaatcctaggggcctagatacaaatcggctgcatcctgagcaccatcgtgtacgtgagcccgagggaagggagccaagatgacaggactcttgcttg

SEQ ID NO: 24646 - DNA, 836 bp, Setaria italica
  Peptide Sequence Number=SeqID_90620
cttcacctgtaattatatgtactactattcttctcggagctctattgagttatggtgaaattaatctacccgaggctagtgaagatcacaagggcactccagaagtattagctttcaaggttggaaattcgtccagtgatattcactttgaagcaaatcagagactttcagtgcctgaatttagggaggatacatcaaacttcaaagagaggggaattcagacagtttccttcggagagagggctagtgagcatattgatctggatgatgatgtccctcttttgaggaaagctgatgaagaagatgagagaggtgacctgcgaaacatacctagaacactaacaccatttccttctatggtcaatcttcgccaagagtctgtgatcagggaggacttgatctttaataagaaaagagaaccagaaggttcatttttcatacaagatagggctgatgggcagactagcttatttgatgttgcccatctaagtgttctgaatgacaaagatacatcctttggtttgttttcatccagtgagaatgctcataaacatgttgacatggaagaaaatctgaatcaggatagagttacagcagcagctagcaaagagcgagatgtctctgagaagaaccaaactgaagagcttgctggaactagtaaatcagccttttctatttctattcaccaatgggaaaagactgacaggcttaatgttgatactagcaatgctgttgaggacaacttgcttgattcctctcttggctcaccatgggcaagagttagcagtcaggatggttcatctggttttgactctgatggggctgagagttcttct

SEQ ID NO: 24647 - DNA, 500 bp, Setaria italica
  Peptide Sequence Number=SeqID_90621
cgtgtggccgtcgccgtcgccggctgtgaacgcggcgatcgccgaggagttgtaccccagcgcgcagaggaagccgaggtagtccgtggcgtcggcgtcgtagacgaggcccgggtccgcggcgcggttgggctgcacgtgccccgcgccgtagccgaacggcgtcgcccggaggaacgacgagttgctcatcggcttcctcatgttgtcctgcaccctggctgttgtcatgatcgccgacttgatggcggcggggctccagtcggggtggagggccttgaggagcccggcgacgccggcgacgtgcgggcacgacatggaggtgcccgactcggcgttgaagaggacgcggcgttcgtcgaaggggagaccggtcgggcccgcaaggccggtgaacgccgcgaggatgctgacccccggcgcggtgatgtcaggcttgaggatctgaggcgtgacggtgttgggcccctgcgacgagaaggcggccatgaacggcgccg

SEQ ID NO: 24648 - DNA, 264 bp, Setaria italica
  Peptide Sequence Number=SeqID_90622
acggtagaatttagtagactagaacttaccttgtttgaggtgttgacctcgggatgatgtgctttgctgcttccttgatttgctgtacaatcatatataggtttaaaccatgcatatagtataattcccccgtttccttggcttactgcttttgggagttgacaaggcctacctgcttctcgggtagatggtggcttttcaggatcggagcccgactatgacttcgacaacgacagatgggaagactaggaaccgttcttcgct

SEQ ID NO: 24649 - DNA, 267 bp, Setaria italica
  Peptide Sequence Number=SeqID_90623
gaagccaagaacacccacgatcacctcagaaatgtgatgaaggactccaaaatatcatcgtcccaggaaagagaaactatatatccagtgtcaaatttccagcccaagtcgatggcttcaagatcaagtactggtaaaccttggagatatcatcatctctctactctactatcttcagcggtcctagaatggattttgatgctcctgctgctgcttgaggggctactctcctatctggtgacagcatttgcacgcctttgcaagctg

SEQ ID NO: 24650 - DNA, 367 bp, Setaria italica
  Peptide Sequence Number=SeqID_90624
atcagtaatcatccaacaaagtgagatcaagcaattcatcaatgaggttgccattctttcacagataaaccatcgaaatatcgtaaaactttttggatgctgccttgaaacagaggtacctttactggtatatgactttattccaaatggttcattatttcaagctcttcattctgcttcagacagcaatttcacattgtcttgggatgactgcatgagaattgcatgcgaagctgcaggtgcactttgctatcttcactctgcggctgcagtatcagtctttcatcgtgatgtcaagtcatctaatatactacttgatgcaaattacactgcaaaagtttcagactttggagcttcaaggttggtt

SEQ ID NO: 24651 - DNA, 609 bp, Setaria italica
  Peptide Sequence Number=SeqID_90625
ccacttccgcgtcttcgtcgtcgtctccagccagactccaagcaagccaagaggccgcgagatctcctccgccccgcaccgccatggacgccgtggactcggtggtcgacccgctcagggagttcgccaaggacagcatccgcctcgtcaagcgctgccacaagccagaccgcaaggagttcaccaaggtggcggcgcggacggcgatcggcttcgtcgtcatgggcttcgtcggcttcttcgtcaagctcatcttcatccccatcaacaacatcatcgtcgggtcaggctgatccaattccagcagttgaggggctgcaggactggacaatggcgtcaaataccttggaagcagcaccagtttgcagcccggacatcgtaaagcagttcctttaggacttccttttgttaagaccagctcctttctgttttctcaaaagattgtattggtagacctggaactctgttggaaccttgatacatccgtgaattaacaggtgacaaaatccaatggttaccgtttcctcacctgttgtcttctcggttgtgttagtttggttccgttcttgattgctcgaaggtttctgatgatgcctgttcaaaaaaaaa

SEQ ID NO: 24652 - DNA, 582 bp, Setaria italica
  Peptide Sequence Number=SeqID_90626
aagccacttccgcgtcttcgtcgtcgtctccagccagactccaagcaagccaagaggccgcgagatctcctccgccccgcaccgccatggacgccgtggactcggtggtcgacccgctcagggagttcgccaaggacagcatccgcctcgtcaagcgctgccacaagccagaccgcaaggagttcaccaaggtggcggcgcggacggcgatcggcttcgtcgtcatgggcttcgtcggcttcttcgtcaagctcatcttcatccccatcaacaacatcatcgtcgggtcaggctgatccaattccagcaggttatctactcgattatacacttgctccgtacatgggccgtattagagaagccagcctcataggatttggttgctgtggcatcgctacgtttggcgcaggtggtcaaggagttctttaccctggcacatgggtggcggtctagtctacggatcgattgtcattaaagtgtgttctgggttttctctcttcttattaggctgtgtgcatcccgctatgcagaggttggaagtatttcaagacatgtatcactcgatgtactacccttagtaaa

SEQ ID NO: 24653 - DNA, 353 bp, Setaria italica
  Peptide Sequence Number=SeqID_90627
ggccatgcaaaagacagtgggcgcggcgagcatgatgaggaacgcgcagccgtagcgcgggccgaggaggtcacacacggcacccatggcgagacgggagaagatggagccggagacggaggccacgccggcgttgccgatgtcggccttggtgaggttgaggttgtcgcggatgatggggaccagcggcgccgcggcgaaggtggagacgaagcaggtgaagaaggagatccacgagaggtggaaggtgcgcatgtgcgggttggcgaaggagaagagcctgatggtcttggccttgtgctccgagtccaccggcaggtcgaacttgcttgccgccgtggcatcctccgtcg

SEQ ID NO: 24654 - DNA, 164 bp, Setaria italica
  Peptide Sequence Number=SeqID_90628
cggggactcatctcttccctgctgcccgcccaggcgaggaggtcaacggcctacagctcctcccgcacgcccatccggcacggctgactgcccggcccggctccctccctctcgcgcgctggcgttgcttttctctcccactccgccgtcccgtccaaatcccc

SEQ ID NO: 24655 - DNA, 361 bp, Setaria italica
  Peptide Sequence Number=SeqID_90629
ctcaacctctgtcttgtgtgcctcagcacctaggccagagccagcgcccgggcaaggctgctcatgagcaggtctgccgcgaagcatctccaagaagaactcaagaagaacaggttcgaaccccggcatcttggagtatcccgggcagtagttgatgtccaggatgaagtacttggcgttgccgtcggcgtccctcgcccagatcaggtcgaagttgatgaggtgcaagcccagcgcccgccggagctcgcgggcgaccctgttcacgaagtcctggggtggcatctcggcgtcgccagcgggcgggggggcgggagggaggggagattggttgggcggaagggggccgcggcgtcggcgg

SEQ ID NO: 24656 - DNA, 647 bp, Setaria italica
  misc_feature (1)..(41): n is a, c, g, or t
  Peptide Sequence Number=SeqID_90630
nnnnnnnnnnnnnnnnnnnnnnnnnnnnnnnnnnnnnnnnntttttttttttttttttctatcaccaaaataatcacattttagatttcaccataaccatgaagttatcgaacaaatgttctgtacaacaatcctgtgaacatcatcttggcatgcaatcatgtgccaccaaaacttcaaccttccacaacactacaccagagttacaaatcttaccaatacctaaagtagcagaacactagagaaacttcttctcaagtctctgcagatgctacaacagttctgctgcaccttcaaagttcaaacgaacaattgtcctgctgtggctattgtacaacccagcaacgcgccagcaaccacctgggttggtgtatggcctaaaagttctcgcagtggtcttgcttcagacaagggatgttcagaaggaagttcacaaactatttgattcaatacctctgcttgctttccagcatgcaatctgataccagaggcatcgtacatcaccacacttgcaaatatagttgctgttgcaaagagggagcaattaaagccatcttggaatccaatcgctactgctagtgctgtaaccgtggctgaatgtgatgatggcatgccgccagagccaataagctgcttaggatcccatc

SEQ ID NO: 24657 - DNA, 1925 bp, Setaria italica
  misc_feature (1869)..(1925): n is a, c, g, or t
  Peptide Sequence Number=SeqID_90631
gcgcgtcggtgcggtgccggattggtcggaggatttcggcgattcggctgcctcggtgggtaccttccatgaagcaaatgaagctacctagcatacagctcaaagttcagtagactgttgggatcaacatttcagtcatctgtgcttttcctaacatgatggctagtggtaatttccagttaaaaagatagtgactcattattgagctacagatggttggccataatgactgttagtgcccttttgtcgtaagaactaggctgtaaattgatagatcaaagttattgatggagcaagcttgctgtgatgatgtacatgagcatgtcataaatgtagcacatggggaaactgcatcaacatccaccagtcatcaagatatgtacagcgactcagatgaaccacatcaggaagataggccttcaataagcacacgaaccccatcatcacagtcttctccatcgacatcgccaacgtatagctccagaaatttatcctttcctagaagagatagtatatatggtcatggaagaagtccttggaactctggtttatggatctcgtttgaaattgtcatgtacatagctcaggttgtagctgctattgtcatcctcatcttttcaagacatgagcatccccatgctccattgttcgcatggatagttggatatacggttggctgcattgcttgtgttcctcttatttattggcgctatgttcatcgaaacagacctttggaccaagaacctcagcagccacccacaacatatcctactttgactccttctcagtcatctgaaggacgcactcatcgtaccagtggtattatcttgcatcttggatgtaccacaattacctgccccaggcttagcgtactggcttatcatttcaagacagccgtagactgtttctttgctgtatggtttgttgttggcaatgtgtggatttttggtgggcgcagtatttcatccgatgctcaggacgctcccaatatgtacaggctatgtttggcattccttgcacttagctgtgttgggtatgccattccttttatcatgtgtgcagcaatttgctgctgctttccatgcttgatatctgttttgcgccttcaagaagatttgggtcaaagtagaggagccactcaagagctaataaatgcattgccaacctacaaattcaagccaaaacgaaacaaaaactggggaatggaccatgcttcaagctcggagaatcttgatgagggcggcatactgggcccaggaactaagaaggaaagagttgtttcagctgaagatgctgtgtgctgcatctgtcttaccaagtatggtgatgatgatgagctccgtgagcttccttgcacacacttctttcatgtgcagtgcgttgataaatggctcaagataaacgcagtatgcccactctgcaagacagagattgggggtgtggttcgatctttcttcggcttgccctttggccgccgacgtgtcgataggatggcaggaagaggtgtagctagctcaagattcaacgtatagaacatgttttttcagtgttatcctttcttacacaaaaagagccctgctcattgtgctgctatggttttattgattattaagagaagcactgatctgcatttggtgtgctcaagacgacgactacaggtggagacctggtgcttgtaaaggcaagcttctgtagtacgtggaggtgttgctatattctgatgtaaccattttcaacaaggatgtaaataaggaacatgaagttcacttgtcaggtgtatattgcaaggaacttcacaggtgttctattactgccagttctgtgattctatgcaccgcgtgcttggtagaaaaaaaaaaaaaaaaaaannnnnnnnnnnnnnnnnnnnnnnnnnnnnnnnnnnnnnnnnnnnnnnnnnnnnnnnn

SEQ ID NO: 24658 - DNA, 386 bp, Setaria italica
  Peptide Sequence Number=SeqID_90632
ccaggccacttgctagctagtagtactatcaagcagtattttgtcaaatcattcgcaaggatttgagatagtacaccactaaggactggccagagtaatggaggacgactcgagcctgtttatgcagtgggcgatggacacgctgcagcacgagcgaccgatggccgccgtcgtcaacgacgactgcggcagcgaggcgaccttgttcccgtcgctccgggcgctccgggaggcctcgcacgcggccgaaatggtccaggagctgatcgcggcggccccggcgagcagctggagctccggctccggcgacaccaccgaaggcagcagcggaggcaacaactcggccggcggcgcggccatggatcacgacgcctggcctccgaccg

SEQ ID NO: 24659 - DNA, 233 bp, Setaria italica
  Peptide Sequence Number=SeqID_90633
ttgatccgcgcaacatctgtgacacagatctagtgggcatcgacgggctccgggcggatctcttggagcagctgtcagaagccaaggggcagttgaaggtgatcgccatcgtcggcttctgcggcttggggaagaccgccctggctgcccaagtgtacaatagagaaatcggcgacagaagattcgagaaacacgcatgggtttgtgccgcgggcaagcagccgacggaggtg

SEQ ID NO: 24660 - DNA, 762 bp, Setaria italica
  Peptide Sequence Number=SeqID_90634
tggcttgcaactttatcatgataagtcgtatagtccttgttggcttgcaactttatcatgaaggaaggttgtatagtctgtattcaaaaattttgcattctaacccctgcatgtatttatgccgtagatcccgaagcaccggaaggagattattgggaattctcagaaggaccttcggaatccgaagaagtgtttgaatttgttccctgtgaagcaaatccgtcagcttctactaatctttttagagaacaagaagctccataggaggctacagaggaggagaccccgaagccctagggtattgacccgagtctcacaataccctagagaacagtttatcgacgcatcttctcctgaactatttatgtttaatcttagagcttgtctaacactgcatcactaagtttgtttcaacttacgtcctgtaataactcgtacctcttaattatgtatgtaaaaatgtaatgtttgttgatattatcccatcgcggatattatcctgatgtatggctaggagacacgccgtggatccttcgaggagtcctagggacactcgacggactaccggacttatgctgttttaggtgcgtttcggataattgctgttccgacagcaattaggcgcacttaaaccagcttaagttgggcggttccgccacagctggtatcagagccgtaggttgggagaatcagctaggcgccgcctccgccgctcgacgcccctgccccctggatccgggcccgccggcgccgcccctgggg

SEQ ID NO: 24661 - DNA, 486 bp, Setaria italica
  Peptide Sequence Number=SeqID_90635
ggcgcccctgacgccgccggcgtcgaccggccccgcgcgcgtggtgatcaccgccgcgacatcctcgtcgtccgcgggcggcagcggcgccgccgccgtgtacatggccgtgaactcctcgttggtgaggtcggtgaaggcggtctcgccgagctcgtaggtgagccccgccgcctccgcctcggcgttggtggcctcgatgtaggccaagttgcgcgcgaacacccggaaccggcgccgctcctccgcggccgtggcgtaggacctgttgtactccgccttccaccgctggaaccgctctaccatcatcgggctgccgccgccggcgcgtccgtgggcggccgtcgccgacgagcagccgtggaggaacacggcggcgagcaggaggaggaggagcacgcgtggcggcgagccgcggttggtggaggtggacgccatggatgacgacctggatggttggcttagcccagtggtttacgctgctta

SEQ ID NO: 24662 - DNA, 259 bp, Setaria italica
  Peptide Sequence Number=SeqID_90636
ccaaacaaagttccgtgcggaagaagcactcagcagcagctgacttgttcctaacatttagagaagcaagctccaagcttgagcagtggacattcttcccatgtctaacaacctggataaatttattaggaagcctatcagtaatgtccttctggggtataatgaagtaaaatccttgcctaatattatagggtatcttcagagtcggcatattatattcttccctgtacttgttggcgaggttatgtatggcttcgct

SEQ ID NO: 24663 - DNA, 243 bp, Setaria italica
  Peptide Sequence Number=SeqID_90637
ggtctgcacggcgaaggccgtcgccgtggcgaagagggcgaccttgcggccggtcttgatcccggcctcgaatgcctcgtcgcgcatgctgtcctccgtcggcgtcgcgtggtacgcgaggacgccgacgaggccctgcacgggcagcaggttgagagacagcagggcgttgccttcgcttatgaggagcagtagcagggagttcgtcgcgaccagcgccgcgccgctgatcacgcagaggaa

SEQ ID NO: 24664 - DNA, 248 bp, Setaria italica
  Peptide Sequence Number=SeqID_90638
cttggcagtgagtttgaagttcagaggtggcgccggtcgcttcctgatttcaaggaaggcgaaaggcaacaaaaagatggcggcgacggcgtgccggtagaagacgaagaccgtggtgctcatgccctcgttgaaggacgccttggtgaggatgtgcatgccggcatagatgagccggatgagcaccaccgtggcgtacaccttgccgttgcccatggcgcctagatggaatgatcgatggtgtttca

SEQ ID NO: 24665 - DNA, 249 bp, Setaria italica
  Peptide Sequence Number=SeqID_90639
ggttggggcttgacttctgcggaacaggaacagccatcggaatcgcctgatcaccgccgtagtactgcaagccaaagatgccatcaccaccatggtactgcccttggccggcgaagctcagcatctggtgataagccggagccaggtcgaggtaggaggagcaggtaggagacgacgcggcggcgggagtggcactggtggtcgtggcggtggagacgacgctggaagagaagtaggaggaaggggaca

SEQ ID NO: 24666 - DNA, 1329 bp, Setaria italica
  Peptide Sequence Number=SeqID_90640
ccaatttcaaaataatcttcacctgagacaaatttgacaaaggcaaggaaaaggtcgtgtatggtgaagcaattgtgtcctccatcaagtagtactctctgaaccatagttctctgcaacaagtcattaaagtatcgattgccaatgttctcaaggtgccgatgcctagtctgcttaaggatgcccaaagatatccagagatatatgacattctccttcacgaaaatatgccccttggggaacagcgtgaagaaaacaaagcaccgtttcaggtgaattggcatacggacatagctcaactttaaggctggcaacacagtatcctccctcgttggtaagtcccagtattcagagtccaatatatcacaccacgtctcctcattttcctcaaagcgaagtgcgcttccaattgctctgactgccaaaggcaagcctccacatttctgaacaatttttctgccaatttcttcaaagggtttttctatattttgatccaggtcacaaaaggccatctgcttaaatagttgccaagattcatcaaaaggtaagcagcccacattgtagggaggcattgtctggataattgatgacacatttacattgcgggtagttacaagtattgcccctaattgtgcagtagacatcaccgatagcaaggcatcccaaaggtccttcctttcgctccatacatcatcaagaacaagtaagaactttctgccaacaacttgttccatcagcatatactctaactggtccaattctgttatctgacaaggtttccttgtaaatgacatgataattttgctcatgatgcttttaagatcaaagttctctgatacatggacccatcccatcaggtcaaactgctttgtgatcctttgatcattgtaaactatttgagcaagtgttgtctttcctactccccccattccaattataggaagaactgatgcattattttctccacaagctccattcagtgagagcaacaacttgactatgttttccttatcatcatctctgccaattacagtgggttcatcaacatgtggagtagttagcctaggcacaaagtcttcctcctcctccctgaatggcgcatctgcctcatccagatgaagatcattccatgcctttgtgatctccttaaatctttccagaattctttttaccctgacagccaattcatctggaactggaatcatcacagggtttgtttctggttccttcttgtcgcccttgcgcttgcgtttacgtgtacttctgtcttcatgaagactgtctggatcatccatcctacgacgcagcagctcaaacttgtactaatcg

SEQ ID NO: 24667 - DNA, 501 bp, Setaria italica
  Peptide Sequence Number=SeqID_90641
ctgatcaccaactgcagcattctcactgccaacagtatcctgatcacaaaaagtggcagccttgccaccatcaacattctgatcaccaaaagtatgagccttgcctccacaagcatccttgccgccgaaagcgaaaaatgactgggcagaagatttgttccaagcaccaaaccccccttgaaactgctcagcaggagtgacgaatatcaacggtggggtggttgactggttagatgtattgacacccaagggcgcagggaacattggagccaatgtcctcaagggcttgatatccagaacatcctgatcaggagtaggcatgaaatttgatggccgattcatctgaacttgcagcaattgagttcctgatcagaatcctcgcagctgcggctgcggctgcggctgcggctgcttgggggcgggagcggaagctaggagacggacgccatggatgagcgagtgatctgctgggcggagagttgagtggcggtctgactggcc

SEQ ID NO: 24668 - DNA, 230 bp, Setaria italica
  Peptide Sequence Number=SeqID_90642
gtggacagagaagggagcacgcaagcaagggagcgaggggggagagagagagagctgtgcgcgagcaataaatagaaattaaggtccgagccgcctccatggcggcgtttgcaggcgccctcgaattcctcccctgcacccactcctctcttctcttcttcttcctctttatatagcctcacacctgagacacgcaacgagggggtaggcaaggcacacgaggggatagg

SEQ ID NO: 24669 - DNA, 500 bp, Setaria italica
  Peptide Sequence Number=SeqID_90643
atcatcggcagctgagagtggcgaggtagcagctagacgttgttggtcagcttgaacaagtgtgataggaagcagcgagctgagaagaggagagaagaggagaggaggagggatcatggagtggagcgacagcgagaacgagcggttcgagcgcgcgctggccacctacggcatcgacgcgtgggagcgcgtggcggcggcggtgggcggcggcaggacggccgacgacgcgaggcgccacttcgaccatctccaggaggacgtcggcgacatcgagtcccgcggccgcgcccacgacgcccgcgacgcccgcaacggcaacaggaataacaggggcagagccaaccggccgcagacttgacgggaacgcgcgcggcggcgcacaagcggctgcagctccgatcctccatcgttcgtcatgtcagatatacaaatatatacatatatgtatatgtcgtgtgtgtggacatgccagtgtgcacaagcgtgtctgttgggtt

SEQ ID NO: 24670 - DNA, 261 bp, Setaria italica
  Peptide Sequence Number=SeqID_90644
gttcgccaccaccaccttgtacacgatccccttgccgcccttgcccagcacgtacgccgacgaccgcagcagctcgtcgagctccacgcggaagccgcggtcgatcgccaccagctccccgtcgccgccgctcgcgccgctgttgtacttgccgccggcctcgtcgtcatcctcgccgcccgaggacgcgtccgacgagtcgccgccgccgccgtgcccgccacagcatgcagcggcagagcgcgctcttgctgctgtccg

SEQ ID NO: 24671 - DNA, 246 bp, Setaria italica
  Peptide Sequence Number=SeqID_90645
aaaaaggatctatcttgggattgcaagtcccagtaatcatgccactcttcatagacaataattcttcctcttggaattcagcttatccttcatttttttgtgctatcttgcacccagttttcaccccgtttcttctgtatgtccaatgcaaagagtccacaatacttgtttctgctcaacctgtgggacatcaatctgtcctgcttgcgagattcgcgccggcgccctcgcgcagcttgccgcctt

SEQ ID NO: 24672 - DNA, 260 bp, Setaria italica
  Peptide Sequence Number=SeqID_90646
ctaacatgaagacgccgacagcagcatccccgtcaggcgatatgcaagtggccgatctcgccggtccgggcggcgcgggcgacggcggtggcggcggacaggcacgtcgacacccactccgccagcagctcccacaccatgtccaccacggacacggccatcgcccatggcattgacatcctcctgccccggctgcccgcccgccgagccgccaagcggccgagccggcgtctctggcgctctcggctacctctctctgg

SEQ ID NO: 24673 - DNA, 319 bp, Setaria italica
  Peptide Sequence Number=SeqID_90647
gagggtgccggcggccgcccttagcaagctgctcccccccgaagccggcggcgaaggaggtcgccaagccgctcgcgctggagaggacggcggcggtgaaggaggtcgccaagccgctcgtgccggagaagccggtggtggcgaagcaggtcaccaagctgtgctcgcgccggagaagacggcggcggcgaaggaggtcgccaagccgccactgccgaagaagaagccgccccgccgaagaacaaggctgcagctgctgtggcgaaccacgccaagccaccgaagaaggcagcggcggcggcagaggagaaatctactg

SEQ ID NO: 24674 - DNA, 404 bp, Setaria italica
  Peptide Sequence Number=SeqID_90648
agatggatcaactagaggtcgccccatatggtgaacaatttattggagataaacatcaatataacttggccatagcttgaagcatagcaacatatgcctatgaatggtattcatgctatcgttttagggttgtccttcttccatcctagcagcaacaggatcgaacggaccacaacctcggccacagcaggtgatctcgcagactgcgtcgaagacacccacagcagtacaagcagaacaacatttttttgcctgttgggattcgcagcagccgcactgtgccgcggtggccgggttaacattgaggctcaagatgaccaggcacatgatcaccatcaaagcagtagtaccctttccctccattgcctcctcttgctgctaccttccttggttacctagctaag

SEQ ID NO: 24675 - DNA, 332 bp, Setaria italica
  Peptide Sequence Number=SeqID_90649
aatatttggacaataattcacaaatacaaacgaaacgctacagttgcgcatttatggcaaaatgccaattttacctatcccaaattgggaactaaggcctaagaatctgtcaaatttgagacagaagtgttgagctacgagagcttctcaggtttcgccctgtcgcgcacagccacgtggcctcctccaaccatgtgcgagtctgccaacgtcggccgtccttcttcctgcaaatgggcctgccggcgtgcattcgtctgcttgctcggcctgtttctgggttccttcgttcccctctgtgggcttcgctgccgcagctggcccggacgttg

SEQ ID NO: 24676 - DNA, 254 bp, Setaria italica
  Peptide Sequence Number=SeqID_90650
gtgttggttgcatatcaagtttcactggaactagaaagcaaggagaacctatcaactgtcgagtaacagcagatataagcaatagcattttgcactccagaatgttcttgatgcccttaggaagaagccaagctaaatttgaatacaaatgtgcacaagttcatgaagaaagttttagatctatagttttccgggcagcttcaaatcttgtgtcctagtctatcatgacgtagttttcctgaccaacaagggga

SEQ ID NO: 24677 - DNA, 496 bp, Setaria italica
  Peptide Sequence Number=SeqID_90651
tctccgggttagccggaagcccgggagcttcggctgctccggcgaggccggcgcgtggggcaagtcctactccttcgtcggcacggaggagtacgtggcgccggagatggtgcgcggcgagggccacgggttcgccgtcgactggtgggccgtttggcatgctcgtgcacgagatggcgttcggccggacgccgttcaagggccagaaccggaaggagacgttccggaacgtgctgcacaaggagctcgagttcccgggggacagccggcggcggatgccggagctcaccgacctcatctcgcgcctgctcgatcgggacccgaggaggaggctcgggtacgccggcggcgccgacgaggtccgcgagcacccgttcttcgccggcgtggcgtgggacatgctcacggaggtgtcccggccgccctacatcccgccaccggccgacgaggatctcgtggccggcgaggggttcgacgtgagggatcacttcaggaa

SEQ ID NO: 24678 - DNA, 274 bp, Setaria italica
  Peptide Sequence Number=SeqID_90652
aacaaccaacgccaccaccaccaccccaccaccagttactctgctccctccctccctgcggctcgcctccaggaatccctcctcggattccttccccgccccagctcccggcccccatccccccgcagccgcctgcactgtgctgccggctgccgccttcggcaccgccgttcgccttccaggctccgccagcctccggtccagcgggaggactatgaagctaaggacaaaacggcctgaatggaagtccctcatgccactacaactaagcagg

SEQ ID NO: 24679 - DNA, 451 bp, Setaria italica
  Peptide Sequence Number=SeqID_90653
ttgcgtgtctcagcggcttcgaggaatacgtcgagcccctcaagcactacctcagaatggcattcaagactgagggtgacacaaagggttcaaaatcttctgatcaagcaggaaagaaagagattttactcagtgttgaacctggatcatcggtaatattcactaccttgtgccagaatgcaatcaaacaatcctcttttagacatgttacttcacatctttttttctgtaacatatacaaaataatgtatgtttctgtttagattagtgtcatattagtgcaatttgcaataggctactctgcatgtattgcatgtctcagctcccctgctatggctcaaaatagtcaagttagcatgaggtgtccatttaatttgtatggcaaaagttttttggactcacataaggattcagtttctgctatggcaaatcagcatgcatgtctattttg

SEQ ID NO: 24680 - DNA, 791 bp, Setaria italica
  Peptide Sequence Number=SeqID_90654
tgtcggaggcggagggcgcgccggaggccggtggcggcggcagcttcggaggcaaggagcaggaccggttcctgccgatcgccaacatcagccgcatcatgcgccgcggggtgccggacaacggcaagatcgccaaggacgccaaggagtccgtccaggagtgcgtctccgagttcatcagcttcatcaccagcgaagctagtgacaagtgcatgaaggagaagcgcaagaccattaacggcgacgatctgatatggtccttgggcacgctcggcttcgaggaatacgtcgagcccctcaagcactacctcaagctctaccgggagactgagggtgacacaaagggttcaaaatcttctgatcaagcaggaaagaaagagattttactcagtgttgaacctggatcatcgtttgatggcctgtaggatggagggcgatagtgagtgggcagcgaagtgctgtttggtcgatcatatgccatagttgctagatggcacataggatagagatctgatgttactgtgaaagccctcatcattactaccatcactgctctctgaggaagccgctccaaaaacctgtatttgcggatgtttggtcctcataaaattatcctcttcttttagtcgggagtcgtggagtacaaaccttacttcttaggtcatagttcaatcatagtgagctgtatgaaatgatgaatctgtccaatcatgaatgaaatcggagatagcttgcacatatcctgcttgcttctccttttgatccgtagaaaacaaaaaaaaaaaaaaaaa

SEQ ID NO: 24681 - DNA, 261 bp, Setaria italica
  Peptide Sequence Number=SeqID_90655
cgaggaggggacgggaactttggggaagggggaggactctcctccgacttgtttgggacgcgcgcgcgatggacggacggacggacgggacggtggagctgcgggggtaatggcgattagacctggttaatggtggggtgatccgaggactgagagagactgggagcgcggcggccgcctttataaagcagccgcggcagcttccgacactggggccggccggccgggggttgctggcctggtagctgcgctccggggcag

SEQ ID NO: 24682 - DNA, 248 bp, Setaria italica
  Peptide Sequence Number=SeqID_90656
gtgcgtgagaggcctggtgggctacgacagtagctggcctaggattgattagtgttttggcctgagaaaggaagtaagagagagagagaaagacacggaggagcctcaggctcgtccgtcaagggaggcggcggaagctcactggaattacgccacgcggtgattccggccaccgttttccaatccaagagcacgggaaagagaaaagagaggagtggatgggaaagctcggcatatgggaaagctcg

SEQ ID NO: 24683 - DNA, 155 bp, Setaria italica
  Peptide Sequence Number=SeqID_90657
ccgcaatgaaggctatggcttctctcgatcctgggttgggctaggagcatgttaccagtgccacagccgtgaacctgaggagcttcttctgagctgccatgtctgcaggtcgcagtgggtacactcgtactgccttgatcctccactgaccccgt

SEQ ID NO: 24684 - DNA, 333 bp, Setaria italica
  Peptide Sequence Number=SeqID_90658
ccgaggaggaggacagcgacgaggacgacaggaaggaggaggccatcgagctcgagatgctgcgcagcgcgcgtcgcgcggtgaggatgccgcggtcgcactcgacgggccactcgctctccgcggcggcggccgccgccgcggaggagggcgaccacgagaggttcacgctgcggctcccggagcacgtgcgtgagcaggtgctccggtccctacgcctgcggcacgccaccagcctgatcaacctctccgacatgagctccgagggcagctcccgaggcggacgccgcctaggaggagggggaggaagcttcggcacggcggcggcggcgg

SEQ ID NO: 24685 - DNA, 248 bp, Setaria italica
  Peptide Sequence Number=SeqID_90659
cttcacctccccgaggaaatcctctcgcctagctgcgcgagcccggtttctcaccttgcgctcgggaaaaaactcacctcgagagaccggaagttaacgtcgccgattcccttctgaccgcgggccggcgtcgtcatggacacctcgcaccactatccatggctcaacttctccctcgctcaccactgtgatctcgaggaggaggagaggggcgccgcggccgagctggccgccatcgccggcgccgc

SEQ ID NO: 24686 - DNA, 1271 bp, Setaria italica
  Peptide Sequence Number=SeqID_90660
tctaattccaaatgaccttgtttcaatgtatatacaaaaaaaaaaactgaaacaacaaatgaacacaactaacaaaatcgatgcatcattttagcatcacggcaccactagaataattctccacctctttctccccctataatttacaagaaaaaacaataataacagtattcacagagatgtctctgtgttcgcttctgacgatgttaatggttcggtcgtggcaaaggatctcattgtggttgagtctgcatcagttggtctctgctcattgttgccattgaggtctaagtcaccaatcacagctggttttttgaccctgtccatggagacacccttctctccagtcagcatatggacgatgttggtcatgttgggacgcagtttcatcgcgtcttgagtgcagagtagaccaactttcaagaaccggcatgcctcctcaacatcaagatcatcccctatatctatatctatgatctcctctagttttccttgctcatagtatgtccatgtcctctcaagcagaaattggtctcccttaggcaacctagcattgtggttacatctgccggtaacaatttccaatagcaaaacaccgaaactataaatatctgacttctttgtcacttgtcccctgaccgcatattcaggagccaagtatcctattgttccttttactccagtgctcacatgagttgcattgggaggcaggagccttgccaatccgaaatcagagattcttggggtgagatccttttcaagaagaatattgcttgcctttatatctcggtgaattataggggggcggatttcttcatgaagataagcaagcccacgagcaacacctaccgctatttttactacgagctctccaattgaatcggatgttgctacggcctgatcctagtaatgtatatgcaaggctgttgttctcaagataattgtatacaaggatcctatgagacccttcagcacaacaaccaaccagggtaattaggttttcatgcacgatatcggaaattgctgtgagttcagttacaaattctttgataccctgccttgaatcagcagacagcacttttactgcaactattgttccatctttaagccttcccctgaacacggaaccaaaaccaccttcacctattttattagcaccactaaaactgtgtgtagctttcctcatctcactgtaggaaaaaaaccttaaccttgtttcctccttcaccatcaaccttttgtttcatgtctgtccctacactattaaaact

SEQ ID NO: 24687 - DNA, 198 bp, Setaria italica
  Peptide Sequence Number=SeqID_90661
ctttagcatgctgcttcaccaagtcctcttttgctctgatagtcagaagtgcagcagagagtttctcgtttaaactcctcacggtctccttgacctcttcatctcttacattggaggatacatgttgttctactgattgaccattctctggactggaatcatttaaattcacccctgctgctagcttgccattcaagg

SEQ ID NO: 24688 - DNA, 332 bp, Setaria italica
  Peptide Sequence Number=SeqID_90662
ctccttccatctcaaagtctcaacatcttcttccccatccatcaccaccaaacatcaacgaccaccaagctggctatggggcctcagcaagaccggcagtcgtccttggcgaacggcacggcgccgaggaaggagacgaaggtggtgcactaccgggagtgccagcggaaccacgcggcgagcatcggcgggtacgccgtggacgggtgccgcgagttcatggcgtcgggcgcggagggcacggcggcggcgctcctgtgcgccgcctgcgggtgccaccgcagcttccacaggcgcgaggtggaggccgactgcgactgctcctccaccac

SEQ ID NO: 24689 - DNA, 500 bp, Setaria italica
  Peptide Sequence Number=SeqID_90663
cattgttagagcagaggtgcagtgaagtctcaatggaactgacgagaatagattccaaactacaagcaacatctgatgtctctcagctccggagatcggcgatgcttcatgccgcttctatttgtacacatttgcgtgcattacttgatggagcagccgatccagctccagagatatgggggaaaactacggatgaggaacaaatgcatagtggtattgtcagctggcctggcattaatgtgcctgtaaaacctgccaactccactcttaagctgtatggcggtgcagcttttgagagagtaatgcatgaatttcgttgtgcaacatactcaatggagtgcccacaagtatcaagggagaaggttgcgaacatactacttgctcatgctggaaggggtggaagcagtgggttgactgaggcagcagctgagatagcccgtgcagctgcacgatcatggcttgctcctcttattgatactgcatgtgaccggcttgcgttt

SEQ ID NO: 24690 - DNA, 380 bp, Setaria italica
  Peptide Sequence Number=SeqID_90664
ggggcaggcggcctcgacggcggccttggcgctccgcaccgtgtcgaagccttcgaacgcgagggacttgttgtcggaggcgtccttctcggcctggttgtccggcgtcgactcgatcagcaccgacccgtcgcaaccctctacgaagcagtcgtggaagaagaggcggatggtggagccgatgctccggatggtggcctgcatcttctgctgcaccacgccgcgcacgatggcctccacgttcgggcaggtgctcgcgtagtagtccaccttcaggtcggccgctccaggctgcgcgaggccgcagacggcggcggcggcgaccgcgaggacgagcaacggcggtctagccatcttggctgcttttagctagcttgctc

SEQ ID NO: 24691 - DNA, 540 bp, Setaria italica
  misc_feature (491)..(540): n is a, c, g, or t
  Peptide Sequence Number=SeqID_90665
aatggggacacatcagagcagccagctgctcctgatgcagagcatcaaaatagtactgcatctgttgaggattctataaaatcaggagagaaagaagtgaagaagtttccattggctaaggattctttggactacaagctaaaggacttattctcaaccaaggaccacatgccaattgctcttaactgacaatgacaatggtcatgaagaggtagcaggaagcacttctaagacgtgacgggatttggcaacatcagtagtcttgctaatctgtcacttgttagtattttgggatatcgatgcttccttgtgttggttcgctctagattgttgcggcaatagtatgttcccgagtcctgacttgtaaagtgaaatgttttaagttgtgttgcttgttagacgttcttgttactcaggacaggaaaaaacaggtttttgtagatgcttgagaaatttgtacacttggcaatgaaaaaatgcttgaattgacnnnnnnnnnnnnnnnnnnnnnnnnnnnnnnnnnnnnnnnnnnnnnnnnnn

SEQ ID NO: 24692 - DNA, 386 bp, Setaria italica
  Peptide Sequence Number=SeqID_90666
gtggcggtggaggtggtggtgaaagaatatgtttgcttccactcaggggtggcggtggtggaggaggcggtggaggacctacgctgctaagccgaggtggtggtgaaaatggtagcctgttacttggtagctcctgcggtggttttgttaggggtccacttggcccagttgttggcacagatgaatccaaaaggctagacggtaccccatgaggaggcggaggcagaggcggttgaggcggggatgagctgttcattgatagagtagctgcaaaagttgtgatagtttagaatcagacttttagttaaacgaaaaaggttcataaaaagaaaaacaacagaaagaaggacagtgatgggaccctgaaatccgtggcgccatgaaac

SEQ ID NO: 24693 - DNA, 1008 bp, Setaria italica
  Peptide Sequence Number=SeqID_90667
aggcggtggaggacctacgctgctaagccgaggtggtggtggaggtggaggaggtggcgatgagaaagcatgcttacttccacttggtggtggtggtggaggtggcggcggtggagtgggtggtgaaaatggtagcctgttacttggtagctcctgcggtggttttgttaggggtccacttggcccagttgttggcacagatgaatccaaaaggctagacggtaccccatgaggaggcggaggcagaggcggttgaggcggggatgagctgttcattgatagagtagcactggattcagaatcttcagtagtaggatcacgatcaatgttctccgagtcagatgagtttccaccatgctgaaccttctcatgatcagctgaaccaacagaatcagaagccacggaatatttttcttcatcagaatcaagtggagacatcagtggcatctgtagaccaactttagcttgcatttttgagagttctttcatgtcattgagtataagcttttgaaatttctcctgcagcgagtttgctgagaattctttgagcaaccaataggcagcatcatcattgctttcaatccagtcaaccccattgaagagttcttgaacagctgaaaaggcttcaattggtaaaccacccttcatatcaccgttcagtgttgctgttggagctcttgtgggagacatgcccccaatttcacaaaacagcacctctgctctaaaattcttcggatagcgatcttttgaaccccagagtatatccacatcatcgctattcagcatcaatacatttgaacgtataaaagcagtattgaacattatcctaaacatcataacttccttctctggatcaagatcgagatgtacacactccagaacaatatctccctggactagacattgtatatcaatttttatcacatcgcaatcctcctgccgatagtgccgcagagatttcttctttggcatagaaaaaatcatgttgaccatgctcgcattcttgcc

SEQ ID NO: 24694 - DNA, 457 bp, Setaria italica
  Peptide Sequence Number=SeqID_90668
atctcagatgccgactcaaggagaattcagctagtggtttctagagaacccttcacttgcagagcttcacgttccctttggcgacgttctctccttcgttcccagtaggggtggaggcagacgaagtcatagacgggggagatggtgttgacgagcacgaggttgacgcccatgaagacgagcagccccgtcatcggccgcgctcggtgcggcatctcgctctctcccctcgcccctttcccgccggcgccttcctcggccgagaccaggcgagagacgactcctcaacgagcggtgaaacacctcaaggaccagagcgaggcgagaagggcggctgcgtcggatgttcagcgagatcaaggagaccggcggcggcttgagcagggcggcggcgcggccggtctggggctctgggcacacccggcgcacggcgaactcgcgaagcgagaagattcgt

SEQ ID NO: 24695 - DNA, 469 bp, Setaria italica
  Peptide Sequence Number=SeqID_90669
tgccagcttaaacgtcaattgtgcgagctcaagacgcactggacgaaaaggttaggttggcaactgtggtttatgaacctcgcaaaattaccaatagaactagcatctatgcagtactctggcgcaggtggtgcctctgaatcattatcaggatgaagattgggcaggtgcatttcagacccagcccttttctcccttccatccaaacccttcatggtttgaagacagtcaatgtcgaagcaatagttgttctgcgaaccatccaaatcctcagtcctcctcaacaccccggtgtactcacagatgggagccccggggaggatagtgtcccaagtcctgacaccccaaccttttgaagctgtcttgaatacctccaggcgatactgcaaaccctgttgagatgttctgttcacacagttgtggttgcagctgcagttagccccacattcaaatactactgctttgggct

SEQ ID NO: 24696 - DNA, 473 bp, Setaria italica
  Peptide Sequence Number=SeqID_90670
accctgatgtaatgccggaactcaggatccaatgggatcgtcttctccatctgccaatggctggaaccattgccatcgtcttgccttacagtataatagagactgaccgcgccgtccgcaacgtggtcccggagcgcgaacatcccgaccctgcttcccctgcttcaacaatggcgatctgtcgcctatggcagcccggtgggaggtcagcaatggagaactccatcctccctgtgtcaagcacgagcaacttgtcccgccaatccatcacccagtagaagcagccgcgggcgtattgacggccggagaacgcagggctccttgacgacacgcccacgccggacatcagatcgcgccaggccagggacgcgacggcgcgccactgcccggtgccggaagagaaggcgaaggcgaccagcttggccttgcactgcgccatccagatcaccccgaacgacgcctcgttccttcct

SEQ ID NO: 24697 - DNA, 1187 bp, Setaria italica
  Peptide Sequence Number=SeqID_90671
aaggaaacaaataacaactacggaaaggtcaaggagaacaagctgccgacggccaacgggatcgggtacctagaggcgaagaaccacctgctgcttggttactgccaggacatcgtctactacctgctccgtaaggctaaggggctctcggtggatggacaccctgtagtgcggagccttgtcgagatcaggctctttctagagaagattcgtccaattgacaagaaggcagagtaccaaatccagaagcttaccaatgcagctgatggcgcaactgcccgagaaaaggcaggaaatacagaggtgaaggggaatggcgagcattcggatgaggaagacctgctgaagtataggccaaacccagatatgatggacacaaagtctgctcctgatgggcaggataatgatggtgtttaccatcctccgaagtttatgcctgctatcatggaagaagaagataagcgtcggaaacaagattcaaggaaagataaagcaatagcacgaatggcaaaggaaaatccttacattaaagagatgattgatgatgctgctgaccggcctgaagagtggaaggaaacagtgggcgatgaaagcaaggaatttgtgaggtacatgcgacagagagaggagcaagagaaacaggaagaggagctgtttactcgtgctccagtaaccaaacgtgataagcagattgagaagcggatcaggagacaacttcatgggttgggaggcctagccgatggttttgatcttggaatgaacatgctattcgacggagacaaagaagatgatggcggttcaagcaagtcgcatggcaagagtggaaagcgaaagaagcacctgaaaagcagcagcaagaagaggaagaggcattagttttgacacactgatagccttttgatctcgactgggtttaggaagatggcagttcaagcaagccaaacggcaaaagttgagcaggagaaataccatggaaacaagtagtgaagagtcagagctcctcaacattgagacgtactaattctcgaacagagaacttgatctgagcctatgaaacatttttagttatatctacatgtttagtggcacaattttgtagccaaaacttctccgcatatggtcaatgtaatattgctgctgtttaacactaaacttgcttcgctgcacatattctacataactcacac

SEQ ID NO: 24698 - DNA, 242 bp, Setaria italica
  Peptide Sequence Number=SeqID_90672
ggtggaccaaggatgccaagaaatgggtttttaacccaaaacaatatgaatcgtcatatcaggaatgcatggatgatgatgatgcatactgcaactatgttatgcgttatgcttatgaccttgtgacaaagagccaaggacaggaggaattgaggaaagcgctgtgggaaactcttgagagtggtgagaaagaattggagaaacacctaggaaatggtacacaatatgcagcttatgcctaa

SEQ ID NO: 24699 - DNA, 426 bp, Setaria italica
  Peptide Sequence Number=SeqID_90673
tacaaataccttacaatactctctagtggtggtgtggaagcacttcttgttctgttacaacgggaagctaaagctggtaataaaaatattttggatgattctggtgccaatttaagtgaaaatgatgtgcacagggatcaaagttccagcagaaaagttgaaagcgctgacgcaagatgtcaggttgatgaaactcaatcaactgaacatcatgaaacgatttttcatgaagaagccgatgaacatgaagcctcaaatgcaaatgatatgctagagtcaaatattggaagtagagtgcctggttctgagaatgggctcttgaaaaatctgggtggtattagcttctcaattacttctgataatgtccggaataatgtttacaatgttgacaaaggtgatggcattgttgtgggcattattcacatt

SEQ ID NO: 24700 - DNA, 460 bp, Setaria italica
  Peptide Sequence Number=SeqID_90674
cggcgggtatcgtaccggacagccggttgccattgagccggaggcggtagaggctggtgcagttgccgatctccggcggtatgaacccggtcagctcgttgctcagcagcagcagcttcgtcaggttctggagcccgaacaggtccttggggatcgggccggtaaggttgttgtacgacaggtcaatggcctgaaggctgggcgcctcggcgaggctcgccggcaagccgccggtgagccggttcttccacgcgtagaacagggtgaggttgcgcaggctcgggaagtcgaggcggatctccccggacagcgcgttgttgtcgacctcgatgtccgtcagcgacgtgcagttggagagctccggcgggatgacgccggtgagctggttcgtgctcagctgcagctgctggaggtttggcagcccgcccaaggtcgccggaatgctcccggtaagggaatt

SEQ ID NO: 24701 - DNA, 595 bp, Setaria italica
  Peptide Sequence Number=SeqID_90675
cggcaggcacggcgcgtccgccgaccacgccacgccgcccaccgccagcgacatggccaggctgaacaggctccgccgccgcgccactgccttggcctgccgcgccaaggcatcgtccgcggccggcgcggtcgtcgtcagggacagaaccgacgcggggtcggcagatttcaccttcaaggcggcggcggccgcggcggccccggcctcctcctgtgtccccgccacggcttcctcctctgcccgttctctgcccgatgccaccggcgggcttctcgcctgtttcgtctccgactccgatgccttagtattgccatccttgccatgaccacgacgatccggtggcggcggcgccttgtcccacatggacttgcccttgtgctcgttgagccgcatgttctcctgcctcagcgccttgagctgggcctcgaggtcatggatcctggcaaaggcgtcctcgttctggtcctccatctcgtcaagaagcgcgtccatggcctcctgctccctgagcgccgcctgcagcttctcctccagctccttgttcacccacaccaggtcgtccatctgcgcctgcatctccccaatcagcctg

SEQ ID NO: 24702 - DNA, 512 bp, Setaria italica
  Peptide Sequence Number=SeqID_90676
ggaagttggggtgtagcgtatgctttgtgtgtttcagggcactcatcaatatcagcatagatgaacgtaagattctcgaattcattgctcaacttgcagaaggatggaagaatctgactgcaaacacgacaccatgaggcaccatagttgaccacagcaggggacttggaggatttaagcgaatcgagcaactgcctcagctgttggtcgctgccggcgctgcgaaggttgccatgggaactgccttgtagcggcaggcctgttccttccagtcctgtccttttggtgtcctccttcccattcgctttctctgccatattccagctcaccgttgcttattcctcctgaggcccagcgagccgcgcggggcgccgggtggcgcgggcgcacaacgggggcgccgggggatgggatcccgctcggccgcgaggtgtcggcggtgtgagcggtggcggctattcgtcgggcggcccctggagaagggcggcgtgtgtcgagcgggcaggtgacgt

SEQ ID NO: 24703 - DNA, 1183 bp, Setaria italica
  Peptide Sequence Number=SeqID_90677
taaagaaaaaggcagaaataacaggtaaccttcttcagatttgcaatgttctttctgctcctcggcaccatttttctataacaacaaagatgatcaactttgatatgcacctctgctgcggtaaaacatgaagcgcaaatgcagtcttatgatgaaaacacaaccctgtcgaccagcagagagcttgatcagcccgcatgtactgtgaggtaacggatgtcatatgcacaatttcatttacaggagcatcctaccctcctaatatccctttttttagcaaagatacaacacgaaacattgccccccgattagaggaacagcaaggtatggcaattggatatacaatatcggccaaatcagcaccatttcttttgaatttgcaccgcttagctacacagattgggtatacacgcaccgtccggggtctgctgctctttccagatccggccagtgatcctgagcttcagctccttcctatcaccaccggagaagaacagcgccatgttcctctggatgatgaggccgtcatggctgtcccgcaccttccggtggctgtcgcggacgctcctgggggtgccctcccacaccatcttcctgccgttggcgcccacctcaaggctgtagctgtagttcttcgcgtcgttctcgtctcccatgaagcgaaggaaggccatgtatactggtgccatcccaagctggaaggcctcaaagtgcaggcagaaatactgcccaaagcagtgaaacaccgtcagcatccaggtggcgttttcaacttctcgtgggttcgatttgacgtatctgtggttgaatgtgcaaccgctatgcatatcaaccttgtgatcatccctcaaatgggaaacaagataagggatgtcgccagccgcggcacactcagaaccagcgtaggggcaattatatggtctgaggctgcattgtgcttcgtgttttatcttgctgtagtatgggaagatttcttggcaccccaaggagtagtacctgcagggaagctcaagcgactcggctactttctccagtgccaaacacctgatatcaccaagctcttgtctgcatgtagggcaacgattgtgcactctagccttgcaagtggaacacaatgtatgcccattttggcactggtggatcggcgggaacatggagttggtgcaggacggggcactcgagc

SEQ ID NO: 24704 - DNA, 179 bp, Setaria italica
  Peptide Sequence Number=SeqID_90678
ctgccgcaccccccctaaaactcctccccctctgctttgtgtgggacgagaaggttgcgggacccgacccggacggcgaggcccggagtttatcagattttgttatctccctcagccaaagacgacggacggaggggaagcgaagcgagcgagaatgtcgaagggcggcgggcgagagg

SEQ ID NO: 24705 - DNA, 716 bp, Setaria italica
  Peptide Sequence Number=SeqID_90679
caagagataagattgctcttgacgtcaaaggggagagggaggaataggtccatgatgaagcagccatctggcagcttgttggcatcccagttgcagatccattggcagccatctgggaggattaggtagatccattgctgattcaccaccctggatgagcctttgttaggtggtcaggtggcggctttaatgttcagccatcaatggtgatttttcttcagcaagttctcatgatgaatcacatatttttctcagtaggtggggaggcgatatcaacgagaaagttgacataatcggcagccaccagtcatcaggattcagctcaagcaaccccaatactgcttaatcatcttccactgcagtgttgaagatgaaactagggaagacggttgtgatgtcccttagatagggcagtgtcatgttctttaacaggtttgggtggcgtaatacaaattctttccattcttcttgatttatttttccatccctatcggcatcagcatcttcaaatgtcttatctataatggcctcgagaaggtcatctgataagtccacataagattccaacaaaatagcaatgaccatttgcttaacctcctcacgctcaataaaaccagtttgcctcaagtcatacaacctaaatgcaaatttgatcttatcttccataggtgccaacggatggaagacactaagagcatgaatgaactcatcaaact

SEQ ID NO: 24706 - DNA, 885 bp, Setaria italica
  Peptide Sequence Number=SeqID_90680
tgaagaaccccctggtaggaccgcaacgcaaagaatagatttatttaaattactttattccttgagagagaagaatattattgagaaacagcaacttgagatatcgaagttaagtacacagagagacaatgaagttatgaaactgaaagaagtatgccatgcagttgttcagcacattcggataagtgatatcgatgaagagatcagaaatgaccaaataaagctagtgattaactggttcactatgcttatgtatgcatttttggcgcacatgaaactccagctttccaaacttgaagcacggcaatctagcacatgggttgaagagcaactgatgaaggaaaaactcaaacatgaagtattatcaggcccattagatcaattccttgatctctgcaatactctaccagattccaatttcgctgttgaggaattcatccattttaagaaacaaaatggtgataatcatgttgacaacattttggccttgggctgtgaccagcttatggatgacggattgatggaaattactcttgtacggaattcagttccatcagaggccttttctacatgtgtggtgagaaatgagcctacagaaactcatatgaggtctggtgggggagcagcatcagaatctttagatcttccagatgacaatatcagctgtagttctgatggagttgacctacaaagaacctgttctgcaagtactattcctgcaaatcatgattcaatcaatcaggaatcttcaactggtgaggccagaagtgttgaacatgccaagagggacaatattgctgatccaagtattttgccaggaagtgtgacttctcctgtcatgggaactaatgcagatgatgatggtactgttgcagcagatccatg

SEQ ID NO: 24707 - DNA, 505 bp, Setaria italica
  Peptide Sequence Number=SeqID_90681
ctggttgttcttcaaaatcaggttctcaaggtgcttgagcttagatatggagaatggtatgtctccttctagattgttagaggacaagtccaaagtttcaagcaacgaacaatcgccaatctcatcagggatctgcccggaaagtccattagacttcaaatctattgagataacacgtttcaggctcccgatggccggtgagatttcaccctcgagattgagccctgaaaggttgagcgccgcaacagcgaaggtgacgttgtcgcatagcacgccgcgccacgagcagtaggtcggcgatgcgccctcgccggaccaatcgtgcagcgcgttgcctccgttgctgaaggatttcttgatctccagcagtgttgccccgtcgtcggcgacggcgacggccgcgaggaggaggaaggcggcgagggcccggaggaggcgggtcatggccggtgctgagccgcggagccgcaatggggcagcagtggcattcgcgaggaggcgtggt

SEQ ID NO: 24708 - DNA, 3027 bp, Setaria italica
  misc_feature (2903)..(3027): n is a, c, g, or t
  Peptide Sequence Number=SeqID_90682
aatgaggttcttcaatacttggtgagttaggcctcctttttagttttgtgaagctcactttgttcgcatctaaatttctcatgagcatcaggggattgcggagcaataatttagaaggaagcctctctccggatatgtgccagttaactggcctgtggtactttgatgtgaagaataatagcttgatgggtacgataccagaaaccatagggaactgtaccagctttcaggtcttggatttgtcaaacaatcagcttactggagaaatcccattcaatattggtttcctgcaagtggctacgctgtctttgcaagggaacaagttctctggcccaattccatcagtgattggccttatgcaggcgcttgcagtgctcgatctgagtttcaatgagctatctggaccaataccatctatactgggcaacttgacatacactgagaaattatacctgcaaggcaataggctaactggatcgatacctccagagcttggtaatatgacgacactgcattaccttgaactgaatgacaatctattgactgggttcattcctcctgatcttgggaagctcacagaattgtttgacttgaaccttgcaaacaacaaccttggaggacctatccctgataatataagttcatgcataaatctcattagtttgaatgcttatgacaataaattaaatggaaccattccacgttcatttcaaaagctcgagagtctgacttatctgaatctgtcatcaaatcatctcagtggagcacttccgattgaggtagcaagaatgagaaatttagacacactggacttatcctgtaacatgatcactggttcaattccctcagctattggaagactagagcatcttctgaggctcaatttaagcaaaaatgctctggttggacacattcctgctgagtttgggaacttgaggagcatcatggagatcgatttgtccagtaactacctccgtggcctgattccacaagaggttgggatgctacaaaatctgatactgttaaaattagaaaataatagtattactggagatgtctcaccactcactaactgtttcagtctcaataacttaaatgtatcatacaacgaccttgctggtattgtacctacagacaacaacttctcacgattttcacctgacagcttcttgggtaaccctggactttgtggctattggcgtggttctcgttcttcgtgctctcctttatcatccagtattgagcgcaaaaggagatcatctatatcaaaggctgcatttcttggtattggtgttggtgggcttgttatcctgctcgttatcctagcagctgcttgctggccgcacaactcaccggttctcaaagatgtctctgtaagcaaaccagacaaccttgttgcagcatcaagcagtgttcctcccaagcttgtgatcctccacatgaacatggccctctatgtatatgatgatataatgaggatgactgaaaatttgagtgaaaaatacattattggttatggagcatcaagtactgtctacagatgtgatctgaagaactgcaagtcagtcgcgataaaaaagctatatactcactacccgcagagcttgaaggaatttgagaccgaacttgagactgttgggagcatcaaacaccgaaatctcgtcagccttcaggggtactccctgtcacctgctgggaatctcctcttctatgattacatggaaaatggcagcctctgggacgttttgcatgtagcttcatccaagaaggaaaaacttgattgggaagcacgcctcaagattgctcttggtgctgctcaaggcctggcttatcttcaccacgaatgcagtccgcgaataattcacagggatgtaaagtcaaagaatatcctcctagacaaagactatgaagctcatcttgctgactttggtattgccaagagcttgtgtgtgtctttgacacacacatcaacatatgtaatgggcaccattggctacattgatcctgagtatgcacgcacatcccggctcaatgagaaatcagatgtatacagctatggcatcgtcttgctggagttgcttactggcaaaaagcccgtcgacgatgagtgcaatcttcatcacttgatcctatccaaagctgcagacaacacggtcatggagatggttgacccagacatcacggacacgtgcaaagatcttggcgaggtcaagaaggtgttccagttggcactcctttgcagcaagaggcaaccatcggatcgaccgacgatgcatgaggtcgtgcgcgtcctggacagcctagtctgcccagacccgcccccaaagcaggcacagccacagggatcggaacagtcagccacagctccgagctacgtcagtgagtatgtcagcctacgaggcggcaccgcgctctcctgtgccaattcatcgagtgcgtccgatgccgagctcttcatgaagtttggcgaggtgatatcacggaacacagaataagatcgatcgtctcaagagttcagcctgcgattttgcagcattttggttccaatctacaagaggtatctggcgccctgtgagcctgtaaatattctgcaacctcctctttcttgggactccagctattttttctccactattccacttcttacttctcgtggtttgggacattgcaaagtgtactgaagtagagtgcttttggttggggaaaaatcgaagcgcaactaaaggaaaattgagttgggtgcaggctgcttttactggcttgttctgtcgtgcggctggacaattctgtctgctcaatcagagcactgttaggctgaagaatcattctgggcagtgttactgttctgttgtattatcctgggcctcctattcctgagtcatgccactgtgatttcctggacnnnnnnnnnnnnnnnnnnnnnnnnnnnnnnnnnnnnnnnnnnnnnnnnnnnnnnnnnnnnnnnnnnnnnnnnnnnnnnnnnnnnnnnnnnnnnnnnnnnnnnnnnnnnnnnnnnnnnnnnnnnnn

SEQ ID NO: 24709 - DNA, 493 bp, Setaria italica
  Peptide Sequence Number=SeqID_90683
gttttggaaggtcattagggagcctgaagaaaccacacccgagcaacagtagcgcttgtattccggatccaatgacgatgccaagaagaaaatcgggcacaatcgctgcaacaatcatcatcaggccttccacgagcattgtggatgcccacaatactaccacaaagtagatgaagtggtctattcctcgtcggagaccagtcatataatatattattgcacctggtattatgcagttaagtcctaagaatggagctgatgagagtgtgttggagatcacaaatgcagtggcaccataacgcccattcaacctttcctttcggaataccttcatgtcctctgcaaaagaggggaatcctccaagtgaagccattgtcaatattgatgttatacacatgatcaatgatattcgagcttggatggatccaagaccagtgtcgctaatattgtagaaaactgtgccaatgcagaagctaaacaaaagagagaattg

SEQ ID NO: 24710 - DNA, 216 bp, Setaria italica
  Peptide Sequence Number=SeqID_90684
ttttgacagttaagatcacaagttaccacatggcaatgccaacaacacatgacaagagaaacaagctcactgttacactcaagtcatccgcaagtaccaccatcgacaaaattgttcatgttccatttgtgggaggaacagagtaaactgtgaatctcaacgatagatgtttgcgtgagatactacagtggatacacaaaaggcttgccatcagcg

SEQ ID NO: 24711 - DNA, 459 bp, Setaria italica
  Peptide Sequence Number=SeqID_90685
ccacttcggcgtgctcggctgcatccggttcggtcaccgggtggtcgggatggagtacgacggcgtcgccgaggaggccgtggcggcgtggggggagtgggctgggaacggccaggcgttcggctccggcgacggcgagtggcgactgtcggtggccgacgccgagggccacgttgagatgcatactgcagacttcgtcgtgctctgcattgggaggttcagcggtgtacccagcatacccacattccctgcaggcaaaggcccggaagcatttgatgggcaggtgatccactccatggagtacgcaaaaatgggcacaactaaagctaaggagatgatcaggggcaagcgtgtaacagtcgttggctacctgaaatcagcgcttgacattgctgctgaatgtgccgaagtaaatggcattgctcatccttgtacaatggtggtccgaaacaaagcacg

SEQ ID NO: 24712 - DNA, 468 bp, Setaria italica
  Peptide Sequence Number=SeqID_90686
gcgtgctctacttcgtcagcagcgactcctcccaggtgtgcctggccatggccgccctgggatccgagtacgagacctccatcatcggcaactaccagcagaagaacctgagggtcatcttcgacacctcggcgtcgcaggtcgggttcgcacaggaggcttgtgggtacatttgactttgactgggattggggaagccacgagctatatatgtgaatatctctatacttgcagatttgtttcgagattacctcgggtgattggcaaatggtaatacagtatttagtttctggcaaatctacaagcatccacgattgcttctggagtatctgttttttatgccaattccttttgccattcatccaagatcaattgcattgcaagaaaccagtggggttctgcgtttaattttgtaactcataggtaatgtaactgggcaattgtcagctaaaccctgctgcaagaaca

SEQ ID NO: 24713 - DNA, 419 bp, Setaria italica
  Peptide Sequence Number=SeqID_90687
cgcgaggtagcggtccacgagggcggcgaacttgcgggcgccggcgagggactcggcgaccgagaaccggccgtaggtgtagaggtcacccttgccgcgcggcgggaggacggatcggcagaagctcgggtccgtggtggcgttgcacgcatccgacggcgacaccggcgtggacggcggcgcgtcgtcggagagcgcgaggcatgagaaggagagcagcaggagagcgcacagagcggcggcgcggtggaccgccatggtaacgacaatgcacgtctaggcttcgcgccgatagatgctctgcgctgccccctgatgtgcttgtttgaggtggtggtggtggtggaaggggaggtgaggtgaggtggcgaatttataggtgaaggtcacgagggatttcatggtaattctgcggagaa

SEQ ID NO: 24714 - DNA, 790 bp, Setaria italica
  Peptide Sequence Number=SeqID_90688
aatgtgtttccctttcaatggtatctagagtaatttctaccaacaagactgaactatgtattatctaccactttttatcaggttttgattgtcaagtactgttttcttgctttattgttcagggtcgacagaagcccgctatatgtacacatatgatcctgggtgtttttccatctccgggactatactatctttttataatatcagttgtacactaagtacaagaataaagatgatgaaatattaataataaataatttggactaggattacaccatggcatagcatcataattttggtgcattttgttattttttctgtattgtgcatgacctatgtttttctgccaaaactgcaggtataatgtgtttactgttccttccagcttgcttgtctagtgtatatacatgggatggcatgtctttgttcatttgtgttgtcagaggtttcagtcaccttttcttatgtttacgagctgtaattcaagtccaaactatcctactcccataaaaatttaggagttgaccacaaatctgctatatgtaactgtgtaaaaccaggccagcttgccaagaaattcatagtattctaagcttatgggttcacaatgttctgcactagtcttgaatttacttttggtagaaactgacatggtaaatcaagtattaagttatctacttgcagtacattgattgatctagattatgtgtcatagtaaaagaatggagctaataatatatgagctgaagattgtatcgattttaatatgaaattgcaaacaattacacca

SEQ ID NO: 24715 - DNA, 784 bp, Setaria italica
  Peptide Sequence Number=SeqID_90689
tgggtagaggtagggtgagaaacaagtgaaagtgggaaggtgatcctgaggctgacataatctacgaaatgttccacatgtttgataggttggatggagtgcaggcatttgagcaacataactccattatatatgatagaatgctcgtaacttttcagatgttgctacaacaatttgttacaagcacatgggctgacattagcgcataagttagaatggtgcattggaagataaagttaagctcgcactatcaagatcagcaccaaaacttggtcctggcaacaaatttttctaccaaatatcagagttccagcggccagcgctccagctccaagccccattcccagattcggatggatatatctacaaacccatgagctttgtctgacttcttcctcctaagctggaagcttgcagtctcctcaattaagccccatgctcatcgccattcgcaaatttgtcgaagtactccttcatctggacgatggcagctccctggaggtgctccctcaggaagatgggctctctcctgtacacttccaccgtcagcgccttccgctgcaggctgctcagatcatgctcgtcagctgagaccgagaacttcatgccccagcttggatcggagctccctgacgcgtccaccttggtgcagtacttgctgttgggatcaacccatgcgacggagaaccactgcggtttgagcagcgacgacctgcggcccaggccgcgtgcagagatcacgcagaactcaaccgacgttttcgccatttgcgctcacactgag

SEQ ID NO: 24716 - DNA, 345 bp, Setaria italica
  Peptide Sequence Number=SeqID_90690
cgaacttctcgtggaggaagatgacggcgaggacctccgagagcggcaggacaagcgcgatcatgatgccggcgaggagcgacgaggagcagacgatgagccccatgatccccaggttggagagctgccacgagacggccccaaagatgagcagcaggtagtagttggtctcgccgagcccgaacgcggcggcctccgtcggtatcgcctggaagtccttcgcgatggccatgccgaccaggcacaccgcagtgccggccgcgcccatcacggcctggatctgcatgaccgtcgcgtacgacggaggcggcgctctcgcggcggcggggccgccgtcccggcgcc

SEQ ID NO: 24717 - DNA, 268 bp, Setaria italica
  Peptide Sequence Number=SeqID_90691
tcctcatccatccgcgcggggggcgaggagggggagggagcgagccatggtggtcagcacgttcactggccccgggattgggatcggtgagcggaccatacaccccatcctttcaggcgtcgaatatcagatcttgcggttgctttgattctcgctccttgttgattcgttctctttccgtccgattcggtgcagggttcggcgtcggctgcgggttcggcgtcgggtggggattcggaggaatgcctcttaacatgttcggcttggg

SEQ ID NO: 24718 - DNA, 702 bp, Setaria italica
  Peptide Sequence Number=SeqID_90692
cctgtcattgcctacactacaatgtcttgttcatccggacccagttactgaatgtggggtgcctgactctgacactgataatggtaccactccagcaggtggaggaggaagtggcgatgatggtaatggtaatggtataactccagctggtggaggtggaggtggtggctgtgtcaacatagccctggaaggtggaggttgtggtagtgaaaaaggaccgtattgtggttggacaacaacatattggacatgtggtgggtataggtgttgctgtggatattgatgatgggggaagttcatggaatgcgatggttgtgaaaacgacacatggtgtggaaattgtgtgtggtgaaagttcataggattgggccttcccaatggctcatttggacaactcttacaatttgatgaggagccactgggaggacgagggtccatttaaaatggaggaaaactgatattgtgtgaatttgatgtgatcaaatgatagtggaattcagggtaaataggaatggagtaacagttgcaccttatattctctgtatttcctttgacgttcattggaccctatctcagactgtcaaatattccatggctcgaagctaccagtagtattgtagtaactgtgtgcttgcagatgtcacacccctaatccagtggctagcatgctcaggttcttccctcccagatcgttgttcccac

SEQ ID NO: 24719 - DNA, 572 bp, Setaria italica
  misc_feature (572)..(572): n is a, c, g, or t
  Peptide Sequence Number=SeqID_90693
ggacaataggtgccagcaaccccctatatcctcttgtacgggatgaatgactggtgctggccgtgaactcaatcgatactgaaattcacttaaatgaaaaaaccaccatcaaaccatgtgtgaaatatattgcaattatgttattaacaaacaaatccgtttttgcgcagaagttcaataataatggaacttctttattagagggatttaataagcttaagattattcaatcaaataataagagctttcagcagaagaagaagttttatgaggacatgtctattgagaaaatgaaagaaaatatgataaaatatgagcctgataagtacatgacaaaggataatactaatttctactatacaactgaaggtaaatattaccatccaggactcaaacatatgattgatccctcaaatgagttggaagctatttttcattataaatactcttatatgcgagagttcttttgtatacgtaatataacacctcttaattattcggaattaaaacgagatagcctattgttggatgcgtataagcgtggtaaagaaagttagtcagtcttcctctcn

SEQ ID NO: 24720 - DNA, 715 bp, Setaria italica
  Peptide Sequence Number=SeqID_90694
cttctctctcattcacgctcacacagagcagcagccgcagcagcgcacactgttcttgtgccgaggaattatttattgccaccgcatcgaattcttagtactgggaaattgattactcattcccctctgctccctcccatccaccccatgttcttgaatttctcaggatatttccccccgctccgcgccagggcagcatttggtcgagatttatagcctctccccccgcttttgccgctcccttctgcttgtcctcttttcccccactggggaggttagcatccggcacaagcaaagcgccggttcttgttgcagtttctgtgtgctccctttttggcttcaagatctgatacaaagaggagaggcagagccgggagaggggaggttcttgtggggaattgcgtcagcgatgaggcccgacgcgcggctggattcggtggtcttccagctcacccccacccggaccaggttcgatttggttctgatagcaaatggccggaaggagaagtttgcatccggtttgctgaaaccgttcctggctcacctgaaggccgcacaggatcagattgccaagggagggtactcgatcacgctcgaaccaagctcagggttcgatgcgccatggtttactagaggcactgtggagagatttgtgcgtttcgtgagtactccggaggtccttgagcgagtcacaacactagagtctgagatcctg

SEQ ID NO: 24721 - DNA, 2917 bp, Setaria italica
  Peptide Sequence Number=SeqID_90695
tcttaaaaagtctattggtcttctattctagtagtagttgtagttcgtctaattcaaagtttcttgtatcatatcctccagtaaaaggaaatagaatacccaaggtaaccaactaactctagggatcgaaccaagctcagggttcgatgcgccatggtttactagaggcactgtggagagatttgtgcgtttcgtgagtactccggaggtccttgagcgagtcacaacactagagtctgagatcctgcagcttgaggatgccattgctatccagagcaatgacaaccttggattgagatctgtcgaagaccatggaagaaagttgactgaaagcaatgaaggtggtcgggcaaattatgatcctgatgcagccacggcaattgttgtctacaagcctgggtcgacgccaccagttcagaatgaaacaacagcgcaggaggaaaattcaaaaattcaactgctcagagtgcttgaaacccgcaaaactgtcttacgaaaagagcaggctatggctttcgctcgtgctgtggcggctgggtttgacattgacaacttgggttgcctgattgcatttgcagagcgctttggtgcttcacgtctgatgaaggcatgttcccattttgttgaactgtggaagcagaagcatgaaactggacaatggattgaagttgaacctgaagcaatgtctacacgctctgaatttcctccatttaatgcatctggcattgtgttcatgggtgacaacatgaagcaaaatatggaatcagggtctgttgatggagaggcaaatggcgaggatgcagctaaatctgatcagaagtctggccagcagatgggaactcacgcagcatatcccccatgggcaatgcatcctccatctgggggagttgtttacccaccatatgctatgcaaggcatgccgttctatcctggggtgaatccatactaccatccatatcctccagtggatgatcccaggtaccactactctggaaggaaatcttcgaggaagcactcctcggatagcaaggatccagaaactcttgatgttgaaagtgaccatagcggttcagaaagaggaagttctcatggtcgaaagtcacatagaaagagtaagaggtcaggaaagaagaagcctagtgtagttgttatcaagaatgtgaatgtaacatctaaaaagcatggctcatcagagagtgagtcgcaatcaagttctgatgtgtctgaggacagtgatgattcgcacacgaaatcaagagaaaggaagcataaaagctcaagttcaaagaaaaaggagggtaggaaaactacttctgattcaggagatgagtatagcaaggatgaaacatcaaatggtcaagatgcagagcaaggtaactggagtgcattccaaaacttcttgttaagagcagaagaaaaaacaaggtccagtgatgcagacatgtttgctggtgaaaaagaacccccatcacggaggaaaaagaatgtaaacactgctgatcctatgcttttggctgagagagattctggcaatgtccatgaacgtaacacagttggttttgattcagccaatgggaggactagagctatccgggttatgtccaatgatgaacttgttatgtctggcgaagggagaggctatattgatggtgaaatgaaggagatagaagctggtggtgggaggtacaggagagggacaggtgatgacttcatgattaatggtcaggaaagccatatagacagaagtagcctgttggatcctcttgcagaggcccgttacaagaatcctgatcatcaggacaagaataggaatggtgtggcagatgagtcctttatgattcctcttaggtccagctcacaggataattttggagcagaaaatagaactaccattgacatagacgttgagcttcctgctagcattcataaaacatcagatgaaaaggctggacatcaacttttctatgagccggatgaattggtgccagagcgtggatttgaagatgtttcatttggatatgacccagcaatggattatgaaagccacatgctgatgcagactactgtgaaggtggaagatgcaaaagcagatgatgtcttgccagttactgagggtgatgtaaaaaaggcagagaaagagaagctaaggaatgcaaaggatggctcggataaaagaaggaaagatgctctattgaggaggctatcagctccaaggactccgctgaatgatgcacaaaaacgtgcacagaacctgcgggcatataaagcagacctccagaaactgaagaaagagcaggaagaagagcaaataaagcgactagagaggcttaaattggagagacaaaagaggattgccacaagaggtaatgggaagggtccagggagtgatagccctaaagcgaacggtatcaatggactgagtaaatcggttccatccataactgggttgaagaaagagagaagtggaacaactgaatcactcagtgatcggctgaagaggctttctgaacccaaaagcattggtggggtggagcattcctcgaatccgaggtcaaatggtgcagatcattcacggagaagaagcatggcatgagacatgagtcgacgtgagatggagaacttaaatgttaatctatcatggaattcggtagcccagcaacctcactagaactgtgaacgacatctcagaaagcttcttccttcttgtacaggaaaaaggaaaaaggcgggcatcggagcattacctgcttctgagattgtgatggaaatcaagttatcttgctatggcggcattgtgctttcaattttaacataattatttcattctttaattgagggtggcttgtaatagctgtaaaccttggtttttttggcgataccgtgctatattgttgggttattaatttattggtaattg

SEQ ID NO: 24722 - DNA, 899 bp, Setaria italica
  misc_feature (894)..(894): n is a, c, g, or t
  Peptide Sequence Number=SeqID_90696
ggagaactaggatagacccgtccttttcaaacaactcgaaattggactatcccatcccacaaacttgaaatttgatgatcccatcccacgataggtacggaaccgtcatatatcgtattgtctcgaaacccaacacaaccttaatcattcattaagattaagggtaaaaacgctacaccacatttgaaaataagacacgaaattagtcaccggccgttgattgatgcatcgttgtagtaatacggagatctgcaaaagtatagatatagtgaagaaaagcccatagaacgagcacaaattgaggactttttatttctattacatttcagtaccaatccaagccttcgcatgaagcgctagcttaacaccctaaaacataagaaaatacgaagccaaaagtgagcaatgcttcctcatgataggtagatgtaggacacagtgtcccctggcgcaaggctcttttctggagctactgttgcttgtggagactctccatagccacttcgagcttcttggcgtcagcacccacaatttcattagtcttttgccctttatgatagaaatggaacgtaggcaccgagtatactttgagatcaccaagcttgcttccaagtccttccatatcaatgtcaactttatacaccggtatgctcggatactggccgctcagctttgatatgaaaggcgcgattgccctacacggtccgcaccacactgccgtgtagtagaacacagccggcagcttctcatcttgaaccttggagaggatgctggcgaaggagtccgctgagcccacgaccaccatgctggagctggaaccgcccgcggaggaggagaagaggcgagagagcggggggaacgcgggagacggcgacgaggaggaggaggggggcncgggg

SEQ ID NO: 24723 - DNA, 770 bp, Setaria italica
  Peptide Sequence Number=SeqID_90697
cccgagctatggaaaatgcagatgtttatatgttcgatgagccatcctgctatctggatgtgaaacaaaggctaaaagctgcacaagttattcgttcattactacaacccaaaaactatgtgattgttgtggagcatgaccttagcattcttgactacctatcagactacatatgttgtctttatgggactcctggagcatatggtgttgtcactttgccctcttcagtcagagaaggaatcaatattttttcttaatggttttatcccatcagaaaatatgcgttttccgtgaggagaaacttacatttagagttaccgagtctgctgaggagataatagagggtgagacttaccaaagctacaaatatcctaccatggtgaaaacaagacctggattcaagctttcagtcatgaatggaagctttactggttcccaaataattgtactgcttggtgaaaatggtactgggaagacaacatttatccgtatgctggaaggacgagtgaagccagataaagtgggagataaagaagttgatatgcctgcgtacacagtctcatacaaacctcaggaaatgacacccaaaattagctctaccgtgaaagaggttctacacaagaaaataccaggatcttgcagtcatgcacagttcagatctgatgtcatgaaaccgctgaaaattgaagaactcatggacaggcaatttgcaaatctttctggcggggagctacaaagggttgcactttgtctttgtctcggaaagcctg

SEQ ID NO: 24724 - DNA, 668 bp, Setaria italica
  Peptide Sequence Number=SeqID_90698
gttagcccaagactagcagagtgcgctgcagatttgtccttcatgtttcctacttttgctgttggtttttggtgttgtttgccatcttattacatcagcagttgcttgctggccattgtataattgggcacctggtctgtttcattaccttcttgaaaatgttgaggctactaatgcgtctgtaccattaggtccaaaggctgcttttagtctgctttgtcttctgggtgatctattccctgatgaaggcatatggctatggaaacgtgaacttccttcactgagtgctattagatctttgagtaccagtacagttctagggcctcaggtggagaaagaggtgaactggtacctgcagcctgaacatgtagccatattacttgtgaggctgatgccacaacttgatagacttgctcgtatcattgataactttgctacttcggccttgatggtgatacaagacacgcttcgtattttcattgttcgtgttgccttagaaaagattgagtgtgcggttgttcttcttcgcccgatatttatatggttagatgataaagttgatgaaacttccctgtcagagagagaggtctttaaggtgcaccagttgcttcagtttattgtgaaattatctgagcatccaaatggcaaggcattgctttggaagatgg

SEQ ID NO: 24725 - DNA, 571 bp, Setaria italica
  Peptide Sequence Number=SeqID_90699
gtataggcagtccaagatgagcaaatccagttggccccctccagactttgaaattgcatattcagtgcttggaggaaaaccgcgaaaacatctgatatgtaagcaacttttgattttcttccgaaaggaaacccaaacaaatgtagtcttcaccatggatcaccggcaagggaacaaactctagccctgaagttgtaaatggtttctgaagatcactttcaattattctccagtccagttgagcaactcgcctgacctcctccccttcctttagtttctttttgaccaaataagggaacttttgggagatgctgtccatagcaaattgagagagataaattggggttggatcaatatcatttgtgggactaaacggctgtacgacccgaacatcatcaaggcctaagattgcatctgcatgctcatgagtcagaagaatagaatcaacacaagggattttgtggtgaacaaaccatcgcagaacttgttctctgaatgtcttcccaacatctattataatatacttatgtgcaccttcatcttggcaataatcaatcaaaagagaagtatt

SEQ ID NO: 24726 - DNA, 1254 bp, Setaria italica
  misc_feature (18)..(18): n is a, c, g, or t
  misc_feature (1175)..(1175): n is a, c, g, or t
  Peptide Sequence Number=SeqID_90700
tccgtttggcgtagttcncttttttttaggtttttttttttgggtctacaactggcgggcagttaacatcaagatgcatacggtgcagtttggcttccaaattgacaagagccgttcaattgctttaccaaggagatggacagcaacttgttggggcaatgaaacaactacttactttttattcgaatcgcgtgttgactattcgaaatgtaaatagggactatatctactggtatcacacgaagattggtgcgccaagtcagtttgtactttcttcacaagagggggctgaatgttaacagcagcaggaaacctagtacagctcactgagtatgcaatggtcctttcacggctacagatcaatgtagacacgcaagccatcatgagctaattgcacatctatcccctccctcctggaccattcttccaatgtttggttgtccttgtgatggtccatctcatgagtcatcccaatgagcaatgctcttttggggcaaatccttttaacagcatctagagtctggtcccaacaaaggtgcacattgtgagaacctgtcctgtataggcagtccaagatgagcaaatccagttggccccctccagactttgaaattgcatattcagtgcttggaggaaaccgcgaaacatctgatatgtaagcaacttttgattttcttccgaaaaggaaacccaaacaaatgtagtcttcaccatggatcaccggcaagggaacaaactctagccctgaagttgtaaatggtttctgaagatcactttcaattattctccagtccagttgagcaactcgcctgacctcctccccttcctttagtttctttttgaccaaataagggaacttttgggagatgctgttattcacaatgaacattgttagtacgaattctcacctattgtcctaactaataactacatattagctgtaaggaaatggtggaagtgaaacataaacccccttaccagataagaggcaacagtgctagaaaatgttttacaagattagacaagagcagcattaaaaaaagacatgcagaaatggtagtccaagaacaaagaaattcgcacgagcataaacatggttgtatgcgtcagttactatatcaatgtttattaaagataatttgctatccttcactgacgcacttctcatgaaacangtctaaagtggtaaattatgtgcaggaggagttggttcctcaatgcatattgtgagaggcagtcagctaactgcagcat

SEQ ID NO: 24727 - DNA, 310 bp, Setaria italica
  Peptide Sequence Number=SeqID_90701
ggtggcgtgcccacccgcctggccaccgtcccgcggtgtttctttcctctcctccaagccaccgcccgccaccggcgccgcccgccctcctccatttatacctctccggcgcggcgacgcacgcaaaccttccctcccgtcccgcaccaaccaaggctacgattttctcggaatcccaagaagaggcgggatcgaaatcaatcagtgccctcccccagaacctgctgccaccatgtcgacgacggcgacggacgaggcggcgttggaggcgcgcctccaggcgctgcggcagaggctcgggaagaagcag

SEQ ID NO: 24728 - DNA, 340 bp, Setaria italica
  Peptide Sequence Number=SeqID_90702
gagcctgccgccggcggtgctgcgtcatggcgctgccccgagtccgctgcgacacaggcggagggcggtggtcggcgacggcgacggcgacagactcttgaggttgagcgttgtaagcagcaccgtgctgcgacacccgggcgaccatgtactccatcgccgccggccctagcgacgcaatctgccgccgatcgatcagctcggagaatatgaaggagcaggatgctgatcgagactgaaagatggaggagtatgtaggataggaaaggttgggagggagctgtcggcgatgctgctgctgctggtagaggatcggaggaccagcagcaagctactaagc

SEQ ID NO: 24729 - DNA, 924 bp, Setaria italica
  Peptide Sequence Number=SeqID_90703
aattttgtattgtccctattcttcttattgaaaaaagatttttgaccttagttctttttttacattcttttaccctctttattgagttaaagctccgggaaacaaccagtactacatcaactaattttcatgaatcacagtgccagctacctgactgtaataggaacgggatacaagtatgccagaaataacactacagaagcttcttatacaaacatattgagttgtacagatgtcacacagaatttgatgcccatctcatatcagctgcaattttgcttgcaaagtaccaaactccatagggtttaaactcagctgtctgacttcaccagcttcactttctccttgagaaactgtcgaatgtgctcccgcttccagttgtcgatccttatggtctccttatgttcgcccttgtcgtcaagcattatgagctttggtggagaaccatacgaataacgggcttccacataagggaagtcatctttatcctcttcaaggaagccaacaacttctggataaaacactaactttctcatgcagacctcaataattgcaccggaaaatgtgagcttgctgattgaatcatctgaatcctcagtgcaacatttacgacaatcctccaccagctcttggtccttgacgaactcggagagcgcgttgcagtcggagcagagggcgaggccggtgaatcccaggtcctcgcactgccgcgccccgagccgctccccgtggcagaagccggagaagcagacgagcgccacagcggcggcggcgtagagagatcgacccatacctcctctcgtccccgcctcggtcgccccagaccaacgtatggcttggactttggagctgccgcaaccgcgagcaccaccaccaccaccgcgacgagtcgacgacggcgacgacgactagcggctaagcggc

SEQ ID NO: 24730 - DNA, 409 bp, Setaria italica
  Peptide Sequence Number=SeqID_90704
agctgattcttacaatcacaagataaacaacacccaagggatgttggagtagtacatctgagccagttccatcgtaatctccaaacctaaatagattttctgcaaatactggatctcccccagctagcaatcttgagcctcctgtcttccgattacaaaggaggaggtcaaggaactgatcaggtcctaaattcgccatgggatgtctgctatgatccctcacaggagactgtttatattgcgatggctgggcaacaccagatctggaagcataacatacgtgatggtgtaaccaaagttcttagtggtgatggctatgagaaaaatttaaatggctcaagaattgcaggagttatttgttgctgatagtgaaagcagttccattcgagctgttaatctgaagacagga

SEQ ID NO: 24731 - DNA, 250 bp, Setaria italica
  misc_feature (247)..(250): n is a, c, g, or t
  Peptide Sequence Number=SeqID_90705
gctgtgacgactactctagaggaagatgcgttacaagaaggcagtccctcgctcataagaaagaacattggagatgtttcaattaacgacattttgtatggtggttctaatgctcgccacagtatgtagttcaagcaaaatatatttttgtccaataacatatctcttgtatgaaaaattggaaataaaaacgtttggatcttcttgcgacaaaaaaaaaaaaaaaaaaaaaaaaaaaaaaaaaaannnn

SEQ ID NO: 24732 - DNA, 359 bp, Setaria italica
  Peptide Sequence Number=SeqID_90706
tcagctacatatacttgattgtcactggcataaacaacacccaagggatgttggagtagtacatctgagccagttccatcgtaatctccaaacctaaatagattttctgcaaatactggatctcccccagctagcaatcttgagcctcctgtcttcagattaacagctcgaatggaactgctttcactatcagcaacaaataactcctgcaattcaggagctaatgaaatcccagaaggctgtgcgaacgatgtgctggtggcacttgagccatttaaatttttctcatagccatcaccactaagaactttggttacaccatcacgtatgttatgcttccagatctggtgttgcccagc

SEQ ID NO: 24733 - DNA, 2335 bp, Setaria italica
  Peptide Sequence Number=SeqID_90707
cagctcccgcggcgcgggcggcgcggtgtcgtcgtcgccgccgccgccgccgcctccgcgccgtccccctcttctccggggacggaggtggcggaggggccggcatgggggaaggtctccgccgtgctcttcgacatggacggcgtgctctgcaacagcgaggagccctcgcgccaggccggcgtcgacgtcttcgccgagatgggcgtcgaggtcaccgtggatgacttcgtccccttcatgggcaccggtgaggcgaatttccttggaggtgttgcaagagtaaaaggagtaaaagatttcaatcctgaaagtgccaaaaagaggttttttgagatatatcttgacaagtatgcaaagctaaattctggcattggatttcctggggcgttggagctcatcatggagtgcaaaaatgctggtcttaaggttgctgttgcatccagcgctgataggattaaggtggatgcaaatctggctgctgctggtttgcctgtgtctctatttgatgccattgtttctgctgatgcatttgaaaagttgaagcctgctcccgacatattcctggcagcatcaaagaacttaggtgttgacacaagtgagtgcattgtgatagaagatgctcttgctggtgttcaagctgcaaaagctgcagaaatgaggtgtatcgctgtgacgactactctagaggaagatgcgttacaagaaggcagtccctcgctcataagaaagaacattggagatgtttcaattaacgacattttgtatggtggttctaatgctcgccacaatgaaggggcagaaagttctgggaatattagttccataggaaatgcttcacctgagaatctgaatggggcaactgatgctggagtatctggcacacaaagttctccaacctcaaaaactgaagggctgttgggttctcgacgggaaatattgaggtacggaagtctgggaatagccgtttcctgtgtttttgttgcagtaagaaattggaaggcaatgcagtttgcatctcccaaagggctgctgaatttttttacaggtggaagtagttcaatttttgttaataatgaaggagaatcactgtcatcaagagctcaacaaataaagaagtatttagctgattttgaatcagggggttctgccacatatgttcctgagtttccaagaaagcttgactggttgaatacggctccacttcagtttggaagagatttaaaaggaaaggtggtactgctggatttttggacctattgctgcatcaactgcatgcatgtcttgccagacctggaatttgtagagaagaagtataaagataaacctttcactgttgttggtgtgcactctgccaaatttgataatgaaaaagatcttgatgctattcgtaatgctgttcttcgctacaacattactcacccggttgtaaatgatggtgacatgtacttgtggagagaactcggtgtgaactcttggcctacatttgttcttattgggcccaatggaaaggttctagcacagatatcaggtgaaggtcatagaaaggatctcgatgatgtagttggtgcagcacttgagttttatgaagagaggaaattattacagaatgatccgcttcccttggcattggagaaggacaaggatagtcgtttactaacttcacctctaaaatttcctgggaaacttgcacttgatgtagaaaacaatcgattatttatatcagacagtaatcataatcgaattgtggtgaccaacttggaagggcagttcatatgccaagttgggagttccgaggaaggactgcttgatggctcatttgatgctgccctatttaaccgccctcagggtcttgcttacaattccaaaaagaatgtcttatatgttgctgacactgagaaccatgcactgcgagagattaattttgtggacgagactgtgagaacactagctggaaatgggactaaaggttccgattacaaaggaggaggtcaaggaactgatcaggtcctaaattcgccatgggatgtctgctatgatccctcacaggagactgtttatattgcgatggctgggcaacaccagatctggaagcataacatacgtgatggtgtaaccaaagttcttagtggtgatggctatgagaaaaatttaaatggctcaagtgccaccagcacatcgttcgcacagccttctgggatttcattagctcctgaattgcaggagttatttgttgctgatagtgaaagcagttccattcgagctgttaatctgaagacaggaggctcaagattgctagctgggggagatccagttattgcaagaaaatctattt

SEQ ID NO: 24734 - DNA, 618 bp, Setaria italica
  Peptide Sequence Number=SeqID_90708
ttagaaaaccaatttgctggctcaatctcgattgcattagatggctctgtttccacatcaaatttactgcgagcttcctacgcctcagcaaaaataaatgttaatcttaacataaacaatcaaacaaagaatattactgtttgaatgtcgtgccacattcactagtgcctatcaacaataatgcaagcttgcaaagcaagataataagaacaaaatcctctggatattattgaccttggagaaatggtaaccatcaggtactgtaattgcaagagacaagaatccttccattgaagaaccaccatcaacattaataacatccgtgtctactgatagccgccgtcttaggcgtttcaatgtcttcggttttggtgatggtggttgcactccaatcaaatctagtgttttcacctctgcacctttctcactaagggttatatacctgatcgcgctgttatttgtatctgctacaagaagccttccttctccaacttcaacgagtcctgctggctcagaaagttgagcggacaagcctggaccatccttgtatcctgcacgtccagtaccagcaacagtcgtaacttttctcgtgacaggatctagccgttttatcttgtg

SEQ ID NO: 24735 - DNA, 1286 bp, Setaria italica
  misc_feature (4)..(4): n is a, c, g, or t
  misc_feature (8)..(8): n is a, c, g, or t
  misc_feature (12)..(12): n is a, c, g, or t
  misc_feature (16)..(16): n is a, c, g, or t
  misc_feature (21)..(21): n is a, c, g, or t
  misc_feature (27)..(27): n is a, c, g, or t
  misc_feature (34)..(34): n is a, c, g, or t
  misc_feature (41)..(41): n is a, c, g, or t
  Peptide Sequence Number=SeqID_90709
tttntttntttntttnttttntttttnttttttnttttttntttttttctttcttttagtttttttttttttttcgatttactaatctttttatttttttgtttttttttttttgacataagatttctaaaaacaatgaagctgggtaacaagcagcatgtcagctatacaacgtacaagggagttagctggaactttgccccctcaaaaaaccccagttagcattgtgggcccggagccaaattgaaaaatatatacatttgaatcacgagaattgataatcagtacgatacaagtaattaccaacatgaacctgactataccttggcattctttctacccgctattaattgcgcaccacctgaattatctcttggcgtcacagaataggatagagtaatttgtgttggactgggctctggcccctcatggaatttgacatcaaaagcaatggattgataaagacaaacttcatcttctttacagtagtagaccttgcagtttatccttcccattgatgacactgatgatatccttttgaacttcagtgacgccagcccttcggagtttagaaaaccatttgctggctcaatctcgattgcattagatggctctgtttccacatcaaatttactgcgagcttccttggagaaatggtaaccatcaggtactgtaattgcaagagacaagaatccttccattgaagaaccaccatcaacattaataacatccgtgtctactgatagccgccgtcttaggcgtttcaatgtcttcggttttggtgatggtggttgcactccaatcaaatctagtgttttcacctctgcacctttctcactaagggttatatacctgatcgcgctgttatttgtatctgctacaagaagccttccttctccaacttcaacgagtcctgctggctcagaaagttgagcggacaagcctggaccatccttgtatcctgcacgtccagtaccagcaacagtcgtaacttttctcgtgacaggatctagccgttttatcttgtgattgtaagaatcagctacatatacttgattgtcactggcataaacaacacccaagggatgttggagtagtacatctgagccagttccatcgtaatctccaaacctaaatagattttctgcaaatactggatctcccccagctagcaatcttgagcctcctgtcttcagattaacagctcgaatggaactgcttttcacttattctagtctaactaaattaactttcctttgttcttaattttcttaggttagttcttt

SEQ ID NO: 24736 - DNA, 537 bp, Setaria italica
  Peptide Sequence Number=SeqID_90710
cttgccccaagggcaaacaactgcactttggctgcggctgtggcatcatttgtgatacttttatcccaggactctaagtctatggaaggatagtatcacaaatgatgccacagccgcagccaaagtgcagttgtcttgcccaagggcaaaaatatatcttcagtaaagtttgcgagcttgggaaaccccagcggaacttgcagatcgtaccaaaagggaagctgccaccacccgaactccttatctgttgttgagaaggcctgtctgaacaccaatagctgtgcagtctccctgtcagatgggggctttggggaagatttatgccctggagtcaccaaaacacttgccgtcgaagcggactgttcttagtgagctatctctgttatgcattccaggttccactacaagtgcgctcatcaaaaattataaattgtatcagatcgcactgaatagagccccctccattgccccctcttaatgttgcgtcgcgtcatgaactttctggattagccaatgacaatgatgcaaggctacgca

SEQ ID NO: 24737 - DNA, 2010 bp, Setaria italica
  Peptide Sequence Number=SeqID_90711
tcaagtaacgtactaacctggtaaaaaagtgaagtttcatagtaccgaaagttgacccaagtttctgatatcctttttatgtaccatggtggaacaaactttggtcgcactactgggggcccattcattacaactagctatgactatgatgcaccaattgatgaatatggtcttaggagatttccaaagtgggcgcatctgagggagcttcacaaatctataaaattgtgcgagcatgccttgctttatggaaacacaacttttctttccctgggacctaaacaagaggctgatatttacaccgatcggtccgggggctgtgttgcattcctggcaaacattgatccagaaaaggacaaaattgtcactttcaataacaggaaatatgatcttcctgcttggtcagttagtatccttcccgactgcaagaatgtggtgttcaacactgcaaaggtgcaatctcaaacttcgatggtgactatggttccagaaagtttgcaagcttcaaaatctgatcgatggagcattttcagagagagaactgggatttggggtaaaaatgacttcgtccaaaatggatttgtggaccatattaatacaacaaaggactccactgactacctatggtatacaacaagttttagtgtggatggaagttacccatcaaaagggagccatgctgttcttaacattgactccaaaggccatggggtccatgctttcctgaataatgagtttataggtagtgcatatggcaatggttcaaaatcaagtttcactgtggaattgcctatcaacctgaggactgggaagaatgaacttgcccttctgagtatgaccgttggtttacaaaatgcaggaccctcttatgagtggataggagcaggctttacaaatgtgaacatctctggtttgaaaaatggagccatagacttgtcttcaaataattgggcgtacaagattggattggaaggggaatattatagtttgttcaagcctgatcagagaagtaacaaacggtggataccacaatctgagccaccgaaaaaccaacctttgacatggtacaaggtaaatgttgatgttccacaaggagatgacccagttgggatagacatgcagtctatggggaaaggcctggcttggttgaatggaaatgccattgggaggtattggcccaggactagttccagtgatgataggtgcactcccagttgtaactacaggggagcatttaatccagacaagtgcagaacaggttgtggacagccaactcagagatggtaccatgtcccacggtcatggtttcatccatcagagaacacccttgttgtttttgaggagaagggtggggatcccacgaagatcacattctcaagaagagttgtgtcaagcgtatgctcctttgtgtcagagcactatccttccatagacttagagtcctgggataaaagtatcacaaatgatgccacagccgcagccaaagtgcagttgtcttgccccaagggcaaaaatatatcttcagtaaagtttgcgagcttgggaaaccccagcggaacttgcagatcgtaccaaaagggaagctgccaccacccgaactccttatctgttgttgagaaggcctgtctgaacaccaatagctgtgcagtctccctgtcagatgggggctttggggaagatttatgccctggagtcaccaaaacacttgccgtcgaagcggactgttcttagtgagctatctctgttatgcattccaggttccactacaagtgcgctcatcaaaaattataaattgtaggtgcttgttgcgtaacatgctatgttaacctggatttgaaaatcttcctagatttagattatggcttcacgagctctcgctttgctgaaagctgagtcctgaaaggtgacagttaggatagcgattgatactgatcatctttgctagcgaatgcatcgtatttcaggatctctatgaactgtttgattgagaaccatgaacgaacttaccaa

SEQ ID NO: 24738 - DNA, 286 bp, Setaria italica
  Peptide Sequence Number=SeqID_90712
ctgtcgggatgcgatacaagtgactcatacggaaagaaacttctgttgttcctgaagtggaaatgcatggaggctaaggctgtagcatattactaccatggtctcgtacttgacaagggcggtgaaacggccaaccatatcagcgcagtttgctgcctctctgcagctgaagacctgctctcagacagcaagagggcttgtttgagtttctgcttggcaaatcctgtcacaagggtaccacctccctggggtgtcatgaagaacatgcacaagaaaattccagatg

SEQ ID NO: 24739 - DNA, 417 bp, Setaria italica
  Peptide Sequence Number=SeqID_90713
tccatcgccggcgaagccatcgatggcagtgatggaaggcccgcccaggcaccggcggtcatctgccccgcatcgatctggccacgctcgccgcgcatgaggatatccgctacaccaccatggagctcgctaaggcatcagtgccagcagggaagcaggacgccgtcgcctgtgtttgctgctctgtgcttgccacctatcgaaacagccacgctcaccacgacgaggcaattttgctgcctgtcaatctgatcattctcgagacacccaaggtgatttgctgcgcttgatgttgtccttctaatgcttgcactttaagtgttcgatgaaatgtcacttcaagctgataaatcattctttcagtctatactgattgcctttgttaccatatttctatgctattgccttgtccactag

SEQ ID NO: 24740 - DNA, 982 bp, Setaria italica
  Peptide Sequence Number=SeqID_90714
aggagataaggttggctggttaagcacctcgcctcctccccacgaccgcgcctccccgagtcctccatccgccgcctctgtgcgccgccacgccgagccgcctccgagcgcccaacgctatcgcggaccctgaccggtgtggaccctacccggccttccctccatgccagcacaacaggacgctctgctatgccctgccgccgccaccgctgcaaacaacggatccatagaggagccatatgcacccacgtgcggccccaaggagcggcggaggtgggcagcgcgcgatccggccgatggcggtggtgggcagcgcgcgatccagccaccggcagcgaccatggatgtcctggtcgacctcccaatccactctttgcagacctgcactcgagccgagccatcgccaacgtccgaattcgggcggcgtgatgtggatccggtggacgtgccggtgtgggggcagccatggcatcctcaccattcaagttcttctcggtgctactgggaagctaaagcagccggcgtcgtcgtgaagtagccgtcgtggcgggataggcgctccctctccggctcgtcgcaccttgccctggacgggagctttgcaaacaaggcatgtggggagcaggtcgtcgcctagtggcctgcctaaatctcctccatcgccggcgaagccatcgatggcagtgatggaaggcccgcccaggcaccggcggtcatctgccccgcatcgatctggccacgctcgccgcgcatgaggatatccactacaccaccatggagctcgctaaggcatcagtgccagcagggaagcaggacgccgtcgcctgtgtttgctgctctgtgcttgccacctatcgaaacagccacgctcaccacgacgaggcaattttgctgcctgtcaatctgatcattctcgagacacccaagagcccaataacggttgcgccatcatcgtcgtcatacatcttgacgccgctcccat

SEQ ID NO: 24741 - DNA, 927 bp, Setaria italica
  Peptide Sequence Number=SeqID_90715
gtgctccatgacgatcaagggtactgcttttctgtggcatcaagttcgctgcatggtagctgtgctatttctaataggtcaaggccttgagtcaccatctgtagttgattcactattggatattactaaaactcctaggaaacctcagtataaaatggcagctgagcttccattgattttgcgatcctgtcaatttgataaagccgactttatgtgttcatcagatgtgagtcagtctctgactgagcacttgaatgatgaatatcatcattatatgctccaagctgaaatatttcacgaggcgttgtcctgtttaccttgtccagaatctaatccactggaaacactacagaagaagaggaatcatattcctctcctatcacgacaaacagagccctcttacgaggagcgtatagcaaaagtcaaaacaaagcagacaaatattctctagcagagtgtccgccttgaataggaacatctatactttgaagagaacggatggaactgtagaagctcagtccttatagtgcagattctaccacaactgcaaccaacagtttgatggcagcgaattggatctgtttcacattcggggatggacagtagcagagatcaagaacgagcggatttcatcagtttaagacggttttaccagcggttgctgcctattccagtcattggacagtagtcggcaatcagaatgtagagcataacagatgagtagatcgctcccttacttttggggacgtgtcgtgttgtgtgcttcatggagcataagtatcttgtattctgaatctgttgtaaattagtatagagatgtagagatcatgtaacgttattctcacatgctgctgtaccaaaactgtaacaagcatcccttgcaaaaaataattaaacaagacatgtaagagatttaaaaaaaaaaaa

SEQ ID NO: 24742 - DNA, 395 bp, Setaria italica
  Peptide Sequence Number=SeqID_90716
ccagcttcgtcagcaagctgggggacttcggcatctgccggctcctgagccagtcgaacaccgccaggtccaacgccaccaggtccatcaccacaaagctccaccggacgaccaccccgaaagggaccttcgcgtacatggacccggagttcctttccaccggcgagctcacgccgcggtccgacgtgtactcgttcggcatcatcatcctgcggctcctgacggggcggccgccgaagaggatcgccgaggtggtggaggacgcgatggagcgcggggagctgcacgccatcctcgaccccacagcggggagctggccgttcgtgcaggccaaccagctggcgcacatcggcctgcggtgcgcggagatgagccggcggcggcggccggacctc

SEQ ID NO: 24743 - DNA, 714 bp, Setaria italica
  Peptide Sequence Number=SeqID_90717
tagttatttgtatgtgatgtctgttaatggagttagttctgctgccatctttattgaattgggcatgcatattgtgacttgatcttacttggactgaaattgtttagcttaagttcagtgcgcgtaaactgtaaagaatgtttatatccatgatacattcacatctgctgttcatcagctagaataatattgagctactatgtggataaagattatgtgcctcattattagtattagttcagaagggacactgatgggttctattctaatgggcataactgtactggtctgaactgtgtgctatgagcttggatgcttcattggattctttaaaaggatgaagtgttactgatcctcttgcataaagtctttaatcttgatatactgagtgtctacttctggtcaaacatacaactgtatttgatatatgtgatatcactacttcaccagggatccacacttatatgtccctacctaagtacacatctatcaaacactaaagcggttgacctgttcatgtgcattttttcagttttcactctatagttgactgttcgtgtgcaatatgacatactaataaaagcatgttcctgtgatttaatagaagtgtatacttataggaaggaggcataatattattgacttgttactagtatggctttgattattctgaggatcatttgagcagatgctagttcatggagaatttatgta

SEQ ID NO: 24744 - DNA, 411 bp, Setaria italica
  misc_feature (351)..(411): n is a, c, g, or t
  Peptide Sequence Number=SeqID_90718
atatactaggcgccaagagcttcaaactttgaaagcttactcgtgtaggcacatattttactgctcctttctgtgctgctgaaactaaaacctgcccagtgtgtgtggtcattggatgccttgtcagaatatcagcaacacttcacagcgaagccattgctgctgcataccagatcaccggaccactgagtccaagcgtgaactggttgacagttaagctgttgcagccagcggtagagtgtagcctgtaggagtagccagtgttgtagctgctgggagcacaccgaactgaatatgttggaacaaaacaactatcagtgctggaagccactttttttaccctaaaagggnnnnnnnnnnnnnnnnnnnnnnnnnnnnnnnnnnnnnnnnnnnnnnnnnnnnnnnnnnnnn

SEQ ID NO: 24745 - DNA, 712 bp, Setaria italica
  Peptide Sequence Number=SeqID_90719
taaggttaaggggtacttagatctggttgtgggcagtacaaatcatctgctgccgaccaggaaagtgctgccactgaggcatcctcgtcgttgtcaacagcaatgagctcttcatcgtcagaagtcggttcggcaaatggtgcgtccacgctctcccagttcaggtcatctctgcagagaaggctaggatgttcgctgacccattcatccaaaacattgatgttgtccaggctgatgggatcgatggtgtccttaagcttgttcctttctcgaagcttcagattgtaacgaacaaatactatatcatgtaaccttgaacgttcaagcctgcttagcttcatggaatggagataattgaagatatcccaattcctttcacaccctgttgcactacaacattggctgaggactcggactgcaagactttggagctctagggttccattaccgaagttgtcccaccatgcaactggattaagtttctgtctttgacgaactgcaattggaaggccaaagtcacctgttgatttcttgtactcctcaagctggagaaatatcttatcttggacctcaacatcagggactaaactagctattgtcttcataagccccctaaatgcatagctttgcatcttaaaagaggggctaaagtaaataccaggattgaagaagcatcctgctccatgcaacggactatgaagctgcttctcca

SEQ ID NO: 24746 - DNA, 297 bp, Setaria italica
  Peptide Sequence Number=SeqID_90720
tttttttttaatttttactgaaaacgcggtgcatcgcctttacacactcgcacaattctgacggcttgtaccgtgtgtagcgagcaagggtagggttccaaggctgctttgttggataaagtatatatttcgccaagaagatagctgaggctgctatctgtgaaggagggtaacaaagcagattgtactccagcaatgatagctcagtgatgtagtttgctagaacctcgatataggctggatcctcatcacatgctcgtgcagcatgaagaaatctcctcaaaaaacacttggctg

SEQ ID NO: 24747 - DNA, 1087 bp, Setaria italica
  Peptide Sequence Number=SeqID_90721
tgtcttcttggcgccggcgagcagccagctggttttccttctgcccttcccctgctgcggtatttgacatggagtatgggagatgggtcgaagaacacagcaaactgatgttccagctcagggctgcgctgaatgagcacatggcggatgaacagctgcaggccttcgtcaatggtgcaatggcacagcacgaggagctgctgaacctcaaaggtgccatggccagggctgatgtcttccacctcctgtctggagtgtgggcaagccctgctgagcgttgcttcctttggttgggaggctttcgcccctcggaggttataaaggtgatgctgaagcatgtggaaccgctgtcagagggtcagatccttggcatatacaaccttcagcagtcagtgcaggagagggaggaggctctcaaccacaccatggaagccacccagcagagcatctccgacattgtcgctgcccccgatgtcgcccccgccaccttcatgggccacatgtcccttgccatgaacaaggtggcgtctatggagagcttcgtcctgcaggcagatggcctaaggcagcagaccctccacaagctccaccacatcctgaccactcgtcaggctgctcggtgcatggtggcgatcgccgactacttccaccgccttcgcgcgctcagcacgctctgggttgcaaggccgaggcaggaggatgggccaggactgtagatgaagcttaccaaataaaacggggaagaagaagtacaataatgcatgcatgtgcaagtttaattgttcttcttcttcttgaaagcatgcaagctagattagttccgagagaaagcaatgcatgcaagaactaattgatctaatttaaagactagtgtaaggtcgattagtttgatctggtaaaatgcgcactgaagagtggattgttcttcaggtgtgtgactttcaactttttaaggtgtacatacagtgttaggggcagagaaagtagggagtaagaatagtattggagactttggactcccttttgttcctaacttatgcaccaactgttgaacttaaccaagaacatcattggtttggccggggga

SEQ ID NO: 24748 - DNA, 449 bp, Setaria italica
  Peptide Sequence Number=SeqID_90722
tggccggcggcgaggggcggaggaggtgcggcggctggggccgcggcttggcgccgagggacgccaggttgcagttggcgcggcggccgttgatgacgggggtggcgtcctcgcacgccttcttggccgcgtccgcctccttgaacgtcacgaagccgtagcccttggagcggccggtgagcttgtcggagatgatgacggcctcgaggatgtcgccgtagcgctcgaagtgctcgcggagggtgtccttgtgcgtctcccacgccagcccacccacgaacaccttggtcagcgtggtgtcgccaaacgccgccgccgccggcggctgcgccagaggcaggggctgcggctgcggcgccatcatcgtcattgccttgcctgccgggccgcggcgctgcgtccttcgtgacggcaagtcggcgagatgtgcggcggggggtggaatgcag

SEQ ID NO: 24749 - DNA, 601 bp, Setaria italica
  Peptide Sequence Number=SeqID_90723
aaagtagcatttcattgaaaataagattgtaagagtgctttgcgtgtatggccagtgtaaccaatagagtaaccgaactaagcagacgacaaaaataaaggctgcatccttatttgttaatctagcagtagagaacaagccctgcatgccataaaacttaaaaggttcacacactttcagtttccaagaaaccttcgaccttctcatgcacttcatatacatggtagccagaaatgttttctatgtacgccgtcagtatatcactatagatgagaaaatcatggcaaggcaaggaaacaagtaaaaatatacatttccatttaaaaatatgcatggtaaacattaactgctcatccgagagggggagagagtttgaagtcagtcaacagatattcactaatccataacatcatgaaacagttactgatttgttcgagagagaaaaacagttattgatctataaagcaacagtaacgaagaaacgatcagtttgaacaatccatttagcatcagtaagcccatcgcaggtgctccagcccccaagcccgagcacatgagcacctcaattttccagcaggatctattgaaattagtaactaat

SEQ ID NO: 24750 - DNA, 848 bp, Setaria italica
  Peptide Sequence Number=SeqID_90724
atattgcaccctacacaagatccccagaaagagctggtggagcccgcggtgaagggcacgcttggcgtcctccaagccgccagagactgcggcgtcggccgtgttgtcatggtgtcgtcgcagacggccatggtgccgaatcccaactggcctgcggacaaggtcatcgacgaggattcctgggccgacatcgacctgctcaaggaactccagctttggtacagcgtgtctaaaacactggcagagaaggccgcgtgggacttcgccgaggagcaggggctgcagctcgccgtgctcaatccagtactggtgttggggccaacattgacgccctcgatcactggcagtctccaagtatttctgcagattatgaagggccagaggtttgacatggacgagtacttccttggctgtgttgacgtccggggcgtggcgcagtcgctcgtagcgttgtatgagaactcgtcggcacagggacgccacttgtgcgtggaatccactgaacggatggtcgatttcaccaacaagcttgccgacctttaccctgaacttccggttcaaagaatccaagaggacaaacaagagtgggtggtgcgagcaaaggacccgtccaagaaattgatcgagttgggtgttcgtttcattccatttgacagaatcatcacggacactatggattgcttcaggagcaaaggactcatctagcttatcacgtggatttcttcaggagaaaaattgctcatctaggttgatttgaatgtgatggtggtggatcaaaaactgctgctatatgaaagttctctagtcgaaaataagctgccacaacacaaggacatctctggatggtg

SEQ ID NO: 24751 - DNA, 860 bp, Setaria italica
  Peptide Sequence Number=SeqID_90725
atttaaggtgccacaaaaagctctgcagacttggtcaaaacaggtaaatgaccataaattacagacttaagcctcctttcgacttccttgtgctcatggcagggctgcatggatcaacctttttgcttcttgtgcccattgcaggactgtcaaacaacacagttgtctgcttttgctttctttttggcttgtttcttccctttgggcttgggcttatccttctgttttagtctgcttctttgtacccttggttgtagccactggtggatgattcgaagcactagacgtagggaactcaatggtcatgggttcgggctgattggtgctaccggctgacctgcacctgtgcatgcataacaacaaaacagaatttcagaataaggaatactaagagcattatattattacatatcagaacaagccatcaccttactgagcctccagaatctaaggtagccaaccttggtgggaaagacagaggatgcaggtgcttcaccattccaagggacaattgctttcctgagttgatgctttggtggtcttcttttcttctttggtggtcctctcagttccatcatagctgcaatgtcctctgggttaccattcttgcaattgtgccaatgatgcccatagcccttacaaatagggcattggtgctgcccttttgtccttttcttctcactacagctcttgtacctctcattttgactcctaccagctgtggcttttagtagtggtggatgcatgaaaaaatcatgggacaatttaggccactgtgacttatcagccagagcagtatatggtcaactaatccctgctattggcttgtattaagtcacagttggtccttaaattttgtt

SEQ ID NO: 24752 - DNA, 353 bp, Setaria italica
  Peptide Sequence Number=SeqID_90726
tggagcctcaagctctcgaacgaggcgtcgtcgttaccgatttccacccttgcggcgccgacgaagcgcagcagccggaacggcctcgccgcggccgctcctgcgcccatctctgaccggcaatacgcgaagagctccgccaccgcacattggatcccaaactccttcgcaaccacccgccatcgggcagccggaccctcagcttgcagaccttcatctccaccgacgccggctgctgactcgttggtgccaccgccaccgctgtcgcaaccggctgctcagccggttttctcactgtcggtgcctgtccttgccaattcgttcggagtctagtctagtttgttcgtccggtt

SEQ ID NO: 24753 - DNA, 597 bp, Setaria italica
  Peptide Sequence Number=SeqID_90727
tgccctcccccatcgcctggcgcttcgcggggcgcagcgccggggactaggacgagcaggaggaggtttcccctcccccgcccccaccgccgttgaccgcgcggcgcgggcgcttgacgcagagcgagtggccgaggagggagaaatgctggtcgcccccgtcctcctcgtcctccctctccccgtctgcctccccgccctcgagccgctccggcttggcgtcctccgagtcgtcgaacagacgcaacggcgcggcaacggcgtgcacgcgggcgtgggcgtgggaggggccgtgggaatggagcccgagcgagaggtccgacgatgcaggccgcgagagatccatacctaaccaaattctccaaccgatcggcgcgaaatcacaaaccctagctagctaattcgtcaacaagaacaacaaccaacgcgacagcagcagcgtaggcgggcggcgcaggagggagcggcggcggcggtggctacgagaggcgacgcggcggcggaaaacaccatgagcctttggggatcgatcggggcttgggaattgggaatcacgagaccacgcgttggaattggggtggcggaaggtagcagctg

SEQ ID NO: 24754 - DNA, 243 bp, Setaria italica
  Peptide Sequence Number=SeqID_90728
tcaggaaccatacttcactcaactcagagctgaagccaagacagttgaagggaggttagcgaccggtgactacaacaggattacacaaggttctttgctgctattcaataaatgcctcatgcttaacgttgaggctgttaggaaatacagttcattctctgagatgctgcaagcagagacaatctcaaatgtccttcctggtatttcatcagtagaagaaggtgtcaaagtatataggaaatt

SEQ ID NO: 24755 - DNA, 359 bp, Setaria italica
  Peptide Sequence Number=SeqID_90729
ggcgtaatgcagcgtccccaccgccgtgaggttcgcggcggcgaagcgcgtggacacgacgacagcgtagtcgagcggcggcttgtcgagcgtgacgaggaacgcgagcgactggccggggtggacgtcgagggagtcgtaggcgttctgcacggggtgggtcccctccacctccgccagccggagcgagtggccctggatcctcacgttgacggaggccttgagcccgacattggagacccggaacaggtacgtcctgccgaggtcgccgacgaaggttgcagactgggcgccgttgatgaggagtccgtcgggcggcggcagggcggcggcgccggcgtcgagcgcctggcggagct

SEQ ID NO: 24756 - DNA, 242 bp, Setaria italica
  Peptide Sequence Number=SeqID_90730
ggggccggtggccaatgtcgttggtgatgcgaatgaacaggatcaacgtcagtggatacgatatgccgtcgcccacagcgcccaccaggcctagcagcatcaggaccacgtccaccttgtctgcgtgcgcgaacaccgacatggacggcgacccccctgctggcggcggcgccggcgccggcgcggcctccttctcggttgcctctccatccatgtctggagagctcgctggcatcaccgaa

SEQ ID NO: 24757 - DNA, 660 bp, Setaria italica
  misc_feature (641)..(660): n is a, c, g, or t
  Peptide Sequence Number=SeqID_90731
caacctcaagtccatgttgaagctgtccagcgtggcgaaccgctgccttgtccggatgccaaagagccggccgaagatgagcgaggtgtacgagatggtccagaagatcgtcgacagcgtcgagaccgggccgccgcagccgcctctgcactaccacggctcggtgtccgaaccaggcgcgaagcggaccaagaaagggtcgctgaagaggaggctccaggagtttaagttcgggtgccggaacatcgtgtggcggggctggaagcctgagatcgtgaagaccttctgagactctccttgctgtaagtatagctgtgcatagggatgataggtggtggttcctctgtgtgtttgccattcgggcgagttgaaaccaaccaggcgcacaaatttgccgtgtaattcacctggtcccgggcaacacaacgcgtgagctgcaagatggtgatcggtaggccccctttgtgttttcagtgcaattcctggtgttttcagtccaattacgaactgcctcgtgtctgcagtgcaattcctggccttcttttgtacttttctggtatgatgaagtcagggttctgttctggtacagcactagtgttgttctgccaaactgaagagaagaaagtgactaagtaaaaccnnnnnnnnnnnnnnnnnnnn

SEQ ID NO: 24758 - DNA, 353 bp, Setaria italica
  Peptide Sequence Number=SeqID_90732
ggaaggaagacagctaccgtacatggatgaaagatgagcgactagagaggatcggaatcaagagcccagaagatgcactggacgtcgttcacctctgctccgctgaacggatgcgtcggttttgatggatccagcagcctatctaacctgggcggaaccgtgcgtgtcgctccgccaaatcaggttacctgtattcccccttttttttgacatcatcatgcttggcccctgaatgtttctcaaatcagttaccccttgtgtttactcttcttttacagcccttgtttacttcccaagttgggaggtgccaaattgacattttgccataaatgcgacactgtagcgtttcgttt

SEQ ID NO: 24759 - DNA, 272 bp, Setaria italica
  Peptide Sequence Number=SeqID_90733
cttcccccttcttcccctcggcggcgccgccggccgccgtcgacgcggggcggtacacgttcagcccgaagctgcggtggcagccggaagtggaggagtacttcgccgccgcgtacggacgggaccgattcgcccgcatctccgaggccctcgcgcatccttctcgttattcttgtattcgtgtcaatactctcaagtcttccactgatactgtcatgcaaaaacttatggacctagtatgcgaaaatggggtctctgatggaatcaatggc

SEQ ID NO: 24760 - DNA, 2521 bp, Setaria italica
  Peptide Sequence Number=SeqID_90734
aacatcttcgctattcagcccgtccccaggctcttgagcttcatctgctagcttgtttctgtcctggcgtcactctggaaagctaaatcatatatttcaccgtatgtgtcaacaaaatgaacctcgaggccttccttcacattagaagcaagttcatcaaagtcccttttattagctgctggaaatatgagtgtcttgatcgcacttctccttgcagcgatggtcttctcttttaccccgccgattgggaggattctcccagttaatgttacttcaccagtcattgcaaggtccttcttgacaggctttcccatggctaaggacagcattgatgttatcatggtgcatccagcactagggccatccttaggggtggcccctgcaggaacatgcaagtgcactttcgactttgcaaaaaattgattatctggctctttctccagtaatatagctctgccaactgtttggcgcaatctgagcactctctttcatgacatctccaagctgccccgtcagcacaagtgcacctttcccttccccttcctccacttttgttgtttcaacgtacaaagtagaaccacccatagcagtccaagctaaacccatgaccactccaacaggagtctgttcatatatacgctctgcctggaaaacaggtttcccaacaaaatcaccaaggtttgatgaatcaaccacaaccttctcgattgccttgtctgccccatcttcttttgctccatctgtgtccttgccctcggatacactgtcttctttgggtgcttcagttgtatgcacttcatgaagtactgcttcagttgtatgcacttcatgaagtactgcttcttttgccaaatttgcttcattagcttccacagcagaatccttcaaaatctcatcttttgctatggcaccatcaccactactaggttcctcatttgctgtgacaatgagagcctcctggtctggctcatttgataccccttggcgaacaagctgcagagctatcttacggtaaattttctcaatctgcttttgaaggttccgcactccagcttcgcggcagtaattttcaataagggcaagaagagctgcatctgtaacttcaacctgttcaggcttaatgccacaagcctctcttgtattcttctctagatagtcccgagcaatatgcatcttctcatcagttatatatccagctattgcaatgatctccatcctatccagcaatggatttggtatcatctctataacgtttgctgtgcaaacgaacagaaccttagataggtcaatagggacatcgaggtagtgatctaagaaattaacattctgctcagggtcgagaagttccaacaatgcactagctggatcgccagaatgccccctcccaagcttgtcaatctcatctatcaaaactagaggatttgctgtcccaactgatttaagacattgcaccatctttcctggcattgcaccaacatacgtgcgtcgatgacccttgatttctgccacgtcagccaaacctccaacagaaaacctgtagaattgacggttgagtgcacgtgcaattgaacgaccaatactggttttaccaactccaggtggcccagaaagacatatgatcttgccttgtgaagtccctcttaacttcccaactgctatgaattccagtattctctctttcacatcactcaaaccataatggtcttcatcaagaatttctgagcatggtggacatcgaagttttcatcactataatttccccatggcaatactgtcagccagtccaaataattacgagttacattgaactcactagaactggcttccaaaagctgaagcttggtaagctcttcttcaatgacttgaagaacatgaggaggacacttgtccttctttgattctatgcgttccctaaattttgcagacagtgctgttttgtcatcagtctccaagcccagctccttcttgatcgccttaagttgctcgttcaataagtaacgccgctgatctccactaatcttttcttcaattgcttttgctatggattgctgcaacttactaatctccatttcctttttcactaactcaagagtcaacttcaaacgcttatatacatctaattcctcaagcacctcctggcaaagcaacttgttggcaccagagatagcagcaccaaagtctgctaaccttgggtagttaaaatcaccaatgtgctgtgtgtaggtttgcacatgatccttccaaagggaacttgcccttagaacttcccgtaaagttgatataacttcgaatgaagtagcttttataacatcgtcatccttgttatagggattttcctttagatggtcaactttaactgttagtggatcctcttcgaccatctcagttatccgtaatcgccggtgaccaagtagcactacctgatccccctgaatgcttgtaatctgagcaagcgtcccaacttcgtgaagacgcttaagcaagtctttccctttcagatcatcaatgcttttctctgaat

SEQ ID NO: 24761 - DNA, 408 bp, Setaria italica
  Peptide Sequence Number=SeqID_90735
tactactgcagtcttgacaggtcccattggtggattctcagggaaactcaacttaagcattccatggaataaggggtgcttgaactttgagaaaattgatgcagatgtatccgttgattcattagagttacggttacaaataagcagtatccggtggatcatgaatgtatgggattctctccaaagaaagccagtagacgaacaaaattccgctcataatgctgcagatatctctattagctctttcaggtctaccttgtgttcacctgcatcaagctctttgaaatcaggttcagattctgtgataggcaccagcgaatgcttggcccatagcacattttctcaaaagcaggcaagagaaaattcaggattctttccttacaagggcatatgtaataacagactgga

SEQ ID NO: 24762 - DNA, 218 bp, Setaria italica
  Peptide Sequence Number=SeqID_90736
atcctggaggcctacgcctccgacgaccgccgccacctcgactacagccgcatcgccgccagcgaggagttcagaaggtacgcgaacctggtgcaggagctccagcgggcggacatgaccgcgctcccggcggaggagcggctgccgttcttcctgaacctgcacaacgccatggccatccacgccgtgactccgggtcggccagccgaggggccgtc

SEQ ID NO: 24763 - DNA, 328 bp, Setaria italica
  Peptide Sequence Number=SeqID_90737
gaggcggcggcatagaggaggacggagtagggccagcgcgccccaccacctctacggcggatgacgccgcctgggactccgcctccggccgcggcggaggcggcgagggattgggaggcggagggggcggcatggaggcggaggtggggttcggaggcggcatagaggtggtgagggaggggttaggatttcgctgcggaggcggaggcctggaaggatccatggctgcggctgcggagcggagggaggagagagggagacggcggcgagttgtaggatcggggcggggcggggcggggccagcccgggaacggacggcccgaccgcc

SEQ ID NO: 24764 - DNA, 381 bp, Setaria italica
  Peptide Sequence Number=SeqID_90738
ttggtccagtgttcttggcatgttcctgagatcgaagatccaggagatgatcctgagaaggaggtccaggtcgatgaacagcggcgccgccgcgcagcggggccacgcctccgatcagctcgcgagctcgtcgacggttccatgcgccggccgacccgtgggagatggagccgtcgtcggaggactacacgtgcgtcatctcccgcgggcccaaccccaggacggtgcacatcttcggcgaccgcgtcgtggaggccggcgctgcggaggccagcgccgcggagagctcgccgcggccgatcaacctgccggcgcgcggcgaccggggcttcttgagcctgtgatcgatcggcgcctgcctgcgtagtctgtttgatgcct

SEQ ID NO: 24765 - DNA, 1192 bp, Setaria italica
  misc_feature (1123)..(1192): n is a, c, g, or t
  Peptide Sequence Number=SeqID_90739
taggtagacttagggggacttagacaaaggcttgctggttcttgctagctgctgcttcttggtcatcgaactgaagagtgctgtgcagttggtcttggtccagtgttcttggcatgttcctgagatcgaagatccaggagatgatcctgagaaggaggtccaggtcgatgaacagcggcgccgccgcgcagcggggccacgcctccgatcagctcgcgagctcgtcgacggttccatgcgacggcgacagcgccggcgccggcggcagaaagagtgccactgcgcgtgccctgttcgcctccccgaggctgttgcactcttcctccctgcccaccggcaccgtcttcgccaagggccccgtgccggacgccgagtccgagacggccttctccatgagcccgacctccgtgctcgacgcggcggcgtccttcaggtccggcaccgacgccgccggcagcagcaggcgccggccgtggcgggacaacgccctgcacggcctcgcggacgcgctggactgcggcgaccagcagccggaggggatcgtcctcgccgcgacgtcgccgtcgctgctggtcaggtcgtgctccctggaccggcgcgtcgagttcggcgtcaagaacaagagctcgtggctgcccctccgcgcctgcagcggccgcgaggccacgccgccggcgccggccgacccgtgggagatggagccgtcgtcggaggactacacgtgcgtcatctcccgcgggcccaaccccaggacggtgcacatcttcggcgaccgcgtcgtggaggccggcgctgcggaggccagcgccgcggagagctcgccgcggccgatcaacctgccggcgcgcggcgaccggggcttcttgagcctgtgatcgatcggcgcctgcctgcgtagtctgtttgatgcctagtaggtaaagaaatttgagtctgctgagtgctattattaagttcagccttgatgttgccgtattgtattggttgttcttcagtctgatcagatgatcatagatgttttgttgatcagatgatgtgctagacgttttgttcaggttgagctgaagctgtcatatatgaagtaatttcatcatgctgttacaaagacaaaaaaaaaaaaaannnnnnnnnnnnnnnnnnnnnnnnnnnnnnnnnnnnnnnnnnnnnnnnnnnnnnnnnnnnnnnnnnnnnn

SEQ ID NO: 24766 - DNA, 276 bp, Setaria italica
  Peptide Sequence Number=SeqID_90740
gtcggggtcagcgaacttgcaggacagccgaggcattaacacaggcaccccgcgcgcgcgcccgagcagccggagccccaatccgctcgccccgcgctcatagagtgcgcgcaggtgatcaggaatcggagcacggggtccacgccgatgaacgaaattccaccaccactagattttttacagccgccctagagggaaggggatgagatttggtgcggcttcccggtgtggggttggggggtggtcgtcgtcagtcgtcgtgcgggaagggaaggg

SEQ ID NO: 24767 - DNA, 502 bp, Setaria italica
  Peptide Sequence Number=SeqID_90741
aacaagatccctctttgtattacgcatgacctaggctagcatcttacagcaccaaggaaacatctcgggcgacgcatcacgccttccattgcctgcctctttgaggcgaagagatggcggacgaccgagagcttgcttgtcgcgcgcgaaacgagcgaggagccagaggagctcctactgctcagtgaagaccttgtttcttctgattcctcgtcttcatttggttctgaaggtggtggaggaggtattgtcatgaggaaagtttcaagcatccggatgatctggctgaaactgggtcgcatgctaggatcctcgacccagcatgattgtactatgaacacaagttcctggggtgtatcctcaggaagtgttggccgcttttgctgttcatatgagcaagagacagtattattcacaccagtagactgcaatcagaaagtaaagtacactgcaagcacaactgataataatgtcaaaaatggtaatctggtaggagttcatg

SEQ ID NO: 24768 - DNA, 580 bp, Setaria italica
  Peptide Sequence Number=SeqID_90742
catgttctaaggattacaagataaagtggaaccaattgttaaaggttggtgttaatgttatgcaaagcagttggataatcctatgatacatgctatgtggaccagttggattatgttatggcatctggttcgtcaatttgatgcatataatggtcaaacaaacatcgcagacacatcatgaaaacaaaaggttaataatttgcaattgcaaaacttccttccatgacaataataaattcaaaacattgcttccttggaatcaaatctttgccatttcatctttaacattttagccttcacactttaggtagccaagcaagtctttcagtgaggaataaaaaatacaagcagttaagtaactactaagtagtaagaggctagcagcttcacccacaaaaggaggcattactaacttgtgcaagtatgggcagcaatagtttcatgcttacctgaaaagcagcagcatatgcagcttgtagatttgacatgccttcgaatggcatcctattggtcaacaattcccacaaaacatgccaaagctgtacacatccactttatttgtgtaatgctttttctcacc

SEQ ID NO: 24769 - DNA, 1969 bp, Setaria italica
  misc_feature (1822)..(1822): n is a, c, g, or t
  Peptide Sequence Number=SeqID_90743
taaaaactaaaaaaggtaaaacttaaaactaaaaataaagtaaaataaacgaagagcaagcatggacaagttacagtaaagcagctgcgagctatacatagcttgcaaaagttgcgcttcaactttcctttgtatcatcaatacaacagctactctacaatgaacaagatccctctttgtattacgcatgacctaggctagcatctttacagcaccaaaggaaaacatctcggggcgacgcatcacgccttcccattgcctgccttctttgaggcgaagagatggcggacgaccgagagcttgcttgtcgcgcgcgaaacgagcgaggagccagaggagctcctactgctcagtgaagaccttgtttcttctgattcctcgtcttcatttggttctgaaggtggtggaggaggtattgtcatgaggaaagtttcaagcatccggatgatctggctgaaactgggtcgcatgctaggatcctcgacccagcatgattgtactatgaacacaagttcctggggtgtatcctcaggaagtgttggccgcttttgctgaaaagcagcagcatatgcagcttgtagatttgacatgccttcgaatggcatcctattggtcaacaattcccacaaaacaatgccaaagctgtacacatccactttatttgtgtaatgctttttctcaccacgtcgaagtgtgactgtgctgtatagctctggggccatccatcggtaagtcccagtttcagccgtcatcatttcagtcacagtttcttcacgtgcaagtccaaagtcagtaagtttcagcttcttacggtttgctgtaagcaataaattatcaggtttcaggtctctatgtataatgccattggcatgtaaacagtccattgcatgagctatgtctagtgcatagccaattgcagtgtgtgtgtctagttggctaggacgaatgctgttcaggtaatttttcagtgacatcccaggtagtagctcgctaacaatcaccatcaatggttccttgcaggctccaatgaacttgacaagattctcatgtttcactttgcacatcatatttacttctcgaatgaaacgggcttcaagtgttgctttttcttcaggagtactgccacggttaagaacctttatcgctacaatttgatcaccatactttcccttgtagaccttcccatgagctccctccccaatcttgtccccaacgaacagcatcttgggatcaacaagcagcttcctctcgatccaggacgccggcgccatggcatccgagctccgagcgggcgccgccgcatccgaacaccgtgccggcgccaccgaatcatcagccgcgaccttgctgggccgcggccgcctgaactcgtcgctgccactgctgccgccgtcccggcacccgtcgctgccgcagctcatcgtgtctggccgcacgcggcgcgccgcagcagcagccgccgcggaggaggaaacgacgttgtcggggtcagcgaacttgcaggacagccgaggcattaacacaggcaccccgcgcgcgcgcccgagcagccggagccccaatccgctcgccccgcgctcatagagtgcgcgcaggtgatcaggaatcggagcacggggtccacgccgatgaacgaaattccaccaccactagattttttacagccgcctgatgaacaaacgacggcaatttttgaatctttttcgcacagaaaccacaatattctttcagaaaaaagcaaaattacagcccaaactcactccgaagcactaatcgcctcagagagccgcgattcttacccaaaaaacactcggaaaaaacngagaaatcaccaaaataaacgaaatactgattttccaaaacaaactgaacggaaagcggtggtttgaactcaagaaatgcgagaaattacaccaaaattcagtagcagaggcggaaccctaaccctagagggaaggggatgagattt

SEQ ID NO: 24770 - DNA, 1036 bp, Setaria italica
  Peptide Sequence Number=SeqID_90744
tggagtctggagcctggacccaacagatagatagagggagagagagagctgcgacagccgacggcatgttgctgcttcggagaagagcggctgccgctttgctcctcgtcttcgcggcggcggcggcgatggaggaagcgtcgtcgctgccggtggtggagccgatggagctctacttctcgcccgcggagctggcgcgcatcgcggggtacggcgaggagcccgtgtcgtcggtgtccgtgtccgggcacgtcgcctgcgagctctgcctccgccccggctccgacctcctcgccttcgagctgccaggtgctaaggtagctgtactctgcgaaaccgagtgtcccaatgatcaagcggccaactctgcacttgcaacgactgacgaattcggcaacttcacaatagatctcccttcccagctccacgccacagcaaatctggagagggcctgcaccgtgaaggtgctccagctcccggcggactcctcatgccgcctccgccaccaacccagcacaacctatggcctcatgctagcctcccaagaagatggcgttcgagcctacaccacgggggtgatacggctacaaaacaatgatacgccgcatggcaagtgtgtgagtgtagaggaaagaactggaagaagatgaacaattgaagcaggaatcaagcaatggcggcgtgtgaaatgtggagttcacgtttgcatgaactttgaagaggaagaagctaaaaatttgaggaagacaagttcactggcctctagtatagctgagttaagcatgtatataaatggaggctgatatgtgtgtgtaaatcttagcaacgacaaatgtgcaggaatcagagggttcatcttcagaagagttcttgacgaggagtgttcagtgtacagtactatagcaacaaggaaagccacgcgtttgacaaataccgcagattacctacacaacatgttgtgttcataatttgccaatttaatacaaataggaaagttagtaacaaatttaaggtaaaccgaacgaaagaaaaaaaa

SEQ ID NO: 24771 - DNA, 309 bp, Setaria italica
  Peptide Sequence Number=SeqID_90745
atcaaaacaaacatagttcaaaagggaaaaggccattatattacctcaaacttaagccttttttgtttcgcaattctcatcatacatgttgtgttttaagttcaattattgttgggtgataaatggcatcaaattctatgttacaaaatatttttaagttatttcttgattatacttatgcagtttcatatcttaagattaatccaatccagattctccaaacctatgaaataaacaaagaaattcttaaaacacttttgcatcaaaggtataatgtcatcaatcatcccataaaatttcaacttaaaa

SEQ ID NO: 24772 - DNA, 267 bp, Setaria italica
  Peptide Sequence Number=SeqID_90746
gtcctttccgtttactgcagtcaaccttaaacggctctttggatgctatctctgctggaatctccttcacaatttctacatatcctctggtctgctcaatgaagtaatcaacatcgaaaacatctgcaaagccactagactcattccaataggcggcaacctcaaacttgggcagaaccatcgtcgcgttcaggagacgtgcaaccccaattccatcgcatagatcacgtcgcagctggttgagcccgccgtagcagtcgattctca

SEQ ID NO: 24773 - DNA, 252 bp, Setaria italica
  Peptide Sequence Number=SeqID_90747
gcggcgtcccccacctcgccgatctaacggggaacgcggagaggcttccccgctccgccaccgcgccgctgctccgctctgggagtgcgccgccatggcatccacgtcctcctccaggtacgcgaagcaccgccggatcggggaggacgaagagacggaggaggacgaggaggaggccgaagaggagcttgaacggttcgatgatttcactatcgcttcatcatgggaaaatttttatctgagatagaggcc

SEQ ID NO: 24774 - DNA, 244 bp, Setaria italica
  Peptide Sequence Number=SeqID_90748
gggcgataggatggctgtactgttggttggaagacctgtgcattgtcacttggcctagggatcatgttcgaagagttccctgccatcgatcgctggattactagagcattgttagtggaccttgccactgtgctcaaagtactccctgcagtcgaaccaggtgttccattaaactggtctgctctcatggaattcgaattagaaactccagattcaggaggtagtgttggtttttaatatctca

SEQ ID NO: 24775 - DNA, 390 bp, Setaria italica
  Peptide Sequence Number=SeqID_90749
taagtaagaactaagtaagaacaagaccttaagtagactaaattgcaggctcctagaggataattacctttgtctatcacttccaagcaagcatgattagaggccatgtgcctccttccttgaaagcctacagcagtccaaccaatgcaccacctttcagtgcatttctttactgatcctgctgtcctcttctgcctttgatcagtttgttaatccaacttgcagcaaggttacaatctgcaagttcttgagggggtgaatttaataaagggcatgcaggcagcaaaatccattgacattctggggaataacagcctttttactggtgtggggggaatccctgcattgtttatggatccaatggctaccctcccagatgtgcttttaagc

SEQ ID NO: 24776 - DNA, 923 bp, Setaria italica
  Peptide Sequence Number=SeqID_90750
gacggcgtgcagggcgccgaaggagttctcctccacgacgagcgacagcgacagcacgtccactccgtcgtgtatcgcatcatcgatggccgcgagcacggtggccgtgttgccggacccagccccgcggccgctgccccagacagacttgtacaccgcgatgcgggccctgggcgcgccaccacgcgctgtgccggaggcaaggccgtggaagcttgccgcctccacgaccgagcccgccgccgtggacgccgtgtgcgtgccgtggccgttggcgtcccgcgccgagaggtaatcgctcttgagctcctcctcggccacgcccgcgtggtagaaccgcgcgccgatgatcttgcggctgcagttgctgcggtcccagcccaccccgacctggcacacgcctttccaccgtgacggcaccggctcgtagccgtcgtcgctgaagcttctcgactccggccaaattcctgtgtcaataatcccgatgatggtgtcttctccatatctgcttctgtggagaagatcggaaggcactttgtcgtttaggcccagccccaggaagtcccagcttcgtgtggtcgtcgtctggtacctcctgctcggttgcacactgatgacttccggcaagtctgcaagttgctgtgcttgctctttcgtaagcatggccgcgaagcccgagaatccatgcttgtagctatagatgatggaatctaaaatatcttgtttactttcaagaacgcttgatagtgtttcatggtgcgaggcaacgacatgatctgggtgtccatgcttcctttcgcccaggtatgctacgtacagcttcttacgcgatgcgtgcacttcgacttgaagcgtgcaaaagcagagcagaagcaacagtggagccaaacgacggtggtaagaagagggtgtttccatccccg

SEQ ID NO: 24777 - DNA, 651 bp, Setaria italica
  Peptide Sequence Number=SeqID_90751
gttcagcaaacatgctgctctcatcctcaaattgtacataaccaacttcctttctcttggttggcggccgtcctcgcccccttcctcgacctctcccacgtcctctagggctgatgttcacgcttcttatggccattttgctggatcttgattcatcattctctgggtcactgccatttgactttctgtaaaatgaatttcaatcaagcactaataaggcacttgttgcagtgagtcatgaatagctgattataacaactgaatttaccttcttctaggtaaccctctttcatccccacaagagtctgcaccaccaaggtctggtaccttgttgacaacttctgttaggaaatcaaaagaactgtacctcttcacacattgcttcaggtagaaggaattcagagtctttgcaccactttgaagagtaatttcatacgtcctgtcaattaaatcttgcaaaaacaattcaagagcccttgaaactaaaacaggcactgctagtgcaatcttgccaaagtcctcatctgcttgcattatctttttgatccgagccgcggggaaccgggtgccgagcttcttcctcatcttcgccgccggagatgggcggaggacggcgaagagcgccatgggacaggacccgtctttcttctt

SEQ ID NO: 24778 - DNA, 283 bp, Setaria italica
  misc_feature (279)..(279): n is a, c, g, or t
  Peptide Sequence Number=SeqID_90752
tgtccctttgtaaacttaatactaggtctacttgtctctgctagtgcaatcttgccaacgtcctcatctgcttgcattatctttttgatccgagcctgtagcgggtccagatcacaccaaacagcccggttagccagtcaccactagccagcagaactgattcagtgggctgcgagacccccgcaaatctctccatccttacaccaccaacggaagccctccctccctcacccacacatcacgaacagagaaccagccgcagaaattcccagccccctnagtt

SEQ ID NO: 24779 - DNA, 1612 bp, Setaria italica
  misc_feature (1)..(28): n is a, c, g, or t
  Peptide Sequence Number=SeqID_90753
nnnnnnnnnnnnnnnnnnnnnnnnnnnnttttttttttttttttttttttctattgaaaatgacaatatataaaaagtcaatcccctgctgaaataccgagttaaatatgacaaaacacttaaatattcaatcatgtaaaataagaggcaactaccaagcaattattgggaaacaaaagttacacaggacaactacataactgcatcgcgtcagcagcccatcacagctaagctgcggcaactactttcaaactatatttacattttacaacaccagaacagtcctgttagtgcatacaatgagaggacgaccatgactaatcctcgttgtcgtagtcctcatcctcatcaacctgcaccgtcagatgtccaaaaccagatggcccgacgccgatgcttccaatggcagcatctggcattggccaatctgactgatggtcggtgtttgcttcttccaccttagaacttgtgcctggcacagctgctggcaggggagcctcttgtggaggttgtgcgcttgggggtatgttctcgttgttatggttgctctctggaactgtttcctctcctggtaaaggttcaccttgttcagcaaacatgctgctctcatcctcaaattgtacataaccaacttcctttctcttggttggcggccgtcctcgcccccttcctcgacctctcccacgtcctctagggctgatgttcacgcttcttatggccattttgctggatcttgattcatcattctctgggtcactgccatttgactttcttcttctaggtaaccctctttcatccccacaagagtctgcaccaccaaggtctggtaccttgttgacaacttctgttaggaaatcaaaagaactgtacctcttcacacattgcttcctgaagataaaaaagataaatatagagccattaggcactaatcactcaaagtttaaacctcaagcataaagtaatcgtgaatacagagataaaacagaaacaaaatctaacatgaaggaacaggtgaaatcataagccacaacgcaacaaaattttaagaaaaaggagtttgatcaaccatctagatacatttaaagatggaattaacttgcaagaattcagaagagcccatatttgcctatgagatgaggttcagctcagtttcagtagagtaggatatcctctacaaatttccttgagctcaatttccagaaaccacactatagcactatatacattgtaaacaaaaataccagtatacaaattggttaccaaaccaacctgatttcatgttcaaaattcagatcttatttgaagtgagacttccgctgaaagcgatcagtccatcgcttccttcagaggtcagacaaaaacattagttgaatctaacttgagtaccttatgttttccctaaacaaattagttggccataggcagggaccgaccagttctcgaaccccacctacagatattataaacattaacttagatagcagctactttttaaacagtgcactcttttaaatcaatgaattcacacaaaacgccatatgcagtggtacggaaagtgccatagttatatgaggcatgagttatatccaacaaattattggtaacttctatt

SEQ ID NO: 24780 - DNA, 811 bp, Setaria italica
  Peptide Sequence Number=SeqID_90754
aagtaagaaacgaaacttaagcgctttggggtatattgtttcttcgtttgttctcgttgttatggttgctctctggaactgtttcctctcctggtaaaggttcaccttgttcagcaaacatgctgctctcatcctcaaattgtacataaccaacttcctttctcttggttggcggccgtcctcgcccccttcctcgacctctcccacgtcctctagggctgatgttcacgcttcttatggccattttgctggatcttgattcatcattctctgggtcactgccatttgactttcttcttctaggtaaccctctttcatccccacaagagtctgcaccaccaaggtctggtaccttgttgacaacttctgttaggaaatcaaaagaactgtacctcttcacacattgcttcaggtggaaggaattcagagtctttgcaccactttgaagagtaatttcatacgtcctgtcaattaaatcttgcaaaaacaattcaagagcccttgaaactaaaacaggcactgctagtgcaatcttgccaacgtcctcatctgcttgcattatctttttgatccgagccgcggggaaccgggtgccgagcttcttcctcatcttcgccgccgccgccgctgcctcgcctcgcctccggctcgacggacgctatcgtgtagtctactctctctcttaattttttttctgctgcttttttcttttttgaaggcttggtactctaggcttcacttaccgtagctcgcttccaccacgacgactaatacgtaagtaaagtaactaaactaactaactaactaacaa

SEQ ID NO: 24781 - DNA, 318 bp, Setaria italica
  Peptide Sequence Number=SeqID_90755
aatccatccatccatccattcatcaaaattccaaattccttgtgtggcacaaattactcttggccttccaatttctaatggtagtaaacttctactctcatcttatggcgtcgcgtttcaatttccttgagatcacaaagctaaagctaagctcgactgaagaaaaactgaagcaaacaaagtagccggcttgagcaagatgacaactaactgggctcgtaaagaggcgtcgatgggcacacgcatcggccaatcagtcgtcggatgctgccgaagaggaggaggtggggtcggcgaggtaggcgaagcgcgcggcgg

SEQ ID NO: 24782 - DNA, 1235 bp, Setaria italica
  misc_feature (1228)..(1228): n is a, c, g, or t
  Peptide Sequence Number=SeqID_90756
ggccagctgccgacctgccgcgccccacccccaccccaccaccgctccacgccgcgcacgaccggcggcggcacggcgtccggtccggcgggtcgagttgagtacttgagttgagccggcggcgcgcggggggcgatcgcgtcggctacggcctccaggtgggtggatccgtcctcgctccgggtttctcgccggaattgctcgttgccgcttgcccgcttccgttctcgttcccggtgcgatctgcggcgtgggcgctgagaaagctgcgtgatcttccgcaggagtttgatctgatcgggcggccgttctcggatttgaggatcccgattcggtttgcgcgacggggtgtagccgcactcttttccttgtccccgtttggcggctcctcacgtgggatttgactgaaggaattggttttctccatctcgtgtcgaagtggatttggtcaaagtcaggccgactggaagggaattttcctggtttggtttggatttggcttcggcaaagggtcgaagcggaaggtggttggtcattaaatcgccgctgctgaactcgctgctgttgcgagacctgttggatcgaagagcagttcactgtgccgtcccgagagtagcagaacaagaggtttaccgttacagtgggaggtctctgctgtaagtgctggtttctgttgtttgagcccaatcttatccaaaatttggatttttggggccacaagagtataccaaggcatcaggaatcgcgtttgcttcaggaagacgaattgttcagctcgtccttttgttggtgggatcggagactagaaccctaggaaaatgggggtgatgtcgcggcgggtgctgcccgcctgcagcagcctctgctacttctgcccctcgctgcgggcacgctcccgccagcctgtcaagcggtacaagaagatcatctcagatatctaccagctgccaccagatggagaaccaaatgatagaagaattgggaaactctgtgattatgtctcgagaaatccaacacgcataccaaagataacggagtatcttgaacagagattctataaagatttgaggcatgagaatttcactttggccaaagttgtgccctgcatctatagaaaacttctctgctcatgcaaggagcacaggccattgctagccacaagctcattaagcaccattcgcactcttcttgatcagaaagcacatgatgatctacgggttctgggttnttacggg

SEQ ID NO: 24783 - DNA, 421 bp, Setaria italica
  Peptide Sequence Number=SeqID_90757
aagaaataaacgaataacaaagaagggaggaagaaagactacccgcctgaaggaaacagaagttcttaggaagtttgatgaacgtttaggaaggctgagctttggtctgtgggttgtgggttcacttctctctgagcttatgattgctccctccactctatttgaggctgttgagagaatatcgctgagcgagaacttgtttcccattggtgccaatgatgatggtttctgccgtaataattctttcttgataaaggtcttggtcttctgttttgcattgatggaccgagcgaaaggaggaagccttacctcaaggatggttattgccggttcttggttagctcctgctcctgtatcatccacactattagctgcaacagcgagcaagctaccaatgaaaggcagtggtatgcacctgttg

SEQ ID NO: 24784 - DNA, 527 bp, Setaria italica
  Peptide Sequence Number=SeqID_90758
ttcctttgtttttgttgtctactactagtccagaggtgtagaagaaatgcttaaccaaaatacaatgcaacgtgtaagaacatgaaaacgttggtaatgccacaaccatttgcacaacctgtaagcatccaatctaagtaaccgatatcaattgtaaactgtctaatggtgaggtggtcctttgcttttctgttgcatgtccatgtagtattctgtgatcttctgaagaaactatgctcaaattgttgctttgcttgccaagctttgtgatcttatggagatgcaaatgatttgcctttgtcaatttgattgaacgatattgggactaggacctcgggatttagtataagtagtttaagatactgaatcttttgttgattacttagaatgactttcaatattatactgcatgcagcttcatattatcttgctattctgtagagcttggtttgtgtcaaactgatgtttttccccctctgaactagcatcaagctgaagtgagatggatctcttttatcaatgtaagg

SEQ ID NO: 24785 - DNA, 318 bp, Setaria italica
  Peptide Sequence Number=SeqID_90759
gtcagcagccggatgcgcgaccgccagaccttctgcgccagccggagcgtcaggaggaacgcggcgaggatgaggatcttgacgacgcagtcgatgatccagtacagggcgctcttgtccacctcatatgacggcggtacggcggctccgccgtcgttgccggcggcgatgcgcgcgaacagcgcctccgcgccggtgatcagcggcacgctgtacccgaccgcctgcacgcccagcatcaccagcgacacgtacggcatcacgtcggtgttggccttgatgtacatgagctggctgaactccgcggcgatggccgcc

SEQ ID NO: 24786 - DNA, 331 bp, Setaria italica
  Peptide Sequence Number=SeqID_90760
tcctccgctatcgcgccgttttaccgggaggcccctgctcgccctcgctatttacagccctccccccccgcacctctccgccgccgccgccaccggggatggggggagcgcacttccccggcgacaacgacgccggcgaggtcgacgcggcctgctgcgacggggaggtcgacctccgcgacgtggggaagatggagcacgggtgcgagcattaccggcggaggtgtaagatcgtggcgccctgttgcaagcaggtgttcccctgccgccactgccacaacgaggccacggtttcaggagatcggcatacagtatgtcgccaagatattag

SEQ ID NO: 24787 - DNA, 402 bp, Setaria italica
  Peptide Sequence Number=SeqID_90761
tgtgtccacagttaagaactcgtgtaatctgttatgagtatctattcgattcattacaaggaacaagagttcttaactgtggacacacgatgcacatggaatgttttactgatatggtgaagcataacaaatacacttgtccaatatgctccaagacagctcttgacatgtcacatcactgggagatgttggatcaagagattgaagcaacaatcatgcctcctgtaatggcttgcaaactgccagaatcaaacaaacaatggtagtaacctcagaagctagtatgtgtattcttgttctttgaggaaacttttcctttcagatgaattgatacagtaaaattgttgttggttggattataaaaagtcagtctgcaaatatatgtgtgctgtacttttctaa

SEQ ID NO: 24788 - DNA, 774 bp, Setaria italica
  Peptide Sequence Number=SeqID_90762
tttttagtttttttttttacctttttaactttttagttttaaaaatttttaggtttactttttagttcggaaaactttttccactgtgtgaagtgtgggtcttgctattctgttgcactgcgtgataaccatcaatgtgtggagaactcaatgagacagaattgcccaatctgttatgagtatctattcgattcattacaaggaacaagagttcttaactgtggacacacgatgcacatggaatgttttactgatatggtgaagcataacaaatacacttgtccaatatgctccaagacagctcttgacatgtcacatcactgggagatgttggatcaagaggtactatgtttttttccctactgaaaatggcttgcaaactgccagaatcaaacaaacaatggtagtaacctcagaagctagtatgtgtattcttgttctttgaggaaactttcctttcagatgaattgatacagtaaaattagttgttggttggattataaaaagtcagtctgcaaatatatgtgtgctgacttttcaatgttctgggaagctatattctgcttcttttttagcacttgctgaattactgatggtatgttattattttgtagattgaagcaacaatcatgcctcctgtatatcgttacaagatttgggtgctttgcaacgactgcaacaaggtctcagaggtgaacttccatgtgattgggcacaagtgcagccactgcaactcgtacaacacccgcttcgtaactaattacgtacgtacct

SEQ ID NO: 24789 - DNA, 515 bp, Setaria italica
  misc_feature (84)..(84): n is a, c, g, or t
  Peptide Sequence Number=SeqID_90763
acaggaacaagagttcttaactgtggacacacgatgcacatggaatgttttactgatatggtgaagcataacaatttgtatcanccttttgatgctacagatacacttgtccaatatgctccaagacagctcttgacatgtcacatcactgggagatgttggatcaagagattgaagcaacaatcatgcctcctgtatatcgttacaagatttgggtgctttgcaacgactgcaacaaggtctcagaggtgaacttccatgtgattgggcacaagtgcagccactgcaactcgtacaacacccgctcgacatcgcgccctgtggattcgtcaggaaacagctcaccgactacagactcgtccgacaacaacctgtagagcattcttggtgccagcctacacctggcataaagaaaagacaaacgacaaagaaaccaataacgaataagaaaggaaaggaaacaatttagtttacgtacggtaagtacgtactattactatactaaattatactaa

SEQ ID NO: 24790 - DNA, 589 bp, Setaria italica
  Peptide Sequence Number=SeqID_90764
tgctttgcaacgatatacaggaggcatgattgttgcttcaatctcttgatccaacatctcccagtgatgtgacatgtcaagagctgtcttggagcatattggacaagtgtatttgttatgcttcaccatatcagtaaaacattccatgtgcatcgtgtgtccactgtgtgaagtgtgggtcttgctattctgttgcactgcgtgataaccatcaatgtgtggagaactcaatgagacagaattgcccaatctgttatgagtatctattcgattcattacaaggaacaagagttcttaactgtggacacacgatgcacatggaatgttttactgatatggtgaagcataacaaatacacttgtccaatatgctccaagacagctcttgacatgtcacatcactgggagatgttggatcaagagattgaagcaacaatcatgcctcctgtatatcgttacaagatttgggtgctttgcaacgactgcaacaaggtctcagaggtgaacttccatgtgattgggcacaagtgcagccaactagcaaactacgtaacaaacaacccgactacgaacaatacgacgaccctaga

SEQ ID NO: 24791 - DNA, 1506 bp, Setaria italica
  Peptide Sequence Number=SeqID_90765
gttttaccgggaggcccctgctcgccctcgctatttacagccctccccccccgcacctctccgccgccgccgcctttaacgtttaaggtttacctttaacctattctaattgttgttgagtaacttctaattgtagtactagtaatttgtccctaagtcttgtttaccggggatggggggagcgcacttccccggcgacaacgacgccggcgaggtcgacgcggcctgctgcgacggggaggtcgacctccgcgacgtggggaagatggagcacgggtgcgagcattaccggcggaggtgtaagatcgtggcgccctgttgcaagcaggtgttcccctgccgccactgccacaacgaggccacggtttcaggagatcggcatacagtatgtcgccaagatattgaaaaagtagtttgtctactctgtgatactgagcagccggtgtcacaagcgtgtgtaagctgtggagccaatatgggagagtatttctgcgatatatgcaaattttacgatgatgatacagagaaagggcagtaccattgcaatgattgtggcatatgcagggttggtggcaaggaaaactttttccactgtgtgaagtgtgggtcttgctattctgttgcactgcgtgataaccatcaatgtgtggagaactcaatgagacagaattgcccaatctgttatgagtatctattcgattcattacaaggaacaagagttcttaactgtggacacacgatgcacatggaatgttttactgatatggtgaagcataacaaatacacttgtccaatatgctccaagacagctcttgacatgtcacatcactgggagatgttggatcaagagattgaagcaacaatcatgcctcctgtatatcgttacaagatttgggtgctttgcaacgactgcaacaaggtctcagaggtgaacttccatgtgattgggcacaagtgcagccactgcaactcgtacaacacccgctcgacatcgcgccctgtggattcgtcaggaaacagctcaccgactacagactcgtccgacaacaacctgtagagcattcttggtgccagcctacacctggcataagaaagcaacgcaagaaccatacgatagaaggaaggaacattgtttcgcggagcgcgatcctgccaaatgccaagaccccccgagccgcttagctctcattctgtcaagattcaattcattccttgaatccacggctgttgttgactcccagctgccacattgctgccctgttctacctagacgaacagcatggccgtctcctgaacgccgccattgtatcagcacttcagcagtgggtgaagtggaacccagcatgttatgaatctgcttgatatactgtctgtaacctatagtagtaagaagaacatgcctgtctgttgtttacttggtggttgtgtgcctgactgcctgtgatggtctgtttctgagaattgcagtcctgtctggtaagactaaaccatgttttatgaaaaaaa

SEQ ID NO: 24792 - DNA, 249 bp, Setaria italica
  Peptide Sequence Number=SeqID_90766
gacggagggggaagaggagaaggcttcaaccggcaagccgccgcccttccctctcttgtctctcgatctccgcgctaatgcggccgcgagcgccacggggaggcgcccagcgcggtggtttaatagggggccaaaggaggccacgcgaaatgaacaaacggggaagacaaggccggggaagaggaaaagttttcgtcgccaactctactaattcctctattctcatctcgatccaaaaggatcaaacag

SEQ ID NO: 24793 - DNA, 338 bp, Setaria italica
  Peptide Sequence Number=SeqID_90767
gcagtgggcacccatctcgctgcccgttggagcgcagctagcacagtagcaccactacccatccacttgcactagcagctagccagatggccgcggcggcgaccgtcaggacgcgctcgctcgccggcggcgttgtgccggtggcactactgctactcgtcttgtgtaccggatcatcatcagctgcagggcagctcgatgtgggctactacaacaagacgtgcccggcggcggaggagatcgtgcgcaacgagacggcggcggccgtcacggcgtcgccggacctcgccgccgcgctgctcaggctgcactaccacgactgcttcgtccagggctgc

SEQ ID NO: 24794 - DNA, 259 bp, Setaria italica
  Peptide Sequence Number=SeqID_90768
acgcggcggcaacggccggcgcggccatggacgcaccggacgtcggggcgggcgcggggccctcggccgcggaggcggtcgcgagcagggacgacgcggcgacggcgacgacggccaggatcctgagcttgagggtggccgccatttgctccgtgcgcgttttcttggtggaacgccggtcgaggcttgtggatacggccggcggatttgcaagtgaagcgagaagctgcagaggctgcgtgagaagcttgtcgtgctc

SEQ ID NO: 24795 - DNA, 513 bp, Setaria italica
  Peptide Sequence Number=SeqID_90769
aagagcctgctcaaggattcccacggagtgcccaaaaactgggacatggactccgttggtccctgtgcctagtctttggtctcctgctcaccagagaatcttgttattgactcactgcacttgaaactccaagcaagaatgtttccggtctgctctccccgagctttgggggatgttcagtcttgagacactgataacaagctaactgggcagatcccgagagagattggcaaggtagcaaagctcaggacccttgacctgtccagtacttggacccgttgtacaatagcttgagtggtcctataccgagaacttttgcaagaacgttcatctagtcgggaatcctcgtatctgcgctgctgaacagggttgtactaggcctgtgctgacactgatatcctgtccctatatcacctgtcaacagtagaagccagtatgctgtaaagtattttacgcttcgcttgatgagtaagcagtaagtaccttaccgtacttaaaataaaaaggttttaa

SEQ ID NO: 24796 - DNA, 347 bp, Setaria italica
  Peptide Sequence Number=SeqID_90770
tcctccctggtcggccctcgccacgctcgccgtagctcctctgaccgcggactccctcagctgctgctgctgccgctgcccgcgcggcgcgagcgctggcgctggggcgacgccgtgcgctcgccgggcgcgcacactggggtggaagaagtcgtaggcagccggcgagagcgcgagcgggctctcgaatgggagcccgtgcgggtgcgccgcagtgggcctctcctccgcctgcccgaggggtaggagcagaagagcgatcgccgccgccattgccatgatctttcccatggtttgagtggcaccctgaattttgagacggagcttgctgttatcgatcacataag

SEQ ID NO: 24797 - DNA, 320 bp, Setaria italica
  Peptide Sequence Number=SeqID_90771
cgggccgcgtgcgcccacggcgcgaagacgaggccccggtaccgctggaacgcctcagccacggcgggcgaggcgccgccggggccctgcgggtcgagcgcgaggtccgggtcgaccgtcagggtccgggacccggacgcaacgctcttgggcagcggccagaggtagaccggctcgccggccgaggtggcgttcgacggcggcgggtggcgccgcgcagcggcggtgccgccgaggaggagggcgaggaggagataagcggggaggttggggggcatttcgggaaaccgcgggtttaggattttaatcgctgatttggt

SEQ ID NO: 24798 - DNA, 213 bp, Setaria italica
  Peptide Sequence Number=SeqID_90772
ctgctttacagaggtgcatgctaaatagaatcccaggtgatgactttattagcctattagaaacactatgctttatcaactgaggaaagggatagaaatttagcaaattgcactagcaccgctaataaggctggacacgtcactctttagtgacagctatgctttccaggtactctgcatctttatgaatcctaatgtttgggcataccctgc

SEQ ID NO: 24799 - DNA, 213 bp, Setaria italica
  Peptide Sequence Number=SeqID_90773
tagccttttctgttttgttcttcgtactgaattttaaccaatatattcattgggatttagttatatgtaatacttgttcagggtccttgtgtgtctcttttaatttcacatcatcaaatataaaaaagcatgagagagcttgcttagttgaggttaaatctatgtgcctttatctttgtgtgaacatgtagagcgtgcggctagctaacattg

SEQ ID NO: 24800 - DNA, 1011 bp, Setaria italica
  Peptide Sequence Number=SeqID_90774
tattctcatgttgctgttggagcatctggagatgactatgacatattagccgagagtgttggtgatgggcgtcttttctttgctggtgaggctaccacgagacgttacccagcaacaatgcacggtgcttttatcagtggtttgcgagaggctgctaacatcacactccatgccaatgcacgagtagcaaagactaaagtggacaaaagctcatcaacaaacacgcaggcttgtgctactatactaacggacttgtttaggcaaccagatttggagtttgggagcttctccattattttcggaggaaaagcttctgatccgaaatccccagctattctaaaggtagaatttggtggccagcgaaagaaaaatgcaattgaaggcgcgaaggcagaacagaaccactcaaacaaattgttgttccagcagctccagtcacattttaaccagcaacagcaactttatgtttacacattgctatcacgacagcaagctatggagttaagagaggttagaggaggtgatgacatgaggttgcattacctctgtgaaaaaatggggtgaaattagttggcaggaaaggccttggtcctgggtcagatgcggtgattgcatccattaaggcagaacgtaacaggagtcgagctaaacctggcccctcaaagctgaaaaaatccatgaagcctaatgttactgcatcatgattactgactgctgattttttgtggggcctgactgcctatagttgatatctaccaggcaatgaatgtgttcacttggatggagtattcgctcatgctgattgctgaacttgtcttcaggccaacttgcatcgaatgtttggcaattgctttagcttagtacaatttgaatgagatctcccagattccagtgtttttcattttttttttctagagtagagcctgttgtgatgtcgcatctgaaatatgtggatcctgcaaagctaatatggctgcggtttaaccactaattcttgaagaagcctgtagt

SEQ ID NO: 24801 - DNA, 467 bp, Setaria italica
  Peptide Sequence Number=SeqID_90775
ctctgctcctcctccatccgagccattccccccggtcccaactccgaagagccgcaggggaaatggccgccctcttctccgccctcctcctcgccgctctcctcgcggccgcccaatacgtgctccgcctgctccactccttcctctgggtcccgctccgcctggagcgccgcttccggcggcagggcatcaggtggccaccgcgcagcctgctctccggcaacgcggccgactaccgcaaccttatggccgccgccaggtccgctcccctcgcctccttccgccacgacggcgtcgtctcccgcgccacgccgcagtacagcgtctggccggcgcggtacggccggccgttcgtgtactggttcgggccccgcccgcggctggtgatctccgacccggagctcgtgaaggccgctttaaccgactccacggggccgtttgataaggcgggctccggtggcaacaac

SEQ ID NO: 24802 - DNA, 593 bp, Setaria italica
  Peptide Sequence Number=SeqID_90776
caagttcagcatgcaccacgcttgcgtattccaaactggaaaaggattaggaatcatcttggagtagcatcacacgtcaacagaggtatatcactgcaatcaaatggaataatgcctggcttatgcccttcagcccctgggcaagttgaaacagtgatttcttcagcctgctgtgtctcagtaaacaccactgtccattggtacatcgtcgaaactccagagacctccgatgttcacgccatcctgagccacctcaccgttgaaaagagcgtcaatgttttcatacgagttgccttcaaggtaaggtaactgcataaagttcgggtaaggctcataatacgcaaattcatccgcaagccacacttcgccattgccaaaaaccatatctgccgtcaccccattttcatgatcagtttcttcagttgtttctttcccaccagcttcaaggtacttcgatccatcaagttgattcagctcgaacgcatcaagccatgcgctggacattggtagtggagagtctgactctgacaactcaatcttgacgactgtggcatcagtactgctgcctgctgagatggcatgttcagaggcgc

SEQ ID NO: 24803 - DNA, 1889 bp, Setaria italica
  Peptide Sequence Number=SeqID_90777
tctgtgcaagcgataacaagattgctattactgcagtattaggatgtgacagttacatcgtcatgcgacatggtgctggtccaggaactagtgggggtacagatgaagtggctgctcagatagaaaatttgtccacagaagatgctcttagccatcagagattgggctgttgtttctgcaatgatgctgcttccctttttaatacaattcctaatggaacactacctggacttacctcagttgcatctggcaaagcagtggagctctttgctaggatgttacatcatcctgacgagttacatgctccaggtgatattgctggtatggaaacagaacatcagcttggcctattaccacatcagctacaaggatcactcccaaagtgtgttttatccatggaacttggcaattcctcaggcaactgtactgcatgttcgattgcagtattgtcagagtacagaagaaggggattggattttgtcatgcaggctattaactatccaacatatctgaaagatcttgcaggcatttctaatttgaagaagccagatccttgtcctaaaatgctgcccagcatctctgtaaattcagacaagatttctgatgtccgctgtctacttttgggtgctggaactcttggatgtgatgttgctcgcattcttatggactctggtgtacgaaagctaacagtggttgatagtggtcgtgtagttgtgtcaaatttggcgagacaatcactctacacttgtgatgaccgtggtgccccaaaagcaactgccatacttaggcatctagtggagaggtgtccttcagttgatgcacaaggcattcaaatggaaatacctatgccagggcatcctgtatctcccagtgaagcagctggtgtgctccaagattgcaagcgccttaaggaattagtggcttcccacgatgctatcttcttgttgaccgacacaagggaaagtaggtggcttccaactctcctctgcactaatgaaaacaagattgctattactgcagcgttagggtatgatagttaccttgttatgcgacatggggctggtcctggcataagctatgaagcttcaaatgtgactactgtcatggataagctgtccacaaaggattcccttggacgtgaaagactggggtgttatttctgcaatgacgtcgttgctcctgttgattctgtttcaaatcgaacactggatcaacaatgtacagtgacacgacccgggctggcctgtattgcatctggacgcgctgcagacctcttcacaagaatgttacatcatccagatgggatacatgctccaggagagattgctggtgcaagcagtggccatccacttggtctattacctcaccagatccgtggatcactctcacagtacaacttattaactctcttgggctattcctcgagcaattgcacagcatgttccaatgtggtattgtctgaatatcggagtagaggaatggattttgtgatgcaagtgatcaacgaaccaacgtatttggaagacctcaccggcctcacggacttgatgaaatccgcagcttacactgaggtcgagtgggtagatgaaattgatgaggacgatttcgccgagatctgataatcacatggttttaacggctgtaaatatcatctcctacattatgattcacgagatgatgaaataacattgcgtgggatggcttcactcaacaataccaagcaatcaagcaaccaccctgtaaatactttgtaacattgtgttacgttgctagcttttacactttgtaatgcacgaatagaagtcaagccaaaatactgctagttttcagttcgcgttgtcaactcagcaaacgctattaattctgggaactcgcgattttataacctt

SEQ ID NO: 24804 - DNA, 422 bp, Setaria italica
  Peptide Sequence Number=SeqID_90778
gcagaaccagagcaaggcagacgaggagtggagaagcaacaagaaaaatggaggccggcaaccaaggagcagaagccaaccggccgacgcggccggcgctgccgctgtgggtgcggatccagctggcggggctgacggcggccatcgacgccgtggagcgcagcgacggcacggtcaaccgctgcctctacggcgccatcgaccgcctcctgagcgcgcgcgccaacccgcgccccgacaagtccggggtccgctcctacgacgtcaccatggacgcctcccgtggcatctgggcgcgcgtcttcgcccccgtttccgccgaccgcccgctccccgtcgtcgtctactaccacggcggcgggttcgcgctcttctcccccccatcgggcccttcaacggcgtgtgccgccgcctctgcgccg

SEQ ID NO: 24805 - DNA, 275 bp, Setaria italica
  Peptide Sequence Number=SeqID_90779
ggggaacttccggaggggcaatggagttatccactcccatcgggagctcacttgctacgccggcggccatggccctcgtcaggcccaacccgaagataacaaatcatacatgtgtcagggggatgcgacttcaatgtcaattttctcatagactacgatctgtagcctctttgatggtgttaaacacgcaaccttcacaaggaatcaaccggaaagattgtggtttgctacaggcagcatcttcagtacagcgtacaaaaaacctgacacagtca

SEQ ID NO: 24806 - DNA, 390 bp, Setaria italica
  Peptide Sequence Number=SeqID_90780
aaatcagtgacaatcggttgaatctatttctcttatgctacattaaattacagaggtgatattttgtccgtaatgctaatgagtactctggaatttcttatgtaaattctcttgcagaatcaaccggaaagattgtggtttgctacaggcagcatcttcagtacagcgtacagaaaacctgacacagtcatcagtatctttcaaagacttctgtgtttcagtgtgtactgaagagggtggtctgataaagataaaagtaaatgtatccggtacaatgacagattctatctttgagaaagttttgacaaagaaggttgctgctgcacaaccccttcctggctttcgacaaatgaaaggaggttattactctttattagctttttactaggc

SEQ ID NO: 24807 - DNA, 363 bp, Setaria italica
  Peptide Sequence Number=SeqID_90781
tatgagaaagatgggcatcaagatagcttttgttatcgtcatgcaagacaaatgtgacgaactcgtgtttctaggcctttggttgttcatagcccatctcatggcatgagcacttgtgagcctagtaagaagccacatttcattgatgggttttatgactacttttctagtgagttaggtcatgctcgtggacatgcttctagttattcttatgttggtccacgccatggttctcatggtgcttgtgttggttcttctcttaagaccccaggggatcattgttctttttgctagtggtagcacttgttcttcttctcgagttgcttctttgaggcatggttccaagggtatttacaaaatcta

SEQ ID NO: 24808 - DNA, 583 bp, Setaria italica
  Peptide Sequence Number=SeqID_90782
agtataatactccctccgtttcaaattgtagatcataaattttgctacgcatctggacatagcaaaatctattaatgtaaaaataccaaaatgacctacaatttgggacggagggagttcggttgtatttccacatcaactagcaactcaattacacgtaccattagttagttgttgtacaatagattagcagccacacggtccctctaaacgcaagtagtcatacatcagcccctgaaatgggctctggttcctgggctgcttcaggtagattgtgttcatcccttggacaagccaggcactatccacattgatgttgaacagccagtatagcccatggatcccatgtcttgctatggcgttgtccctgccgatcagcccggtggcgaagtgaggaacacccctgttctgatcgttaaagaaaacctgcaactcagcgcgtgccgaagacgcaagcgccactcggaacttataggtgctgcctggactcacactgtcaagagtgaacttgatttgcaatgtagttggttggtaagtgttgtcatcaacttttctgttaacttgagcatagaaccaatcggtg

SEQ ID NO: 24809 - DNA, 1827 bp, Setaria italica
  misc_feature (1)..(29): n is a, c, g, or t
  Peptide Sequence Number=SeqID_90783
nnnnnnnnnnnnnnnnnnnnnnnnnnnnnttttttttttttttttttttttttacccacttaacgtaaaactttccactgaatccttttggtctatacgttgaaaaagtaacgcaaaatgtacccgtctttgactttctaaaaatacatatccaggtgaacgcaggccagaggcattgaagataattcgacagtagccacttatccaactggaaaaataattagcccaatcactcatgcagcacaaaaacaaggtgagtcactcgtggcatgagaaatgtagaaccggtataggcgtatagccaagagacctcttaactctttgattcggccacacgagctttgtacaggcagatataagccatgtgccagtctcctccaccagatagtttcaaaatgtcttcctccttgcgaatgtttgggttgtcatcatcaaactcgatccattttccattatcttgcttaacccagccaacgtagtggccagagtctgcacttcttcccttgtgtgtcaagacagcaaccaaatcgtagacaccagtcaattgtttctttggtacagaaggatcagctttgtcaatgtccatgctggatgagtccccagcactacttgatgacccctcattttcttttgagctgctagctttcccctgtgttttcaatccaaactttgcattttctgcatctctcagcatctgtcgaggagcttggagtttctgtttcagttcatctgagcaaaattcataaacatccagttccagagggtaatcaacttttcgtaaaatctttgccttttggttcgattcccttttccaaaagaaacgaacgaactgcacagtcaagtacctgggcagctcatttattcttgactctctagtataaatcgcagttcgacccagtgcaggtgaaactttctcaagttctgttttcaagccatgcttaagtccctcatgaaggtggttaacatcttgagatatatgacacttcatggaataaactgactctgtctccatgctctcttcaccactttctgcacagtggaccctgctcacaaggtctatcccaaacagttgcttcatcgaaagagctgcagattcacttgcatctgatgtaagagtttgagaaagtgtatacacaagctgtgtccagcattcttctgcatcctgttgcatgtagacattattgtgctgctgggcaaattgtgggtattttttacgcagtgtctgcaagaattgtagaggtgcaacaggacggacactttgatcaagctcaccaaaggtgttacgagttgcaagagtcaaattatgagaggcttggtcaacaccattacctcttgcagtatctgaatagcttagtagcgctgacttcagctctggaacagaatgcagacattgcaacgtggaattcatgtagcatgtattcccaaggttataaagaccagcactgtgccccagtgcgaccacttgctcttcttctggtagatcctcaacaaacactggacctttctctggagctttcacaatttcatcagctgtacctatcatcatcaacttttgaccctctttcactcccaaagtagaccaatctgcatcatccttcaatattccacccttcaccatgattttttggcgttcaggtggtacaccagttagtgtgtacagctgactcttgaaaacaataggcggctgggtagtgtcgatctctatgcctggaaagacctccttctgccattttacgcttacggtcggcatggcggcggtgcggtggagacggggtttacttgctggaggagaaaggaacggggcagcacaggcgaggggaagtgctc

SEQ ID NO: 24810 - DNA, 809 bp, Setaria italica
  Peptide Sequence Number=SeqID_90784
agggttctcaaactgttatagcacctctatagcccgctatttctaccaggtaaaattgcacaaacaacccaataagccacttcaagtttgacattgccccccataaatcatttgttgcaaatacccacccagtgtgtgcaaacttaactgattcaacatgttttcaagatagcgagctgccaatgtggtctttaccgaaattagatacttctaggagtataatctcgacaattttttttggagattacacaaaagaattgctaatgagagactaaactgtcacaccgagtttcactctgtacaaaaaatttcaatacaaaatggtaaatgaacctaatgcaagcacttgggcaagtttgactatgctacctcggcctgtagttgctctctcagcaaaaacaggttgattcgataaatttgagcacactgggtggtactatattagttctggctttgaaaactctatggcatccattacaggctaaataaatcaaaaagaaaaaactgcgcagctccattttttttttccgaacgacgcaggagagctgcatgtcatttcattaagagagaaaagagcatacaacgagtccggttaaggatcaaaacccgagtacaaaaacacacacccacacactcatgaagaaccaacccagcctaggcaggcggggacaacaacctaacaaggaattcctgaagattggctgccccatccataccccaaaggctacattcatcagttactgtctggagcagtacatgcatggctttgaattctcgaaacacatgatatgtacggctccatttggtag

SEQ ID NO: 24811 - DNA, 378 bp, Setaria italica
  Peptide Sequence Number=SeqID_90785
acgaagagcatataaacaatattcatcgaaaagtttatataatgatgccatccctcaacattattatcctcctctcacactaaccaaagcatcagctatcctagtacaaatagtattcatagtatccttattctccacatcgtcactctcatctccttgtgtttgtctcgtaccacttatatattgtatcaagtactcttcatcaacattacatttctcgaacttcttatcacacaaattgctttcacggataaaattatgcaatgcaaggcactacctttcaatcgtgtgaaacttaggcattgctgttttgacaatatgtttgcatgtggagtgcagatctaatgactgaatgatgatgagagatgcacacaatat

SEQ ID NO: 24812 - DNA, 973 bp, Setaria italica
  Peptide Sequence Number=SeqID_90786
ctccacctgcaggagcatgcacgataccagcacaccagcggcaatggtgcaggaaaccatggcaccggccgccttggaccataaccgtggctgtacatcggtggcggcgggcggtggagctccagctatgacgaagcagtacagagagccaatagcgatgttgaaggaggcagcgagggccagtaaggcccaaacggaagcgtcctgagggagatcagtcgctcctgccgccatgaccgtatccgcggacgccgccgtgggtatggcgagcgcgaggacgacgaacgggagcagagggagtcctcgagggcgccgcagctgcttcggttcgtcctcggcttgatggcgcgccagggacttgtagatggtgagggattgccaagtggaagagcgcggaggcggcgagtacgacgctcacgacgacgaccgggtggatttgtactccttggcggcgtcggcgagttgctccgcgtgcagcgccgcgcccatgaggaggcagagccccatgaagaaggcgaccggagatctcgatgcagaggcggcaggtgccggcgctgctccggcggtcgcggtcgtgggtcccgcggcggctggccggcgaacgacgatgaagttgagcgagaggatggcgagattgaagaaagccacgacggagaggacggcgccggcgacgacgcccggttggagatgcagatcggcggcggcggcggcgagcggctccgcgtgcagcaccgccgagaagacgacgcagagcgcggcgaaggagggggagcggtgatctcggcgcggatccggccggatcatgtccggccgtatcagttgggccaagctggagcgccatctcgggagatccttcggctggctggcgcccgacgacgaggaagagctcggagaccaacctgcggaagaggagctcggcgtcggcgatgtcgaggacgaccacgaagcgagagccggctggtggagttggagc

SEQ ID NO: 24813 - DNA, 437 bp, Setaria italica
  Peptide Sequence Number=SeqID_90787
ggaaccagaactgcctagcaaacacacgaccaaccaggagatgctggatatcctcctctttttgatcacaaagggggcaatgttctgggtgggggagaccacgtttggccagccggtccacagtccagcagcgcctatgagctactaaccacatgaagaaacgacacttgggaggggcccaagatttccaaatgcgttcatatggattaaagagaattgctccctggaataaagcatcataggccgatcttgctgtgtattcacctgcaagggcgtgttgctctgtaggactaatggaactcgatctggcctggcagttctggctcgatgagtgagcatgcaaccttcttctgatagtatgaatctcacaatgtaggagtagatattttacctatagaccatgtttggcgtggcatggacttgttggacatgccgcg

SEQ ID NO: 24814 - DNA, 190 bp, Setaria italica
  Peptide Sequence Number=SeqID_90788
gctggcatgaaatggccactgaaatagaaggtcaacccggcaaacagacttggtgcctgttgcatcgctcgaagtcttcctgtgcgagggccatcaaaagagccatgaacatcacacctgacttcatagggctcttctgggattagttctctagcctcaatacaggctctcaaccaatttacattgagaa

SEQ ID NO: 24815 - DNA, 1436 bp, Setaria italica
  Peptide Sequence Number=SeqID_90789
ctttttcagtcttcgccgccccccaaacccgcctccccgaggaaaacccaaactccgcgaaattcgaggtaaattccatgggcggcggcggcggcggcggcgatctcacccccaccagcatcccctcctcaccgtcgtgctcgtcggaggtccttcctcctgagttcgccgagtacgtggccgtctcgccggtctccgacgacgaagaatccgatgagtgctctgtctacgaccacgccgaggtggatgctcgacacttcggccgccggctgcaggaccacctgcgggaggcgaaagagttcatcaggaggtataagcctggggattgcattgagggagctggcggagcaaaagctggggactatatcttgcctgagatcactacacttctgctagtgggccctagaggtgctggcaagagcacccttgtgaaccgaattacaagggtctttgacaaggatgatgacccttctgcaccagatcgagcacaggtgtcaggaaattcaaaatcaaatggtacagtcttccttcgtgagtatccagttccaaggaattcaactgctatatgtatttatgatacacagagcttatcatgcaacccacaaaataatttcaagacactgcagaagtggatgacaaagggaatcagccatggggagatagcgactggggatactaatgaaggcaataatactaaggacattaaaccattggggaatcagttcagttatcttcgttgcaaaaccaggaaggtcaactttgtgatatttgttgttgacggtgtttctatccttcaggcaattgagagtaacacggaagattacattgacatactgcgtcaaacatttatgtatccatgcttatcaattggagatgataaacctgttgttgtggtcacaaacggtgaaagactatcgatacaacaacgtgcttgtgttcaaaacaagttagtagatctactaggcattcctgtccagcaaatttttgatataccaggatctgatgattaccaaactgatctggctatattggatatgttacgttactgtatccaacatgcagagcagaacctccccattaaattgagttatcttttagaggtgcgtgggcgtgaaacttttgagattgcagcagagcagctgatggccttagatgcagtcattgaagccaccattattttcctctgcatcgtgatccttctacttcggttttcagataaattgttgcaatcgtagctatggcatgcgattgatttgtaaataagcaaaaccaaggagtctcgccttctttagctagcagtgtacacatggtactgtacctagaaaatacccactagacaatacaatggacggcaccaatgtgcatgactatggttatgcaagacaccgaatcctgtttctatcatacatgcttgtatagttgcattaaaaaaaaaa

SEQ ID NO: 24816 - DNA, 255 bp, Setaria italica
  Peptide Sequence Number=SeqID_90790
tgctggaagaaattatttgtaattccatttcttcactttgatcatcttacatattatcagctccagctgaagccattcaaatcaaaatgtctgtaagcttgatcagtgtcgtcgacattgtgggtgttcaggtcaagtttcttccccggacatgagtgcccaaagtctagtagcttgctttctctgggatattcaaccgcctgtctcgtgcagtttggttcttcgagatatggcttctctgcgtctcctttgctt

SEQ ID NO: 24817 - DNA, 232 bp, Setaria italica
  Peptide Sequence Number=SeqID_90791
agtcaactcaaaatatacacagagatgagagaattaaaaaactgcaaggtgctcatctgattaagggaaatgctaagctttattgactctaaaaagtcatcactggccctttattttcttacatataccattttagactgactcaggatcaacatatatataggagcaaagcacttacttggcaacaaattgatagaatttaatcatcaagtccttgtcattttacgtaaac

SEQ ID NO: 24818 - DNA, 456 bp, Setaria italica
  Peptide Sequence Number=SeqID_90792
aaaggggatctcctctttgctgaagtgatagaactgccactggtaacagatacggaaggcccatgatctgttctcctaaaagaagtatctcgtgatccaccatcatgtatacttctggcatcatgatggtcaccaaagaagttctcttttgttgatgatccagcttccgatggttcaggagtatgagaccctggaatagctttccacagctgaattgcgtgtataatggcatcacgaactggttttaccttatcaaatttactacgctcaagggagcgaaggcaggaagttctgaaagaggcaaccaaatacccagaactgacagcaatacttgaaagagcaagagaggcagccttccttgtattccagtcgctactcttaagtgcatccataatacttgttagagctgatgataacgcctgctctgtggaagcaccttcagcctgaacatgcttc

SEQ ID NO: 24819 - DNA, 288 bp, Setaria italica
  Peptide Sequence Number=SeqID_90793
ggcggcgacgaagagggacggggaggtcggggacgccgtgaaggagagcgagaaggtgttgttgggcgaagtccacggcgccgagttgcccggtgagagggtcgaccccagcggcatgtccgcgccatgggaaagcagcgggaggaggagcgcgaggcagcagaggatagcaagatccccgtgctttccccgcaaaggccgcatctttccggcgattcggggcggctggctttctcggatggcgattgcggacagagaggcagagaagaagctaatcaaggcagcaaa

SEQ ID NO: 24820 - DNA, 880 bp, Setaria italica
  Peptide Sequence Number=SeqID_90794
agcccgcgtccgcggccctcggcctcggcgcgcgccgtgctgggctcccccggctacgtggacccgcactacctccgctccggcgtcgtcaccaagaagagcgacgtctacagcttcggcgtgctgctgctggagctgctcaccggcgtccaggcgttctgcgacggccggctcctcacggcggccgtcgcgccgaggatcagcgcggcatgcgacgctggcgagctcgtggaccagaggctggggtgccggtacgacgccgacgaggctgcggccatggtggctctggcggccgcgtgcgtcggggagaacccgagcctccggccgtcgatggccgacgtggtccgtgccctggagcggaacggccgagcctcgatcgccaccgtcgggagacgatcagacggcggcgggaagctatagatcgtgcgatagctagccgtggcgcgacacggacgcgtggtggtgcctggcgtggcatggtcatgctgtgtggggaatcggatgcttaggtggcgaccattgtgtccgtaggatgcgattgcccaccctattgggttggtgaggagcaggcgctggtgctgaagcctaccaagagaacagacatatggtttgtctggacagggacttcagtggatggaggagagagctttgggattgggattgttctttctctgtgatctttgtttcggtgatgagtatgtagagggctagttttttagctataggtcggccattaacacacaacaaaaaaaaattccaagtgcattcagcagctgaggatgggcgaagaggatgcaatttatctcaatccaagtgtgtatatagtgcaagtacattacgtctttcatgcatgtccggttgtgtagtcttgctgtgcctt

SEQ ID NO: 24821 - DNA, 607 bp, Setaria italica
  Peptide Sequence Number=SeqID_90795
ttcggcgcaaagggcttatccggtgcttgaggtagtcgtggacaatgtctacaccagtcaacccttggttgctcagctcctcgatttggcgaacctgcttctcctgctcaggggaaagaagcaacacatccttccaattgtttgtctccttcagtgtttcacccttgaaggtcaatctgcagctctgcggtaactttgcatagaaccacagagaagtccacccgaactgtgaggccttcaagtagtaaaccggataactcctcctcatcttgtccctcagccggaagtagacacccccgagtgtgactgtttctcctttattattggtgtagagcctgtagaagtgcgcgaacacctccaccgtcggtggcacacccaagtaggcctcactcaggtgggcaaagatgctcagtgcggtaatcgagttcggggtgaggtgagaccactcgatgtcgtagtgctcgagcactctgaccaggaaatcgctcgcgtccgtcctcaggccgcacattatgtgattcagagacaagaccacaaactggtcctccaggatggacggcgacggagtctcacctgtggtggggattcgccattcgatcagctcgcc

SEQ ID NO: 24822 - DNA, 190 bp, Setaria italica
  Peptide Sequence Number=SeqID_90796
cggaggaagggaccgatgagaaggagacggtgaaaggcaagaagaagagctcgtggggcttcgatgggctcaagaagtggaagaaagctggctgtagcagcggcgatgcggcagccatcggtgagcagccggagcgtgctctgccacggtcatcgtacagcgagtcgccggctcggaggcgacgccccat

SEQ ID NO: 24823 - DNA, 757 bp, Setaria italica
  Peptide Sequence Number=SeqID_90797
atttcagcattcattgcttcatatgagatatctcaggcagaagacagttctcttgacatgatttcaagtattttatatgaagtttatgatggagaggaatctctctgcatgcagttttgggataaaaatagttttgttgatggtccaattaggtctgttcttcatattgtggaaaaggagtatccttttcaaatatcagagctggtccgcttcttatcagctgtttgccatgggacctggcctgctcaatgtgtatacaactatcttgagagaatgaatggagttacaacaatctatgccatccctggtcatgtcgcagaaaatgtgaattacggccatcaaattgaaagtcatcatccagttagcattcctggtattgaaggcattaaggttccatgtggaaccaatggttacattttgaaagttcttcaaggggatgctgtattagttcgctgggagttcccgcattctggggtattccttttgctcgtaactttggcccaagagctccattcatgcaattacaaggaggcatctgacatcatggacctactttatcgtatggtatcatcaaataaggacttgtgcttcgctttgttgcatgttgacaagtcaccggctgtacaaaaatcaaagaacttggggcaacttgaaaatcatgtcaggattgatattgctaagatattttgcaattccattttcaaatatgtgcaagatgttaataatgccgacatattgtccaaaaccctaggtctgc

SEQ ID NO: 24824 - DNA, 278 bp, Setaria italica
  Peptide Sequence Number=SeqID_90798
tcctatcccctgttgcgtgtctcaggagagctgcagtgacagagcaagaggccaaggcactagccaataacccaaggagagagtggtaaacgatcgaaaccgatcagccatgactgagctggcgcctctccccaaggtgttgctggggtcgctggcgttcggggtgttctggatgctggcggtgttcccgtcggtgccgttcctcccgatcggccgcacgggcgggggcgctgcgtgggggcggtgctcatgatcgtgttccacgtgatcagccccga

SEQ ID NO: 24825 - DNA, 718 bp, Setaria italica
  Peptide Sequence Number=SeqID_90799
gaactggctgccatgggtcgaactactattgtcattgcacatcgactctccaccatccgaaatgctgatatgattgctgtcatgcagtctggtgaggtcaaggagctgggatcccatgatgagctcattgccaaggagaatggcatgtactcatctcttgtacaccatcgacacaccaaagactcaaatgttactcacgactttgatggaactggaagtacatttgttatgcagcaatcaagtaaccagggtatgagtaggaggtcctctgcagtaagcaagtcaatgtcaacactgtacatgagtgatgctgaagatgcacgcagcacagagaagccaaagcttcctgtaccatccttcagaaggctactgatgcttaatgcaccagaatggaagcatgcagtgatgggaacaattagtgcatctgtgtttggaggaatacaacccgtgtattcatatgccatgggaagcatggtctcgatctacttctcgacagatcatgaagagatcaaaggaaaaaactaggacctacacattattctttgttggtcttacagtcctatcattcattgtcaatattggacagcattacagctttggtgccatgggggaataccttaccaagaggattcgagaaaagatgcttgcaaaattcctcactttcgaggttgggtggttcgaccgtgacgagaattctagcggcaccatatgctcaacc

SEQ ID NO: 24826 - DNA, 367 bp, Setaria italica
  Peptide Sequence Number=SeqID_90800
cgttgcagctccagcacggacgaccacgcctccctgacggcggccggcacgccgttctacctcgccgacgcagatcaaaggcttcttggcttccgcgaggactgcgtcgagcaccacctgcgtcccggtcgcggcggggtcgtcgaggaagccgccgcggcgcgcgggccccgcttctgcgccgacgtcaccaagtactccatggacgtgtacccgctcgcgcaccacgcgcgcttctgcggcctcgccggctgcctcgccgtctgcgtgcagctgcgccgcgatggcgacgacgcgtccatggatgacagcagccgggaagggtgcgtgctggagttcttcctcccgctggactgcagagacggca

SEQ ID NO: 24827 - DNA, 210 bp, Setaria italica
  Peptide Sequence Number=SeqID_90801
gggccggggcatgcacgggcgcggccgtggccgcgggagctaccgccagaccgtgtgccggcactggctgcgcggcctctgcatgaagggcgacgcgtgcgggttcctgcaccagtttgacaaggcccgcatgcccgtctgccgcttcttccgcgacttcggcgagtgccgcgagcccgactgcgcctacaagcactcgtacgacgacgt

SEQ ID NO: 24828 - DNA, 576 bp, Setaria italica
  Peptide Sequence Number=SeqID_90802
tagaagtccatgccgtagataccagtagatgggtcatacctgagataatgcaataaagagaacggctattaatcatcaacaaaatgcagcacttcactaagcaggaactaggcagacaggaactatccccagcaaatgcacaataagtactctgaaattccaaatctctaagggaggagaaactagccacaaacacacaatgcccacatatgcagacagtaaaggcaacaacagtatagcgttatgcaaactgaaatcaagtggggatggaattatatgcacagtttaaatcaaggtggtactccaggtccaggatacaaataacttgtcaataataacaacacagcaaatatgtctgttgcaccacagtactacaaatttgaccataggcctggacaagcatgctaaccatgcaataaatcagagataaaaaatcacagatgcacccaaagaatggcattttgacttgctcaggacaatcctggtacaagatcacaatagactaaaacttaatgcaatattatacacgggtgtggcagtttctgaaaaagcatacaattgaactcaagtgaacaa

SEQ ID NO: 24829 - DNA, 247 bp, Setaria italica
  Peptide Sequence Number=SeqID_90803
cctactccattccattgacctcgcctcgcctctccctccctccctctctcccgctctctctcctccttcccaaagcttggaattttcccgtgccgaacggggccttccttcccctcgacgcgtcccctgattcgccggcggacacaccaaggcaaaacccagcccgacccgcgtgctgtgtgggcggggtccgtctctgggtgccttccgtgccggctgcgtgcgtcgcgggcgcattgccttgccg

SEQ ID NO: 24830 - DNA, 305 bp, Setaria italica
  Peptide Sequence Number=SeqID_90804
gaatcgctagacataatgctttgccgtggcttgtcagaggttgccaatcttcctccgtccatcaagaccttggagatttgggaatgcgacaatcttcgatccttatcaggacagctggatgcactccaaacattaaatattaaccgttgcagtaatttgaaatcgctggaatcttgcttgggaaggctcccgtcgctggaaaacctcagcctttacatgtgcagaagcctgcaatccttaccaaatgggcctcaaacgtactcatatcttagagctctttggattcaatcttgtcctggtataaa

SEQ ID NO: 24831 - DNA, 153 bp, Setaria italica
  Peptide Sequence Number=SeqID_90805
gtgcttcacctcccccatgccgcactccgaatggctttgcagagaggatcggagtgccaatgcgatggaccgtggcgccatgatgcccgcccaatttaaggccggagcaccgacagagctgctcctctcgcgcactgggctgaatcatttcgg

SEQ ID NO: 24832 - DNA, 927 bp, Setaria italica
  Peptide Sequence Number=SeqID_90806
tcgtgcactcgatgaagttccccagcggcaacgctggctgcgccgccggcggcggcggcggcggcaagcccgcggagttcgaccacgcccgctggctcttcgagaccaagggcacctacggctacggcaacgcgctctggcccaaggacggcggccacggcggtggcgccactggcttcgccggcttcgaggagccgcccaacttcggctcccgctgccgccgcccgctcaccaggaagaccagcgtctcgcaggccatcatcagcccgtacaggctactcatcgccatccgcctggtggcgctggggttcttcctgacatggcgcatccggcacccgaacccggaggcggtgtggctgtgggcgatgtcggtgacgtgcgaggtgtggttcgccttctcctggctcctcgacagcctccccaagctctgccccgtccagcgggccgccgacctggacgtcctcgccgagcgcttcgagctccccaccgctcgcaaccccaaaggccgctccgacctccccggcatcgacgtcttcgtctccaccgccgacccggagaaggagccgccgctcgtcaccgccaacaccatcctctccatcctcgccgccgactaccccgtcgagaagctcgcctgctacctctccgacgacggcggcgcgctgctcaccttcgaggcgctcgccgagaccgccagcttcgcgcgcacctgggtgcccttctgccgcaagcacggcgtcgagccgcgcagccccgaggcgtacttcggccagaagagggacttcctcaagaacaaggtgcgcgtggacttcgtcagggagcgccggaaggtgaagcgcgagtacgacgagttcaaggtgcgggtgaattcgctgccggaggccatccgccggcgctccgatgcgtacaacgccggcgaggagctgcgcc

SEQ ID NO: 24833 - DNA, 285 bp, Setaria italica
  Peptide Sequence Number=SeqID_90807
acaagttgttgctctcctctctctcccctccccctataggcagctcactctagtgctccactataaaactgcagaggtagaaaggagacttttcgagctcgagcaatggcgaagcagcagcaggaggtgtacttcgtgttcatgaactttgaccccgtctacgagcgcctcagagctgatcggtccaaggaagggtcggccacgctggacgcgtacctgagccacaagcacgacaagcttctcgccaagctcctccaacccgactcctaccggaagaggtcgtcg

SEQ ID NO: 24834 - DNA, 949 bp, Setaria italica
  Peptide Sequence Number=SeqID_90808
cgctcgatggtcgacgacgacgggttgacgacgctgcagttgaggcgggacctccccgcacgtccccgtctgcacctggatgcggcccatcttcaccatcgccgccgcgaacttctccttccacagcgtctcattcgccgcgaagctgctcaccagcgccgccatcgccgtgtccacgcgcagctggttgtcggagaagaagagccccatgccgcgcgggaggagcttgtagtagttgttgtccagcacgttgggcgtcccggggtccatcgccgtcgtgatcggcgtcgcccgcgtcgtgttcgacgggcacagcgcccgcagcagcgacgcgtacgacgagctcagccccgcgtccacgattgcggccgggggcttggcgctccggttccagacgcggtcgacgaaggattcgcagaaggagcggccaacggtgtgggcgccggagaggacgaccatgtcctcgacactgaggttcttggcggcgaacaggtcggtgagctccttggccgtggacgtgggcgggggaaggtcgacggtgtccgacgcgttggacacgtggccgtcacgccgccccgccgggaccttgtacgagacgctgccggtgagggcgacgctgtcgcgggcggcgaaggcgacgatgtcggcgcacgagacggtgcgcgggcagctctgctccacggcggccttggcggcgtcgatcacgtcgaagccgcggaggctcgggttgttcggggcggcgtcacgctccgtttgcccgccgccggggttcacggtcaggagcaccgaagcatcacagcccctgacgaagcagtcgtggaaatggaggcggatgaggcccgcggcggtgccggcgtccctggcgaaggcggcggcgacggcctggcggacgagcgcctcggcgttggggcaggtggtgtcgtagaaccccacccggagctgcgcgcgg

SEQ ID NO: 24835 - DNA, 269 bp, Setaria italica
  Peptide Sequence Number=SeqID_90809
cccaagagaagccagccaagcctgctgccaaaggcgacatttttctcatggacgccggcgcagccacctccgcccaggagcgcccggcgccgccctcgccggtggccgccgcgctgccgatgccgatgccgctgccacaggcgtcggcggacccgtccaaccccttccccaccaccttcgtccaggcggacaccacctccttcaagcaggtggtccagatcctcaccggcacgccggagaccgcggcggccgcggcggcgggcggggca

SEQ ID NO: 24836 - DNA, 654 bp, Setaria italica
  Peptide Sequence Number=SeqID_90810
ggtctctttatgctcttgttctttcagtctcagaactggctcatacatttgtgtattctctggtggactacagcaatgattcatgccctcccttggttgctaaaagctaaaactactactatgaactacaagcatcctccatccttatgaacagggttattttcttttatctccaaaaaattaacatggtcaaaactaatgggaagattcttatcttttgagtctcaagagttattccgctgcttattcacatgctatactcttcccatgggagaaaacggagggttcatgacaatagatggaggtgctttttcattcctgctctttggtttcttttctccttggtcgtgactgagtcaattaactgcttcacttcctccttcagaagcatcttcagcgagctggagtatagcttgttcttgaatttgtcgataccaatgtctgaagaagcttcagaacagtgaagcaaagagatgcagatagaaaacgcctgcaacgctgatagtcgtgcatgaaaatccaccgagaaatgtccattcccatccgccttcatcaaaagggcagggagaacttctttgttaccctgagcaaatagctccataggaacttttacttttctatttctattctactagtaattctaaccctagttaa

SEQ ID NO: 24837 - DNA, 435 bp, Setaria italica
  misc_feature (405)..(405): n is a, c, g, or t
  Peptide Sequence Number=SeqID_90811
taactaattgtttttaatatcatcagcttagcaatgaatggtttgtattcattacatccactttatgattatttcatgtttatattatatattgataaagttaattaatgattgtatatttctttttttcaccgtcgtacagttgatagttgcctttacttatgttgaatcgtgtcttagttttaatgcatatagcacagtagatagacaacagtttaatgacctagttggtcctgctcgatatgatagctattactgggttacataaatgtgattacgaatgtgtaacttagtttattatatgcatttatacagttgagatccgggtgatcttatcataaaattatcatggaatgctagttcgtggttccagagcagatgaaatatgctgattatgttcatctntgctttcaggcacatctgaagtctttcttc

SEQ ID NO: 24838 - DNA, 643 bp, Setaria italica
  Peptide Sequence Number=SeqID_90812
gcttgggaacttgatggacgcggcgacgaatgcctgcttgaggtacttgtcggtggcgaccacgatgcccagcgacacgagcaggtgcgcgacgccgagaatggtgggcagcagtccggatgaagaggacgtggcgctggcatttccggcgccggcggtggagttggggacggtcagccggcggcgaatgttggacgataacgaccggtgaggcgcggcggtgccattgttgttggctggacccatgaagcttgtgttgccggcagcgatgcggttcaatgctgggcggccatgggacgtggaggcagaggacgcggcggaacaagaagaagaatgcggtgtgagcgatccgcatcggcggcatcggggaggaagcatgcaggagcgggcagtcgacgtggagcgggggcgagcggagaggcggtggtggtggcagcgtaaagtggtgaccccaatcatggcgatcgctgccatggatcaggaatacgtgttgttcgtggagtgcagaggaggagtaggtgaagtttccctccctcctgctgctggctgatgtctcgctcctccctggcgcgagcgcccggagcagcaggcaggctagctactgcctcgcaggtagtaacggagattcgatgcgatgcgttgg

SEQ ID NO: 24839 - DNA, 630 bp, Setaria italica
  Peptide Sequence Number=SeqID_90813
tggcagcagtggcgtatgctattgctgctcgagaggagaggctagcgtctcaagagaagcctgttgcggagaggtttggaaccgaaggaaagcctatggtggagaaggtagcgtctggaaagaagcatgcttcaatcggtgagcctcggatcagaccgcagtccaagtcaccaccccagaaagctgaaagccttaaaaggcctattgaaggcaacacatcttcaaaatggttcagcggcaaagagcccatagacgacggttatgatgaagaaccaggagctaatgtgtcggtaaggaggccattaagaccggcacataagaagccaggtgtcatttcatcagatgacaaggtggcggagaggttgtcaaatgattctgccccaagcataaagaaggaacctagtttcgcccgaaaaggaccagaaaggaaaggaagctggaaatttgagcaagatcaagggaatcagaagctgccgccagcgccagcaccccggcaagccaatgagctcatattccggtagagacagtacagttgccactcctgtaatgacttttcccagtgaagcggaagcgatggcagatgcttgggagaaggagaagttggccaaaatcaagaagcagtacaacgag

SEQ ID NO: 24840 - DNA, 369 bp, Setaria italica
  Peptide Sequence Number=SeqID_90814
ctcaacaaggtgaaccggttctacaagggcaaggaggaggagttcctggagcggggccggtcgctgcggaagcagatggacatcctcgccgacctcaaggccgccgccagggaggacaccaccaccaatccctccgactcctccgtcgcctccggcggctgctccgaggatgagtccacacggtacgcgatgacgtctgagacagacacggaccagctgagcgagcaggaggccaccacaccgaccaaggaccccggcgtcacggctcaagaagaccggcagatggatctagacggttctggaaccttcgggaggtcggcgagcggctgcgggaggaagagcctcaagatcaacatccccctgaccaac

SEQ ID NO: 24841 - DNA, 522 bp, Setaria italica
  Peptide Sequence Number=SeqID_90815
cttcgaacgtatcgcagcaacgagagaaccatcacattggacgaaaccatctctcaacgcgccttcaacgtgcagggaaagtcggttccaggaacatattggctccggcttctatattgtgtcagagcagagcccgttcctttgcaaatcacctgactggctccatggactagatgttctctctcacctatgctctgcctttcttctacgttgtccatagggaatccacgtttagtaccggttcggaagcccctcaagtaccagtactggcaattcggtactagagtggggtcctttagtaccggttgaaataatctgtactaaagggcctgccacgccgcgcgcggggcggcctatttagtaccggttggtctccccaaccggtactaatttatttttttctttcttttcttattttctatttctttattctgtattcgtatttcatatttgtttcctttacgtatactagttcttatacgctaatatatataaagctctatttattcttttaaaaaaaaa

SEQ ID NO: 24842 - DNA, 282 bp, Setaria italica
  Peptide Sequence Number=SeqID_90816
agaaggggcctctctagccatccgggagaaggggtcggagcagggatttggaatcctcccggctcgagcaggccttgctgccttgctggagtggttttttcttttctcggtcccctactttagagatcgaagaaaagatctggttggagttgctcttagatacagcctgaacatctcctgtgttgatggtgcccttgtgtcctgaaaagtcatggtaactgacacctccctcgagcatataggtgacgttctacaaatcctctggtggggatgatcagtaaa

SEQ ID NO: 24843 - DNA, 542 bp, Setaria italica
  Peptide Sequence Number=SeqID_90817
cgccgccgtcgttctcggctgcggcggtggggatggcgtggctcgccaggtcctggtacatcggctccaccatcttgtcctcggcggcgaggttgatccagatgttgatgccccgctgcacgccctcgccgccgggcacctccgcgtgcacgacgccgcgccctgccgtcagccactgaacatctcctgtgttgatggtgcccttgtgtcctgaaaagtcatggtaactgacacctccctcgagcatataggtgacgttctcaaatcctctgtggggatgatcagtaaagccagctggcgcagaaaactcgaactcgtcgaaggacaggataggatccaactccggcagctcaggcctgccgatgctccgccagagcgcaaagccctccacgtagggctttcgctcgcacgtcagtgtccggaccaccgcccgcggttcgttcatcacgtcgccgtcgtcgtcgtcctcgggacgacgcagctcctcggtgccatggctctcaatcttgacagcctccgcgggaccgggatgccgcctctcg

SEQ ID NO: 24844 - DNA, 312 bp, Setaria italica
  Peptide Sequence Number=SeqID_90818
cccttttgcatctacaaacaatccatcaagcccgtagttgtaatctaagcaaaatctctctttctctctctaaaatgtatgtacatcaattgttccattccattccatcgcagctcttggaattcatggtgttcgcctccggaatatcgggttcgtcgcgctgcctcagccgtggtgcctgcccttggacctgctcctcacgctgccgtccccgccgctgccgccacggcccctcgtcagcgacgacgaccgggggctctgcgcgagccgccgtgacgccctcttcttcctcaggctccggccgccggaccc

SEQ ID NO: 24845 - DNA, 420 bp, Setaria italica
  Peptide Sequence Number=SeqID_90819
aacaaatagtcaaatgcaaattaaataaagctttttcactgtaggttttcgttacaaaacaaatatgtatatgtatacatacatgaagagacgcaaattgcagccattggttatcatgcctccatatggcgtgcccacagtgaacaaatcatcacacggagctgcagtccgccggctggaaggagaggacgccgttgcccatgtcgtacagcaggtgcatgttctgatgcatgtagttgccgatgacggtcgtctcgttcatcggcagcgtcgcgttcggccgcgccgcgctgaacaccaccatgcacgccgtggcctcgtccacgggcccccagtagttctccggcggcaccaccaggtccgacgaagcgccgccgccgcttccaaagtgcagcaccagcggcggcaccagcttgctgg

SEQ ID NO: 24846 - DNA, 226 bp, Setaria italica
  Peptide Sequence Number=SeqID_90820
gtgatcttcttcatgtctttttttccccctttgttctgtgtcgtgaaaatgtgtagtatacccaatgatttaccaggtagtaccgtagtaggtcgacgtggcataggatcaaacgccgcccacgcatgcttatacgccatatacgcaggatgtaccatgtgatgtactgtgaaccgtacattttttatgaacggctcagtgtcagccttaatcttccaaaaaaaaa

SEQ ID NO: 24847 - DNA, 443 bp, Setaria italica
  Peptide Sequence Number=SeqID_90821
gtgaggttgagcgtggtggggtcgagcgtgacgacgccggaggaggcgatgcacaggatccggcggtaccttcccctccacgagtgcttgacgacgaggtaccgggcgaggtactcgggctcctcgggaggcccggcgggggcgacggcggggggccgggcgaggtggccgcctctgcggcggcgtggcggctggcgaagtccatggtggctaggctcgggccggcattaggtttccgccaccagggtaggggaggggaggagtggcgcgagtgagtcgcccccagcgcggcgaccgatctcgaagggagacgagatccccctgctgctgctgcctcgccggtcgccggaggagggtgctcgccggcgctgcggccggacaatccgttgccgagattttgtgctgcgcgatgactcgtggtgcctcgattgattgatcgatcg

SEQ ID NO: 24848 - DNA, 126 bp, Setaria italica
  Peptide Sequence Number=SeqID_90822
agcttcgcagatgtctcaagccaagagctccaaccatactccataagggattcaacattggaagggtttgaatccagcaaatcaagaagatcacttaaaatctttgtacgtgctgaagcatcttca

SEQ ID NO: 24849 - DNA, 806 bp, Setaria italica
  Peptide Sequence Number=SeqID_90823
tcgcgcagaacatcccgtgggactacacgggcgacgacatgcgcgcgctcttcgagaagcacggctccgtcgtcggcgtggaggtaggcatctgcttcagtcccctccctctcttacctattcgaagtttttgcttcttgatacagctctgtaatagtagtagcagtcctagtgttagacggtggatgctgtcgaaagcagtggctgtcggattgaagtattagtactgttggagtagtttgcagttgctcaacttatgtagagacagaaagacgacatggcttgaagaagaaactgaaatgcatttggtgtgtaatgggcctcacgatccatttttgctgtgctcaagtaggtgcaatacaatagttgcaaggctttgaatctgaaggaaagctcattctatgcttgtgcgaatctggctgcaaagtacaaacatgacggctaatttagaattctgctactaaaatggggacatgaggaggttagtggaagcaatattcagagttattgtcaggttgttgcaaactccgtcggtatgcgcagagcttaattacttgcaaggtgcccctccctttattaactttggagctagttatattttgttaaaaaaatatttgggttagtcttatatgatttcaaagtcttgtatttggatccttgaataatggtttagtgctaccatattactttctactgctcatggaacaatgacttaactacttacgagaaagtattcttgttttcatggccggccgctcattaatccatttcacaatgggtgtttgctaaaattactcagctctatt

SEQ ID NO: 24850 - DNA, 858 bp, Setaria italica
  misc_feature (851)..(858): n is a, c, g, or t
  Peptide Sequence Number=SeqID_90824
aacatcccgtgggactacacgggcgacgacatgcgcgcgctcttcgagaagcacggctccgtcgtcggcgtggagctttcaatgtacaatgccagtaaaaacagagggttggcgtttgtaaccatgggttcagaagaggaggctcttgcagctctcaacaatctcaattcaactactttagatgatagaaagatcaaggtggactttgcgagacctagaaagaagcaacctaagcaagttaagcaacctgttgtggtatcagatagcacggaaaagtatattctgtttgtcggaaatttgacatggagagtcagaaatcgtcaccttcgcgaactatttgcctcggccccaggtgtcctatcagctgaagttatctttcataccactacgccaaggcgatctgctggttatgcatttgtttctttttcttcaaaagaggctgcagaggctgccatatcttctttaaatggacagaaattgatgggacgacccattaatgtgatgttcaaagaagaaagtgctaaaaagaatgaatcttctgtcccaaaggaagaggaggccgaggaggaatcatctgagcagagtgatagctaaacactaacttttcagagaatcaagaaaagtgaaatgaattgatctgtggttacatatattctgacccatggacatggtatttctttttcagcagtagttatatcttttgttttatttatctctatttattccatgtacatattggtttaccaagattggaagttgttttccatgtgagaaatgaaacagcctccttaacatgttattgttgattacatgtctgtttatttatgccgaaccttacaactatttgcccnnnnnnnn

SEQ ID NO: 24851 - DNA, 701 bp, Setaria italica
  Peptide Sequence Number=SeqID_90825
cgcgctcgccgcggcccagggctctcccggcaccgccacgttctacggcggacccgacggctccggcaccatgggtggcgcctgcgggtacgacaacctctacaacgccgggtacggcgtgctcaacgcggcgctgagccagacgctgttcaacgacggcgcgtcatgcgggcagtgctacaccatcacctgcgacagatcacgctccggcggacagtactgcaagcccggcaacagcatcaccgtcacggccaccaacctctgcccggccaactacgccctgcccaacggcggctggtgcggcccggggcgccctcacttcgacatgtcgcagccggcgtgggagaacatcggaatctaccaggccggcgtcatccctgtcctgtaccagcaggtcaagtgctcccgcagcggcggcgtgcgcttcagcctcgccggctccaactacttcctcctcgtcaacatccagaacctcgccggcagcggctccgtgggagccgcctgggtcaagggcgacaacacggggtggatccagatgtccaggaactggggcgccaactggcaggcgctcgccgggctcgtcggccaggggctcagcttcgccgtgaccagcaccggcgggcagtacattcagttcctcaacgtcgcgccggcgtggtggcagttcggccagaccttcaccaacaactaccagaatttcg

SEQ ID NO: 24852 - DNA, 419 bp, Setaria italica
  Peptide Sequence Number=SeqID_90826
aaaaggcagtgtgccattcactgtactatgcaataaactggatcagggagttgctcaatgctttcagcacacaggttgcaagtaggattgataatttctcacagaaagcaagggatgagacagcagtaaaacttctaaagcgtctgagaaatctgatatttcttgagggcttgctgaatgcgtttctaaaaaaatatcctctatctctacctgagctgcgatatcttggggattgttctggatcaactagcaccagcaaattcaaccttccaaagaaaatgggagaagagagcatggatggcacatcttccaacaaaagacaaaagggtcgcaaggacaaggcagcctcagaaagaatgaatcctgatgataaactcaagcaaccttacggttacttagattgcactctgagcgagcta

SEQ ID NO: 24853 - DNA, 717 bp, Setaria italica
  Peptide Sequence Number=SeqID_90827
cagttaatcgttaatgatgtgaaatcatataatgtcttgtagtaatgagggtgaggggctatctggaaatcctctaatcacatgccttggcattccatgaatcttgtgacaagtaaatagctgagagcatctggatcacttatgctatatgaggaaattaacagaggctctgaaccaacctacagtaatatcaatatagaaaatcccaagacagaggaacatgcctggcacaaatgtggcaccaagaaattacccaagagaccgtgcttgcagaatggaagacatttttcgtgcaaaaattattcagcctaggtaaaattgaagaatatgtagcaggggctgaataaagcatatcagtgccagatcaacagcatgtaaagatgagttttactgttttagaaagaaattaggggatcataccacataaagagcatcatcccctctcaagaaacctttggtgccatcaattggatcaagtacctccaaaccaaagcataaactttatgacatattaacttggcagataccaataaatgaattaacttcaaagaactgaacgtgtatgataaataaaacatgacagcttactgattacccaataagtagcagggtttgaatcaaatgagacagcatccttgcctcctctatcaattgctctcagcacatcatcttgagttaaaggtgaaccactgttgctcactttgtctgcaactgcac

SEQ ID NO: 24854 - DNA, 1296 bp, Setaria italica
  misc_feature (1)..(29): n is a, c, g, or t
  Peptide Sequence Number=SeqID_90828
nnnnnnnnnnnnnnnnnnnnnnnnnnnnnagaacgaacgaaaggacgaagcatcacggctcgcatgaattgcgtctgaatgaagttgcttaaggagttgttcagcacattgctccgaggtaatagtgtgtttccatccatttaattttgtggtaatggcaatggaagtcatatgagtatgttttgcggtttctctgctgaatctgaatgtcagacagaatacaatttgatggggggtcaataaggtaaattggttccaaaaaaatcaatgtgttgatgtgtgaagtatcaatgcagctacttgtaattagctgagatcatttcaacaagcttgtcatgcagagctccatttgtcaccagaacaccgcccgaagggtagatgattctgcgagatgttaggtcagctgcaagatccaacggttttccactccagtcactaatctggccaccggcttcctgcacgcaaattaccccaacagcatgatcccaggacttgatctgagttgtcgtccgtgctcgaaggacaaaaacggaggctctcccggaagctacagttagatacttgcacaagctgccacagaaaaccgataggagaagaatttcattctcatttctaggatcagattcacccgttgttgaattgaagagaacagataatggtatcatatcccatgtttggctatctggaatgcaatagcgtgccatgtgaacaactgaacatgtatcaacaaagcatcttttccaaatatccggtgcggtagtgaattggccaatctcagcagacaagcgcctagtccatgtaccacagcctagatgagatatcataagaatcccacggccattacatgcagcagcactgtcatctttcccgttggctacggtataattggtccaattcggacatcccatcactccaactgttacctttccattcaccacaagagccagacccaccacataaagagcatcatcccctctcaagaaacctttggtgccatcaattggatcaagtacccaataagtagcagggtttgaatcaaatgagacagcatccttgcctcctctatcaattgctctcagcacatcatcttgagttaaaggtgaaccactgttgctcactttgtctgcaactgcactaaaaattgactcaacaagtacatcactactattatcgtcagcttctgatgaccttagagatgccgagtcctcttctgccaccagaggtattgatgggaacagtctctggagttccaaactaacaagggcctgcacccgaaatccgcaattgtgacaggta

SEQ ID NO: 24855 - DNA, 423 bp, Setaria italica
  Peptide Sequence Number=SeqID_90829
acgatcaataccccgatcagcaacacatttctcagcagtttcaatgaacttgtggaaacactgtgcattaattcttccttttatatatgggctaacaatttgatcaatgttaccctcctgcttgcactgcagtgcccaatctaccacgttacctactcgtattggaaaaatgcagttcataactggtccggcacagaggacctcaaacaatacagcaccaaaagaatagacatccgatttctcggtcagctgaaaagtgcggaaatattcaggatcaataagaccaccactgctcttgaaggttgtggtctcaccagttgatggctcagtcgtggaaagaccaatacctgtaatcttggcaatccaatcctcatccagcagaatatcagacgtgttaatgttgcggtgaatgatctgtagcag

SEQ ID NO: 24856 - DNA, 294 bp, Setaria italica
  Peptide Sequence Number=SeqID_90830
accccttcctctctccccgtcgcgtcttctcaattagcagagacggagatggcatctggggcggcggagaaggggaaggccctggcggatgcgtcggagtcagcggcggagagcgcggcgcggcgggcgcgggagtggaccacgtgggcgatgaagaaggccaaggtggtggcccactacggcttcatccccttcgtcatcctcgtcggcatgaactccgagcccaagccccgcctcacccagctcctctccccaatctaggccggccagattgattctcgtccggtcgctctc

SEQ ID NO: 24857 - DNA, 445 bp, Setaria italica
  Peptide Sequence Number=SeqID_90831
gccggcgccggcggcagcatgtcctcctccgccttgctctcctcggcggcgctaccaccgccgttcgtcatcgcagccaccgccgcggcggggatggcgacgtgcttctcggcaggcacgctagtcgtcaccacagaagcagcagcagcagcgctgttgttgtcctccatgctccaaccaggtgaacacagctccttgctagagtgaagagcgagcaagcaggagacgtcgaggaagaggttgcggaggacgctcccgtacttatacacctgctgcgtgccgtgccgtgccgcgcttggtctttgcggcgatcgtcgatcgatcagctttggcctggcctggattggctaagacacgcacgtcccgccggcgggtgtccagcaccagaggctctctgctcgatcagcttcgtccttgctcttgacgtccagctgctgctgctcac

SEQ ID NO: 24858 - DNA, 631 bp, Setaria italica
  Peptide Sequence Number=SeqID_90832
gtgctacattgccattttagttatcagcatcattttctaatgagaacggtattagtactgacatactgttgaacgtcaggcatcatatagtaccactaaggtcattaagtcatcaagtcaactagtaaagtcaccgctggtccaactgtttgacttggtagattagtatgactagtctcaacaagacctgcttaggcaggaggcatattagtatgatggtgatctcaatgtgcttaagatcgcactcttgcttccagttgaccaccccaatggccccatgggcccaacttcgagtaacaaacaccatttctttttcagtgtatgagaaacagaagctgctgcctgcaggctctcccttcctccctctccctctccctctccctctccctcttcttctccctctctgccttctgtgttctcacatgtgtgtctgcgcggaaacttaatatatcactaatggaagatttgattatttcattgtcgattcatgtttcttccttaagacttttatcaagtatcaaccatgacaattatgacatcaattgtgaactatttcctccttgatgcatttaacgtgtatagaccttctgaaggtatttttttctggaatacgtaggagagctgcgtatca

SEQ ID NO: 24859 - DNA, 289 bp, Setaria italica
  Peptide Sequence Number=SeqID_90833
ccacacgccacagcacagcgtaggagagctcgttgagcgcgccggaggcagccacggtctcgagggctagcgtgcagtccctgacatcgtccttatccaggagcgggcagcggagcgcggcggcgatggcccgcgccgccgtggacttgccggaccccgggtggcccttcatcgccaccaccaccggcggcgccaattgctcgtcagccatcggcacactccccctcctcccctaagtaaccctaaagcatttcttggctctccctccgcctcaggcaatggcgaagat

SEQ ID NO: 24860 - DNA, 212 bp, Setaria italica
  Peptide Sequence Number=SeqID_90834
aaggaatgactccactgaaggagttctgagcaaggtggataatttcaagatttgttgcatttgctagtgattcagggatctctccctgaaaattattctcagatattactagattttcaatattcgggagtgtgttgcccatgttagaaggtaaggttcctacaagactgttccctgctatgcccagaaatgttaacgacgacaggttatag

SEQ ID NO: 24861 - DNA, 514 bp, Setaria italica
  Peptide Sequence Number=SeqID_90835
aggaaccgacctagaacaaccctaataagtgagttcgaatgttgcctctgccctctaatcactgcacgattgccctaacggatatagattgcatgcttgatgggtgcgcgtagtcgccacaggttccaattgcttggtctgccctctaatctctgtgtgaaattcgtgttgctcgatccgcagaccgtgcgatgaattgtggtgtagctgagtggattccgtgttttgatgccgatccgtagtcgaccccagttccgattgtttggtttccgtggtgtatgctacgggaattatgtgttgcggtgttgatccgtagcctgtattgaagaattgcggtttaaccgagctgattccatgtttgatttggatccatatcacctgtgagtagttgcttctattcggattgttgagtttcccattgcgtaaggtgtggattgtgatgtctagcctcacgtgtagctcatattgatgaacggtggggcaatcggacagatccgtgttttaatgctgaatt

SEQ ID NO: 24862 - DNA, 269 bp, Setaria italica
  Peptide Sequence Number=SeqID_90836
gggatggatagccacgccgccgggtcgagctccggcggatcctaggacggcggcgccgcgcccaggagcaacacgagaaagcccaagtgtgagatctccttccacgatatgatcttgctggtgttgtagccagttttaggcttcaatcaagcatgttatctctactttccttttcattttgtctggggtttagaacttttcttttgagtattttcgggctggttatcatgatattgtcgtgctcgatatataagttggtactggtcgag

SEQ ID NO: 24863 - DNA, 703 bp, Setaria italica
  misc_feature (26)..(26): n is a, c, g, or t
  Peptide Sequence Number=SeqID_90837
gaaattacctacacaaagaagcaagnacaataatattgaaacaaccataggattctctttttctatggtcagtagagaatgacgtgcagcatgctaataaagcatactgcaccttacttcaaactccaaatgcatgccttgcatggtttgtttaatcaataaggggttgggtgtaggatatgtcttcacttcactggttagttgactcaaaatgaagatataggccattatgtagaagggaaagtagttttgacaatacatttttggtgcagtaatatgctgccaaaatttattttgaatacggcatagaaaacacaacaacatcagatcagaataccataaaattcaaacagcgaaccaagagtagaaacgggcttactagttactaccatgctagtacataaataacagcgaccagagcaaactagttgggcagttagaaccacctggctaacatttagttccttagtgaaggatgtgtaatataattgttttgctggcttaatttagcaagctgaagaggatggcagatatgtcctgaagagacatagtgataattaatatagatgcatctaaagccgtatgagtatcattaacatttcacaaaaggaacagcctcaaaagacaatgaaaatatacttatagagagatgggaaaccaagcattggcattaacaacaataacaacaaagccttctagtcac

SEQ ID NO: 24864 - DNA, 393 bp, Setaria italica
  misc_feature (384)..(393): n is a, c, g, or t
  Peptide Sequence Number=SeqID_90838
ggcctccgtggaggcgccgccggagccggagatctaacggccggccggccggaggaggaggagccgacgaggaggctgtgacaccattcgagcttcgcggcgcgcggcgtgctccgtcgccggggtgactccacggtagcacggtgggggcaacctgtacgggcccacctgtaagtgccgcgtgggctgccccggccggctcgcgtgcggcgcgcggccgtggctcggtagcgtaggacttctccatgtctgatatctctccctctggtccggtgtaacataccgtggaattcaataatgaatcatggcataaaataaaaaccgccctcgccggagtgatttgtgtgtgctttcgctgtcaaggtggcctttgcgaggctttannnnnnnnnn

SEQ ID NO: 24865 - DNA, 381 bp, Setaria italica
  Peptide Sequence Number=SeqID_90839
gaccttcttcttggtgagggcgtagcccaccaccagccgctgctgccccgcggaggcgggcggcggggtcagcggcaccggctcccccgccgcagccgccgcctcctcgtcgtccgacacctccccgtgcaccctcatccccacaaaccctaaccctatccccgccgaggaatggcaatggaaccgccccccaacaaaaaatacctcaaaaaatctggaaaaaaatccaggaaaatccggcggcgatcgggggaaggaattcacggactgggatggttcaagatggaaggttcgaggttgggatcagggagaagataagacgattttcttgtgcaaagtgttctgtttttggagctttgcgttttaatggcgaggcgagtg

SEQ ID NO: 24866 - DNA, 408 bp, Setaria italica
  Peptide Sequence Number=SeqID_90840
tttttttttttttttcccctttttcaaacgtctgccaaatagcattgccctactttcgtggactgacacatgagagcgctcctataatgattagagcatctcactatttttctttgttggtgaatacattttttctcagcggatgattcgaaccccatatgtttcacgtttgcattgcacattcacctcaaaataggtcacactgaagtaggtcacagtgaaatcagtgatcatgcaaaacttgcactacgatggtaacggcttccagagatcatctgaagttctgaggcctttacttggacccgtaaagcagctgctggacacggccaaacaattttcacggatgaaatgactgaattatgtacggtttgagtggagctgtaaggagctcctatttcaatttgaaga

SEQ ID NO: 24867 - DNA, 418 bp, Setaria italica
  Peptide Sequence Number=SeqID_90841
ccgcttcctctccgtctcccctcgtcgtcgtcggcacggcaccgtacgcctcctcctccccctcgctgctgatagtgatagcttggcttcgttgtactccggggaataatccgggaaggagaagcggccgctggacatggagcgcagcatctcggtgtcgagggcgatgaggtcggcggagttgagctcgctccaccggctcttgaacaccacgtccgacacgatgatgcggtgcttgtgcctgtccagctccggcgacggcggcgccctcgccgacgccgcctcctcgtccgcctgctgcttcgggccggcgcctcccgcggcgaacctcgcggacggcacgcgctccacgaagatgtcgaggaggtcgcgcccgctccccgcgtcggtgtcgccgtcgaagcggccggaggacagg

SEQ ID NO: 24868 - DNA, 196 bp, Setaria italica
  Peptide Sequence Number=SeqID_90842
actggtcattgttccgatgagggtgcctatcgatgagagccctgtcttcctattataccaggaataacaaagatccatattgacaacagaacagagctcttcaaaacaatagaacaccacttgcagatctgttgtaccaggattcctagctgccgcgatctgcaagtggtgttctattgttttgaagagctcttca

SEQ ID NO: 24869 - DNA, 662 bp, Setaria italica
  Peptide Sequence Number=SeqID_90843
ccttcgccccctatccgcgtcccccgcgcgatcgatcggccgccgccgccgccccagcgagccagccatggcggagatcgccgagcgggccgtcccgggggagctgccggaggagccgcggccgccgcccggggaggaggaggacgaggaggaggaggagggggacgtgtgccggatctgccgcaaccgcggcgacgaggaccacccgctccggtacccgtgcgcctgcagcggcagcatcaagttcgtgcaccaggactgcctcctccagtggctcgaccatagcaactcgcgccagtgcgaggtttgtaaacatgcattctccttctcacccgtgtacgctgataatgctccgacaagacttcctttccaagaattgatagttggcgttggaatgaaagcatgccatgtgtttcaattcatccttcggcttgcctttgttctctcagtttggctcatgattatcccattcattacttactggatatggaggttaacatttgtgagaagtcttggtgaagcacaaaggctgttcctgagtcacatcagtgctcagttgatccttagtgactgccttcacgggttccttctctcagctatcattgtccttatatttcttggagccacctcattacgggactacataaggcatttgcgtgagc

SEQ ID NO: 24870 - DNA, 3319 bp, Setaria italica
  Peptide Sequence Number=SeqID_90844
tttaaaaagtaaaagaaaagaaaagtaacttaaggtagaaaggactagttacctagaatgagtcacatcagtgctcagttgatccttagtgactgccttcacgggttccttctctcagctatcattgtccttatatttcttggagccacctcattacgggactacataaggcatttgcgtgagcttggtggacacgatgcggagagggatgatggaggccgtgaaaggcatggtgctcgggctgtcaggaggctagcgggtcctaataatagggttcctgcagatggaaatattgatgaattagcagaagcccaaggaattggtgctggtgaacttctgaggagaaatgctgaaaatgttgctgctcgactggaacgacttgaggctcaggttgagcagatgcttgatggtctggatgatgcagatggtgcggaggatgttccttttgacgaacttgttggtatgcaaggacctgtcttccacttggttgagaacgcaataacagttttagccagcaatgctatattcctcattgttgtgatctttgttccgttctcattgggaagaattgtcctgtactatttatcatggtttttctcttcggcctctactcctatgctggcaaaaatgatgcccttcacagaaacagctatttctatagctaatgatacattgaagagtgcacttaatgttgtgaagaatttttcttccgacactaacaatgaaggtgttattgggcatgtgattgaggttgttactcaatccttgaagataaatgccactggtcttagtgtaattcaagggagtgggaggggcagtctgataaaaggaacagctatcggctcgtcttatctttccgatttgacaactcttgctgttggatacatgttcatcttctgccttgtattcttgtacatcggatcactggctttacttcgatatgccaggggagaacgttttaccattggaagactctacggtatagctactatattagaggccattccatctctatgcaggcagttctttgctggaatgaagcatctcatgactatggtcaaagttgcattccttctggtgattgagcttggtgtattccctcttatgtgtggttggtggcttgatgtctgcactctaaagatgctcggcacaacaattgctcagagagttgaattctttacaatgtcacccttggcgagctcttctatccattggctagttgggatcgtgtatatgctccaaataagcatatttgtcagtcttcttcgaggggtactgcgcaatggagttctttattttctgcgggaccctgctgatccaaattacaatccattcagggacttgatcgacgatcctgtgcataaacatgctcgacgggttcttttgtctgttgcagtgtatggaagcttgattgtgatgttggtcttcttacccgttaaactggccatgcgagtagctccttcaatttttcctctggacatcacgatatttgacccattcactgagattccagttgatgtccttctgttccaaatatgcatcccatttgcaattgagcatttcaagcctcgtgcaactattaaatctcttttgcaccactggtttgctgcggttggttgggcccttggattaactgatttcctactgccaaaacctgaagaaaatggtgcgcaggaaaattggaatggcagggcagaaagaagagataggggccatgttgggcgggaattggttgctccacaggttgaacaacgcatgatacaacatgttgctgcagaagataatggcaggggaaatccaaatgaagccaatgatgttgctgaagaacctgatgtagatgatcagggagactcagagtatggttttgtgcttcggattgtgctcttgcttgtactggcatggatgacactactgatattcaatgctggaatgatagttattcctatctcacttggacgtcttgtttttgaggctgttccccgcctgccaatcacacacggcatcaagtgcaatgatctcttctcctttagcattgggtgctatattctctggagtgcagcagctggaaccagatatgcaattgattatatcagatcgcggcagctaggaatcctggtacaacagatctgcaagtggtgttctattgttttgaagagctctgttctgttgtcaatatggatctttgttattcctgttttgattggactcctttttgagctactggtcattgttccgatgagggtgcctatcgatgagagccctgtcttcctattataccaggattgggcgcttgggttaatattcttgaagatatggactcggctggttatgttggatcaaatggcacctttggttgatgagagctggaggtcaaagtttgagagagttagagatgatggattctcccgtttaaggggtttgtgggtcctccatgaaattataatgccgatagtcaccaagctccttactgctctctgtgtcccatacgtccttgcaaggggagtcttcccggtgctgggctacccactcatcgtgaactcggcagtgtaccgctttgcctggctaggctgcctgatcttcagcgcgctcttcttctgcggcaagagattccatgtgtggttcaccaacctccacaacaccatcagggatgaccgctatctgattggccggaggctgcacaattttggtgaggacacacctgagccaagcgaatccggagcaactatagggtcagatgaccaggacagggccctagtcctgcaagatcatgaagaggaaatgggattgaggctgaggcgcaataacatgcgtgcaaaccaacagcccaggctagcagcataaggaaggagttttcaatggagagtgcataaccgtggtataaaccttcagcctgcagcttgtgcttgcggtttgtcattgggttgtagaggggagtctgtgtgttagtgatagggatgagtttaagtactgttgtacaacaaaagcctgggagaaagctaaaatgatcggacagtaatacggaaggtaactccctttcctgtggtagtcttggctgactgtaaatatcgtttgacagagcactaccaggccaacgcagttttatgtgatcctgttgtaatggctaatgaatcaagtgaaaacaatctgttgggtagatacaagatagattataatagcactatcaccccctttttataaaaattgtgtgccatatatttttttattttttagcaatgtaatatcgcattctgtgaagcggtggtgccatataatgctataagccttggatggaatgttatcactagaaaaaaaaaaaaaa

SEQ ID NO: 24871 - DNA, 525 bp, Setaria italica
  Peptide Sequence Number=SeqID_90845
cgacgacgacgacggaagcattacctgaggtcgagccatggcgcggttgatgaccaagacgtcggccaccttggtgatggcagccgcgttcctcctcctcgctgcggcggacgcgtcgtcgtcgtacgactacgccggcgcgttcgacaagtgcctgcagttcttcgaggcgcagcggtctgggaagctccccgccgaccgccgcgtcaagtggcgcggcgactccgccctcaccgacggcttctcccagggggtggatttggtgggcgggtactacgactccggcgaccacgtcaagtttgggttccccatggcgtacgcggtgacgatgctgtcctggggagtgctcgagttcgagaaggagatggtcgccgccaacaacctccagcgcgccctcgacgccatccgctggggcaccaactacttcatcaaggcccacaccgagcccaacggcctatgggtccaggtgggcgacggggacagcgaccacctgtgctgggagcgcgcggaggacatgtcgacgcc

SEQ ID NO: 24872 - DNA, 313 bp, Setaria italica
  Peptide Sequence Number=SeqID_90846
cgccgaagtggcgcgcgtacgcttcgaggtacgccaccacctgccggtggtccgggaacacctgggtcacgctctccggccacgggaagtcggagtactggtacatggggcgcggcgtctgcagctcggtgcagtcggggacgcgcgcccacacgccgccgagggcgctgccggcctcgaagacgacgggctggcagccccgctcgagcaggtgcttgcacacggccaggccgctcaccccggctccgatgatgaccacccgcttcttctccatggcaggcttgctagctagttgcctgatgcttgtgcgtgc

SEQ ID NO: 24873 - DNA, 919 bp, Setaria italica
  Peptide Sequence Number=SeqID_90847
tttttaagacataaacccgaaaaactacaaaacaaaccaatttaaatgtttcaagtttttcatcatccaacaatacagtttacggggaattcaaagaactacaagtacttcaagctaactgcaacagaacgtgtaatccccacctgttttggaaagtagcatagatctacagacaggaaagaatcacatgcacttccaacttgaaatgcctttcggtgttgcttttgttttctcttttctttttccacctttttaactcaagggactctgaatatcgagtcaaatgaacaaacacaactttatgcattacatatataccaccgatgttcacccacatatataggttgtaaataatgtacacaccagaccagtaacattactcgactccccataacatcttcaccacttaactgtaaaaaactttcacaaacaagttttcatggatgtcatgaagtcccttcagaattcaacaagataaccatagctcggctccacggtccagtcaacttcatgaccctcaagattcagcagcagtaggttgcatgcagcagaaccatttcttagaactgctaggtccctttgctgcatataacccttgcccagatggctgtgaattttttgtgggcacatcttgtccctgtgagttgccaccagtcttcttctcatccctggctttgttgaagattacagtgaacccctcagctgatgcagggtcattgacatcccattctccaaacttgggcagcggacttcctttttccgccgccatggcgattctcttctgcgggggcgagggagtggaggcgcaccaccggaaggaaaggggacgaaggaaaaggaagagaggaatcggtttcgagagaattaacaagtagaaacccctacaagactagaatagacaagggtacaattagaacaa

SEQ ID NO: 24874 - DNA, 1534 bp, Setaria italica
  Peptide Sequence Number=SeqID_90848
cccaaaaagtagattcctagtccaagtggaaattttcctgaattttcctcctggttttttgactgaacagtaggaatgattcttctagcaaacaatttttatttacaacgatagatttttcctcgatttacaacttatttacggttgggtaagaacaaaaaggcactcacaatttcacctgctggcacaacaaaataatgcagacatgcaggaaagaaaatgcctcacttattggtgcactccaaaaaaaaaaactatgtatgtacagcaactaaattgctccgaaagacctcatgaactgaatcccctgtctgaaaactactggaacttcaggaagccagtgtagtcctggggcagctgtcgacggagcaagcgaggatgtccctgtaatcgcgcgagatcgtgaaatggtcgtacacgttgccgtcgcggctcttcttgtactcgaacagcagggacgaatggttgaaggccgtgagcttgacgaagccatggtcgaagtcggtgaagtggctccattggaccttcgaggtggtgaactccgtgaggctggctcctccgccgccgacgaccacgtgcgtcgtcgcctggaacgggccgctgtagtggtccgatgcgttgacgatgcattggctctggtagactgggcatgtcctttcatagttgtggacgtggccatagaaggcgagatcgaccttgtacttctgccagagctcctgcaagccttcccgccccattggttcctcgaacgtgccttccaatccatagtaggcgcaggaggagtacccgagaacacggtgcgcaaggaagatgagccatggctgcttctgcctgtcgacagacgacaggcattgctcgatgaacttgtactgctcggtccccggcctccagtcctcttctgtgtgagcaatgcagaacctgaacatgccgtaatccgtcgcgtaccagaattttgcacggttctcagcaggagtgtagaacatggtttgagcaggaacaccgcattctccaccagagtcgaggttcccatagaatgatccagttccaggccaatcccgttcatgattaccacttccaatcatgtatggcaccgtcgaagcaattggctcgacctgtgcggtgaactgatcccactgtgacaaatacccattcgcgtaggaaatatccccaatgtggaccaccatgtcaatgttttccaagtctctgataatttggtaagtagtgttcagtgatcctggttggtagttgttgtactcgttggaaccatctgcttctgcctttcccatgtccccaaatatgacaactcgttgcaaagaatcttgtccagggtaaggcgatgcttggaagctgtatgacttgctccagatacgggtaccgttcattagcctatggccaagcctgtaggtgtacagtgagtctggccacagatccttcaggtagctagtatgaatgtagccaggatggcgccaaccaacagttcgtgccggtgcaccacacatgcttatttttgtcaaaagttaatgtaccagctggc

SEQ ID NO: 24875 - DNA, 441 bp, Setaria italica
  Peptide Sequence Number=SeqID_90849
accaaatccacgatggcacgtccggctcccctctccaatgccagcctctcgttgctagtcttcgggaagctctcttcgagagagtccatgtaggccgagaagaaccgcaagccctcgccgaacaccttcaagaacgccgcctccgagtcgccgccttcctcggacgatgtgtcagggtcagaagccacgagatcggcctcctcctcaacgacggtgacgacccgcgggtcgaggcgccggagggacgaggtgaacgcgtccctccggcgggcaccgcccggcaccacgccgcgcagcgagttgacgcagttgacggcgagagcggtggaggcgccgccgtcgcgcagatcgagcgcgtcgaggtcgagctccgcgaggtccccggcgtggtgcacggcgcggaagctgaagggcacgcccatgagccgcgcgaacttctcc

SEQ ID NO: 24876 - DNA, 284 bp, Setaria italica
  Peptide Sequence Number=SeqID_90850
tttcctcgtaagctaggcgtcgttgttccctgccgagcgagcgaaccggagcagcgccgccgtcggggagggagcccgccggtcccaggatgaggggcctgacccgcgcggcgaagcgcgccggcgagatggccttcaacgccggcggaggtgccgtcaactggttcccgggtcacatggccgccgcctcccgcgccatccgggaccgcctcaagctcgccgacctcgtcatcgaggtccgcgacgcacgcattccattatcctcagcaaatgaagaccttcaa

SEQ ID NO: 24877 - DNA, 387 bp, Setaria italica
  Peptide Sequence Number=SeqID_90851
ggtgcgggccagcaggccgcacagcatctgcgagtacatggactggaacgagtctgtgcagaggatggcggcggtcgggctcgtgtacacgttgtaggggtcgtaggggcggtgcttgaagtggtcgctcttgtagtagctggtcagcaccggccgcgccggcagaccgccgggcgtcgtcgtctccgacttgatgaacaggaagtagaggcccttccccttgtccagcccaggcacgtacaagttcatgacgggcatgaggaggctgtagagcatctggcgcctgttgagctcgtcctcgatcgtcggcattagcttcctctcccccgccgacgtccccgagctggtgaggaactcggtgatggggtgggaggagatgatgttgga

SEQ ID NO: 24878 - DNA, 1152 bp, Setaria italica
  Peptide Sequence Number=SeqID_90852
ttggttgggtatagtgctgacctttgcatgccggcacagtagagaataaagagcaaatgtgccaccttgaccattatcattggctcgcaagacgacaaaacatacttcatcagagggatgagagtaagtgtgtaaatgatcaaggacagagctccaataacatcttcatcatcatccaccccatgtggaaagatattgtagaaaacatacaatggtgatgtacctaagtcaccaaatactacgccaaggctctgaaatgcaagccgcagtaacaaaattgatgaaaacttcttttctctgtacatgttcttcagctgactggcctcctcatccatgggttgatcaaggttttgatccagctcccacatacttccccggttggttgtctcgctatctgatatcgacgccattagcatctccttcaaccttcaggtcacaatcccacctcaaaacctcacacctgagagctccccaacggccgaaagtgacttccccttcgcatcaaccgaaaatggaactccttaacttcccaaattgagcaccggaaattaaaccaccaaaaccagaatcaggaacaaatctctggccctctcactgcaattccaccacaaatccccacatcagcagcggcccaagaccgaccgtcaccttggtctacgcaaacagcaaatcctccaagaataaccaagaacaggagcacagataaccaaatccgaatgccacctcaaatcttcgaagaggacttgcagccaagaccgaactcttcccctttgatttcagcaagaaccagaatggaacctttggtccaagagccaagagccaagaatcggagcgagaataacccaaatcgagctagaaaccgaggatttgagcccaccgagccgaaaatctccactccaatcaacctcaaacgcttcagacaaagagacgaacctggacagattcgcggaaccaagaaaaccccaatatttcaataccaaaacctcagcaagattaagtttttgatgctacagttcccacaacggggacaagcagcgatgtgggccgccctccaattgtcaaaagcacggcaatccagcagacagaaggtttaggttgaggagatatgatttatgggagagagagagagagagagagagagagagagagagg

SEQ ID NO: 24879 - DNA, 2926 bp, Setaria italica
  misc_feature (2916)..(2916): n is a, c, g, or t
  Peptide Sequence Number=SeqID_90853
ggcggcctcgccctcctactacggcctcaggctcctccacagcttcctgcacccggatctcgtcctccgcctcgagcgcggggacggccgcgcgggtgctggcgctggcggaggaagcgggggaggaggacgcagctacgcgctcgtcccggccgacgagctctccagggcgctcgccaggcagaattctggctttggtctgcaaaataagcattcgtttgctggagatagtgctggtgcttatcctttggtgcttaggatatctgtccgagaaacaagtattctgaatctgaggatcagcaaaaaggacaacccagttgagaactacaaacgagcaaacaaaattttcaatgttgattctcaaccagttcatgtttgggatttttcagggcagacaaacctaatattaatgaatgaatggaataggctacatcatgactgttgccatgcagatcaagagaatcttctggaagtgcaagtctatgcaatgtccgattccttaacatccaaaatcggaggtaccaacaaagaaaattccggagatgttgatgacttgagtgctgattcatcctacagaagctttggaagagctggctctatggggttaataggattggagaatcttggaaatacttgcttcatgaacagttcaatccaatgtttggctcacacgccaaagcttgttgattatttccttggtgattatgccagaaatattaatcggactaatccattgggattgaatggtgaacttgctttggcgtttggagaactgttgaggagcttatggaccactgacagaaaaccaattgcaccacatcatttcaaggaaaaaattgcctgctttgctcctcagttcagtggctttaatcagcatgattcacaggagcttcttgcttttttattggatggtctccatgaagatcttaaccaggttaagtgtaaaccatatgaagaagcaaaggatgcaagtggccgtcctgacgaagaagttgcagatgagtactggagcaaccatttagctcgaaatgattctgtgatagttgatacctgccatggacaatacaaatctacattaacttgtcctacttgcagtaaaacatctgtcacatttgacccatttatgtacttatctttgcccgtaccttccacggcaaagaggacaatgactgtaacagttttcagcactgatggtatcagagaaccatgctcatatgatgtcagtgtgcccaagtttgggactcttagtgatcttgttcaggctttaagcattgcttgcttacttggaaatgatgagatcctgcttgttacagaggtctataataactgcatcattcgatacctggaggaaccttctgattcggtttcattgctaagggatggagataaactggcagcatacaggctaccccaaaaaatatgagaaatccccacttgtggtttttacacaccagcatatggatgagtattctagtggtgataatgtaactccacaaaagaaggaatttgaggccccacttctggcaacccttccagagacagtcaatggattattgcttcaggatatctacctgaaattgttaaatccatttcgactttccaagggggctaactcacttagtggttttgcagggtctaatggtgaccctgttgatctgatggatggaatgccttctgattcagacagtaattttcagaacattcaattggaagatgacactgaaagcagtaactgcagtactactgattgtgaaataagaaaaggacccagtgagttatatgatatgggtacagctgattctgacaagggagcaaacgtggaagagtttgaattttacttaaaaaatgaaagggtgatggccagcaacagaaaatagatattaatgaagtggatttgcttgagacaataccaagccggttgcatgtgaatgtccactggcaacaaagtgcgtcaaggcaatatgacacctcaatgctgaacaatctacctgagattcacaagcttgagctaatcccgaaaggaactgaagattctgttgcactacatggttgtctggaagcctttctaaaagaggaaccattgggtccggaagacatgtggtactgtccgtgctgcaagaagcatcaacaagcgatgaagaaattggatctctggaggctgcctgaagtccttgtgatccacctcaaaaggttctcgtacactcagttcacaagaaacaagcttgagacatttgttgactttcccaccactgatttggatctatcatgctacatcgccaacaagagtgagcagccgagcagccattatcacttgtatgccattagcaaccactacggaaacatgggaggggggcattacaccgccagcatctatcatgaggaagggaaaggatggtataagtttgatgatgaatgtgtaactcctataagtgaagacggtataaagacgtccgcagcttatgttctgttctacagacgagagtgaggatacaggagcattttctgcatgtgttttttggctggcaactccagaattccctacataccagccgcttcaccatgtctgatttcaccatgtcggcacttggatctctcgagtcatactaacttacctatacaacagcatgtacagattcagctgccaacaggagacaccgaaagaacctagctgatgcaatattcttttttcccagctcacaatattcttatattctttagggtacatggcccgggcccccccaatccccaggcattgtaatctccaccagtgaaggaagggtcaacgaacacaattcttttgtcgccgccgcccgcttgaattcttgctgagaattcgaggcagcgatgtaacagctctgtaattaactccagtgtgatctgttcttgtccagatttccaaaaaaaaaaaaaaaaaanaaaaaaaaaa

SEQ ID NO: 24880 - DNA, 450 bp, Setaria italica
  misc_feature (7)..(7): n is a, c, g, or t
  Peptide Sequence Number=SeqID_90854
atctgcngttttactctgctgcataagaaagatggatatgtcacataactacacccagaactgtgaattcatgcaacatacgtagtaacctacattatacaaaggataaagaaatgtgattgcctgtctagttcaaattcaatttgatttgctttatcgattattattattacagaatgtggagttgatcctttttctttttttgaacattcatgctcttagatccctttctagtgctcttggaggcttggatggaatggtcacttttctttaacagttcctgagaattgacacttttccccttttccagactcatccttcacaaacatgcttcctgtcatcgatcgatttgcatactcaatactcttaccaggttatgttgccagaggctgttgcaattgtggttgcacctaccgaccctaccaggagttatggaatatttaggctgac

SEQ ID NO: 24881 - DNA, 1804 bp, Setaria italica
  Peptide Sequence Number=SeqID_90855
agtagataatgtactggatttatgtctagtgaaaagcaatataccctggcatcctgacccttagtagtatgatagtggcatatcttgcatggaacgggaattatcaggatattattatcttgagtgcttcaaaataggctgcaagtgattccattagttactctatatattgcatctgctgtttttactctgctgcataagaaagatggatatgtcacataactacacccagaactgtgaattcatgcaacatacgtagtaacctacattatacaaaggataaagaaatgtgattgcctgtctagttcaaattcaatttgatttgctttatcgattattattattacagaatgtggagttgatccttttccttttttgaacattcatgctcttagatccctttctagtgctcttggaggcttggatggaatggtcactttctttaacagttcctgagaattgacacttttcccctttcgtcggcgctctactctcgtcgctcgcctagtcgcctttccccaaccttccttcgttccttccccgcgctgttcgacggccacacgcctggctctctctcgccgatcccttcccgccgatcgcgcctcagctctgctccagattttccccaggctaaaattttagtgttctgctccagcgatgagcagcaggagatgtgacatcaatgcatggagatgtgggactcactcaacgccaagtaaatcgatgtatctagatgctcaacaagctgtccactgccaagctacagaccgcgatgctggttcctgcgctgtgaagcatcacttcccgtctccaatcgtatcttggatagaagatctatcgagctttggcaatgtttcttttagccccgacactgaatatgtggatgagcaagccagagcttcagtgggacagtcttcaacatcaagcaatttgcatgacatgcaaatatcagtgagattgacagacgaattcatggagcttgcaaaggagaatacaagcaataatctagagacttgcggaattcttggcgcttcatttagggatggaacttactttgtgacaatgttgattataccaaagcaagaaggaactgctcactcatgtcaggctgttaatgaggaggagatacatgctgtattatcagagcagtcactttaccctgcaggatggattcatactcatccttcacaaacatgcttcctgtcatcgatcgatttgcatactcaatactcttaccaggttatgttgccagaggctgttgcaattgtggttgcacctaccgaccctaccaggagttatggaatatttaggctgactgatcctggtgggatggaggtgcttagggggtgcgatgaaagtgggttccacactcaccgagagacaattgatggcagtccaatctatgaaacctgctcgaaagtgcacttcaatcccaatttacggtttgagattgtcgatctgcgttctggtgcatgatcaatgaagcaaagagcagcttgttcttccttacgctccctcttggcagaagtatataccgtagagcttacaggtgattcctgttaggtagataaacaagctgttaatgagctgtaaccaagatgcccatattgctgatccgtgatatgtcaaagccttttgacatttgtgctggtattcgccagaaagagcctaactgaaaaattagcacgggctatcctggatgttcaatctttgagctggtatctgtaattatgttacttgggaaaaaataacacatggttatcttgggctgggctgaagtgtgctgcaccactccaaatttttc

SEQ ID NO: 24882 - DNA, 321 bp, Setaria italica
  Peptide Sequence Number=SeqID_90856
gggccgcgtcgggttcatggcgggcgggcggcggtggatctgcgggccggatctggatctcgccctcgccctccgcctcggtgggtgggaggggggtccgggaggagcacgcggaggagggagacgcggtgagagggagggagggagggagggagggaggggaagcgcacggtcggtcggtagggtgggcggcggtggggaatcgagctggaaattgggggagattcttgtcagatcacaagagtttttgcttcgcggagagggttggagaaatggagagtgcggttacgcgcggagaggggcgtccacgctgctgtgctg

SEQ ID NO: 24883 - DNA, 487 bp, Setaria italica
  Peptide Sequence Number=SeqID_90857
gcgccggggaagggcggcgagtaccggccctccttcgcggacgacctcctcctcgccttcttccggagcaagatggtggaggaggttggatgggattcggaaaagcctgggtatgccgggctgatggaggttgccaatcgtctcatggtcaaggggaagagtgctttggagactgagcaagcagctgtccgagtactacagtcattgtttccgcctctattgcttgtcctatacaaagcccttttatcgccaattgctaatggtcaactagctgccatgatgctcgctagagcgacagcactttcatgccaatggttaatgggcacatgttcagttaattctgtcactcttcctgatggaaagtcttggtcaagtggggtgttcgttgagaaatgcaaatatctggaagagagcaaatgccttggtatttgcatcaacacgtgcaaactgccaactcagactttcttcaaagatcacatgggcgttg

SEQ ID NO: 24884 - DNA, 318 bp, Setaria italica
  Peptide Sequence Number=SeqID_90858
ccctggcctgtgaaatggatcagcttcttgatggccacgacagtgccatccttgagcttggccttgtaaacctcaccaaaaccccctgaacctacgagggtctctgcactgaagccattagtcgcctcgaggagatgcgcaaaggtgagcttcctgagcggcttctcaaacgtggccacgttgatgcttagaggctcgtgcacacccgaaagcttccagctcgatgtgccggatgtcggaaggctctcaatgtacccggttctcatctcttcagtcttctgattcttcttgagcttgaagagtgtgaccagcagcagc

SEQ ID NO: 24885 - DNA, 360 bp, Setaria italica
  Peptide Sequence Number=SeqID_90859
ttttgttctgtaacagcaaatgattttgtagactcgagtcatcttttcccaggaaaggcataggagctggcaccaaaaacccacattggttttgagaattcagcatccaaagcatacaattgaattaccacattgctctgctcatcccatttatagatattccaaaatccactctgccgatctgttatgaagaaaagctccccttttgcggaccacttgggttcagtaggagattctaccaatgctgggtctccaccagcaatgcaaattcggttatgcacttctcttgaccacggggagaagaagtccctcactatgccttaagagaggggagtaccgaaccctttagggaggtactca

SEQ ID NO: 24886 - DNA, 474 bp, Setaria italica
  Peptide Sequence Number=SeqID_90860
ttttgagaattcagcatccaaagcatacaaaccaaatacaacattgctctgctcatcctgtaccaatagcaagaaagcaagatttttccagcaaaaaaagttcagatatttatataatttatgtgcaattacaaccctccaagttgagagcatcttagtattaggttatcaatgaaagtgttactactaacctacgtgatggagttgacaaaataactcaatagtcaatatgcaagtggtttatcataattgtttctgtggaaaggcacatattatgtaaaaggttataatttgttaaaaacagaagaaatagagactgaagatttgccagaaataaatatagaaaagattagttataagacggtcactggaacaatacagacagtatgccccattccattctctaattacatagttcagcaacgtcagaagtatgaacacaaccagatcactaggcaactgaatagaaaaagg

SEQ ID NO: 24887 - DNA, 379 bp, Setaria italica
  Peptide Sequence Number=SeqID_90861
ggcgaggaggggagcatgtggacggtcgacggagcagcatcgccgagcttgccgccgccaggtagcgctgctgcgctcgcataagtagagcagaggaccgagaggagccaacggcgagtccacgagcgagcgacccgaagcggaccaggccaggaaagccggagggaggcggcggcatgtcgtggcaggcgtacgtggacgaccacatgctctgcgacatcgatggccagcgcctcaccgccgccgccgccatcctcggccatgacggcgccgaatgggcccagtccgacgccgtcccgcaggtcagtgaatagggtgaaacctgaagaaatcactgcaataatgaatgatttcaatgaaccaggctctctagcaccca

SEQ ID NO: 24888 - DNA, 308 bp, Setaria italica
  Peptide Sequence Number=SeqID_90862
ttgctcgtgaagtatcgactgaatgccaaaaatccataataccattggccagaattctggcaacagatttctgctcttcttgaatgcttgcttcttcaaatactgctcggccactagaagaaatccagtgggacatctgtgctgcggctgcacttttccacaggcgctcctgcatgaagtcatttgccatccagaccatctcctctagaacaaaatcccagtgactctttcgcttcttctccaaagaaacattgcagagagaccgttcaccagccctcttaatgtttgcctcgatataccgcgccctt

SEQ ID NO: 24889 - DNA, 369 bp, Setaria italica
  Peptide Sequence Number=SeqID_90863
gcagcagcgagggtggtatctgcccctccagccggttggacgacaggttcagccgctccagcttcacgaggtcgccgagggacgccgggatctcgccggacagcctgttccggctcaggtccagtatcacctgcagctccgacagctccccgagctccggcggtatcggcccctccagcgcgttctccgaaagccgcagctcgtacagcttgttgcattgccggagcgccggcggtatggcgccggcgaggccgttcttgttcaggttcagaacgttgagagatgtcagccggccgatctccggcgggatgctgccggagaggtggttgtcgctgagggacagcttgagaaggccggagcagttgaccg

SEQ ID NO: 24890 - DNA, 276 bp, Setaria italica
  Peptide Sequence Number=SeqID_90864
ggcgcagcagggccggagacagctactagccgaggtgggtgtgggatcgggcatcggagcgggacacgccgcggacttttccttgggcaacgccgtggacatggttcacggcctgttcactgtgcagcaatcaatcactcaatcaggttcaggccatcacagtatggcgtgccatgtgcggcgcacgggcggcgagggtgtcggcgcacgggcgtgtccctgtgggctgtggccacactctgtagtggcgatgagaggtggccttgctctcgccgg

SEQ ID NO: 24891 - DNA, 584 bp, Setaria italica
  Peptide Sequence Number=SeqID_90865
catacactctgctatctgatttctcttccatctcctcagttaggttatcaagatgtgaacaccactttggagccgggccgagtgcaggaataaagtgggcaggtatctggctattatccagagctaataacactaaaccactattccggaagatgcagacatcattgatagcaccaccatctggttcaatgctagtcatgttatttcctgtattaggatcccaaactctcactatgtgcttatcagcggtgataagtttaggttcagtagaattaagtgtctggtgccacttgatatttaatattggactaccgtacatgtgatccttaactcgcagaggagaagacatgcgtagatcatatattgatatctttcccgtgctgctccctactgccataaggtatccttgatcttcgtcaaactgcaaagatgtgacctcctgatcataatcttcagaagaaacagctggaatattaatcctgccaacagaagactttttcctcatatcaaagcactcaactgcaccatcctcaccaccacaagcgacaagcccatggaccatacttcgtgtaaccgcatttatt

SEQ ID NO: 24892 - DNA, 482 bp, Setaria italica
  Peptide Sequence Number=SeqID_90866
gggaatcgcgtctcttttatcgtcttttccttgttactcttgcacacatgcaggcaaagccaaagccatctccttgaatccaaaaaaatatttggatctccttatcctttacacatctaaactatggtactgcaaggtcctccatcaaaccaggcaagaggccttgtaagctaacactacggtactgtcacctagaactagaagaacatagaagtgccccgcctggcggcggctaggagacgtagcggagcgagtgcagggaggccgaggtgtccatggacgcggcgtcgtacatgcagcggctctccgtggcctcgatgccgtagtccatgagcgggcggcgctcaagctcctcgtcatgctcgcgcacgcagtccgggacctcgagctgccccttgtccatgtgcgcccacacgtactcgagcctgctcatgtacctcagcttctcgtacagcccggagctgaagaggaagcggccgaag

SEQ ID NO: 24893 - DNA, 436 bp, Setaria italica
  Peptide Sequence Number=SeqID_90867
tcatcggctccgtcgtgctcgactccacgcagggggtcctgtcaggtgtcgcgagaggttgtgggtggcagcacttggcggcatggaccaacctggtggccttctacatcataggcttgcccctggccatcctctttggattcacgcttggcttccaaaccaaggggctgtggatgggtcagatttgcggtctcctctgccagaactgcgtcctgctgttcatcaccctgcgcaccgactgggagaagtttagaccctgaccatagaatcaaacagggacaacgatttcgtctgctgagcatcggggaaggcatgccatgtagttttcatgtactttttgcacgcgctgttcttgttgactttaaccttgagcaacaacttccagagccacatcatcctgtaacactgcagtaagatagtagtaaaaatacatagt

SEQ ID NO: 24894 - DNA, 479 bp, Setaria italica
  Peptide Sequence Number=SeqID_90868
gtgggaaaaaacaatcccaataatatattttgtgctaattacaatttacccataccaaaaataactctagactctatactacccctgatagtattgtgcactgtaaaagatcctcaaatccatctattaatccgatctgtaaagagcgctgaagcggcgagaagaccgccgcctcttcacttcgagccgacgccctcgcagagacgacgccagtcaactctacgtcaattcttagtccactccgagcttcttcctcacgcctgcttcaagcaggccagtgaacttcatcttgagcacaatggcttcctcgagtgaaggtataaaccaagagcttaagtcccctaatctccttttctgggtgtcctaatgtagaactagatctaatgatcgtgtcaattttcaattgcaactagaatggatacatatggatacatctggactctcgccccaggtatctctttcttttctacttttacttc

SEQ ID NO: 24895 - DNA, 550 bp, Setaria italica
  Peptide Sequence Number=SeqID_90869
ttttgataggattcatgttgaaattccaactgaacaaccattactctttactgtttagtacatcctttttgttttcttgtcattttgtgcttccatattcctgttagatttcatgggatttgtttattttagtcccacaatatagtttgcgagtgaatatttcattatctttcccttgaaatacacgcatggtgaagggttatcagccaattgagctgcaactgctccgtacagagaattcatatagctgtgtactgtatccatgttttgcaatattataaataagtgctttagtagatccacttgcagtaatagttagttacagttttgctaaatttaatagatagcaaactaatatgctcgaacatgtgcccagtattgctctgatcgtttgagtgaacacagaccattacaaaaaagttgggtgtgtccttttggtcactttaaaactgcaagtggtatacacatggatagacatcattggcataagggttagtgcgctctctgacggctatatttatcctttgcaaattatccgcctatttctaga

SEQ ID NO: 24896 - DNA, 687 bp, Setaria italica
  Peptide Sequence Number=SeqID_90870
agcgttaagggctacgacctcatcgcgaccatcaaggcggagctggaaaagaagtgccccggcgtggtttcgtgctccgacatcgagatcctcgccaccagggacgcggtcgctcttgccggcgggccgccgtacgcggtgcgcacggggcgcagggaccgccgccagtcccgggcctacgacgtcaagctcccgggggccgactacacggcggcgcaggccgtcgcgtactacaccaggctggggatgaacgcgtacgacacggtggtgctgctgggcgcacacaccgttggcgccacgcactgcagcgccatcaagaacagccggctgtacgggtacggcggcaagcccggcgcgacggaccccggcatggaccccgccaccgcgtcagtgtacaagaggtacgtgtgcccgaacgtctcgtcatcggacgggaacaccgtgttccttgacgaccagtggagcgcggtcaaggtggacaaccactactacagaaacctgcagctccgccgcggcgtcctctccgttgaccagaatctctacaacgacgggtccacacgttggatcgtcgaccagctcgccagcaatgctgggctcttccagtcgcagttcgccagggttctggtaaagctcagcgaggtcaacgtgctcaccggcactcagggagagatccgcaaggtctgcagc

SEQ ID NO: 24897 - DNA, 1019 bp, Setaria italica
  Peptide Sequence Number=SeqID_90871
gccgcccaacactgaggccggggccggggcggagttctcgcagccgctgtcgtccggcaaggaggaggaggagaacgacgacgatgaggacgacgagaccgacagcgtggggtacgacggagcggggaacggcggcggcgcgccccagctgaagaaggggccctggacgcccgaggaggacaagcgcctcaaggactacgtcgaggcgcacggcgaggggaactggaaccaggtgcagcggaacgcggggctcaaccgctgcggcaagagctgccgcctccgctgggccaaccacctcaggcccgacctcaagaaggggcccttcgacgcggaagaggttgataagatcatcaagttccacatgatgtgggggaacaagtgggctaagatggcgtcccatttgcctggacgcaccgataacgaaattaaaaattactggaatactagattgaagaggcatcagcgagctaatttgcctctctatccagaacatttgtgttctcgggttctggatcaagacatgaaccgtcacattcctgatgagtcacgtggcaagaaacgatcaaacgagttaacgcaggaaaaagttgttggtatggatgatcttgtgggtgatcttatggtatttcagcaccttgactatggtaaggatccagtggttccaacaaaccctttgaagcgccacgcgtctactggtgatctgtcatatgtgcaatctcttgacaaggtggagaacttttattccaatgatttgaactatgtattgacaaagagtcagtcggtgcctcttggtagtgccactgccaatggctatccaatatttgatggcaatccctctacttctgggaccatacacaggtccaagaagacagggctcccttcattccaatgttccagctatgaatttagtaatagctggttgcttcaatgccccacggcttctcttattgaacaacagcttgacacctgtattcaatctccagagtccatgtcttcacaaaacactggtctgctgggtg

SEQ ID NO: 24898 - DNA, 464 bp, Setaria italica
  Peptide Sequence Number=SeqID_90872
gctctccgacgactgccggaccggcgcggcggaggcgatccgcgagctgagatcaatggggatcaagtcggtgatgctgacaggggacagcaggtcggcggccatgcgcgcgcaggagcagctaaggggcgccatggatgagctccacccggagctcctcccggcggacaaggtccgactcgtcggcgagctcaaggcgcgggacgggccgacgatgatggtcggagacggcatgaacgacgcccccgcgctggccatggcggacgtcggcgtgtccatgggtctgtcgggctcggcagccgccatggagaccagccacgccacgctcatgtccagcgacatcctcagggtgcccgccgccgtcgggctcgggcggcgcgcacgccggaccatcgccgtaaacgtggttgtctccgtcgccgcgaaggccgccgtcgtcgcgctcgccgtcgcgtggcgacccg

SEQ ID NO: 24899 - DNA, 497 bp, Setaria italica
  Peptide Sequence Number=SeqID_90873
gaatctctggccgctcaaaatctccattgccaatttccgattgggacctcaaatcagaacctgcttttggtactaatctgatctcatacaatccaggaacttgcatgatattggcatgattctgtttgagcaacagatcctgacgaagtacatcttcgtaatggagatggagtggaagcatcatggctgttccgcttttctttgagatacttgatcgattacgcttcaccttgggtgcatccaattccgagcccactgcttcactggatggtgttgcataatgacgaaggccctgataagggccggaggtgagaggccgaggtgcgtccgccgacggcaacacgcgggggaccgaagcccgccggagagcggggctaccgaccttcctggccaggtagcgcagcgccatggcaccgatcggccggatctgggcggaggaggacggcgcgggtggggtgggaggcgtgcgcgcgcgcgccgctagggtttggttggtt

SEQ ID NO: 24900 - DNA, 307 bp, Setaria italica
  misc_feature (281)..(307): n is a, c, g, or t
  Peptide Sequence Number=SeqID_90874
ctctatttgatcctactatgtctccaaggaacatggccataattgcttggaagttatctgcaaattcttcagaagcatgacatggtaaatcttctgatgctggaatatgtaggttgatgaaatgttgtgttgttaccaaagacagtctaatggcagaaacgtgatccttcattatattttgatacaattattgtatttgttgttttgctgtatacaacaaaactgaagatagtcttagctttgaaattatgatagcaatgcattatgagactgttctaacnnnnnnnnnnnnnnnnnnnnnnnnnnn

SEQ ID NO: 24901 - DNA, 264 bp, Setaria italica
  Peptide Sequence Number=SeqID_90875
ttggggaagtttatgaaggagttcttgaagacaaaagtatggttgcagtgaagaagtttatccacaatgtgaaagagaactttgctaaagagttgaccatccactgtgaaatcaaccataggaacgtagttaggctcattggttattgtatagacgaaaatgccctaactatggtcaccgagtatgtccctaatggaaacctgagtgatgttcttcatcatgaaaatgctcccatacctttggatatacgacttaggattgcaa

SEQ ID NO: 24902 - DNA, 422 bp, Setaria italica
  Peptide Sequence Number=SeqID_90876
cctttcacgtgaggcaggcctagcaaggccaggtaggccaacaggaagtagcaggggcacgcagcccaatagcaattgtccagacactggagctattcagctatataatataggagtagtcacgaaggaagacacggcacgattcagtggatcgtcattcctgttcgatccaagcagtagtgtttgccgcagagccatggctcagatgttgcaggatgatgctcaccaccatggcgtccatgagctgctccgcgaatcgccgcctccacgagcagcgctgatctactactctctccttctcgcatgccctgtgatcctcctgctgctgctgcgccgccgccgcctgacggcgtcgtctgccgccgcgagagaccgggaagcaagactgacttagggacaaggacttaccctttacgtactaa

SEQ ID NO: 24903 - DNA, 624 bp, Setaria italica
  Peptide Sequence Number=SeqID_90877
tttttgcatagtgtcaaagttgggagtttggagggaactaaacatggcccaagacccgttgcagctatcttctcggcagctgctttttgtcatgaatgttccctcactaccttatgtctcagcattagtctaaaactaccatctgctgtttgcacaaatgaaaaacacttctcaagaacatgatgcgacattgctggctccccaacaccagcgaacaaatcttcaactgataatttccagaatgcatactgaaagcatcctgcacttggagctcaatggtgtgacagaacagccccatcgtcgggtgctgcatgcgaatagcatccttacatgacatatgcatgaagcatgatagctctggttgaacctgccagccattcggatcattctgtagtgaaggcatgaagttgtccttcaaaactccaaaacaactcaagatttcatgaaatgccggtaagccatgatcacaactgaaatgtacccaactcctggatgtgcctcgtaagtttgatagtctttccgccaacccagtaaagacggtacgaaaggtcaagattatgaagcaatagcttcagattatcagcctcatctaattccttctttgtcttctctgaacttccatgt

SEQ ID NO: 24904 - DNA, 227 bp, Setaria italica
  Peptide Sequence Number=SeqID_90878
ttttggcaacaacagtagtagcaggagtcatctgcttcgttgtagtacctgagcaacgcccatcgggagtgcagtgcttcttcactgagtcgtcagcaatggacgcttcgccgtcgccggacttgggatcggccatctccttgctgttgattgcttcatgtaactgcctgtctagcctgattccatgtgctcttgtagccagaagtagcagcagcagaagagcggac

SEQ ID NO: 24905 - DNA, 498 bp, Setaria italica
  Peptide Sequence Number=SeqID_90879
cataggtacattgtgatgtaaggtagagtagtaaggtgtttgaatgacaaggcatgagaaagaggacactcttcactcttccatcatgggcttcttttgacaaataatacataacatcttccgttcctctttgatggaataacgacatatataaggccattggaacattagttatgatgagaagaataacagaaagttgcaaccttgaaaggcatcttttcccatgcagaattttgcccttgaattgtgacattgcagctaagcagtatccggagaacatcaatgctacaggtagcactggaagaacaaatctgaattctttatgtccaagtatgctgtaaacccctaatacccaagcgattaaacctgaaatcctccattcccgagacttgacaattccgcacattgcaaacggtaagaatgtccaaatcatagatggaaacccctgtgtgaagtaccagtggaagacatgtgttccatagtagtctcctcctgaag

SEQ ID NO: 24906 - DNA, 897 bp, Setaria italica
  misc_feature (1)..(158): n is a, c, g, or t
  Peptide Sequence Number=SeqID_90880
nnnnnnnnnnnnnnnnnnnnnnnnnnnnnnnnnnnnnnnnnnnnnnnnnnnnnnnnnnnnnnnnnnnnnnnnnnnnnnnnnnnnnnnnnnnnnnnnnnnnnnnnnnnnnnnnnnnnnnnnnnnnnnnnnnnnnnnnnnnnnnnnnnnnnnnnnnnnnnaaggggttttctaagatatcagaagtatatacaataatgttacagctcatttctgaaattgaaaaactaaaacaacacaaagcatatgaagattgttagatgagataacaggccttttctgcaacagcaatgctaaatcataacacatccccctgtgaataaacaacaacagatgactgaaggtctctgtcaaccttgaaatgagtgtggaaaaatctcctgacctcaagaaaggaattgcccagaagcaagtggtgaacatgtctttcttcggactcaaataatacaatgtgactgaatgaagataaatttccgaaaacctcgcccacaaactcagatgggcttgtcaggaaacgatctgactcatccaaggtccctttgttaccactaggagtgcagtccaaaaagcgcataggtacattgtgatgtaaggtagagtagtaaggtgttgaatgacaaggcatgagaaagaggacactcttcactcttccatcatgggcttcttttgacaaataatacataacatcttccgttcctctttgatggaataacgacatatataaggccattggaacattagttatgatgagaagaataacagaaagttgcaaccttgaaaggcatcttttcccatgcagaattttgcccttgaattgtgacattgcagctaagcagcatacttggacataaagaattcagatttgttcttcagtgctacctgtagcattgatgttctccg

SEQ ID NO: 24907 - DNA, 396 bp, Setaria italica
  Peptide Sequence Number=SeqID_90881
cgactcaccttcgcgatcaccaaccgctcccgccacgcgttagctcatgatcatcccctgctcactcgccaccctcaggacgccgtgccgttcctcgagctgcccgaccggcagatccatcctgtcgccgacctcgaagccatcccctcgccgaggctcctcgccacccacattcctttctcgctgctgccggcatcggtgaccgccgccggctcacgggtcgtctacatgtgccgtgagcccaaggacgtgttcgtgtccaaatggcatttcgagaatcgggtctctgagaagctcttcgtcgaccttggtttggctttccacttgttttgcgagggggtctctgttttgggacccgtttggaaccactacctcgagtattggaatgagagcaag

SEQ ID NO: 24908 - DNA, 391 bp, Setaria italica
  Peptide Sequence Number=SeqID_90882
ggaacgacgacgacgcctggatcttcgtcttctgctccggcgacgcggctggggaagtcggtgcggtagctttggcgcttgctgttgtactcttgagatgcccacacggcttgttcttcggtatagtcagcttcgcgctttctgtgcaggcagccttggtgactccacttgtactgtaagtaatgatgtggtacgtagtatatattggttttagttgaagtttttttgggagagcgcaatgcagcaagcatggtatcggtaacagtctgccgacatttttgtgcttctgatgccatctgtattctgtagcgtaactgtacgttcatttctcgcatggatcttaactagttgtttgtactttaattttagtttaggttacttaaaaaaaaaa

SEQ ID NO: 24909 - DNA, 352 bp, Setaria italica
  Peptide Sequence Number=SeqID_90883
gtcgcaggtagtagtagtagtacatcgttgcctacactccgcagaagtccttgagtctatcctcatggcgagctccatgagcgacgcagaagtgcatgaagtcgtcgttgcagtggggccttgaaacggggcgggtgctcctcgtcaacgagctcatccggcgcctggatcttcagaccgggcagcgcgaacaagatggccgagtacctagcgacatccccaccgacggtgacccggtgaaatggcgcgcgcaccctgtcgtttgtccacgcccggagctcgttgccggctatgacgacgagcgacgccggcgacgacggcctgaaatggatccactccccgtcgccggtct

SEQ ID NO: 24910 - DNA, 926 bp, Setaria italica
  Peptide Sequence Number=SeqID_90884
gcagcaatagagatgtacttggatgttaggagcacaattgaagaccatgtcaggggctttactgaacccacatcagacaaactgctaccagatctacttcctgaagagcagcatgtcttcaccctagttcttgatctgaatgaaacacttgtctactctgattggcagcgtgagagaggatggagaacttataagagaccaggagttgatgcatttttggaacatatggcaagattctatgaagttgttgtgtattctgatcagccacctatgtatgttgaacctgtgattgagaggctgaactcaaggggtaccattttacacaggctatcaagacctgcaactaagtacatggatggaaagcattatcgggatttatcgaagttgaacagaaaacctcaacaggttatttatctcagcgcccatgctcttgaaacttgcttgcaacctgaaaattgtgttgaaatcaaaccttttaaacttgaaagtgatgacacccgactgcttgatctcattccgtttctcgagtatgtggccatggccagaccttctgacattaggacagtgcttgcatcatatcaaggtcatgatgttgctgctgagtttatcgagcgttcaaaggaacaccagaggcgaatgcacgatcagagcaaacatggacgcttatggagacggtgaaggatcctggaacaattatgcactgatttatttgtgaattctagtcatggtggtgtttctgaaagaaaagcatatggaacctttgtcctcgtccgtagtcaaattattggctgctctgtagggatatctcgtagtttttggcagtttaggttttggctgattgaggcatcctaagatcatcggttgaatggtcaatgttgagaccatgtgattctaaatttttgctttgatggagttgtcaaccaaaa

SEQ ID NO: 24911 - DNA, 495 bp, Setaria italica
  Peptide Sequence Number=SeqID_90885
catcggcgggggcggccagcgactctcgctgcttcagccgtcggtcacagagagacggcttgtgcgacgagggggaaaacggtggtgatcaacggcgacggggcggtgaggtcgtcgatttccaccaagaggagccgagctgctgctatccacaacgaatctgagcgtaaacgaagggacaggatcaaccagaagatgaaaacgttgcaaaagctcgtcccgaactcgagcaagacggacaaggcgtcgatgctggacgaggtgatcgactacctgaagcagctgcaggcgcaggtgcaggtgatgagccggatgagcagcatgatgatgcccatggcgatgccgcagctgcagatgtccgtgatggcgcagatggcccagatggcccagatggcgcagatggcccagggcatgatgaacatgggctccctcgcgcagccgggctacgcgggcctcacgccgcccatgatcgccccccttggtccccatcgtccc

SEQ ID NO: 24912 - DNA, 1993 bp, Setaria italica
  Peptide Sequence Number=SeqID_90886
cgtgcgctgcggaggggcaagggcgccggccggcggggttttgccggaggaggcggaggcggaggaagggggccggttcgtcgggtggttccgggaggcgtggccgtacatccggggccaccgagggagcaccttcgtcgtcgtcatctcaggggaggtcgtcgccggaccccacctcgacggcattctgcaggatatatcccttcttcatggtcttgggatcaaatttgttctcgttcctggaacacatgtccagattgataagctcttggctgagagaggcaagaaggctaagtatgctggtcgttaccgtattaccgattcagattcattagaggctgcaatggaggcagctggccgaatacggctaactatagaagcgaagctatctcctggtccaccaatgttaaatctccgtcgacatggggttaatggccgttggcacgaaattgctgataatgttgctagtggaaattttcttggtgctaagaggcgaggggttgttggtggcactgattatggattcactggtgaagttaagaaaatagatgtttcacggataagagaaaggcttgatagagatagtatagttgttgtgagcaatatgggatactccagtgcaggggaggtcttaaactgcaatacatatgaagttgctacagcatgtgctttagccatagaggcggacaagcttatttgcattgtcgatggacaaatatttgacgagcatggccgaatcaatcgtttcatgtctattgaggaggcagatatgttgatcagaacacgtgctaagcagagtgagattgctgcgaattatgttaaggttgttgatgaggaggacattaatcatgtccgcaacctcccgatgaaacaggatacagaacatggtttgaatggaaggagccattttaatgggtacactgcatctttccggaatggtgtgggttttaataatggaaatggtctctctggtgagcaagggtttgctattggtggggaggagcgcttgagcaggtcaaatggttacctttcagagttggcagcagcagcatatgtatgccatggtggtgtccaaagagttcatatcgtggatggtactgttggtggatcattgttgttggaactattcactagagatggtgttggaacgatgatagctagggatatgtatgaaggtacaagaatggctagagaggaagatctttctggtattagaaagatcattcatcctctagaagaatctggtgtcctggtgcgccgaacagataaagagcttcttgaagcattgacgtcattcatcgtcgtggaaagagatggttcgatcatagcgtgtgctgctctctttccttatcttgaggataaatccggagaagttgctgctattgctgtctctgaagaatgtcgaggacaaggccaaggagacaagttgcttgattacgttgagaagaaggctttatcccttggactggagaaattattcttgcttactacacggacagctgattggtttgttcgtcgcggcttcaaggagtgctccattgaatcgctgccagcagtgaggagaaaacgaattgacctttcgcgtgggtcgaaatactacatgaagcggctccaggttgcagagattgggcttatggctgtcaacgggtttgccatgagatgattcaatgctagtttacagatctagttgctgcacacgagggttgtttgatgacccctgcagcgcttgtacattgtagaactgtgtttatgcaagtaaatattcgatgtatttgcataaaaagggtaaataatcgatgtgacggttgtttcttgagtaggagctgccactggggttggtatagtgtaatctttggctggctaatagctttgagccagttgtgttgttgtactgtgaccgattccccttctccaccgttttttcaccgggcgaaatggagttagctagtcttgtactcttgtaaactattcttccgttactaaaccttaccta

SEQ ID NO: 24913 - DNA, 435 bp, Setaria italica
  Peptide Sequence Number=SeqID_90887
ctcgattaattttattgtagcatttgagaaacaacttttacagcagattgccaatgctccacacgcttgatttagcaaacaaagccagaggtactagctggttctcctttacaaagccaaaaaacacataaatttccggcaacaacttcgcaagccaggaactcactgctgaatgtgtttcaaatgtaatccaacagcattgttgttatggacatcttgacgcaaactgtaccaaagcactgaggcggcttcttcacaggccagattcaagctgttctcagtagataacagtcgagaagaggatctggttcgcatcttgtttcttgtcctcccctacgatgggtttcatgtgcgccatccactcgtcgatcacctgatcgaggctgttctgggcggcctcatcagcgtcggacaaggggggcagcccggacgcgg

SEQ ID NO: 24914 - DNA, 543 bp, Setaria italica
  Peptide Sequence Number=SeqID_90888
gccgctcaagggcgccatgaccaacgaggtgtaccaggcgcggtggcccgccggcggcgggggcggggagagggaggagcggaaggtgctggtgcgggtgtacggggagggcgtggagcacttcttcgacagggaggacgaggtgcgcacgttcgagtgcatgtcgcggcacgggcacgggccgcgcctcctcggccgcttcagcaacggccgcgtcgaggagttcatccacgccaggacactttcagctgctgacctacgtgatccggagatttcagctatcatagcctccaaattgagggaatttcacaaccttgacatgcctggtccaaaatctgtgctcatttgggaaagattaaggaactggctcaaaactgccaagagcttgtgctcccctgatgaagccaaagagttctgcttggatagcatggatgaggagatcgctgcattggagaatgaattttcaggggaaggactatgagtatgcaagttttaacccagttgcctatgacatcacaaaccatttttgtgagatggccgcag

SEQ ID NO: 24915 - DNA, 465 bp, Setaria italica
  Peptide Sequence Number=SeqID_90889
tccttcataactagttagcttgtcctaagcgtcttacattttgtaaaacggaggtaatacatgttgctgtgtttctgttatggcctccatgctttttgcctgtcataggtttttgaactggaagctttgctttatctttaattgactatcccacctgatttattctgaataagctggaaaatatatttctatgatcttagttccttgcctaacgccttttcaggactatgagtatgcaagttttaacccagttgcctatgacatcacaaaccatttttgtgagatggccgcagactaccattcagaaaagccgcatatattggactacactaaatatccaggtaccaaatatatttaaagctattgattttgcattgttattttcaccttgatgggacctacttatccttgcctttatgctcatatattgcaatacaacagataccaatgagcagaagcaatttg

SEQ ID NO: 24916 - DNA, 263 bp, Setaria italica
  Peptide Sequence Number=SeqID_90890
ccccggcgccggcgacgaggtcgaagtgcactacacggggacgctgttggacggcaccaagttcgactccagcagggatcgcgattccccgttcaagttcacgctgggacaaggacaagttataaagggatgggatttgggcatcaagaccatgaagaaaggtgaaaatgctattttcactatcccaccagagcttgcatacggtgaagatggctccccaccagtcattcctccaaatgccactctgcagtttgatgttgagt

SEQ ID NO: 24917 - DNA, 226 bp, Setaria italica
  Peptide Sequence Number=SeqID_90891
agcagcagcagtgcacaactctttccccatctctggcgacatttcagcattcataccgcggccagcaccatccttcttgaggaaacgcccaaaatgcacctatagagagttctgaatcttatcaggaatctgcaagaagctactgaatcccagcgcaggcttctgcagcaacccatctgataggcggctgacagccggttcttgcctgctaccgtctcccatcaag

SEQ ID NO: 24918 - DNA, 474 bp, Setaria italica
  Peptide Sequence Number=SeqID_90892
acgggccaagcctcgcccatgtgggcaagaaacccttccacaaagccgttgcgcctcatgcctgacggtcttgaccaaacaatcgtaagaattcctgtatagagctttgccctccttcccctggttcatcatcctagttttgatcacatctgctggacagctcaaggttgtcgcggacagtccagacacgacggatgccaatgtgtgggcatacagattgtcatcgcaaatcttcttgctaatgatgagatgctttgcctgatcatagcatgtcaattcacccatgttgacaaggaatgcccgttgggcgtttggaccaaccccttccaaagtcccagaaagccctcagcttgtataattttgtgaaggcatctgccactccagtgtaccgtggttggataccttggcttaacaacctgccatctgcttgcatccttacctttatgaggtcagcagggcttgacaacacctgcg

SEQ ID NO: 24919 - DNA, 289 bp, Setaria italica
  Peptide Sequence Number=SeqID_90893
aaaatccatttagtatgttgggaactttaaataattccacatattataatgcacaccaataatatgtaaccagctgaatcgggatgatactggaacatacttttagtgaaagaaacatatttgtttttaggttactatcctcgaagcatttgggtaatgacatgattaaaggtttcatgtccattcttttatgctctatttttcttaaattggtattgccaagcagtcttacagagatatataagcctttcgtagccatgattgttcaacttatgcagtgcttttactt

SEQ ID NO: 24920 - DNA, 812 bp, Setaria italica
  Peptide Sequence Number=SeqID_90894
ccaaaatgggagactatgggttacaagacactagcggttaaggagcctgatatcacagcaagccagaatatttcagactcaggatccgtccagcttgtgtatggagattgtactaatccttcaaaagtttgccctgcaaagcctgccatcatattcagttgcatagataattctgggacatgggggcatggaggaatgtttgatgctttgactaggctctcaacatgcattccagatgcttatcaccgtgcttctgagttcgatgacctccacatgggagatcttcacttgatttaccttgatgaagccaactgcacccggagtttggatgcgcctttatgggtggcactagctattgttcagtcttacaatccgagacgtaaagtaccgagaagtgaaatctccatgcctgatttagagctctgtttatcgaaagctgccttatcagctgctcagcgttctgcggttatccacatgccccgaattggttaccaaggtggctcccaacgatcagaatggtataccatagaacgccttctcaggaaatactcatctctccacggaatcgacattttcgtgtactactttcagcgttcatccaggcaacagacggattctgctgacgcttctgctggaagcagctcaagctaggcgtagggatgtttctgtagcccactagaggaatcagggaatattagctagctgcaatttatcttatcttttgttgcccctgttttatagcttagtaactatagcttttgtttggtagatgaggtagatgaattatgttttagggttctgcctctttagct

SEQ ID NO: 24921 - DNA, 309 bp, Setaria italica
  Peptide Sequence Number=SeqID_90895
gtcgtcgagcacgtacccgaagtcgccctcggagatcttgacgtacgcggcgtcggcgaggctgacggaggaagcgttgcgcagtgcgcggaggttggggtaggagtcgcgggagatccgcacgcacgtggccgagaacggcagcgccgccttgggcggccgctcgggggacgcgtgctcccgctcctcgtccccgtcgtcgcgccccagctcctcctcccgctcctccccatcctcctgggggtggtggtggttctcgtcggcgtcgtccggcggcaggatgatgtgcgacgccatggtgcgggggcg

SEQ ID NO: 24922 - DNA, 488 bp, Setaria italica
  Peptide Sequence Number=SeqID_90896
ccgagcgagacccatggcatcgtcgagggtggccggatgctggagctcgacgttggtctgcagcgggttgcgaaggtcgccaatgaagagatcgatttgatcctattcctagagagtgcgttaacgggcgagcaggggcaggaactgcgccttgtactccttcactgtcccagtgcggtgaagcttcatgagggcgccgagcggattgctgcgtgtcgggggatcgaatgcccgttgcaccttgtcgacgaactccagccatgtgagggcgtcgtggttctgctccaggcagtaataccagtcctaggcatcaccttccatgtagaaagaggcgagccagacgcgctcgtcctcggaggtgcggtcggcgcggaagaattgctccgccttgtggagctaaagggatcgggtccgtgctaccgttatagcgtgggaaactcctcattcttatcttaagcctaacaaattactgatccaactaacaaact

SEQ ID NO: 24923 - DNA, 363 bp, Setaria italica
  Peptide Sequence Number=SeqID_90897
tagaataccttacttacctccccgctcgctgaccacagcccatcaacaaagttgagcattccagaaagtgtaacctgtgtggatcgttcaaatttccgtcagcatatcagcatatagaatccgacttggtatcttcctcgcctccctcccgttgttgcagtttgatggtgcagtcgatatcctcaaccacaagaatggatcggctgctaatgccgacaagaagcttcctgaggtccatgttgctttggaccgaagtcagctcgagatcatatatgtcaaacctgagatggttggccatggccgcgatcaggctggactttccggtcccaggtggaccgtagagcaggtaccccctcttccatg

SEQ ID NO: 24924 - DNA, 273 bp, Setaria italica
  Peptide Sequence Number=SeqID_90898
tccctgcgccgcctcgccgccaaaggccacctctccccaggccgcgtgcgaagactccatcgggcggataaggtgcgtctccgccgtgcaagatctcagggacgcggatcttgtgattgaggccatcgttgagaacgaagatgtcaagaagaggctgttcgtggagctggataagatcacgaagccctcaaccattcttgcgtccaacactagctccatctccataacccgcctggcttcagctaccaaacgccccgctcaggtgataggcat

SEQ ID NO: 24925 - DNA, 818 bp, Setaria italica
  Peptide Sequence Number=SeqID_90899
tagatatgaagacgcttcattgctcttgcttgacatggcaactgtggaattctccatccttggactccccttcaccttcttccaaccgtcaatgtatgccataggagacaccgacgatggtgtgtgctgccttgtgggccttgttggcagcattaacaacctccatttgcaagtgtggctgctaaaggaggatggtgctgtcaagacgtgggagccagagaagaaagttccagtgagccaagtgcttggcagggatgcccaattgcatcaagtccatgtcgtaaccaatggactagctcttctatgctgggatcggtgccaccaattcgccatcaatctgaggaaaatgtgtatcaatgctgaatttgagtgcagtgctcttggttatcctttgcaaatgccatggccacctgctgtgttggtggaaactggtagtgagactattaattatcttgtggatgttgtaacacaaaatcttttggtaatcgaggaaactgagatgaatatgatggttggtgtgcaatgtgacaagatggttcgcagaagcaagaaaattcctattagcaagctaggtcatgttggtgacatcatccactataatcaaatggtcatccatggctgtgagatggttcaaggtattcagaagactcatggtaatgacactactgagtcggtgatacgaactaaatcaagatgtggtagcgagatggcttctagtgatcatggtggtcagatgatcaactgtaatcaaactgtcatctatgatagtgagatggttcaaggtattgagaggaatcatgataaataggacaactaga

SEQ ID NO: 24926 - DNA, 1251 bp, Setaria italica
  Peptide Sequence Number=SeqID_90900
aacacccagcattaacacccagcatttcatatcaaaggccccatggaggcaaacttttggaattgaaggaaacggtatggtaactttaacccactagtctctaatcataatcctttctactgacaacacagcagcaacgagactaccatgatgccgaatgctacttagaatcaccagtttcaatttgataagcgacgatattagttaataaacgaaaccacgacctaaacctgaatcaggtgatagcttcagggcaacattctcagccacttccatgaagaggttgctgatcttcagggggctgctcctgctgttcctggggctcctgccacaaataggtcaccgggtgaccctgctgggcaccatacaccattcctgcacctggcacctgctgctgtggcatgtagtagtatggatatgcatcagctggggctcccatgggtggaagcccagccctaggaagcccaactccctcctccttcatctcatccctgggcacaatgtcaaccaagaagtcgtaaatgtcagtcctggtgatggctgctgcaatgtcattcttctgcaaggtccggcgcttgttctcctcagtgtgcatccatgacctcagtgtcaactccagtatgaatatctcgcacgctttcgcgaagaccactggagcttctgcagagatcatgcggacatcctcgtcggccttcatgatcttctttatcctcgcaagtggcaaggtgtggttcttgaagtcagtagtctgttcaatatcagccaggcgctcagcccagaactgctggagttgacgctgctgctgctgctggagctgttggtggaattgctgggcttgctggtagacaatctggtgttgtgcactcatttgagcagggttggctgtgaatggttgccctggttgtaaaccagcaggcgggactgcagaaggagcggctatggttgctgcaggcggataggctggggcagggtactcttgtgatccaccagcagcaacacccattgcaggctgaggctgagatgatggttccatgtcagctcttgcttgtccaaaatcctatgatctttccagcattggaagtcggagcagcacgcgtcggaagctcctccacggccgggcaggcgagagcgacgggcccccgcttgcggttgcggcgctggattgggatggctgggctagggcacggattggagaatgggggagaggagaggacgccgcctcctagccttccctctctctctactctcctc

SEQ ID NO: 24927 - DNA, 523 bp, Setaria italica
  Peptide Sequence Number=SeqID_90901
ggaggatttctgtggcacggccctccctcagtaccgagtggatccgtactgatgcaagaaggacagcaatcggcttagatttggaccttgagtcacttgagtggtgccttgaaaacaacctaagcaagataggagctgatggctattcaaggatgttgcttttccatggaaatgttctacaacccaaggaagcccgtcttgtcaagcaaaagttcagtgatcttgtgcaaggccttgatgtaagcagcgagaatggctcttcaggaagtaacagttgcgagcagccaggtcttgctaattcgaagtgcttagccaattcaaccatgtcagaggcagctttgcctggaagggatattatctgtgcattcaactacagctgctgttgcctgcatagtcggaaggacttggttttgtatttcaggcatgcattcagctctctctcgaaaagaggtggcatatttgtaatggatgcatatggtggcacatcatctgaacgcaagctacgtctccaacggaaattccc

SEQ ID NO: 24928 - DNA, 498 bp, Setaria italica
  Peptide Sequence Number=SeqID_90902
ccctgcatatagatcttgagctggtttcttggaagaccgtgacacttattggagatcgcaagaggatcttgaagaaagtactcaaggaaggagaaggctatgagcgccctaatgatggagctgtagtgagagtgaggcttattggcaagttggaggatggcactgtctttgtaaagaaagggcatgatggtgaagagccatttgagtccaagacagatgaggagcaggttattgaaggtctggacattactgtggttaatatgaagaaaggagaggttgcattggcaagaattccacctgaacatgcatttgggtctgctgaaacaaagcaagatcttgctgtggttcctccaaactccaccgtgttctatgaagtggagcttgtttccttcgagaaggacaaagaatcatgggatttaaagagcaatgctgagaagattgaggcagctgccaagaagaaagatgaaggcaatgccttggtttaagagtagggaaagt

SEQ ID NO: 24929 - DNA, 526 bp, Setaria italica
  misc_feature (28)..(28): n is a, c, g, or t
  Peptide Sequence Number=SeqID_90903
ctagtggggtgtaatctcttagtcatgntaacgattgatttgtctgctcttgggttgaatcttgaaccaattaattttagattctgaattggagaggaagctactggcgtagtcacttgaaaacatgtgtaaattctgcctaatttctaggcgaggcgaatttactgaactttatggagctcgagcatttcagcggaggtctctctgtctggaattcgttgggattccaatcgaggctggagcctggagggtgtttgcagagttcagatctttgatctgtgcgtgagagactcgttggttcttctggttgtaggatctggatccttttggtgctgttatggaaagcaatttagttgtttcagcttcagtccttaatagcagttcaagcatatgcatcctgagtgaactgcaacttgtatgaagctgtgaatctagatggccccgactaatgagtttgttaaagggtgacttttgcattgatgctcatagttaataaggcctgctcccatagcaataggggcattag

SEQ ID NO: 24930 - DNA, 310 bp, Setaria italica
  Peptide Sequence Number=SeqID_90904
cgcagcaaaactaccacccgagtcccgagctagcgatatccgttgcagtacgacggacttgaggagcgctctcgcttgctgccggcggcaactgcagcgatgcgagccgcggcaggaggccgcgcggtgttccacctccagcacctccgcccgcgccctccatgccgagcttctcctgctcccgccaccgcggtcctcccccactccgcgcccgcgagccgcgcctaccaccgccgcctccccaaaggctttttacctactctggagccgggggtttcagcagtctacttgtgtcggcgagtacactcca

SEQ ID NO: 24931 - DNA, 360 bp, Setaria italica
  Peptide Sequence Number=SeqID_90905
aaatctagtaacctggagaaagcttgccgccagcagttttgggtgtgtcatctttcccagcgaacaagatttcaccaaggtcctgtcacgcactaataattttgacagcaatacaatcgggcagagattgacagcagaaagtgcccctgctaatatgtctgggtagtggcgcaagtgcttccaccatgaagctttatctgtaaaaaagagaaaactaaaatgattcaggaaagaagctttaatacagttcgttaccaccttcgcaaactgttatttgaaacatactaattacaaaaggggaaaaggatgtactttttcaggctgccaatatcccaacatagcactttgtgaagatgccat

SEQ ID NO: 24932 - DNA, 195 bp, Setaria italica
  Peptide Sequence Number=SeqID_90906
ctgtatattagttgcaaggcaaaccaaccatatagctccactcacaaagttaggtttgtgctgctggctgcctaatgataatatcaggactaatctgccagcctattggatttttttcctcgaatacacaggagatctgcacatcattgcattaagaagagaattatggagtatgaaacacccaacacaacacca

SEQ ID NO: 24933 - DNA, 791 bp, Setaria italica
  Peptide Sequence Number=SeqID_90907
actccccttcccctctgtttttcccttttctttttgacatgccatctcttcttattacggttatactacatgcgtagcatctcttcttgtttggtttcatttcatatacgctggcccctagtcgctgagcagcagggccagctagttgtggctgctggaaacctatgcatgcccaggcaatcttcttgcgccatgctccattttactgcaacttgcagcatgccagggccacgctcttacatagcaggcctggtggcagctccagaaggaccaacttgtcgtagcagctggaaataagcttctagtttctgcctcaggacaccatgctccctcttcactttctggaacgatttcatacaaccttcagcatttccttgagcacagtaatccctgaatgacatgcactcactcttcatccttgaagcaccaatgctggagcagctgccttttagttgctgcatgtatgcatcccacttgttgaaatctttggggtatttttccagagcttgctcgatgttggatattagcctggcagagtccttgaaaaacaaagtaacgacctcttctgcaaaattcggactagtttcatcctgcaagtcttccacctgacaaaattgctcatctaggtacccctgatcaaagagactctttttcatggatgcagcttgacgtcgcaaactagaataatccatttgtatgaatgaactagggaaaaggtggcaaggcgaaggtgaataggtgatacagataggaacacacttcacaagttacaatacaataactggtgggag

SEQ ID NO: 24934 - DNA, 261 bp, Setaria italica
  Peptide Sequence Number=SeqID_90908
gtcttcctgctcttgctaacgttgacatcgacgtcatccaactgcagtgccaaataaggattgcacaacaggggttaaaaagaacaggagatttgaacaaaatagacatccgcatgttggtaatggtggataccaactacatttaagtcgtgcatagcagcatggacttactttgtttagtcaaactaagtactaagggttggtacatgatcaaagcttataccacgtttgactaatccaagttgaagctcttttttctac

SEQ ID NO: 24935 - DNA, 983 bp, Setaria italica
  Peptide Sequence Number=SeqID_90909
ccgaatttgatcgaggccttgccccgtctttgctcggcttctttacttcacctctagcgatttcttgtgccgggggtgctggcaagagctttcttgcttctgcgctcgtggctttgcgcctgaatcctgcggtttctgctccgtccacttcggttcttcgtcttttccccccagtgatctctctaaaattttcctaacccccttgccttcttgtgcggaagattgcattttggagtcttcctaaatagctcttgggaattctctggttcgttagccggcccatagttcagaaaagcaagggccagtttggtctacttcatttcacaaaaaggggggaaattaggtagtaaaatccggttctcccctgattctgttcggagatactgtttgagaggaagtaaaagcgccaagtttggaggtttcgaggagtgggggagacttattccttggagctagctgcatgaggaagcattgagacaatgagagatgacaattcaagcaggaacaagctgtcctggtccaggacccttgttaggaagtggttcaacatcaaaacgaaggcgaaggacttccattcggattatgcagctgaggaagtcggagtgcagtggaggaccagtttctctgatagagatgcgtgcaaatccaagaaaagcagaacagagaggttgcctaagaggaatgtggatcgagatggtagactaggtaatggatttgacggtgcttatatcacaaacacacaggattacagggtcttcgttgctacatggaatgtgggaggaaggtcaccatctagtcatttgaatctggaggactggcttcatacttctcctgctgctgatatatatgtgatagggtttcaggaaattgttcccttgaatgctggtaatgttctattgactgaagacaatggtccagcgaagaaatgggtttctcttgttagaaaaacttcttaaattaattctttgtattctaactaaggt

SEQ ID NO: 24936 - DNA, 161 bp, Setaria italica
  Peptide Sequence Number=SeqID_90910
cgacgatcaggatactcaggaggacaacagcaaggactgcaactgcaatgccgtcaccaccccatgatgttgcttcacatgtttcgtctagtagttagtttataattatatataggggggaaaacaatataatgatgcattaattcagcgtagcacattat

SEQ ID NO: 24937 - DNA, 425 bp, Setaria italica
  Peptide Sequence Number=SeqID_90911
gcgacggagcggcggtgtgaagcgggtggcgggcgccgcgacggagcggcggtgtgaagcgggaggcgaaggcaccgccgcccgtgtccgtggtggaggttcccgccgcgttgccaccgccggaggagccgtgaagaagctggcgccggcgaggttcatggcccctctctttgtctgtcctcttccgagtttcgataactagtcggatagtattataggagaaagaatcaacaagaaggtgctatatgctgtttgatcatctgttcgttgcgtcactcgtgatgagcattgttttaaattcttttgcaaagatataatgcttttttctaagatctcggccttcgaaatttttggtgtactctgatcagttatatgcgtatgtctgatccgttgatcctcacatggttcgaactgaagagacagag

SEQ ID NO: 24938 - DNA, 437 bp, Setaria italica
  Peptide Sequence Number=SeqID_90912
tcgatcttttaagaagagtggttgattccggattaccagcagaaagcggagagtatcctatgcccatacttgatcatttcatggtgggggagaaatacaggtggccagtgccagaaccatattggtatcatggtgaacttgacgtggatatggacgacgatgatttccctgggctcattggaaggacactcaattaggcggccgtgctattaacacatcgaaatatattagtatcatggtgcaccatgtggatagatatgatgaagactaccaatcggatgtcaagcctgttctgcacatcttgctagtatttaagtaatcagttatcattgcccttctgtctaaaatgtatgtaactgcaggatcatatgactgacagttgccactttcaactttgctaaatatttgacttgaacaaaaaaaaaaaaaaaacctaa

SEQ ID NO: 24939 - DNA, 574 bp, Setaria italica
  Peptide Sequence Number=SeqID_90913
tccttatgtttgtctatgtgcagatatggaagatagggtcaagtgtattctcttcctccttggggaggaagctgattcttttgccaagagggcagaaatgtattacaagcgacgaccagaggtgatcagttcagtggaagaagcataccgggcatacagggcccttgctgaacgctatgaccatatgtcaggggagttacacaaagcaaaccatacaattgcatctaccttccctgatcagattcagtattcattgctagaagaggatgatgacaatctcccaaaagcttataccaaggtcgatcctcgcaaaattcacaagtcaacagtggagggactaatgaagaagaagcatagagagaaatcaagaccaaaagatggaggaaagaagtctgcagttccaatgaacaaggataatgcacaagctgagatcagcaggctacagaaagagatattagtcctgcagacggagaaagagttcatcaaaagctcttacgagagtggaattgcaaaatactgggatcttgagaaacaaattaacgaaatgcaggaagaagtttgctacttccaagac

SEQ ID NO: 24940 - DNA, 446 bp, Setaria italica
  Peptide Sequence Number=SeqID_90914
ggcttttccatttttgcccttttcctctccgtcccggccgttgccgttgctctgcgccgctctcctgtctccccaccagaccaccagtagccgctgccgccgtcgctggcagggtgtgccagcggccgcggccatgttctcctggatccttcgcggctgccgagacgagtgctccgcctccgaccagctcaagcaggctcgtgatgtcttcgtggcaaaagaggcagtcttgcaaaagaagatttctcaagagatggaacgggccaaggagttcactaagtcaggaaacaaacaagcagcaatgcagtgcttgaagaggaaaaagtactatgaaagccaaatgagccaggttggaagtgtccagttacgcattaataccaaggagaaaatgaatcgctgatcacatgggaaacaatgacacaaagtgagattacagctctggaact

SEQ ID NO: 24941 - DNA, 746 bp, Setaria italica
  Peptide Sequence Number=SeqID_90915
gagatggagaacacaatcatccagactgctctcagtaccccggatgttgaattgcttcctgattcttctccggaagtaaccagtatagatcgctaccaagagaacagaggcaagtcccatatataaatatatatgatgcttcgttactgaaaaggcaattaggctgaccagaacagccgctaacagaacgaagtaaaacattccctgaaagaaattccatctagcatcagcaggattaatgagagtaaaatactaaaattaactacaccagagggagctacacacaagcaaacctacaaacacagaaaactcaaaaatcaatgccaatgagatcaacacacaacacctcaattacgaatgtatataacagatacagaggatagaatagaaccatccagtttgaaataggcaagagtcatctgtgcccttaatatatacagcaggagatatgttgaagtaaggttataatatcctaatgccactttgttaagtataacaaactgaccatataattaaatataataaacgtgaatagttgatgctggatgaaatgagaagttctgagaacattttttaaaaactatataattaagttggtctttcaagactgatagagtggttaaattgagtaaaatatactggtaccgatctgtccagcaagtccagcgtgcagtctgattccctccatagaatattacaacataactagcgaagattttactggaacttatgctctatgcagcttc

SEQ ID NO: 24942 - DNA, 708 bp, Setaria italica
  Peptide Sequence Number=SeqID_90916
acgagcctggggacttactaggcacaagtgaggccttgttcagggcagcgaaagccttgtttccttcaccgttgctccctaaacaaatggtatcgccacgtccatgccagacaccacactggacattattcatctccaaagttctggcctcctggcacagcgtacagcaaggacatatgagatggagaacacaatcatccagactgctctcagtaccccggatgttgaattgcttcctgattcttctccggaagtaaccagtatagatcgctaccaagagaacagaggcaagtcccatatataaatatatatgatgcttcgttactgaaaaggcaattaggctgaccagaacagccgctaacagaacgaagtaaaacattccctgaaggaagcaagatccgaggttggctctccgcatgttcttgccaaaccggtagcacgggcagcaggcggcctcgagcgcgatccggcggtcctccaggcaatccagcacgacgtccccctcccacatcctctgcacccctccgcctccgactccgcctccgcagtcgccggccgcctccgccgcggcggcgcccttcctccgctccgccgacagcgccacggacgcgcacagcatgtcgaagtccagcaccgccgccatcccggactcctccccctcgctctcgctctccccccgccgccgctcctcctcctcctcctccgtcc

SEQ ID NO: 24943 - DNA, 717 bp, Setaria italica
  Peptide Sequence Number=SeqID_90917
tttggaaagagaaggaatcccatttcattcatgtctatgtatcgttgaaactgctaagttacatcagaaatttacagttggattcaggcaaaagccctgagctcgtgtgacattatgcagatacggtcttggacctaaataaactgattgcacaatagaaatatcactgaattttacaacaacaggccgattgcgcccatctcccatgtatggttgctgccaagtccagcatcagatcactggatgcaagcacacaataagaaggcgcagaagtgcagtaaccatgatttttcttcgcaggacagttgaagcccttcttggaatgtgcagaggttgtggtgatgcagaatagcaattctattacacctgctccggttgggctgatgggacgagcggctcgtgctcgtcagctgcatttgatgttctgtccatgcaacacaaccctggggacttactaggcacaagtgaggccttgttcagggcagcgaaagccttgtttccttcaccgttgctccctaaacaaatggtatcgccacgtccatgccagacaccacactggacattattcatctccaaagttctggcctcctggcacagcgtacagcaaggacatatgagatggagaacacaatcatccagactgctctcagtaccctgtaagcacaaaagagggtggatggtcaggacgtcaggttagcttcatcggaatgaagactt

SEQ ID NO: 24944 - DNA, 453 bp, Setaria italica
  Peptide Sequence Number=SeqID_90918
ggggcaaacgcgggtgataggagctgattaacagcaacaggagcctggcctttcgttcgtgcctactttacttgcgagtgaagacaagatggaccgtggctagaaaacgtatggaatctttagttcggggcgcaacttggagcattcaacatttccagtcatacagtttagagtccacatcaaactgtgttcttttatactactcctcccatcacaacatgtctatttaattaagattattttcggctaagcatttctaacttttttttggaaacattttctttatttaaaaatgtataaattaactagataagattaaatgttttcaaattccaaattataggtcctttcggcttttctagattcatatatattattatgcatctagatatgcacaatatctaggtgcatagcaactatgcacctagaaagccaaaacgcctataatttggg

SEQ ID NO: 24945 - DNA, 1156 bp, Setaria italica
  misc_feature (1107)..(1156): n is a, c, g, or t
  Peptide Sequence Number=SeqID_90919
ttcgatattctgttctagccgaacggatgcaggtgttcatgctttatcaaatatttgccatgttgatgtggagcggataagtaaaaggaagcctggtgaagtgttaacaccccatgagcctggagttgtaaaacgtgctgtgaaccactttctacagaggaatgaaggtgacataatggtgactgacgttcgctgcgttgcaccagattttcatgctagatataaagctctcgagcgcacgtagatatcactatcgcttgctttctggacctgagtcaacatcagtctttgagaaaaactctgcttggcacatatctgaggatttggatattcaggcaatgaagaaagcatgcagcatacttgttgggcatcatgatttcagttcatttcgggcagctggatgtcaggcaaactcaccaatgagaactctggatgaactgaatgttacagaagtattccctttcatgttttttccttcaagcatagaacgatcagagatggaatcatcagatgggtctcttatttattcgaggacaccagccttagaaccctctcggaaagaatctgatgattcctgtacaagcagtgggaaatcagaatctgagaacggaaaagaatttggatcaagattaaggcaccgctgctttgtagttactgcaagggcacggtcttttctttaccatcaggtaaggttgatggttggtcttctaaaatctgttgggacaggcgatctaacaactgcagatgttgagagaattttgaatgcaaaaaaggtgactgctgcacctcctatggcacctgcttgtggtctataccttgctaacgtgaaatacgatctgaacgtttgaagacaaattttatcaaatggcttctgttgctgggcgtccaagttttgtcagctgttggctatcaaaggatcaggttcttgaatcgtcatgaatccaaattccaaaagcagcataagcggaaaaggaccggctttattctcgtcagtttgtgctgtgtattcagataatcagatgcttagattttgtgtacatgctttagaaggttaaaatgtttcatacatcatgacattttgagtacgcaacacgtgctgataagttnnnnnnnnnnnnnnnnnnnnnnnnnnnnnnnnnnnnnnnnnnnnnnnnnn

SEQ ID NO: 24946 - DNA, 566 bp, Setaria italica
  Peptide Sequence Number=SeqID_90920
aaaccgtaagaacctaaagaaataaccgaatacggggaacgacccccgaccgtaggaggggagggaggcggagaggcggcggaggtgtgggcggacagcgtgaagaagaagcgcaagcgcaagatgaacaagcacaagctccgcaagctccggaagcgactccgccgccagacatgagcgctctctccgctccggttcaaaggttgttggacttgaaaccagggtctccaatgcaattgcacactggttcttggctgatcgcctgctgtggatttttgtttggcaaaggagctacttgttcaatagcagccatcaattgttgggttgggactaacagtctagaaactatgacagaactcataatgaaactgagctgagctaggttaagtttgatttctgtcaaataaagctccagatttggttgttttgttgctctttctttccattcaatgctgcggtgaacacacccacacataccgtccagaactgctccacatatcagatctgagggaacctgaatttttgcactgggtgttgtttaccctgttgatatctgacaagctacc

SEQ ID NO: 24947 - DNA, 397 bp, Setaria italica
  Peptide Sequence Number=SeqID_90921
tgagagcgttctcgaacccatcaaaccgccaagcaaaccaccctgagcaagcagctcgagagctgcggcgatcgaagtgctagagcgcccataaaccgccgggggcgacgcggaagacggcggtcagggatggacgcgccgggagaactgcagtgcgtgggccggctcgaggtcgccgcgccgccgccggcgcgctacctccgcgtgggctcccttcccgtgcctaccgactcctccgcctccctcccagccctcctgccgtccccgtccccgactggagctccaaggtatcaaatgctgccactggagactgatctcaatactctccctatgattccaaacatcccagagaaggtttttcccaatcgacgcaaagaatactgaaggattacggtat

SEQ ID NO: 24948 - DNA, 544 bp, Setaria italica
  Peptide Sequence Number=SeqID_90922
ctttcgtcgtttgaggttccatatctctctctggaaatgcatccccctctgactttacacaggcatcctatgtgtgctgagattattgaagaattccagaagtgccatctggatcaccctgtcaagaagttcttcggagaatgcacagaccttaaaataaagcttgatcgctgcttccgacaggagaaagcattgaagagaaaggcaaactttgaagagagcaagaaatttaaagaacagctgcaggcttacaaaagggaaattgcagagaagaatgaggaatgagaacttggaacaaaggacaaggacctagaggtggatgctcgtaatctgtgatgagctgccctcaattttaagaaggatatgtcaagttcttttgaactgcatgtttatcaaaaaaaaattactctttgccgagtagcatataaacctcaacagctcaaacgtttcttgctttactttggtatatgtttcttatttgtttttatgcttgtgcaacagtgaactgatgaagcattgtatgagacttggacaactcatcctt

SEQ ID NO: 24949 - DNA, 1466 bp, Setaria italica
  Peptide Sequence Number=SeqID_90923
atcaagtgatggtcgtcttggaattcatgtggagaaggttatccaggagctccctgcgatgacatcagaaattgctcgtgatgtgcttcctcaaatgctagaaggtggtgatgctgctgctgcgttgaatgatgttcaagcacatgatgcattaccatcctcatcacagctaaatactgaaatacagaagaatgaagcagtatgtctggcaagtgatacagaagcagaatgtgctccagttatagagaaagcaaagagttacagtagccagataaaacatgctaatcaaactgaaggtgcttatattagttctacatcaatggaaaatgttggtaaaccttcaaatcagagcaatatatcacatgctgcggaggaggtacatgcaaggaaggaagacattttgattggtgatggggtctatgatgttggtggccgtgtttctgacaacaaggaagtcaggatacaggagcaaatgttggaggagatgcatgcaatggataatccttcacaagaaaaggagcacaaaaaatctaggactgattcttttgacacgtcagctccagaccctcctagaataactaatgagcctgatgtcagagatttgactaaatcaagtagatctccactggaagcagacacaacttctcatagggaacctttaaatacttcttttcggcaagaagttcaagacactttacatgaggactccactgaaaatccaagcgctgttggaaagaagaagaaaaggaaaaggcgtgaattggcccttctaaagcttctgctcaagaaacaagtgaaccatcagctggggctaaggagttatcaaaatccacaggtgatgcacataaagttgaattaaatggcagagatgaaattgcagtcaaatcatctggtttgactctttcatcatcaggactcaatgatgaaaaccaggggggcaaacttgttcagtttacgagtgatgctctggcatctactgatctaatctctgaacaagggaagattgatcatgctattaaaggatgtagaaatcctgccattggagatgccatttattccgtaggtgaagttgtagcttgtgatggggaaaatccaaaagggagcagcaccccttggaatggaggggagaggcatgaacaaataaaacaacatgatcagggaagtcatgatgaagtcgtagctgaaattagcaacatggagaaagatgggaaaggtacagatgccttggagaagaggcaaacgaatgataatacttctcaattgaagaagcgtaagaaagcaaagaaggctggttctgttgaccgagcttccctggatactattcatgaaaaggagatgcacgggtacagagagaacgcagtcagattggatgcagtttctactgaaagggggattgtccatgaccctttgccacagcaaccaaacaatgtgcatcaaggggagtcaaatataatagaaaatccaaa

SEQ ID NO: 24950 - DNA, 221 bp, Setaria italica
  Peptide Sequence Number=SeqID_90924
ctcggccccaagaacgacgccaagcgaagactcgatctccgcgcccaaatcgatcctcgaatcgggggatgaggacggcgcaaggtttgattttggcgccggaatcgggattagcggggcgcggatttgtgtcggggcaggtcgggacgggaattgaggaggaagggggggttggagattgggacgggaatatacgaggagagatgcacgcacgcggcgag

SEQ ID NO: 24951 - DNA, 1638 bp, Setaria italica
  misc_feature (1)..(56): n is a, c, g, or t
  Peptide Sequence Number=SeqID_90925
nnnnnnnnnnnnnnnnnnnnnnnnnnnnnnnnnnnnnnnnnnnnnnnnnnnnnnnngtttcttgaaccaagcaagataatttatcatagattgatatagtggtattcctgcgtcatacatgatcgccaaaacatcagtagaagcaaaaaagttacaacactgctcactgctgaaccaacaaatatacaacctacaggtacgtcgcatcttctaagttcgattctagtgcacttgtgcagtgcgatatcctggcaagggagatgctgctgctgctgctccaagtgagcgccgcggcgaaggttggactctcattggcgatcttggtgatcttggtacggcgtgtgaggccttccgtatgtcaaccagtggtgacgctgaaccatattttgcatcttgcagctgctccagctcttccagcacctgagacatccgaggccgcatcttggcatcgccgcagatgcattgcaaggcaatgcttgcaatggcgtttgcacccttttttggatactgacctccaagctttgtgtccatgatgcggtatagcctgcgcttgtcgcccaagtgaggtctggcccaatcaactaagttctgctctatgcctggctttgatttgtccagggctcttcttccagtgagcaattcaagcaacaccaccccaaagctgtagacatctgcctttgcagagaggcggcctgttgcaatgtactcaggagctgcatatccatgagtgcccatgacttgtgtggatacatgggttttatccccggttggaccagcttttgccaagccaaaatctgagagttttgcgtggaattccgaatcgaggagaatgttcgaggccttgaaatcacgatatataacttggttttcagcatcatgtaagaatgacaaacccctagcagctccaatagcaactttgagccttattgcccatgacaaaggatcagcacctcttctgaacagatgattctccaaacttcccttgggcataaattcatacaccaaaagccggttatcaccatctgaacagtaaccaatgagcttaacaagattcttgtggtgaagctggccaaggtaatcaacctctgtcagccattccttgtgtccttggaaaccttctggtttaagcttcttgacagcaacaaccagaccactccccggtcttgaaggagcaagcgtgtgctcatcaatccaacctttgtagacatgcccaaatcctccttccccaagaagactgtccggtcggaagttcttggttgcagtttttagatcattgaacgtgaatgccttcaaattagaagacgacaagatttcaccttccgtccgaggagtgggaagctcacttcgatctctcatagatggaagagtcaaagttgagcgagttgagttgctcttaatcgtggaagggagagatgataaacttgtcttgctggtcacttttgatgggtaggtagcattgttcatgctgtgatccacccgtgccgtggtgtccatgcaattccccatgtttccctctgtaccaattcaccaagctagatcagctcaatcctccgcttacattacagagccgaacgggaaaagatggtctcccttggctcgcagcacgagatgaccagtaatgcaaggaatcaagaggaa

SEQ ID NO: 24952 - DNA, 316 bp, Setaria italica
  Peptide Sequence Number=SeqID_90926
cccgggggcacgccctcaacttgccccacaagattctagaccacgagtaagccacccactacaccaacactagtcatctactacctgcttcagtatcagtatcaatctatcatccactagtacgcggcatgccatgccggccagggaactgatagaggtcggccctgccgatggccgtagagagagaactaactgtgtgcttcagatcaagcacgccgaccgccgtggcgctgaccgcagcaacacgacgggaattaacaggcacagtagacgctgacgctgacacggaccgaacgcgtatgaacgctgcaaccgg

SEQ ID NO: 24953 - DNA, 1800 bp, Setaria italica
  Peptide Sequence Number=SeqID_90927
tcacggtaccctttctcgagaacatttcgcacggtcagctccaggtgatctcggcgatgctgcctgaccatccgtccctgtcctacgaccctgacaagccgtccacgtatgtctgcaccccgcctccactcatggagggatgtggagtgcacaagcagttctacggcaaacttcacatcgtgcccaggcactcagattggttcgtgccaacaacggtgcacaggttggagaggcaggttgtgccacaatacttctctggaaaatcccaggggcaaacaccggagaagtacatgatgttgaggaatagggtgattgcgaagtatttggaacgacctgggaaaagactcgtgtttgccgagtgccagggacttgtcacaagcacacctgaattgtatgatctgagtaggatagttaggttcttggaatcttgggggatcattaattaccttgcaacagggtctgtgcaccgtggcctcaggatggcagcatcactaatcaaggaggagacaacaggggagctgcatctggtatctgcacctatgaaatcgattgatggtttgattctgtttgatcggccaaaatgcagtatccgggcagatgatatagcttctgcggtgtcaacttcatctgctccagtggtggcaaatggtgatgctaattctgcgaatttggatgataagatatgggagcgcttatcagagacttcttgtagtttctgctcacaacctttgcccagcttacactacgagtcacaaaaggaggcagacattgctctttgttcggattgcttccacaattcaagatttgttactgggcattcaagtttagattttcagagagtggatgggatgaaggatcgatcagacactgatggggacagatggactgatcaggaaactttactgttgttagaaggcatagagaagtacaatgataactggaatcatattgcggggcatgttggaacaaagtcaaaagcacaatgtattcaacattttatttgtctcccagtggaagatggtttgttagagaacattgaagtgccagaagcatcccttccatccaggatgcaaagcaatggatttttgaattcagattccaatggcagtacttcaggttgtttacctcaaagtagccaacctggaaaccaaattccattcattaattctgctaatccagtcatgtcactggttgcattttggcctctgaagtaggaccaagggttgcagcagcctgtgcaagtgcagcgttatcggttttgacaagagatgattccaggatggttcagaaggcatcgatggtgtgggtcatgctgctcatctaaattatggaccctcatcatccatctctcctgaaactgtcaaacatgctgccatgtgtggcttgtcagcagcggcaacaaagtccaaactttttgcagatcaggaggagcgcgaaattcagagattagctgctaccatcataaatcatcagctaaagagactggagttgaagctgaagcagtttgcggaggttgagaccatgctcttgaaggaaagtgaacggtttgagctgacgaggcagcagctggcagctcagcgcgtccgaatattatctacccggttaccttcctcaggtggcactctacccggaggtggcagcaccatggtttcaaacccaatgaatcaggctgctggtcttagaccgccgatgatgcagggctcaatgccgcagtccagcatgccagcgatgtacgccaaccacatgcaggggcatccccagatggctgctctgctgcagcagcgtcaacagatgctctcg

SEQ ID NO: 24954 - DNA, 479 bp, Setaria italica
  Peptide Sequence Number=SeqID_90928
attcaaactgagccattaagttttgaaatgtggaactgaaacacactgaacccatcaacattcacaaaacgcttgtttatccattgcataataaagaataatagccgtgtttcctggtctcctcatttccaaattgcaattggcaccaagggaggtgaaaggaagtgctccaatcaaatacatacattgatagccacccaatcaccatctatacaactcaagaaagaataggcatcccatcttcggaaatcttagtggaacacagacaccagacctgacctctgaagcagccagctccacttaaaaacggcaatgcaattccccatctctcgcttcaaccctgatgctacaaccctgcaacctcactctgtacaatttccacttgtcgctaactacattctgatatagacaatccctctcggggagcatggtcgtgatggaaccatcgctcatgatcactgattgcttcctagtctagt

SEQ ID NO: 24955 - DNA, 334 bp, Setaria italica
  Peptide Sequence Number=SeqID_90929
ggcgggcggccgcagcggcgtggcccgcacggtcctgggctacgccgacgccgtcgcccaccacgccggccaggccgtcgccgagggcgccaagattatcaacgagcgcatgagcactcagaactacaaaagtgtgaagcaaacagtgaagcgattggaagaggtagcggtttcatcgcgtggagatgatagagttctggtgctaaggcgctggctaagggccctacaggaggttgaggctgaagttggaggctcaggtggtacttccggacagaattcaactgagccaaacccctcgaaagcatcattggcgagggttctgttttatgatgct

SEQ ID NO: 24956 - DNA, 412 bp, Setaria italica
  Peptide Sequence Number=SeqID_90930
tccagtaggaattatttggacaggcacccgcaatcacatacgatgatgaactggagtcaactctctcagtcattgacaacagggtgggaagtggataattgacgccgtgtgtccgcctgtccagatttaattggttaggagttctgaagagagaattacatatgtaaattatcacattttgtgcatctctagtcttggtgtgcatgcaagtcatcagtcatgcagcttcctggatgcaataatggttatgtgaagctagtactatagaactttgtggtataggttgctagttgtccacaagatctgtattattcatcagataagagttatctagcatcaggttcatttctatctggttattgtagtcatcacagaggcatgttctcagtttggtagatgtagattttacctg

SEQ ID NO: 24957 - DNA, 505 bp, Setaria italica
  Peptide Sequence Number=SeqID_90931
cgaagcagctggacgggcagagaaggtggagtggtaccggtctggtcaccaccggcagcttcaggacattctgatccttatgctgctgatgaggctgacatttccagtaggaattatttggacaggcacccgcaatcacatacgatgatgaactggagtcaactctctcagtcattgtgagttcagatgcacggacaacagggtgggaagtggataattgacgccgtgtgtccgcctgtccagatttaattggttaggagttctgaagagagaattacatatgtaaattatcacattttgtgcatctctagtcttggtgtgcatgcaagtcatcagtcatgcagcttcctggatgcaataatggttatgtgaagctagtactatagaactttgtggtataggttgctagttgtccacaagatctgtattattcatcagataagagttattctagcatcaggttcatttctatctggttattgtagtcatcacagaggcattgttc

SEQ ID NO: 24958 - DNA, 445 bp, Setaria italica
  Peptide Sequence Number=SeqID_90932
attagagctgaaacagaactcactgcggattttggcaacatcagtgaggacagtaggccggaggtgccatcaaacatgcatttgcagcctcggacggagagggaagaaacggttgacggtggcactgccaatgctgtcaggatgaatggcaatcatcagcagcataactttcagaacaacacacaccgggtgctaggtgttgctccatcggtttcagaggcatcgagcagctggacgggcagagaaggtggagtggtaccggtctggtcaccaccggcagcttcaggacattctgatccttatgctgctgatgaggctgacatttccagatttaattggttaggagttctgaagagagaattacatatgtaaattatcacattttgtgcatctctagtcttggtgtgcatgcaagtcatcagtcatgcagcttcctggatgcaat

SEQ ID NO: 24959 - DNA, 2912 bp, Setaria italica
  Peptide Sequence Number=SeqID_90933
ccaatccaatatccacaggccaccctctccattggaccacacctcgcctctcccccaaccaagactcacgagccccggccaatctctctgcaacatcggcgccatcatcgattctcagaaggaaaaaaatactctggtttttttttaatctgagaaaagaggaggagattggtcagattactcaatcttcactgcaactggaggctctctgaagaaaagaggccaatccagtccagcttttccacagttcctggaaatcctcactcaccgcgagaagctcatcatagcggagggccaggagcttgttcttggctgctccacaggttcttgagctgctgccgatcttcttggccgggagccagtaactgattactatcttgggggattcttggcgagccgtgccggattgggcgccatgtcagcgtcgcagtcgtcgatgagcggcgccggggaggcgggggtgcggacgttggtgtggttcaggcgggacctgcgggtggaggacaacccggcgctggcggcggccgcgcggaaggccggggaggtggtgcctgcctacgtgtgggcgccggaggaggacggggcctactaccccggcagggtgtcccggtggtggctcagccagagcctcaagcacctggacgcctcgctccgccggctcggggccagccgcctcgtcacccgtcgctccgacgacgcagtcgtcgctctgctcgacctcgtccgcagcaccggcgccacgcacctcttcttcaaccacctctacgacccactgtcgctggtccgggaccaccgcgtgaaggagctgcttacggccgagggcatcaccgtgcagtccttcaactccgaccttctgtacgagccgtgggaggtcctcgacgacgacggctgcccctttaccatgttcgcacccttttggaacaggtgcctgtgcatgcccgaccctgcagcgccactgctgccgcccaagaggatcaattcaggtgacttgtcgaggtgcccatccgacgagctgatatttgaagacgagtccgaaaggggaagcaatgcgctgctggcacgggcatggtcaccggggtggcagaatgctgacaaggcgcttactgccttcctcaatggcccattgatcgactactctatgaatcacaagaaggctgacagcgcgagcacatccctgctgtccccatacctgcacttcggtgagctcagcgtccgcaaggtcttccatcaggtccggatgaagcagctgatgtggagcaacgaaggcaaccacgctggcgaggagagctgcactctgttcctccgctccatcggcctgcgggagtactcaaggtacctcaccttcaatcacccctgcagccatgagaagccgctcctgtcgcacctcaggttcttcccttgggtcgtcaacgaggtatacttcaaggtttggaggcaggggagaactggctaccctcttgtcgacgctggcatgagggagctctgggcaactgggtggctgcacgatcgcatacgtgtggtggtctcgagtttttttgtcaaggtgctccagttgccatggcgctgggggatgaagtatttctgggacaccttgctggatgctgacctcgagagtgacgcgctaggttggcagtacatttccgggtccctccctgatggccgcgagcttgaccgcatcgacaaccctcagtttgaagggtacaagtttgacccacatggggagtatgtccggcgatggctaccagagctggcgaggttgccaacggaatggatacaccacccctgggatgcacctgagtctgtgcttcaagctgcgggagttgagctaggctccaactatcctcgccccattgttgagttagatgcagccaattccaggttacaggatgccctgtcagaaatgtgggagcttgaggcggcctctcgggctgcgatggaaaatggaatggaagaaggccttggcgactcctcggatgtgccaccaatcgccttccctcaagaattacagatggaagtggaccgacaaccggtccgacatgctacccagacaccgatgatggctggtcggagacgagaagatcagatggtgcctagcatgacttcttcattcattagagctgaaacagaactcactgcggattttggcaacatcagtgaggacagtaggccggaggtgccatcaaacatgcatttgcagcctcggacggagagggaagaaacggttgacggtggcactgccaatgctgtcaggatgaatggcaatcatcagcagcataactttcagaacaacacacaccgggtgctaggtgttgctccatcggtttcagaggcatcgagcagctggacgggcagagaaggtggagtggtaccggtctggtcaccaccggcagcttcaggacattctgatccttatgctgctgatgaggctgacatttccagtaggaattatttggacaggcacccgcaatcacatacgatgatgaaatttaattggttaggagtttctgaagagagaattacatatgtaaattatcacattttgtgcatctctagtcttggtgtgcatgcaagtcatcagtcatgcagcttcctggatgcaataatggttatgtgaagctagtactatagaactttgtggtataggttgctagttgtccacaagatctgtattattcatcagataagagttattctagcatcaggttcatctacaatctaccaactggagacattgcagaggcatgttctcagtttggtagatgtagattttacctgctattgtgaagggaacacccctgaggtaaaatgtgatggtgtcacaccgaccatatctgcttcttctttgcctcaataaaagaaagtttaggacttagtaaaaccttttactaaaaaaaaaaaaaaagtaaaaaaaa

SEQ ID NO: 24960 - DNA, 451 bp, Setaria italica
  Peptide Sequence Number=SeqID_90934
gtaaaatataaactggaatatgatcggatccttcttagcttactacttctccccccctttccacctgtagacaatggatagagtaaattattccaatgtaacaccgcaaatcatgtatattatccacttttctcagagaagaattgatttccactattctttactttgacaaactttcagaattccctcttttgaaatgattcattatctcacattcttctacatggcaacaaaaaatgctatgatcctccacagcattgcaatgatggagacaggcgccggaaatgagaatgtggtctattctagaaccgtaattatactcttcagcaccaattttttgattaaaacaagtatatgctcctgtcctttcagggtgtttcgatctaaaagcatccaaaaagggacctccatgttctctcagcatggatctcagccattctcggaacatttg

SEQ ID NO: 24961 - DNA, 647 bp, Setaria italica
  Peptide Sequence Number=SeqID_90935
tatagctttcttttccaagccatcactatagtacgctaccatttactgtattctcagacagaaccaaatttccatcatcttgcagctcataagttttccccttattgaagaatgatacaatactctgctgtcgtccacggacctctggaagatatcttgcagctgatggtgggatattatgaactggaagttcaggaatttctttcagtaaaatataaactggaatatgatcggatccttctagcttactacttctcccccctttccactttgacaaactttcagaattccctcttttgaaatgattcattatctcacattcttctacatggcaacaaaaaatgctatgatccctccacagcattgcaatgatggagacaggcgccggaaatgagaatgtggtctattctagaaccgtaattatactcttcagcaccaatttttgattaaaacaagtatatgctcctgtcctgcataaacgaaaagcagcaaagttagaacagcgaagtacaggtaacattgtaattttgtgggaggaatctaccacaggtttataagtcaaccatggagaaggaaaatagagtaaactcaaacctcattgttgcaaagaggaatccaatttgatcagtgtaatggtgtcagttttc

SEQ ID NO: 24962 - DNA, 609 bp, Setaria italica
  Peptide Sequence Number=SeqID_90936
taattactagacttaccaaggaagaaccaaaattagtcgaggcaggacctgtctgcagatgtcataatggctgaaggatacgaggcttttgtttcgtgcaatcgctctgctaaagggcgtggagcatactctggtgttgcaacatttttgccgagtaacatcagcattttccagccaggaggttgctttgccagtagcagctgaagaaggctttactggacttcacgactatgcaagaaacagcgaaattttggggaatttgttattgcaactcctgtagcggaggagggccttggtgaaatcacaagagaagacctgctaagggtagacaatgaggggcggtgcatcatcaccgatcacggacattttgttcttttcaacatatatggcccagctgtcgaagaagatgataaagagcgggttcgttttaagctactattttataagatactgcagaaacgatgggaatatctgctggcacttggaaagagagtctttgttgttggtgatttgaatattgctcctgcttcaatagataggtgtgatgcgctgcctggtttgtagaagcaaatagttccgtagaatggctgagatccatgctgagagaac

SEQ ID NO: 24963 - DNA, 1220 bp, Setaria italica
  Peptide Sequence Number=SeqID_90937
aaggccacattttgttagtgttacaagtttacaacaaccaactaaatacagtgttaaaatatatacctgcctaggggaaaattaattgctgattaaaagaatagctctccccacaagcatatcacagcatcatcagcatgttaggacaaagtgatggaccagacttacaggaagcagaatgtcctggactcctgaaagggggaaccgtcacaagcgcttctctttagattttacaggtgcccactgaaagtggccacaatttgcttctttatttgatgcaggtccctgagcacgaggacagacatagaataagcggcctatattagggcccttcttcacagaccttggaatacatggttcacgatgtcctttgcaacgtggcagtgtcatcttcatcttttgttgtattctttgccactctaatgctgcagcattagacttgtctgttgaaattgaacaggatggtatatttgtgttatcctgatcttccgcagctgaagttgtacactgcatgttttctggcagactatcatcatttggaacacatgtttgattggtatggtgtactgtttccactggagtaactaaggtactgatgctgacatttactgtctttggccctggttgttgaaaaaatgacttgattgttggttgagaggataaattgcgtttaagcttcttgtttggcacagacttggtgccagacggtgaagttttctggctgttataggagacgccacttaatccttcatttctccattgatcaggatttgtccccttacacatcaaactaggaaggttaccaccttttgtaagatcagttataccagctgccagtccttccttaactatagctttcttttccaagccatcactatagtagctaccatttactgtattctcagacagaaccaaatttccatcatcttgcagctcataagttttccccttattgaagaatgatacaatactctgctgtcgtccacggacctctggaagatatcttgcagctgatggtgggatattatgaactggaagttcaggaatttctttcagtaaaatataaactggaatatgatcggatccttctagcttactacttctcccccctttccactttgacaaactttcagaattccctcatgctatgatcctccacagcattgcaatgaatggaagaacaaggacgaccggaaaaattagtaagaaattagttagta

SEQ ID NO: 24964 - DNA, 732 bp, Setaria italica
  Peptide Sequence Number=SeqID_90938
gccgtagacatggacgggagggagcagaggcggcggcggggacgagtaggacacgccgtggacgggcgggaacgggaatggcagcttccccgggtcggacggtggcggaggggaagagtaggaaacgccgtggacgggcgggaatggaaaaccgccgctgcccccgccgccgggtgtggatggtggggagtgctggttcccatggtcaccgccgtggtcgccgccatggggtggcggcgaccaagagcctggagaagacggtgttcctggggatggtgggtggtagcctggcgtcgtcggcgtcgatggcgaccctggtgtgccgggggtacttgatcctggtgtgcctcctggagttgtcggggatgacggcgatcctggtgcgccgggagtcgtcggcgggtatgtcgatcctggcgtgcccggagtcgtcggagtcgatggcgatcctggcgcgccaggggtcgtcggcgggaatgtcgaccctggcgtgcctggagccgacggcgagtgcggcggccagacgccgccggggtgctcagtgggtggtgctaccacgggttgacctgagggtgaccacccggacgatggcggctggtagccggatgacggaggcgagccaccatgggatggcccggatgaaggcggcattgacgggttggggctgccgccgccgccgggtggcgtcgtcgaagagccccctggtggagacgggtacgacggcgtaaggta

SEQ ID NO: 24965 - DNA, 296 bp, Setaria italica
  Peptide Sequence Number=SeqID_90939
cgatgagaaattacgctacatggtttgaacccgtccaacccggtctgcttggtcgggcgaattattcatcggcgcaaacgcggcgtttgcgtcaatgaatccggcaccagccgaactgccgcggcgattcgataaaacccgtaaaacatccgggcattcatcgccgatttacgctatactgtattttcatacagtagtcgctcaatcgctctccgcggcacctcggctaatcgtcgtcgccgacgacctaaacgactaaagtccgatggctcactgcgctgtccacatcgcagccc

SEQ ID NO: 24966 - DNA, 286 bp, Setaria italica
  Peptide Sequence Number=SeqID_90940
cggtcgagcgcgtgcgccgccgtggaacccgtgccgaggcccagcgccatgccgggctccacgaactccaccgcgcggtgcgccgccacgcgcttcaagtcctcctgcgtcagcttcgcggacggcagcggcgaggcggcggcggcgtcgcccatgtgcgccgccacgcgcttcaagtcctcctgcgtcacggacggcggcggcgaggtggcggcgctgcccatggcgacgggtgcgggagggaggagggttttcggtggcgtggggccggattggattgggggaa

SEQ ID NO: 24967 - DNA, 541 bp, Setaria italica
  Peptide Sequence Number=SeqID_90941
agcaaggattaaggagaatatcaacatatttgactggtctattcctgaagatttgatggcgaagttctctgaaatcaaacaggttaggctcctgagagccgagtttgcggttcacccacggagcggatgcaatacattggaggatctttgggatggcgagatatagtgacggtgccgtccttgttggcgacaatgacggtggtggccatgccgaggaacatgccgtgctcgacgacgccggtgatccggagaagttggttgctgatgtcgtggaggtcgccgtggatgccgtcctcgaagaacatctcaacgatgtagttaccgttgtctgtcacgaacggcgtgtcctccccagcgtccttcttgaccttcctgagcctggcgttgaagcccggcaatccgtcgaacaccttgcggatgaggcccagcgtgtggggcgcgcctccggtgccgccccctccgctcccgcccccgccggtgccgccccctccgcttccgctgccgcctccaccaccagaggatcctccgccgcctcccccac

SEQ ID NO: 24968 - DNA, 740 bp, Setaria italica
  misc_feature (706)..(740): n is a, c, g, or t
  Peptide Sequence Number=SeqID_90942
gaacatgaagcattgttccatgttcacctcatcaccagatacacacaaagggaccactgatattcgcagaatataataaggtaaaaaaacacagatgttgagcaatgaagaaatgtgactagttataatatctcaaagacatctcaaacttattggttccgtcacattcatctgggtaattctatcgtatcattacccatgaaattggagcaagcaaggtaacgacagtactagtacgagtgtacgacaacaggagagcaacaaaacttgagagcacaccgagagctgctttgctctgcttttcttttctatttcttcgctggaatgacaggatcttggcagcttattagcatcatgtcgcatcactggattaattcttgtccatgacagtgacggtgccgtccttgttggcgacaatgacggtggtggccatgccgaggaacatgccgtgctcgacgacgccggtgatccggagaagttggttgctgatgtcgtggaggtcgccgtggatgccgtcctcgaagaacatctcaacgatgtagttaccgttgtctgtcacgaacggcgtgtcctcttcagcatctttcttgaccattctgagcctggcgtggaaaccggcaatccgtcgaacaccttgcagatgagtcccagcgtgtggggcgcgccgaaggggatgatttcgacgggcaccgcgcccgtgcacccnnnnnnnnnnnnnnnnnnnnnnnnnnnnnnnnnnn

SEQ ID NO: 24969 - DNA, 889 bp, Setaria italica
  Peptide Sequence Number=SeqID_90943
gtttactttggggcggggggttacagtttaaataagcttacttcttcttgtggaggaccgtgacggtgccgtccctgttggcgacgacgacggtggttgccatgccgaggaacatgccgtgctcgacgacgccggtgatgcggaggaggctgtcgctgatgtcgcgcaggtcgccgcggatgccgtcctcgaagaacatctccacgatgtagttgccgttgtcggtgacgaacggcacctccccagcgtccttcttgaccttcctgagcctggcgttgaagcccggcaatccgtcgaacaccttgcggatgaggcccagcgtgtggggcgcgccgaaggggacgacctcgacggggatggcgcccgtgcacccgagcctggggacgagcttggactcgtcgacgatcacgacgaaccgctccccggcgccctcgatcatcttctcccgcagcagcgaccccccgcggcccttgacgaggttgaggtccgggtcgacctcgtcggcgccgtcgatggagaggcggatccgggcgcccgaggccgcgtcgagcgggaggagcgggatcccggcgcgcgccgcgtggagctccgtcttgagggaggtgggaacgccggcgacccccggcagcgcgcctgcgcggaggaggtccccgaggcggtccagcgcgtgtgcggcggtggagcctgtgcccaggcccagcgtcatgccgggctccacgaactccaccgcgcggtgcgccgccacgcgcttcaggtcgtcctgcgacagcagctccccggacggcggcggtgaggcggcggcgctgcccatggcgaggggagggggagatatttgggaatgggacgcgggaatgggatgggataggggggaatcaatcggcgaatccgg

SEQ ID NO: 24970 - DNA, 366 bp, Setaria italica
  Peptide Sequence Number=SeqID_90944
tgttctgagaattgttccgcttcagttcacgacgggttctccatgtcgtcacatgtgaatacaatgaaggaaacaagaaacagagcaacagaagcagcaagatcgcgacacatattagcatgacattcatgaagccatctcggttctttgggttcttgttctgctcggtccatggcacaccaccaacattcatcccgaaaactcctgtgacaatggatagaggaaggaatattatggagagaaatgaaagatagtataagcttttgtttatctgctcggattgccaactgtccagactagcctgaagtgttgtcactctatttgttatgaatcctaggttttctttgagcctctaaggcgacctat

SEQ ID NO: 24971 - DNA, 337 bp, Setaria italica
  Peptide Sequence Number=SeqID_90945
gcgttctccaggcagcggagcagcggcctggcccagagaggcggcggcgaggaggagaagcgcgcggctgtggcggtgaggaggtcggtggatgcgctctcggacgcccacgcgctcgcgctgtacgcaccgccggcagaagtgctcctcaaagacaagttcacggacaacgaggagccgtcgaaggagaccttcgtgttccggagcgcgtactgcgagccggcgccggcgaagggagcggcggaggcggcgcccgccgatggcgaccggcggagggacatcggcacggagatgacgccgctgggcagctcgtgccacacgccgctcaagagcacct

SEQ ID NO: 24972 - DNA, 467 bp, Setaria italica
  misc_feature (50)..(50): n is a, c, g, or t
  Peptide Sequence Number=SeqID_90946
ctttgttaatcgaagaaggccatctgacaatatccagttccctcctcggntaaaaataggttcaccatttaccttgaagatcctggaggtgatctacatttgcatcagcaggttttcaaaaggccaaatgttcaatagacatctcttggccgttcaagttcagttgaaacctgtatttttcaaggtacaatctgcaatccaggaacttttgttctctagctgaagtgtacaatgtaggtatgacctcttaaaatcatcatgaaaagttgaaaccagatgggggtccattatattcacaggctgcagtgaaaacaaaccaatttaaatccttgtatcgatttaaaggatcttcccagagaaaaaaataaagaaaaaaggagtaattaaaagattaaagttgagcagattcttctttttgcattatcctcttcatatatccatggtgatattgattacccttaattgta

SEQ ID NO: 24973 - DNA, 2937 bp, Setaria italica
  Peptide Sequence Number=SeqID_90947
ggtttgacttgtgacaaactcaactgaggggattgtgacaaactcaactgaggggaacagtccttcctctacggctccacccaacccagttctacatgaacccgttcacaggccacgttgccgaccacgggaatcattcaacgccaccggcaccatccaacccaacacataggaacctcaaattatctgtgctaccatagcagttacacggccacgatctcgtgtctgtgctttattcggcacgcacttattttacacggatcttcgcttatgaatcatgatcacaactcaacagacgaaatccgtctcagatcatcacggcatggtccagatgatggttccagcctcggagaacgaccctgggactggaccccgggggagcctcgaacgagatgtcaatggccgtcttctcccccggcgtcagcgaaaagtagttgtctgagtagtggacagggaggatccttgtgtcgttgtatttctccttagctgtggacgatccagaactgtgcaccgagaaatggaggaagaatgcgacgcccgaatcggtcccgttcacctcaagtgttcttaggttgtgacttgatcttgggatactgaggccgctgcgtattttcctccacgagccgccgctctcatttctctgctgagtagtttctttgctagcgttgtgggaaccacttgcatcacctagatcaattgttgatactgaggatgtgttttctgctactgacttattcgacttgttttccacggtcattcttactttgtgcctggagccggagactgaaacctcagtataaatttttagtggaatgtttttctgctggtactgctctaataatttgtagtctttcccatgaagatgtaaccagtagaagtttctggagagtattccattgtctgacagcctgaaaagtttgagtagcagaaaatacacaggcttggcatccttcatcttcgggtatttcatctccatgatctgcttcactttctttggtggtacaactattttctcggaaactttgtaatagggggatgcaccatccagatcccatactgaaacttcgacagccacatctgcgagttcatcagctgtagtgtttaccacctctataaagtagctggccaaattcagttggacatgaataggttcagcagcacaacggcaaccataaaacccagcagtttggtcttggagatgatcatagaactgccctcttagtccagtccatggattctgtgtcttccaaatcagaagacctgtaaactttgtccacatgaaggaagtccatccttccagaagcgctctgtactgaacgtagttaactagttgtgccttttcacagaaatcatccaggtcttttgggtgtccataaagttcaatctgatcatggaccttccctggttttgagtagggaatgaacttgtggtagtcccatattggatttggtacttcttctatgtacccgccaattcttttcttgaaaattggaatactccatccctctggaggcattgtggccctaattgtcgcagcaactggaacccccacagacccaacttcagggttgaacccatatttgtagaaactgtccttgaaaaagctctctggatattgaatctcatatggaccatcagtgaaatcgcctttcccattggcaaaaccatcccacattgatccttggacatacacacgcgtaccatcaaggtatttactggggtcagttgattcttccgataaacatttttcttgactgtttgatgcctggctacttacaaacataggatgtaacttcaaatcattcttcagtgctctgttgatgtcaactggtgggacttgctcattaccaccaacccataaagctagactagcatgattcctgagtaatttgatagtatctctagcacatagaagaaagagatgatggtccaaagggccattagggtttgatacaggaattcctcggccgtcgacatctccagttatccaaaattcctgccaaaccatcagaccatagacatcgcaaaaatgataaaaatcaggcctctctgctaatccgccaccccaacagcgaagcatattgaagttcatgtcggcgtggaacttgatgtcagtcatatatcgcttctttgttaatcgaagaaggccatctgacaatatccagttccctcctcggataaaaataggttcaccatttaccttgaagatcctcccaccagtagaattatcaattgtactctcgatcttacggaatccaaaataatggctccaggaatcagactctccaaatcctttaacatctacactaatctcgacatagtatagggattgctttcccatgccatttggccaccacaggtttggcttatagaagaataaaggaggaatggtgtactctagatctgactgaggagggatagctatggcataactctgaaggtgttccaccaagcaaatgttcccttcaagttcagttgaaacctgtattttcaaggtacaatctgcaatccaggaacttttgttctctagctgaagtgtacaatgtaggtatgacctcttaaaatcatcatgaaaagttgaaaccagatgggggtccattatattcacaggcccagttatcgaaattgatacctcatcccagatacccgtgtttcgatcccttattgggcacatccaatcccatccttcaacatattgtgtagcaacatctttcccaatctgatggtcaccaccctggcctccctgaggaggaattctgccagggtgatcaggaggatgaacaaggacagcaagcatattgttaccatcaggatggagaacatcagtaatatcaactcgtgtgccttcggaacattccttttggaagtacctccttgtgcccatttaggtacatttctgctgagtagtttattccccggaagtttaaagttaacgtg

SEQ ID NO: 24974 - DNA, 912 bp, Setaria italica
  misc_feature (882)..(882): n is a, c, g, or t
  misc_feature (909)..(909): n is a, c, g, or t
  Peptide Sequence Number=SeqID_90948
cagcaccgcactagcggcgatgatccagctgctgttcgttgtggtgctggcggaggcgtccgtggcagcggcgctgctcttcaagacgccgctgcggaagctcgccgtgctgggcctcgaccgcctcaagcgcggccgccgcgcgcccgtcgccgtcaagacggtagcgggcgtcttcctcgctcttctcgcctccacgctctacagcatggccgagatcagcggccgcgcgtccgaccccgactccggcggtgggctcacgcccacagaccaggtcctcttctcgcgtcacctcctcgaggcgtccctcatggggtacaccttgtttcttatgctagtgatcgaccggcttcaccaatacatcagagatttgcgtggcttcaagaagaacttggaggctgtatcgaagcataataacatgttggaggaagcaaaagttggaatttcagaggagacaaagaagtaccaagaagagattgccaatctgaacaaggagatgaataaactgaagctacaagtccaagaaaagactgaagaggtacatgttgctgaggataaggcacttgctatccaaaaacaatctgaaggcttgctgattgaatatgatcgcctgctagaggacaaccagcaccttcggatacagctgcagtcaattgatctcaggctttccagttcttgagaaaagaatattcaagcatgaggatattgggatggtgaatctagtgctgttgcaacaaattatctgttgcagtttggtaagaaacaatgtttactctttcatgggatactgaagaaattattgttgatagatcattggatgttagcacccaaatagcatgccagttatcagctttcttacttctcagtctcagtatctttaangactatgtgttgcattatatattggtncct

SEQ ID NO: 24975 - DNA, 300 bp, Setaria italica
  Peptide Sequence Number=SeqID_90949
tccaagcagccgggcgaccttgtccctgatctcctccttggtgacaatcccccgttcgtctgcgcagatcctcaagccggcaccccacaggtcgcagatgtagctttggttcaagaactggtcggcaaagtatggccagcacaggaacgggacgccatgacgcaccccttccatcgtcgagttccatccgcagtgtgagatgaagcatgccaccgaggggtgcgagagcacacgctgctggggagcccagccgacgaccagccccttgcctccaacacggcatctgaactcgtccagcca

SEQ ID NO: 24976 - DNA, 2103 bp, Setaria italica
  Peptide Sequence Number=SeqID_90950
gccgtcgtcgccgccagcgacgacggggacgccgactacgacttcgccgaccgcgactccgacgactccggggagctcctctcgcaccggcagcagcaaaattatagcatactcagtgaagttgatatcaagcagtgccaagaagatgacataaacagggtttcaactgttctttcaatttctaaatcagaagcatgcgttcttcttcgaaactataactggagtgttagtaaggtgcatgacgaatggtttgccgatgaagagcgtgttcgcaaggttgttggcttaccagagaagcacatggaacttccaactgacagagaagtgacatgtggaatatgttttgaaagttgccctcgcggcacgatgagtgctgcggcatgtggtcatcctttctgcagtacttgttggagaggttacattagcactgctataaatgatggtccagggtgtttgatgttgaggtgtcctgatccatcctgtgctgctgctgttggacaagaaatgataaatgcactggctgatgacgaagataaggaaaagtatgggcgatatcttcgcagatcttacattgaagataacagaaagacaaaatggtgtcctgctcctggatgtgaatatgcagtggaattcgtcatgggcagtggcagctacgatgttaactgtaactgttcatatgggttttgttggaactgcactgaggaagctcaccgcccagtagactgtgcaactgtttcaaagtggatcctcaagaacagtgcagaatctgagaatatgaactggatactggctaattcaaagccttgtcctaaatgcaagcgacctattgaaaaaaatcagggatgcatgcacatcacatgcactcctccatgcaaatttgagttctgctggttgtgtcttggtccatggtcagagcatggagagaggaccggtggattttatgcttgtaaccgctatgagtcagcaaggcaagaaggagcgtatgatgaatctgaaaggagaagagaaatggcaaagaactcccttgagagatatacacattattatgaacgatgggcagccaatcaatcgtcaaggcaaaaagcgttgggggaccttcaaagtctgcagaatgacaagcttgaaaagttaagtgacatacaaagccaacctgagtcacagctgaagttcatcatagaggcatggttacagattgtcgaatgtagaagagtattgaagtggacttatgcgtatggattttacctgccagagcacgaacatgccaaaagacagttctttgaatatctgcaaggtgaggcagaatcaggtttggagcggttgcatcaatgcgcagagaaagaacttcaagtataccttgaagcagaatctccctcaaaagatttcaatgatttccgtacaaagttggctggattaactagtgtgactcgcaattattttgaaaatcttgtccgggctttggaaactggattaaatgatgtaggtccttccactagccatggcacatgcagcaaaagcgcaacttccaagagtcttggtggtaaaagtaagagtggcaagaacagggcatcaagcaccagctccaaaaccggtggctcaaaccgaggtgtggatgacagcaacatttggacatgcgatcagtgcacatatgcaaaccccaaatctgccagagcctgccaggcctgtgaccgccaacatcgatagcgctagtcagttcccatttgagttttggactctattcggttgcgaatcctcaggtgttaccccgtcatgcactgcatacatgaaatttaagtgttaactgatatctggggcaagcgaggaggtatcagtaggaggattgcggcatactgttatgaaagtagattttcgtgtatcctcgattgtttgtcggctgacagcacccgtgaagcctcaactcagcatccaggtcgatttgtatataagtatatccacatctgtaacaatgttttgttttattgaagtaggggggccccaggaggtgcccgctgccaaatgaactgaattgttgtagtgctgttgtaatgtaataatgcattgacctattttaaagaaatttagtcttcctgctaagtttactttaaa
